United States Patent Application Publication US 2007/0067865 A1 - sequence listing, part 61

SEQ ID NO: 391773 - DNA, 493 bp, Oryza sativa
  unsure (1)..(493): unsure at all n locations
ngagcggngnccgaatnccgtgtgcngggcttgagaattatgcaatggtgccacttgagacgaggacagtgccaaatcaagtggctgcaatgaaggcattgaaggattccctgaaaattccagcaaggatggggtggaatggggatccatgtgcaccaaggacatgggatgcatgggagggagtcacttgcctccgcaaggacaaagggcttgtgatcacccaactggatcttgcaagtcaaggactaaaaggttacatcactgatgaaataagtcatctgacagacttggaacttgagctataattctttgactggaagcttacctccgggcttagggcaaccttcacttgctacattggatctgtcatcaaaccagtttactggaggaattcctggcaccataggttcatcaaaattacaaacagctttactgaacaacaatcaactngatgggcaagttccagaaagactttactttattggcgtacatg

SEQ ID NO: 391774 - DNA, 180 bp, Oryza sativa
  unsure (1)..(180): unsure at all n locations
ataatcataattccaagatatctttttcttcccaagaggaacattacttggaatgaagcacaactaacaaggcagggaacaaagggttcaaagaaccctgtaaagaataatacagatgcagatttgtacattgcaatgcaaggatgagcattaagaacttaagttgagtaanagagcatt

SEQ ID NO: 391775 - DNA, 475 bp, Oryza sativa
cgattttcttttcttttcttttcttttgttgcgtcgtcttcgattcctcctgtgctgtgcgcaccatggcggccaccgcgctccacctcccgccactcctcctcgcgcgccgcctccgcttctcctccgccgccgcttccacgtctacctcgcgcaggaccacgcgcctctccgcgcagctcgacgacaccgccgctgcttccacctccacctccacctctgataagcccgccgccgcctcctccttcgcgccgcctcccgacttcaagcctccggagcccaagaccttcgaggtgaagcccggccagtccgacgacatcgtcaccgcctccctcgccattcccttccgcctcggcaccggcgtcttcgcccttggatattcgggatcgctggtttctcctgacgaggtggcaccagatgaatatgctttggatttccaaggtcggaagggtaaggagtcatcaaagatagggca

SEQ ID NO: 391776 - DNA, 498 bp, Oryza sativa
cgctactggagatcaagaagtccttccgcaatgtggacaacgtgctgtacgattgggccggcgatggcgcgccgcggcgctactgctcgtggcgcggcgtgctctgcgacaacgtcaccttcgccgtcgcggcgctcaacctctcggggctcaatcttgggggcgaaatctccccggccatcgggaatctgaaaagcgtcgagtcgatcgacttgaagtcgaatgaactttctgggcagatccctgatgagattggcgattgcacgtcgcttaaaactctggacctgtcctctaacaatctaggaggaggtcgagaggttgacgaggctcaaggctggccggatgaaggagctcgtgctcaagaggaggttggagctggagagcatctgcaggagcatgcacgtcgagcctgacaccagcactgtgccggagaagtccatcgcgttgattgattctggccttgtgaatccttctgagctcatggccagcatcgacgag

SEQ ID NO: 391777 - DNA, 440 bp, Oryza sativa
cctacttccaaaaaagagagaaaagggaatccagcgacttaggcggaggaggaagcgagcagaggttgcgagtggaagggaactgaggaagcggagcgcaatggcggcggcggcgagagacgctctcctggacgagctgcgcgcgctcatggcggcgcactccccgccgctccacgcgcgtggggtcccctccgaagacgcccaccagagcgagtacgtgtcggagcgggacaagcggcggcagttcgtctccgggttcaccgggagcgccggtttggcgcttataactatgaaggaggcgctattgtggacggatgggcgttacttcttgcaggcagagcagcaactcagtgatcgctggaaattgatgcgaatgggagaagatcccccgggtgaagtttggatagctgataacctgtcagatgaagctgttgttggaa

SEQ ID NO: 391778 - DNA, 458 bp, Oryza sativa
  unsure (1)..(458): unsure at all n locations
ttctatttggcactgcaggcatcccaatatcgggacgattcaattaaaatcctgtgcggctcgaccacatcacgccctcgaggagtcgtgggtctctctcgcgaccgacttaccacgcgttatccctacgcgtccgtctcccccctttatttttatcgcgcccgccaccgaaaagacgaaaaaaatctcccaattccccaaccctaacgccgatctcgcctccaccccccagatcccgagtccgccgcctcttcgttcgtcgtcgagctcgctcgctcgcccaaccctagcgcgccagatctacccgcccccgagcagccgccatggcggagaccctcgacatgacgctcgacgacatcatcaagaacaactagaaggccaacggggggggcggccgcggccgccggggggtgccccctgcnncngcgggggggggggtggggntttttttggggggg

SEQ ID NO: 391779 - DNA, 285 bp, Oryza sativa
  unsure (1)..(285): unsure at all n locations
cccacgcgtccggcatgccatggtgcaaaagcttatagaattcagatgccataaatactactatccctggagctaaaggttggtgggtcgaggagaccatcttgtcaccaagaaagctctcagaactctccatctctaggccagcttagggctggaccagcttgctgccattgggagcctgtatcagttcataaggggaggaggggaaggcaaggaggcanctagcgaagaagaaaagcanacaccaaaactcaggnatgcatgacaaggaagaacatgatccta

SEQ ID NO: 391780 - DNA, 168 bp, Oryza sativa
  unsure (1)..(168): unsure at all n locations
tccgggtcgaccccgcgtccgctgattgcacggttccatttccggggcagctgcangaagtcattcgacatggctgatttgaaaaggaatgtaaagagtgttcaaccagcgatcgcgcacagctggtgacattgtttcggtgaaatttncatttggaaagaggcggga

SEQ ID NO: 391781 - DNA, 613 bp, Oryza sativa
atggatctatttagttggggatgtgggccgaataagctgtttggtgggcctgcggatctgctaacgagctgctaggtctccattggtaccctgtgcttgcctcctccataccctcgcctcgagctcgagaagggggggcggcggcggcccccccccctcggctactccggccaaggacgtctccctcagccggccccgacgcctgccctcttgccccaacttccccgcgttaagatcaagaaccgagggtttctcactgcaaaggctttggttttttcctgagaggagatgtctgggaagagagctttctgcacggcagtggagtctggcagaaaaactccagagttttgctatcttcttggtttcagcggtgttgttgcgctcccaggcgataggtttcaacctttggatgattttttgtctgagaatccttttctgtcacctattccattaggaaggctctatgaaaacattgatccagcaaagccttatatgctagaggaccctattcgtcgggcagtatggtctggatcccttgcaccttaaatagccaacaaatgaaaaagtccctgaccaatccttactaaggaaatgtgggggtgcataaggattt

SEQ ID NO: 391782 - DNA, 373 bp, Oryza sativa
caggaatcctcgcttatcatgggactaaattatgtaatatcatcagtggccatctttgatgaatatacaaatgatgtgcttgacatggcaccaggatcctgctttcccaggtttaaataccggaaaaatgaagcttcgacagagggtggttcattatcaaggcctgcctcatttaaggacaagcaagacgggaagaaagctccatcacgtgttacatcgtttaagggcagctttgatgagttcaatccatttaagttgctagatcacctgtttgaggagtgtaagcaccgtggagaggttcttggtgctgaaggagtgataacaccaaaagacattgaagaaacaaagtcaggaaaaatcgggattggagtac

SEQ ID NO: 391783 - DNA, 471 bp, Oryza sativa
tcgtggacgcgtgggcgagcccgccggaggccaaaacgccttctggggcagcatccaccaattcgccatggcctccgagaccgagcccgacgccgtggtgttcgaggctccggcgcacttccgcatctacaagagcggcaagatggaccgccttcaccgaccaccctgcctgcccgctggcgtcgacgaggcgcccggcgtcgcctccaaggacgtcgtcatcgacgccggcaccggcctctccgtgcgcctctacctccccaagatccaagagccatccaagaagctccccgtcctcgtcttcttccacggaggcggcttcctcatcgagtcggccgactcctccacgtaccacaactacgtcaaccccttcgccgccgcggccggcgtcgtcctggtgtccgtcgactaccgcctcgccccggagcacccgctgccggcggcctacgacgattcctgggccgggctact

SEQ ID NO: 391784 - DNA, 603 bp, Oryza sativa
cccacgcgtccgcccacgcgtgcgcgcaggccgcgtctcccctttccctcccttctccccacggcagccccactacctctcccacggcggcaccactgcctcttcccaccggcgacgctgctccttctcccctctccccaccagcatcaccggtccccctccctcttcccccactggcgcgggcccttcccccaccagtgggcggtggcccctttcctcctcgtcggggtgcatccaccgctccgctcgttgccatatccggcaggtcggcggcatggtggctcaggatctggctcctctctctccctctcaacatctccctagcgcagcgatgggtcgacgacttcccggcacggcggtgacgcggtggatcctggtgcagtgacaggtcggcagcgacctctcgctcgcctttcccactcctgtgtgatttatttgtgatctgatttgattatctcctgtcatgtgatctattttggatgattttgtgatgattcctatttggattgggattttggttatgggttggatgggaatgatttgggatttggagaggggctgcgcgtgatgcggtgatggaccaagccagatgaaatctctacc

SEQ ID NO: 391785 - DNA, 694 bp, Oryza sativa
  unsure (1)..(694): unsure at all n locations
gggaggaagcattgggtggcactggatatcatgttgccaggataaatggagtactggataagaatcgcctttctgtgaccatcaggaattcaacttgccaagtagattctcgctttgtatccaaccatgacttccaccaggatgagctgaaggcatggtggtcagctgccatgaagagtggctggaaactgccttcgcaagaagaactcaatacgaagctacgagaaagagagctgcttcgtttttgaaacggaaaaggcacagacgccccagctccagatgacagatgccaacatcaattacagaggtttttctcttgcttgcctctggtctgaaaacgccagcgatgcaagcatcatcactaccggtcaggctaattaagttctgcactgtactgctgggattgctatccccacggttgatggtatattgagagagaaatcaggctgccgtttcgtgccgtggcgtaagcagcttgtattgtattttaagtacacgatttgacgatttgatttttacgatcggatgagcagttgcacgagttgttaactacttattgctcatcctatctgctgtaaataggaagctactaacagtcacagtgcagtgcaatcgtacaatttgtactactgctgctgctgaatataaatacttcctgaaagaataaaaaaagttatgctggctgccannnnnn

SEQ ID NO: 391786 - DNA, 526 bp, Oryza sativa
catgcaggcagtggtgtttatgaaatgaaaccgttatctgatgatgattccagacaattgttctgcaaacgaatatttgactctaacgatgactgtcctgctgatttgtgtggtgtcactgagaaaattttgaagaaatgtggtggtgtaccgctagcaatcatcactacagcatgcgtggtggctagcaaaccaaggaattcagaggaatgggacaaggtcaataagtctatcagtttggggcttgagaacaaccttgatgtggacaagatgcggaagatattaagcctcagttacaacgatctaccttttcatttgaagacttgcttgttgtctctaagcaaatatcctgaggatgaactaattagaaaagatgttttgatatggggttggttagctgagggttttattacagatgaaacacgacctgtagggaccagcttgcaggagattggagagagctacttcaacgagctcatcaatcgaagcttgatccaccccatgagtgagggcaatttttgggatg

SEQ ID NO: 391787 - DNA, 479 bp, Oryza sativa
ctgtgaactctagaattatccatggtgatgctaaatttagcacaagttcttctgatctggaaaatatcgtttggcctggagattcaacaacagtgcccaaaggctgggacttcccagtgaatgctaagatactccagattggtgtgccagtgagacgtgattttaaaacttttgtgaatgttgagactaatccgaacacgaatagatcaactgtcagtggctacagcattgatatgtttgaggcagctgtcaagaaattaccgtatgctctacgctacgagtacattccctatgattgtgctgtttcatatgacctgctagtatcccaggtcttttacaagaagtttgatgcagcagtcggtgatgtgacaattattgctaaccgaactagatatgtagatttcacaatgccatacacagagtctggtgtttcgatgcttgttctatctaagagtgacgatgaaccaaccacatggatc

SEQ ID NO: 391788 - DNA, 502 bp, Oryza sativa
aaggaatgagactcctatggcttttttgggccagaaactgcaaagtgctttgtgttcattggagcgcttccctgttgtgctcagccagtccagcagaataggtattggaggctcccgtttgacttcaggtttgagtgctctagctcagcccttcaagttgcgcctttgtcgaggtcagggggagaaatcacttcgggattattgcggcaaatattgtgcttattgatccctttgcgagtctagcagctgttgaagagtttctttggcccagagttcagcgtagtgaggctgcttcgaagcctacagttccatcaggaaataattctgaatctggcatacctggcaccgcagctggtgcgtcatccacagctgcaccagctccatctggcaggcgtccaacaacaagatcaaaatcatctgctgcaagtagtggtgcatctaagaaggattctcaggaggaaagcacacacactgcccagggaaaggggaaggctgttgcaaa

SEQ ID NO: 391789 - DNA, 527 bp, Oryza sativa
ctcgctggacgccatcttgaactgtatgaggtggaaagcagcgaacgggagaataagcagcatgtcgtgagtttgataaaatacattcaatctaaaagaggtagcctgatgtgggagaatgaggatcctacccttgttcggactgaactacctagcgcttcactcttatcagcacttgtgcaaagcatggttagtgcaattttcttccaaggtgatcttcgtgaaacctggggttctgaagcacttaagtgggctatggagtgcacatctcgtcacttggcatgtcggtcacaccagatatatcgtgctttacgccccagtgttaaaagcgatagctgtgtattgcttatgaggtgcatccacagatgcttgggtaaccctgttccagctgttctgggttttgcaatggagatattgttgactcttcaagtcatggttgagaacatggaacctgagaaggtgatactttacccacagctcttctggggctgtgttgcactgatgcataccgattatgtgcacatata

SEQ ID NO: 391790 - DNA, 545 bp, Oryza sativa
  unsure (1)..(545): unsure at all n locations
tctctgacgcggggcagcgcgccggcgagggtggccatcagcaccgccatgctcgccagcacggtggtggtggcgtccgacggtgcccttcttcggctacctcatgtcattcatcggctcgttcctcagcgtcatggcgaccgtgctgttcccttgcctctgctacctcaagatctacaaggccgatggcatccaccgcacggagatggtggccatcgccggaattctgctgctaggagtgttcgtcgccgtcaccggcacgtacacttctttgctgcagattatagccactttctgaggtggttggttgctgttggtctctgatagtagacagtagtacttacagacaatagtgtgaccacagtgtccttaaaataaagggcgcttgaaaaaattttcggagttagtttgtatctaagataaagctgaatcaataatattgacttaggtgaaaaaattgtataaaaaaaaagtgcaaacaatgtcaatgttgtatttaataaatatcagatatgagacactnnnnnnnnnnnnnnnnnnnnnnn

SEQ ID NO: 391791 - DNA, 1057 bp, Oryza sativa
ctcctggctatggtgcaggagcaggagtggctcgccgccggcgaggacgacaggatcaccgacacggaaatcaaggcccttatcctgaatctattcgtggcgggcacagacacaacatcaaccatagttgagtggacaatggcagagctgattcgacacccagatatcctcaagcaggcccaagaggagctagatgcggccgcccgcgatctagaactagtctcagagtcggatctatcacatctcaccttcttccatgctatcatcaaggagacattccgtctacatccatcaacaccgctctcgctgccacgcatggcatctgaggagtgtgagatcgcaggctaccgtatccccaagggtgcagagttgctggtcaatgtgtgggggatcgcccgtgacccagccatatggcctgacccactagagtacaagccctctcggttcctccccggtgggacgcacactgatgtggatgtcaagggaaatgatttcggacttataccattcggtgcagggcgaaggatatgcgccggcctcagttggggcctgcggatggtcaccatgacagcggccacgctggtgcatgcattcgactggcagctaccagcggaccagacgccagacaagctcaatatggatgaggcgtttaccctcctgctgcaaagggcagagccattggtggttcacccggtaccaaggcttctcccatccgcttacaatattgcataaagatttacgagtttgaatataattaaccgcaaaagttatttccgtgtgtgtggcatcaaataaaatagagggtatgaacttttgtcatggtgttgcatcattgttgtatgttggtagattggtttttcacgagtatctatactccttataaaaaggagtagtggtgatgattctgctaccaccccactaccaactcttatctttttttaaggacatctaggattagtgggcccatatgtcattactctcaccaacttttattcttgtgaaaggttattaccgtgcgaataaatagtgggtttgaactaaaaaaaaaaaaaaaaaa

SEQ ID NO: 391792 - DNA, 580 bp, Oryza sativa
  unsure (1)..(580): unsure at all n locations
ggtgggtggtgtgctgaacgtcggcgacttcgtgccggcgctccggtggctggacccgcaggcngtggtagcgaggatgaaaaagctgcaccgccggttcgacgacatgatgaacgcgatcatcgcggagaggagggccggatcactactcaggaccaaccgacagtcgtgaggaaggtaaggacttgcttggcttgctcctggctatggtgcaggagcaggagtggctcgccgccggcgaggacgacaggatcaccgacacggaaatcaaggcccttatcctgaatctattcgtggcgggcacagacacaacatcaaccatagttgagtggacaatggcagagctgattcgacacccagatatcctcaagcacgcccaagaggagctagatgttgttgtgggtcgtgataggctcctctcagagtcggatctatcacatctcaccttcttccatgctatcatcaaggagacattccgccttcatccatcaaccccggtctcgctgccacgcatggcatctgaggagtgtgagatcgcaggctaccgtatcccccagggtgcagagttgctggtcaatgt

SEQ ID NO: 391793 - DNA, 556 bp, Oryza sativa
  unsure (1)..(556): unsure at all n locations
tcgaccccgcgtccgattcgaaattgatagtgaaacccatgatccgcttgacataggaatatatcaaattcgtgaggcgaatcaaatgattgaagagtttatgttggctgcaaatatctctgtcgctgagaagattttgaagcacttccccttgtgttcattgctaaggcgccatcctagcccaacaaaggaggtgcttgagccattactccgaactgcgtcttctgtggggctaaatctggatgtgtcatcctcaaaagcattagcagaatcacttgataatgcaaagaatgatgacccatacttcaacaagcttatcaggattttggcaactagatgcatgacacaggcagtttatttctgtagcggagacttgaccttttctgagtattaccattatggccttgctgcttctctttacacacatttcacctcccctattcgcagatatgcagatgtnattgttcataggttgtnagctgctgccctagaaattgccaaacttccacccctctttnaggatggtccacaacttacaggcgtantgacaacttna

SEQ ID NO: 391794 - DNA, 683 bp, Oryza sativa
cccacgcgtccggttctagatcgcgagcggggcgcttttttttttttttttttttttcgcaaggtaattgttaccgaccaaaatcaattagttgccaacctaaataacaggtcaatacataagctgaagtgtcaataaacacaaaatccattcccagtcgcatgctagacctatgcgggcgtgtggtgatgaaccgcaacatagaaatgagctgacgacagatatataagtcatatggtacacaacagggtaaaaaacataagctcgacgggctttactagtgtagtcactgcaactgcccatttgcatttatcagcaattgtttctttcagttcagcgccggcgtctcttatcataatcatcggcttcttcatcagaatcacctttctcacgaaacctaggattcttctccgaatcaatcgcatctctcttgaactcagagtcaggtgctctttgcgacgatcgctcatcgttccgggaacgtttccgttggtaatctctggcgttccggtaagaatctccataccctctcttcctgtcacctctggcatattgggggggggccttagggtgaaaagcacctccatagtcaactaactcacgttgtgcttctagctctttctgaaccatcttaccatagccacctcttccaggatcgtagtccgtgcggtactcatccccga

SEQ ID NO: 391795 - DNA, 284 bp, Oryza sativa
  unsure (1)..(284): unsure at all n locations
gcacataacacagattaattgctcataacagaggatatttgcaacattctcgtcgtacaactcctagttcctacttgacctaaggctctgggctgacctgatctttggctaaacaacggcatacatctgcactacaccaggcaaatgcggggggtgatgggagtaacatttatatgcatacacatctngactgaaatgaagtttaacagctcccaaatgcttgatacaccatgttggggctcgatcatnaaagcgggtatncttgggcaaaaacaccatnatac

SEQ ID NO: 391796 - DNA, 491 bp, Oryza sativa
gtgttttttatattcaggtttgctactgcaatccaacaccatctcataactacattatcctaatcgagcctttttaagtaatgaggccagtacaattaaaaaaggtgccgtagacaatagcaaacccatgaagaactgaaaacaaatggatgcaaaactaaaattgtcttagttctgtcgacaaatgccaactgctataatcgtacatgcgtctccgaagaaaccgccgacactgcctcactctccaagaaccataccaaacccaaatttgtaatctttcttccagtgatcaagctctgcagaaagaacgaaattcacgccgggggtcaaccgctcctccaaaagagcagaaacaacgccattggtatcaatcttccccctcagacgacactgtctcaacatataatcatagccgaaacttgctgttacatccttcgccatatgattgtacataaaatcagatgcaagggaaaccttttcttgatcttttt

SEQ ID NO: 391797 - DNA, 702 bp, Oryza sativa
  unsure (1)..(702): unsure at all n locations
ttcctctcttcttcctccctttctcctcctcgccacctagcgtcgtcgacgctcgccggcggcgaggtgtgatatctgtgccctgatcatcgatggggcctcagcaagaccggtcggcggccaagccgtacgcgaacggcagcacggcggcggcggcggcggcggggaggaaggagaacaacaaggtggtgcggtacagggagtgccagcgcaaccacgccgccagcatcggcggccacgccgtcgacggctgccgggagttcatggcgtcgggcgccgatggcaccgccgccgcgctcctctgcgccgcctgcggctgccaccagagcttccacaggcgagaggtggaggccgccgcggccgaatgcgactgctcctccgacaccttctccggcaccggccgtcggtgatcgccgtggatttgattcggcctcgtcgtgcgagtagatcagcatcatcagtaggtaaggtggtattggcgatttggcattcacaggattcggtggatgaatgaatctgattgtgtatgaaccgattaaaaagttctcttcctttctttctttcatattttgatctttggtgaatcgatggtgtgtaatgtaacataatatatgttaaaaagcatacgcataanaagcgttcatgtaactgctgtgtccatgtacagattatattcagatgaacatcttaattatattctct

SEQ ID NO: 391798 - DNA, 611 bp, Oryza sativa
cggacgcgtgggcggacgcgtgggcgagctagcaaaaaggatagcaatggtggaaccggggagagcgcgggagacgaaggtcaccgcctcagcctcaagctctgcaggctcagacgccgctgtcatgaagaagaagaagaagaagaagaagaagctggtggtagcaagcaggaaggtggatgagaaagacaagaagcaggtggattacaagtgcagtagaagcagcggcagagacgagtgctgcaaggtggagagccgtcatcagcagtgcacagagccggagagcccttcctacaggttagctctcaggagcctcttctcgtgcagaaacagcagcagcagcagccacgccggccaccaccaccaccgcgccgccgacggcaagaagctcggctgcaattccgcctccatctgcaaggtcaagcaagacaacccgatgcagcagcacatgcgcagggcggaggatgagctcaaggtgaaggacaagccgccggtcgccgagccgtactgcaagcgcagagcttccgtgagcgcgtgcacatcagcagcgagcggtcgtgaagaagtcagtgaagcagcagcagcaggaggcgagcagcagcttgcagtcg

SEQ ID NO: 391799 - DNA, 617 bp, Oryza sativa
cggacgcgtgggctgagtaaatgttgacacgcggaacacagattactctgtttttaagagatgatgataagtacgagtttgctgaccctggacgtattcaaggtttagttaagaactattcccagtttgtttcattccccatatatacatggcaggagaaatcaagaacagttgaggtggaagaagaagaaccgaaagaaggtgaagaggcaacagagggtgaaaagaagaagaaaaagaaaacaatcactgagaagtactgggattgggaattggctaatgaaacaaagcccatatggatgagaaatccaaaggaagttgagaaaactgagtacaatgaattctacaagaaggcattcaatgagtttttggatcctcttgcttacacccactttacaacagagggtgaggtggaattcaggagcgtcctctacattccaggaatggcacctcttagcaatgaggagataatgaaccctaagaccaagaatatccggctgtatgttaagagagtcttcatatcagatgacttcgatggcgagttgttccctagatacttaagctttgtaaagggtgtagtggactcaaatgatcttcctctcaatgtttcccgtgag

SEQ ID NO: 391800 - DNA, 715 bp, Oryza sativa
  unsure (1)..(715): unsure at all n locations
cccacagcgttctagcgtagcctagtgcatagtgaatgcggcaacagtatctacaatgaaaagagcatggtccaatgctgtacaattgaccttgaggatgacatccgactgactatggatgctcatgctgtaaccaacgatgggcaaactgaatagttagacacccaaatacggttttatatcgacaaccatgcatacaataagctgatgtctccatacagctatgattgaaacctatcgagacttaatgaacactaagacacacaggatagatgacctgacgatctgagatctgagcttgctcacatgctgaactgcatgagagaagagatattcagcacaaatcagtgaggaagatgctctcttgtacaattcatggtgctgaacttcttacatcatatgatggtagttcaggcactggtcatatgatgcaatggttcaatgaagagtctctctctgattagatgaagaaatcgttatctatctgttagataacatatttatgtattttgcttaatgtcncattgtttgtgacttttggatttgtaaaccattaagtatgttttgttttatcctctattaccttgtcggttatttanacatgcactaccctatccttttgtttagacctgggatgatccattaatctacttgctatggtattttatttnnnnnnnnnnnnnnnnnnnnnnnnnnnnnnnnnnnnnnnnnnnnn

SEQ ID NO: 391801 - DNA, 351 bp, Oryza sativa
cccacgcgtccgcggacgcgtgggcgcgggtggtgggcacaaggttgaagactacaggaacacatttgcaaaccttgcaatccccctcttctctatggctgagccggtccctcccaagaccatcaagcaccaggacatggcctggactgtttgggaccgctggaccataactggcggggggggggctgagggagcttctggactggctcaaggagaagggcctgaatgcatacagcatatcttgcggcacctcgctgctgtacaactcaatgttcccgaggcacaaggagcgtctagacaagaaggtggtcgatgtggcgagggaggtggcaaaggtggaggggcccccat

SEQ ID NO: 391802 - DNA, 436 bp, Oryza sativa
  unsure (1)..(436): unsure at all n locations
cccacgcgtccgcccacgcgtccgagggccttgaagcttctctggctgcatgccgacggacactgccagtgccacctctctctgctgctgcgcctcgtcgcttgcctcgcccttgtgctgctgctgccgccgccgccgcctgcccaagcggcgacggtggtcacccacctgccgggaggggagggtcctctacccttctacctggagaccgggtacgtgggcgtggaggaggagaccgggacggagctcttctactacttcgtggagtcggagcggagccctcgcagcgacgtcgtgctgctgtggctgtcgggagggccccggtgctcggtcttcagcggcttcgtgtacgagataggccctggaatggttgtcgcggaacgttacagcggcggacggttccgcggttgaagtataatccgnattcctggacgaa

SEQ ID NO: 391803 - DNA, 419 bp, Oryza sativa
ctgaagtcccagtttgcgatgtgacattcttgaggcagagtgtgcagtttggaagtggactgtggtgtgtggttgatgtgtctattgataccatccttcctggagagagtaaaacagctcagtccagtgtgcagaccagcagtacagctgccagacgcatggaagtcaggctgttgccatcaggctgtgttattgaagaaatggagaatggctattccaaggtgacctggatggtgcatgccgcttatgatgagagagcagtgccagtgctttatcattcacttctccgctctgcaaaagcccttggtgcgtgccgctgggtagcatcactccagagacaccagcccgttcctttccggcctgcacaaatacatcttttgtcctgacagcacaatgacaaaaatggtgatgccaagaaa

SEQ ID NO: 391804 - DNA, 441 bp, Oryza sativa
cccacgcgtccgcccacgcgtccgcgatactccaacactcctggcctagtatatatcatccaagggactggtgtactgggattgacctttcctggttgcccagcaacttaccaaaagcaatttaggcattttggtcttgaaggaggaagccaaaggcaaggaaaaaaattaagagatgaaaaccaaaagatccaccaatttaggcaaggagatgttgttgcacttccttctggtataccacactggttctataatgagggtgacacccctgttgttgctttgtttgtttttgatgtaaacaacaatgctaatcaactcgaaccaagacaaaaggagttcttgttagctggtaacaatatagagcaacaagtgtcccacccctcaatcaacaaacattctgggcaaaacatattcaatggattcaacactaagctattaagt

SEQ ID NO: 391805 - DNA, 458 bp, Oryza sativa
cccacgcgtccgcccacgcgtccgcgcacgcggccgcgccgccgccgcctcctccattaccgagaagaagagaaacctctcttctactgttggatccaactactacctacccgcacgccgcaatgtcgctcgccaccagctcctcgatggccggtggggcggcggtggttccacgcagggcgacggcgacgacggcctcggcgttcgtcacgatgaagcggcgcgccacggccgtgcgcgccgtacacgcgggggagccgtcaaagaacccgcccgtcggcgtcccgtccgaggcgaatacgtcgtcaccgtcggtggcggcgcccgagaaggcccccgaggcggccgcgcccgcgcctgtggctcctgctccggcggacactaaacatagtggcccaggtgaggttggcctgcgacaacttgaggaccaaaaaagggcttgtatttcccgaaatccc

SEQ ID NO: 391806 - DNA, 474 bp, Oryza sativa
cccacgcgtccggggaagacgacgacgaggtcgcccgcgcagcaatgccgctctgcagcttctacgcctccacctccctccccgtcgccaagccccactccctcccctcctcctcctcctccaagccctacaccgccacgccggcgccggcgccgacggcggcgtcggcgtcggcgtcggcggcggcgctgtcgctgcacctgcccgagctgccgtcgcgggtgaaggacaagatcctgagccttgagctgatgggggtggactacgggcgcgcgctggcgctgaacccggcgctccgcgacgcggcgccggagtccatccacgccgtggtgacgttcctccagtcgcgggggctccacttcaaggacctcggccgcgtgttcggcatgtgcccggcgctgctcaccgccagcgtccgcgccgacctccgcccggtcttcgccttcctcaccgacgacctcgggatcccggaca

SEQ ID NO: 391807 - DNA, 398 bp, Oryza sativa
  unsure (1)..(398): unsure at all n locations
cgtccgcggacgcgtgggcgcgcatcggccccgcgccccctccactgctccgccgaccaccgtcaggtcgcgacgccgccgatgactctctcgtgccgccaaggatcacgccgccaccgtgactcctcgccatcgatgcgcgacgtgacgcgtttccatctcttcgttcgtcgtcgacgtcttcgccggcctcctcaagaatcccgcaccgccgctgtcgaccgagatgaggaaggccaagccattatcgaaatagttgcgcgcgtaggcacaccagcagaaaaaggcaccggccactccaagctcgtccggcactacgactcggaggcctnctggaacaatgtatcactattcactagcacccctccttcctcactggtttgctggtcttggtgcta

SEQ ID NO: 391808 - DNA, 500 bp, Oryza sativa
gtgaaactgatcctccatccaatcatcaaaatggttatggggaacctcctgaaatgtatggtcttagccacagaaaattgctgcgtcagcttatcatgagtggagatattgattctgcattcaaaaaacttggagaatggtatccacaggtgataaaggatgaaacatcaattatttgcttcttactccattcccaaagattcattgaatttatcggggctggacaactggaggatgctgtaaaatatgctcgctctaacctggccaacttcttgacacataaagcttttgatgggttgctaaaggagagcgtggccctgcttgcatatgaaaagcctgccgaatcgtgcattggatatctgctagactctccacagcgggaatttgtagcggatgcagtgaatgcagctgtcctgtcaaccaaccccaacatgaaggaccctgagagttgcctttactcatgtctcgagaaactactggggcagctcacagtatgcagc

SEQ ID NO: 391809 - DNA, 327 bp, Oryza sativa
  unsure (1)..(327): unsure at all n locations
gttcttcttgtctggctgtagccggccgatcagctcccgggccggcgggcaagcacaatacagcgtcccacacggcctcggcgtgctgttatacttcttgttagtgcatgtaaatatggatgggggggggggggggggtggggtataaggcaaatgggcagcagctgtgcctaggtcaaagccacggnggtggcaggcccttgtctagcacttgttgcccgggttttgctatgtactactgctgttgagaagaggatcttcaagtgtaaaaaccacttcttttttctttttaaaatgagaggggcatagaatctacctccaattttc

SEQ ID NO: 391810 - DNA, 351 bp, Oryza sativa
  unsure (1)..(351): unsure at all n locations
gggagctctttgatcttctctctgggggaaaganctcctgatgagggaagatggcaagaaacaagtttgcattgttggtctgcaagaatttgaggtttctgatgttcagattgtcaaggaatatattgagagaggaaatgcagcccggagtacagggtcaactttttgccaatgaggggggggggaaggccacatgctattctgcagctggctatcaanaaacatatcatgagtaactgataccaggcgacaaagagatcgagatgctaatgaatctaaaaacacaaaggctgtgggaaaaatttcatttattgatcttgctggaagcgagcgtggagcctatacaacaga

SEQ ID NO: 391811 - DNA, 514 bp, Oryza sativa
cccacgcgtccgaaccagctgagctgagcgacgcaggaactcgggacgactcaggagtcggaggagacaatctcactctctccctctcccctctcctctcccaaaatccacgccgagcccgccaaatcctccccccggtgcgactcgccacggatcgcgcgccgccggcaatgggggccgccgcctgcgacgccgccgtcgaggagctcactcgcctcctggaccaagtcgaggagccgctgaagcagacgttccagaatgtgcaccagggctatccaacagacacactagtgcgcttcctaaaagctagagagtggcatgtttcaaaggcttgtgatatgcttgtggattccttgaattggaggatacaaaatgaaattgatagtatactggagaaacctataattcctgtagatttatatagatcaatacgtgagacacagcttgttggattatcaggatactcaaaggaggttcattactatgtgcaatctcatattcaaatcaatgagta

SEQ ID NO: 391812 - DNA, 220 bp, Oryza sativa
gcgacggcaacaaggtgtcggcgcgtgcggctgggcgacccgagggcggggtcgccggggctgtccgggcggctcgaccaggcgctggggcggctgtccgcgctcaccgagctgtcgctcgtgcccgggcgcgtcgaaggcgagctcccggagtcgctcaactcctgccggaaccggggggggggggccttcaccaacaacctcatctcccaccaaatac

SEQ ID NO: 391813 - DNA, 464 bp, Oryza sativa
  unsure (1)..(464): unsure at all n locations
aaggtggcttcggaggaggcaagggtggaggcttcggtggtggcttcggaggaggcaaaggcggaggagttggcggcggtgcgggcggaggattcggtggcggcggtggcgctggagcaggaggcggtttcggcggaggcaagggaggtggtttcggtggaggcgtcggcggcggccatcgacttcctcacgctctgctaccgcctcaagacgacgaagagggccgggtgggtgaggcgcggggtgcaggggccggagtccgtcgccgaccacatgtaccggatgggcgtcatggcgctcgtcgccgccgacctgcccagcggcgtgaaccgcgacaggtgtgtcaagatggcgatcgtgcacgacatagccgaagctattgttggtgatatcaccccttcagatggcgtgccgaaggaagaaaagagccgcanagagcaagaagcattggaccatatgtgcag

SEQ ID NO: 391814 - DNA, 428 bp, Oryza sativa
caattaccttgcgtctgggtcggtgcacccgggtctaaggatggcaacctcccttctaagggaggagccaaccggggagttgcaactattgactgcgccactgaaatcaattgatggcctaattttgtttgatcgaccgaaatgtaacctccaagcagaggacatttcttcattggcatcaaattcggaggttgtggattttgatgctggacttgcagaattggatggaaagattagggagcgattgtcagagagttcttgcagttattgcttacagcctttgaccagcttgcactatcagtcactaaaggaggcagatatcgctctatgctctgattgcttccatgatgcgagatatattactgggcattcaagcttagattttcagaggattgatggggataacgatagatcaaaaaatgatgggg

SEQ ID NO: 391815 - DNA, 594 bp, Oryza sativa
  unsure (1)..(594): unsure at all n locations
cccacgcgtccgcccacgcgtccgaagctcagctcagctactaatcgatgagctcgggaccatcacttcgctggtagctcagctgattcgatcgatcagccatggcgggggagaggaggtggagcacggcggcggcggcggctggatggctgcgagtggccgccgttgtggtggccgccgcctctgccgcctcgtcggcggccggcgagggggtcggccggcagacggtcccggcgatgtacgtgttcggcgactcgctggtggacgtcggcaacaacgacttcctgccgccgccggcgccgaggccgccggagccaccctgcggcatcgacctcccgcccgaggccgccgccgccgacggcggcggcgggggccgcttcaccaacggcttcaacctcgccgacgtcatcgcgcagcatgtgggggtcaagaagagcccgccggcgtacctctccctgacaacgccgggaagagacggcgaactccggggaggcctngtcggggccaactacgcctncagcggatccggcattctngacttaattgggaacggacaatcagncttggagagcaggtaagctcttnacaaaacaa

SEQ ID NO: 391816 - DNA, 464 bp, Oryza sativa
ttctaccatccattctcctctactctcctctcctctcctctcctctcctctccggcttactccccccctcaccgcttaccgcgccgcctccgtctctgccgctgccaggctcgggagcggcggatctgccgccgacagcgccggcatccgtctccgcctcttcacggcggcgtctgagccggggcaggtatccctcccattccctcacctcccctctcacctctcctctctcggcgcggattccggccggagcagctgccggagggcggtggcggcggcggctccaggcggttcctgcgcggaaggcggaggcggcggccgtggcggctcccctccctcctcccagatccggtggaggcgggggcggctcccctcccgcccgggtcctgccgtgccagcccggcccgccgctagctctccggcttgacatcggctcgcgggtttttcttgttctttcacgcgcg

SEQ ID NO: 391817 - DNA, 268 bp, Oryza sativa
gtcgaccacgcgtccgctcagccgccacactaccatccattctcctctactctcctctcctctcctctcctctcctctccggcttactccccccctcaccgcttaccgcgccgcctccgtctctgccgctgccaggctcgggagcggcggatctgccgcctcgccgctgtcccgtctcctgctcagcctcccaaaccccagcgtgaaacttcccgtgtcttctccgagccggaacgccggcgccgccgtggccgtcaagaacaggacc

SEQ ID NO: 391818 - DNA, 541 bp, Oryza sativa
gaaatgggctaaagacttgaaaggtgtggggggggattggaatacactgggtatagtggttcaagaggtcaattacattgaattgatctgtgaccgggattcgtatggttgtagtgttcagaagtgctatcctcagtctattctattcatgcacaatggttggtcttttggtggatggcgggagtggaactctaaacaatacaagagcagtatgctaattgtgaacccattggaactcatgcaagtactgttagtgccattagtgtgggatccagatgctgagatgggtcagattggtagctacgctctacaaccagaaaattgtcaattaactacctgcatgagagcacattgcattaagccaagtgattatgagatcatcactgccaaagaaaaccatgctgctgatgctcctagactgcttattgttgtaatggaggatgaaggcaatacagtttggactttagaattttcagtcagtggagtggtacagaagaagcgtgatctttggttgtgtgcatttgctgttaacaaggacatg

SEQ ID NO: 391819 - DNA, 402 bp, Oryza sativa
  unsure (1)..(402): unsure at all n locations
cttcagcaacagcttagaattcagctcagtaaatctgttgattgctcgtttcaaatcatcatcggtgtttcgtttcttgatttcttgatccatccatggcgacgacagtggattggtgtggccgtggcagcaatcttcctgctgcgatgtatgacatggtggtggatagcaaggagctaatgggcgcgcttgctccgtccatggtgtccttctcctacccgtgttccgagcagagcgcgagctcgcttcttgctggcgccaactacctgactcccgcgcaggtgctccatgtccaggcgcagctacagcgcctgcgccgcccgggcgcggcgagcggctgcctcgcgcgngagccgcgttgccgatgaagcggcatggcgcgttgcggttgcggcggcggcg

SEQ ID NO: 391820 - DNA, 786 bp, Oryza sativa
cacgaggtagaatcagtcctgtgacagcaacagctatatcaactgttcaatctatgcccttatcaggttttggaggaaagtggaatcaatcattttgcttcagaaatgaatccattttccttccaaagaaagggccctcctcgaaaaattgtccagttaaataacagctgggaaagaccataaccaaccgtgttagacggacctaacttgacacagcctgagtggaccgtgtgggaccaaaccgttgagtattgtgcattcgcttatcagcagtatattgtaatttcttccttgcggccccaatttagatatcttggagatgtttcgattcccttcgctacaggtgccgtttggcatcgtaggcagttgtttgtggctacgcccaccaccatcgagtgtgtctttgttgatgcgggtgtggctgccattgacattgaaacaaaaaagaggaaagaagaaatgaaagcaagagaagctcagagtcgggcggctgcagagcatggagatttggctcttattacagttgaaggccccaagactaccacttctgagaaaatagctttaagacctccaatgttgcaggttgttcggttagcctcctttcagtatgctccatctatacccccatttatagtgccaaagcaatcaaagttagatggagaagattcagtgtttcagaaagaattggatgatagaagatatgctgaagttgctgttgctggaggaggggtatctgttgcagtaacccgcttccctcctgagcagaaaagacctattggacccctt

SEQ ID NO: 391821 - DNA, 431 bp, Oryza sativa
cccacgcgtccgcccacgcgtccgcccctctctgtctttttctctccctccgtctcctctccaaatgcaaagctctcttctcttctctcgctcctcgctctctccatccatggccatgagggcctaaatgccaaagcagtcaagctgataagaccgagagagaaaggtgttcctttccgtcctcgcaccccccggctccgattttctgctcccgccatgccgccgccgccaaggctgctgttcttgctcgtcatgctgctggtggtcgcggcgcccggcgcgccggtgttcggggcgaacgcgccgccggaggtgaaggcggagatcgacgcgctactcatgttccggagcgggctgcgcgacccttacgccgccatgtccgggtggaaccgcgtcttcgccgccgggccctggtcctggcgcggggtggc

SEQ ID NO: 391822 - DNA, 469 bp, Oryza sativa
  unsure (1)..(469): unsure at all n locations
cccacgcgtccgatctaaaactgcatattttgtgtgtacttctgtgcttccatctgtatgctttttgctgtgaaatatgttaatttctttttgtatgaagttgccaggattattgtataagcttctaggttttcagtttatgacagatcatgttcacaagggtttaaaattattcaactgggggtcccttcagaaactattgaaaccagccagctcctacttcctggtaatgccatattggacaagtgctttgtgcatcttgtacaagacttcctaaaactgtccacaattaggataatgttttaatgggaaacagatgctagtgattacgagagaaggaaaataacacaacctaatgataataataataataagttagccagtaaacaactcaatactcaccagtttggtgcacaccanatcaagctgggattggaacaaaaaaaaggacgggggaaggtatctcttt

SEQ ID NO: 391823 - DNA, 572 bp, Oryza sativa
cggacgcgtgggtgagaatgcacagggcgtacggatatatcgcagtcgtgaagtaggccaatcttatattacttccatcgcaacgacattgcttgctacgtcacatgctatctggataataataagaataagaccacaagtgattttttgcaatggtccagggacatgcattcctctgtgtgtctcggcttttcttctgaaggtgcttggtttgggatggtcctccattttctacatcgaaagcattgcaagagtgaagaagctttcattaagcggtttactgttgtacaagctacgaatagctgatcagttcttcgtgcagtggccccagctgcagcaaaaataccctcgagcatgctatgccggccgtttaatgtaaagattcacgcatagatgataatattgctttacagcaaaatgctaatggttttatattgcagatgttcttctgattagatgtgacgtttgtcaaatatttttcttccttttcaacagactggactggtcattatctaaaaaaaaacagactggactggagtgatagatagatgccctgacccgaggagatattg

SEQ ID NO: 391824 - DNA, 506 bp, Oryza sativa
  unsure (1)..(506): unsure at all n locations
aaaaagaaatatgttgtcttagcatatcctatgcaatctcaaacaatgcagccttccattgatgataaggccacaactgagccaaagagtggacagaaaactttggaacatccatctcttcctgcagctggaccgtctgaatctgaatctgaacataagatcaaaggaaattttgtcaatacacctgatgatccacctattagcccttctgtgcctagcaaaagtgcaagcaaaaaaaggaccaacactatagcttcagttccagctccacctgctaagaagctattcaaagaacattcccagcacacaaaggatcaaagtgaatgagatgcttgtgtccagccatcccacagatattttggggtgtttgtccaaaacctatggccacctgctagaagaaaggaggcatccaaaataaagcttacaagttaaaagcaggactcttttgctgaagacctacatcctaatattaatggatataaggggncatggctgctttcaccttt

SEQ ID NO: 391825 - DNA, 546 bp, Oryza sativa
  unsure (1)..(546): unsure at all n locations
cccacgcgtccgcccacgcgtccgcccacgcgtccgcccacgcgtccgcccacgcgtccgcccacgcgtccgcccacgcgtccgcccacgcgtccgcgagctcgctctcgcggcgtctcccatggcggaagcggacgcgcaaacccagagccgcgcccactcctcgacggcggcgccggtggcgggggagacggccggcgaaccagtcgggtttccccagaatggcgctataaatggggctcctttgatgtttccggtgatgtaccctatgcttatgacgggtatgcatcctcagcagagcctggatgatcaggctcagggtccagggatctatgccatacagcagaatcaattcatggggagtactctcatgccactcacttacaggattccaacggaaagtgtcggtgctgtggctggtgaagagcaagcacaggatgctaggcaacaacatggccctcagagacaaggttgttggtgaggaggtttcacttttgctttttcaagtttgacttgggccctngatcatcaaagttagcagcaagt

SEQ ID NO: 391826 - DNA, 462 bp, Oryza sativa
gatcgccataaacggttacacaaactcctgcaggtcaagatcagtaggagttcaccaacttgcaaggtctgtggagaaaatcctgttttcaccaaagaggacttcgtgaactttgattacgagagcttcacacaatctccaatgtccaaaaattcgacgacgcggagcctgaatcttctcccggagaacgcccgggtgagctgcagagactacaagaaggtgctcgacagcggcaggccgcacctgctggtggacgtgcggccgtcgcaccattttcagatagcgtccatggctcactccatcaacgtcccgctctcgctgctggaggagaagctgccactgctgcgggactcggcgagggaagtgtcgtcgcggcgcgacgggcggcagcactgccctgtgtacgtcatctgccggcgaggcaatgactcccaggtcgccgtgcagatcctccgcgagaat

SEQ ID NO: 391827 - DNA, 370 bp, Oryza sativa
gtggtgacatccctgatttcgtcggcgacctggccagcctcgaggtgctgcagctctgggagaacaacttcaccggcggcgtgccgcgccgcctcggccgcaatggccgcctccagctgctcgacctctcgtcgaacaggctcaccggcacgctgccgccggagctctgcgccggtggcgggaggcacacgctcatcgcgcttggcaacttcttgttcggcgccatcccggactcccttggtgaatgcaagtccttgagccgtgttcgtcttggggagaactacttgaacggctcaattccgaagggtctctttgagctgccgaagctgacgcaggttgagctgcaagataacctgctcacaggcaattt

SEQ ID NO: 391828 - DNA, 651 bp, Oryza sativa
  unsure (1)..(651): unsure at all n locations
cccacgcgtccgggaggaggaggaggaggggtgaagaaggaggagggggaggaggaggcgaggggaagaggaggaggaggcggcgtggtgggagggtgggggacgtgggaggagctggtgctgggcagcgccgtcatccgccatgggggcgttgcgtggggcgccgtcgccgccgaggtgcggtcccgctcgccgtgcgccttctcgcctgaggaatgtgaagctaaattttcagagatacaagcacgctactctgcatgcgatgcttggtttgaggagctccgtaagcggagagttgctgaattaagaaatgatctgaagaagtctgaaaattttattggatccctgcagtccatgatcaaaagcctcagcaatagcaagcatgatgatggcaactctgaatgtcacactagtcatactgagtcatgttcaaataatgaaaatacagctgataacaattcatcaagcaaagcattgtccaaagatagatcatctgctgctagttttacagaggaagcaagcaacagtcagaaatctgaaaaggtgcaacactgcgatactgattcaattcaagtgaacaatacttcagcagaggctttggtaaaacccccttgttgaaaaaaaggtttgtccttgaaggtggtttctttn

SEQ ID NO: 391829 - DNA, 500 bp, Oryza sativa
  unsure (1)..(500): unsure at all n locations
tttcgcatgcgtttggactccaccgccgtggcggccgctctagaactagtggatcccccgggctgcacgaattcggcacgagcgaattcggatacaaatctgatcagtgcgattgcgatcgaatttcacccagagtccacacaaactttcgattcgatttctccgatctcgcagcggtggcggccatggcgcagaggacgctggagctgacgctgatctcggccaaggatctcaacgacgtgaacctcctctccatgatggaggtctacgccgtcgtctcgctctccggcgaccgccgctcgcggcagcggatcgccaccgaccgcgccggtggccgcaacccggcgtggaacgccgccccgctccggttcaccgtcccggcctccggcgcgggttccctccacgtcctcctccgcgccgagcgcgccctccgccacctctacttcgcaaggtccacattccccctncttccggaagctcctctccccgggngccccccc

SEQ ID NO: 391830 - DNA, 480 bp, Oryza sativa
gtcgaattcggatacaaatctgatcagttcgatttcgatcgaatttcacccaaagtccacacaaactttcgattcgatttctccgatctcgcagcggtggcggccatggcgcagaggacgctggagctgacgctgatctcggccaaggatctcaaggacgtgaacctcctctccaagatggaggtctacgccgtcgtctcgctctccggcgaccgccgctcgcggcagcggatcgccaccgaccgcgccggtggccgcaacccggcgtggaacgccgccccgctccggttcaccgtcccggcctccggcgcgggttccctccacgttctcctccgcgccgagcgcgccctcggcgaccgcgacgtcggcgaggtccacatccccctctcggagctcctctccggcgcccccgacggcgccgtccccgccaagttcgtctcctaccggccccgcaagatctccttcgggaagccacagggc

SEQ ID NO: 391831 - DNA, 254 bp, Oryza sativa
cccacgcgtccgcgcagttaagaggagttaatccaagctctagctcgatcgcgcggtcgccggagctgaggtagacgaaggagtgcgacgagctaagatgggtagtggaagcgcggcgaacggcggcggaggaggggcgggggcggcgagggtgccgatgccggcggccaagccgttcctggagacgctgggggggaacatgaaggagacattcctgccggacgacccgttcagggcggagcggcgctagcgcg

SEQ ID NO: 391832 - DNA, 377 bp, Oryza sativa
cggacgcgtgggcggacgcgtgggtggccggaaaactggaggactaatagaaggaagcatcactatatctgggtatcctaaaaaccaagagactttcactaggatctctggttattgtgaacaaaatgatgtgcattcaccttgcttgactgtaattgagtcattgctgtactctgcatgcctccgattgccggctcatgttgatgtgaacactcgaagggtttttgttgaagaggtgatggaacccgccgagctaaatgcattaagtggtgctcttgttggcctaccaggagtgaatggtctgtcaactgaacaacgcaagaggttgacgatagctgtggagcttgtggcaaatccttcaatcgtgttcatggatg

SEQ ID NO: 391833 - DNA, 1194 bp, Oryza sativa
  unsure (1)..(1194): unsure at all n locations
gcccccgctcatgatgggttggactccaccgcggtggcggccgctctaaactagtggatcccccgggctgcaggaattcggcaacaacaacaaaaaccacttctcgtgggtagaagagagagagagcgaggcgatttcgaccaagaagatggccgggatcgtggtggtgttcgacttcgacaagacgatcatcgacgtcgacagcgacaactgggtcgtggacgggctcggcgcgacggaggagttcgagcggctgctgcccaccatgccgtggaacaccctcatggacaccatgatgggcgagctccacgcgagcggcaagtcgctcgccgacgtcgcgggcgtgctcaggtcggcgccgctcgacccgcgcgtcgtcgccgccatcaaggcctgctacggcctgggctgcgacctccggatcctcagcgacgccaaccgcttcttcatcgacaccatcctcgaccaccacggcctcacgggttacttctccgagatcaacaccaacccgagcgccgtcgacgccgccaccggccgcctccgcatcgcgccgtaccacgacttccacgccggcccgcacgggtgcggcctcgggatctgcccgcccaacatgtgcaagggccaggtgctcgaccgcatccgcgccttcccccggcgccgccggcaagagggtcatctacctcggtgacggccgcggcgactactgcccgtccgctccgccttcggccgcgacgacttcatgatgccacgcaggggcttccccgtgtgggagctccatctgcgaggacccgtcgctgctccacgcggaggtgcactcgtggnccgacggcgcccgagatggaggagaacgctgctgcggctggtcggcagggtgctcctcgaggagaggaacctgcccgccgctcgactgcaagctcgagtcgttgcccggccgtcgccgtgcaggacggcatgcctatgacgctccggatcaagaactgatcaatggcggcgacgaacgtacgcatgatttcgagcgcgaaacggctagctcgaacaatgtgtgtgtgaggattgcgatacgggtataattttaactattgactgattttntgctacgcgtgattgagcctgcgattagtagaggctcattgtatcttgtccgatcaattgaagtaaaacatttggcttggctcaaaaaaaaaaaaaaaaaaa

SEQ ID NO: 391834 - DNA, 783 bp, Oryza sativa
tctgggctcatcagtgaaaagactgaaagacatgctagaaatagagataggcctgatcgtggtgtatgggcccctcgtcgctatgacaaatctgcatcaggtgggacgcattcctcgtcatctgagttctcaccaatgcagcaacattctggtgaaaatttctgtcagcaagcagatggccatggagagagaaaaatagacccaaggggtcatggtggtattcgcggaggccctgtggaaaatggacatagacatgctaaccgccgtggtcctccacgtggtctgaaggagatggaaatttctgcaagcacatctgatggaaagccttcaaagagagcctctgccaactatggtgctcatgagaggcaagtgtgggttcaaaaatcaagctcggcgacgtgatcttgtccaatgatgatactcatcaaaacaaatattgcaagttgtggagttctggattttgcagcttgatcctgtgaagtactgttaacaaaatgcccccgatcatatgcttccatgaagtgcaatctcagatttgtcaatcgaaatctcagctttagctgaaaagggagcttatatgatttgattcacagcaatagtgaattaacataacccactttaggtagctcttgattgctttgggtgagacttgatttgggcccaaggttgctattctggagcaatggaaggatttaggttggcatcattacccttgtgacagtggtcacatatttctgagacccctggagaatatacacgaccttaactaatcagagatgggtg

SEQ ID NO: 391835 - DNA, 464 bp, Oryza sativa
  unsure (1)..(464): unsure at all n locations
gaacgagctcgccgccgccgccgtggcgccgtcgcagcagcagctnagcggagggtgagtgggaggagggcgcgttcggggagggtccgcgccgtcgccacgcccgcccgcgccccccgcgccccgtcctccactcgcgcccgcccgcgcgcccggacgatgacagagaagatcctggcgagggcgtcggagcgcgccagcttggagcccggggagaacgtgtgggtggacgtcgacgtgctgatgacgcacgacgtctgcggccctggcaccatcgggatcttcaagcgggagttcggggaggacgccaaggtttgggaccgagagaaggtggtcatcatcccggaccactacatcttcaccagcgatgagcgagcaaaccgaaatgttgatatcctcagggatttctgtatggacagaacatcaagtacttctatgacatcaaggactnagcaatttcaaan

SEQ ID NO: 391836 - DNA, 935 bp, Oryza sativa
ctcactataggtaaagctgctcctcctgcacgcgccgcggcctgaaccggctggacccacgcgtgcgcgttcttcctgggctgagacccactactccgagccatcaagaacacacacacatccagaaagcctaatccaatccaaaagccctaatcacccagactccatctctgtgaggtttgagagaggtaggtgagccgtagatctgagcgagttcttgggtcttccagcaggtagatcacttcatctgaggatcaatctttttttttttcctttgtttttgagcttctgttggtgtacaggacagagagttccagagccttttagtttctggtgttctgatctgttcttggtgtaagattattggtctgatttggtagccaagagggttaattttttccacacctccttgtgctagttagcttagcttataccccccttgtaaagtgattagtagatctagaacttctcttttcgtctgccagttcttggattttggaaagaacaggtggtttgttattcagatttttaggttagaaaaaatccacaaaaaaaaagatattcgatggcagctgctatagaaggaaatctgatgcgggcgctgggagaggctccgtcgccgcagatgcagaagatcgcgccgccgccgtttcatcccggcttgccgccggcgccggcggaacttctcctcggccggagtccacgggttccactacatgggcccggcccagctcagcccggcccagatccagcgcgtccaggcccaactccacatgcagcggcaggcccagtcggggctcggcccgcgggcccagcccatgaagcccgcttcggcggctgctccggcggcggcggcggcgcgggcgcagaagctgtaccgcggcgtgcggcagcggcactggggcaagtgggtggcggagatccggctgccgggc

SEQ ID NO: 391837 - DNA, 438 bp, Oryza sativa
cagaaatgctctgttcttttcattgataatcatctcgtgacaactggaaatattgggacatgtattgcctcttaagtcttaacgcccagtgatagtttgttacaaggaactaacatcattcaggtgtcatgggtaactcacctttatccgtgtcagtatacacctctgccaacgggaggctttttgcaaatggctgaaccagtaacccatcactagaagaaaaaagaaacccccagaaccatcctattttataccagccacacaaacattatggagtatcttgttggggtgaaactcttggcctccactgctcccctcttggatggaggattggccattgacaaccctcctctggtttgatggcattcgagtccatcactctcaggcgattgtctcgtccacttgcttccagctatcgagcattgagcccttttttca

SEQ ID NO: 391838 - DNA, 532 bp, Oryza sativa
gattttacaagttaaggctagaaaaagtaaaagcagggagaaaaggaaatctcaatgttgctactgagatactgcaggttgcaccctctcttcatatggttgaagtacgaaaagcaaaaggcgacaccctcgaatttcataagttctacaagaacctctccagaaccttaaaggatgttgtttggaaatcagatgatcttcaaaatcaactttcctagagtaacttgggagaggaggaatgggtgaactattttagcatcccattcttttgaatcagcattcccatttctagaggctggaaaagcagaaagcatgttcattgcatctgtaattagatgtgagtggccctgtaaactatgtttggtctccactagtgttgtaaatgctgctcttatttgtcagagaacccttgtgatagctcaagtgaagctgatcactcaatggggttttgtgtgtcaagtttttgtatgtaaatcagaatcttgtgaggaacaagtatattaattggttagcattattcattttcatttac

SEQ ID NO: 391839 - DNA, 574 bp, Oryza sativa
gctgaagcggttcctggcgaagcgcaaggccacccccgcctccgcgccggtcgtcgtacgtcgtccgtgctgcggcggcggaggaggagcagccgccggcgaagaaagcgaaggcggccgtggagaggcgcgaggattggctcgcgctgggaagccttggacacatgcactcgcgctgatgatcatcgccacgacgtcacgtctgcgatttgagaattgagagctcgatcgattgatcgccatgtggtcacccggtagccgatgctgcaaggccggtcgagttggaagatggttctcgtcgcattaacggccttgagttgatttcgccgagcctgaccttgagttgattaccatggaagtatgaagatttcgtgattagcagttaccctagttatcgcggcgtataattaagcacggtcactgaagcgcaatggccttgagtcggtagatcaggactagagaggggtgtatggatctgacaagtactgtagtatattgtatcccgtttgaattttttttcgattcctatggggactgaattgattaatgatatccaattccttcgactgttctg

SEQ ID NO: 391840 - DNA, 1011 bp, Oryza sativa
gtcctgttcacgggcaaagtgcacttggaagtgcattaggtctcatctctcgtcatggtagtatggtcagtcagggtaagccccttgtggatcctgttgtcaccctttttggaagtgtccatgagaagatgcctgagataatgggaagcatgcggagcacattgtttcctaactttggcagcatgtttagtgtggcggaacagcagcaagctaaaggtgattgggatgctgagagtcaacgggagggtgaagattatggatcagaccatggtggggatgacattgaagatagcctccaaagcccacttatttctcgtcaagcgacaagcgtggaaggaaaggagatcgctgcacctcatggcagtataatgggtgctgtgggaagaagtagtagtctcatgcagggcggggaggcagtaagcagcatgggcattggtgggggatggcagttggcttggaaatggactgagagagaaggtgcagatggcgaaaaagaaggtggcttccaacgtatctacttgcatgaagagggtgtgacaggtgatcgcaggggctctatactgtcattgcctggaggtgatgttcctcctggtggtgagttcgtccaggcagctgctcttgtcagccaacctgctctttactctaaggaattgatggagcaacgccttgctggccctgctatggtgcatccatctcaggcagttgctaaaggtccaaaatgggcagacttattcgaacctggagtgaagcatgctctgtttgttggcatagggatacaaatcctgcaacagtttgctggcattaatggagttctgtactacactccacaaattcttgagcaagctggtgttggggtcctccttgcaaacattggacttagctcctcatctgcatctatccttattagcggactgacaaccttgctgatgcttcccagcattggtattgctatgaggctcatggatatgtctggaagaaggtttcttgtgcttgcaacaatccctatcctga

SEQ ID NO: 391841 - DNA, 616 bp, Oryza sativa
ctcccctcctcggcccttccttcccttcttccctcggcggcggcggcggcggctagcaatcgcgaggaggagaagatggtgaagaagagcaagaagagcaagagcaagcgcgtgacgctgcggcagaagcacaaggtgctccgcaaggtgaaggagcaccaccgcaagaagcgcaaggaggccaagaaggaagggaagagccacaggaagaaggtcgagaaggaccccgggatccccaacgagtggcccttcaaggagcaggagctcaaggccctcgaggcccgccgcgcgcaggcgctccaggagctcgagctcaagaaggaggcgcgcaaggaaagggctaggaagagaaagcttggattgcttgaggacgaggacattgctaatttggcctctgcagcttctgctcagggcagcgagtttgcagagaaggatgcagcacaggagaatgcctcttagacgtggcttagagccaagatcattcagagagagccttctacaaggagcttgttaaagttattgaagcgtctgatgtcattcttgaggttctcgatgccagagatccactgggcactcgttgcattgacatggaaaagatggtcaggaaggctgatcc

SEQ ID NO: 391842 - DNA, 621 bp, Oryza sativa
gatctgcaaagaaggctggacaatgattcaaatgagaagaagatgctcgaagaacgtgctatcgaatttgaacaagttcgtaaggagctggagggttcaaggactgaggtcgcagaactacaagctacaatcaacaatctgaaagctgacctaggaagagctctggaagagaaatcacagctggagagccgtatcaatgatctggaacacaccaatcgcctgtaatttggaagaattctcgcaggagaaatcctcacttggtgccgagatcccaaaaactgaaagaagccaatgcttctcttgaaggcaagctgacatccacagagtcacagctccagcaactccacgccgagaaatcagaagcatccattagcagtgagaagcagatctccgatctgaatcaagccatcgccgatctcgaaacaaagcttgaactcctttcttcagagaaaactacagtcgataacaaggtggctagcttactgaccgatgtcacagcttcgtgatgagaagatcagggagatggacagccacctgcaccagctgcacctggagcatgtcaagctgattgcagaggcagatgccgtgacgaaggcggtgtcggagctgcgagcacgggtg

SEQ ID NO: 391843 - DNA, 535 bp, Oryza sativa
gtttgagacgccaggatgaaggacttggctggggtggggctctagttcgtggcggcgttcatgttccacttcgcctcctacatggtcatcccggcgatcaccgacgtgacgatggacgccgtctgccccggccgcgacgagtgctccgtcgtcatctacctcagcggcttccagagcgccatcacagggatgggggctcttgtggtgactcccatcgtggggaatttgtcggacaaatacggcaggaaggcgcctgatgaccacctgccggtgaccgtggccattctgccgttgtttatactggcctgcaaccgctccaaggtgtacttctacgtgtactacgtcgttaaggtcctcgccggcatctttctgcgagggcagcatgcattgcctcttgctcgcctacgtggccgaccaagtcggcgccaggcggcgagcggcggcgttcgggctcctctccggcgtgtcggcagcggggttcgtctccggaacactcaccgcgcggttcctccagacatcaaccaccttccaggtg

SEQ ID NO: 391844 - DNA, 460 bp, Oryza sativa
gaaaagacacacacagagagaaaccgcgtcacctcacctcgcctcgccgcagtgcgcgcagagtgtgtcaccaccaaccagccatggctctcgccgccgccgccgccgcccaccacctcgtcgcgcccgccgccgtgtcgccgtactactcggctcgcgtgtcgccggggttcctccgcctccacgacttcccccgatccgtcggcctggccgccaccgcggccccgaggattttttgccaatctatcaactcggctgatgtcttgggtgcttcttcaacgacatctgatgatgcaattccacagccagttgttctgatagatcaagactcagaccgtgatgcaaccatagtgcagctgagttttggagaccgtctgggggccactacttgacacgatgaaggcactcaaggacctgggccttgatgtgacgaagggaggtgtggcaactgaatcagctg

SEQ ID NO: 391845 - DNA, 1576 bp, Oryza sativa
cccacgcgtcccatttactgcagaaggtgaaggtgaaggaggaggcggccatggcgagggagcaggcgctgctgttgacggagatcgtgaaccgcggcgtggagccgtcggggccggacgccgggtcgccgacgttctcggtgcgggtgcggcggcggctgccggacttcctccagtcggtgaacctcaagtacgtgcggctcgggtaccactacctcatcagccacggcgtgtacctggccaccatcccggtcatcgtgctcgtctgcggcgccgaggtcggcagcctcagccgagacgagctgtggcgcaaggtctggggcgaggccacctacgacctcgccaccgtcctcgccttcctcgccgtcctcgccttcaccatctccgtctacatcatgtccaggcctaggcccgtctacctcatcgacttcgcctgctacaaaccagccgacgaactcaaggtgtcgaaggcggagttcatcgatctggcgaggaagtcgggcaagttcgacgaggatagcctggcgttccagtcgcggctgctggccaagtctggcatcggcgacgagtcctacatgccgcgctgcgtgttcgagccgggcaccaactgcgccaccatgaaggaaggccgcgccgaggcgtccgccgccatgttcgccgcgctggacgagctgttcgacaagtgccgcgtccgccccaaggacgtcggcgtgctcgtcgtcaactgcagcctcttcaacccgacgccgtcgctgtccgccatgatcgtcaaccactacaagatgcgcgggaacatcctcagctacaacctcggcggcatggggtgcagcgccggcgtcatcgcggtggacctcgcccgcgacatgctccaggccagcgcgcgggggctcgccgtcgtcgtcagcacggaggccgtctccttcacctggtacgccgggaagcgccgctccatgctcatccccaacgccttcttccgcgccggctgcgccgccgtgctgctctccaaccgccgcagggacttccaccgcgccaagtaccagctcgagcacatcgtgcgcacccacaagggcgccgacgaccgcagcttccggtcggtgtaccaggaggaggacgagcagcggatcaagggcctgtccatcagccgcgacctcgtggaggtcggcggccacgcgctcaagaccaacatcaccaccctgggcccgctcgtgcttccgttctcggagcagatcctcttcttcgccggcgtgctcttccgccacctgttcccgtccaagacctccgccccgccgccgccgtccgccgacggcgacgcctccgccgccgctccctacatcccggacttcaagcgcgcgttcgagcacttctgcatgcacgcggcgagccgcgacgtttgctggagcacctgcagggcaacctgggcctccgcgacggcgacctggaggcgtcgcgcgccgcgccccaccgcttcggcaacacgtcgagcagcagcatctggtacgagctggcgtacctggaggccaaggcccccttcccccgggaagcttttggactcccttcggtccggttaattcacact

SEQ ID NO: 391846 - DNA, 790 bp, Oryza sativa
  unsure (1)..(790): unsure at all n locations
gcagatcctcttcttcgccggcgtgctcttccgccacctgttcccgtccaagacctccgccccgccgccgccgtccgccgacggacgcctccgccgccgctccctacatcccggacttcaagcgcgcgttcgagcacttctgcatgcacgcggcgagccgggacgtgctggagcacctgcagggcaacctgggcctccgcgacggcgacctggaggcgtcgcgcgccgcgctccaccgcttcggcaacacgtcgagcagcagcatctggtacgagctggcgtacctggaggccaagggccgcgtccgccgcggcgaccgcgtgtggcagctcgccttcggctccgggttcaagtgcaacagcgccgtgtggcgcgccgtccgccgcgtgcgccgcccggcgcgcagcccgtggctggactgcgtcgagcagtacccggctcgcatgaacgcttaagctgcagtggtaagtatgcagaggctaatgaacggaaaattactgcaacgtcaaaagacgggatcggcatgcgatgccggttaaggttcaagcttgattaatttgtgttggtgtattagcaagtcggtttatgagccatagactaccataaaagttgtgcgagacatgtgtactgaaccagtgtacgcgagttcggtgatatgtgaacttatctacgtttgattctattatttatactgtcatatgctacttgaattaacctggtggctgtttattaagtgttgctgcaatggactgatagttgttcaagtnnnnnnnnnnnnnnnnnnnnnnnn

SEQ ID NO: 391847 - DNA, 682 bp, Oryza sativa
gccaccaagtggctctagtcgtctgcctaccgagggaaagagcttcagcaatggcccttctcgtcggttatcactcggcggagctgataatatgtctaaattgtctccaaatggtttattagcaaggagatctccatcttttcattcaagatcctctctttcttctagcagcagcttggtcctaaagcatgctaaaggcacttcaaagtcgtttgatggtggtacgaggtcattagacaggagcaagattaatgggaatggagctcatttacttaaccgttctactgatgctgtcagagattgtgaaactaatgatagttggaaaggaaatgcagatgagggaaccattgaaaatacaaatagcaacactgacgagagtaataaagaaactgcaaataacaagtcagctgagatggtatctggttttctttatgatatgttgcagaaggaggtaatttctttgagaaaggcatgccatgaaaaagatcagagtctaaaagataaagatgatgcgattgagatgcttgctaagaaagtagataccttaactaaagctatggaagtagaggcgaaaaaaatgaggcgggaggttgctgccatggagaaagaagttgcagctatgcgtgttgataaggaacaagaagtcaaagccaggcggctttggtagttctaaagggactgg

SEQ ID NO: 391848 - DNA, 1161 bp, Oryza sativa
  unsure (1)..(1161): unsure at all n locations
caggagtnagggcggcggcgactgggatggcgacggcgatgcagatctgccactaatggatgaagctcgacaaccactatctcgcaaagttccaatttcttcaagccgaattaatccctataggatgattataattatccggttggtggttttggggttcttcttccactaccgagtgatgcatcctgtgaatgatgcatttgctttgtggctcatctctgtaatatgtgaaatctggtttgctatgtcttggattcttgatcaatttccaaagtggcttcccatagagagggagacgtacctggaccgcttgtcactgaggtttgacaaggaaggtcagccatctcaacttgctccagtcgacttctttgtcagtacagttgatccatcgaaggaacctcccttagtcacagcaaacaccgtcctttccatcctctcggtggattacccagttgataaggtttcatgctatgtctctgatgatggtgctgcaatgctgacatttgaagcattatccgaaacatctgaatttgcaaagaaatgggttcctttctgcaaaaagtacagtattgaaccacgtgctccagagtggtacttccaacagaagatagactacctgaaggataaggtggcaccatactttgttagggagaggagagcaatgaagagagagtatgaggaattcaaggtgagaatcaatgcattggttgctaaagctcagaaagttcccgaggaaggttggacaatgcaagatggaactccctggcctggaaacaatgttcgcgatcaccctggaatgattcaggtcttccttggccaaagtggcggccatgacatcgaaggtaatgagctacctcgattggtgtatgtctcaagagaaaagaggccaggctataaccatcacaagaaggctggtgccatgaacgcattggtccgcgtctctgctgtactaactaatgctccatacatgctcaacttggattgtgatcattacatcaacaatagcaaggctataaaggaagcaatgtgttttatgatgggccctttggttgggaaagaaggtttgttatgtgcaattccctcaaggtttatggggattatccgtcatgatcgtacgccacaggacgtggcttcttcggtatcacatgaaggttggtggtt

SEQ ID NO: 391849 - DNA, 510 bp, Oryza sativa
ggaacaataaaaaaaatcccacggcgcgcaccatttcttcccacccgctgctgcttcctcgcctttccgataagaagcttcgccgtctcctcctcctctttcccttcctccgccgctccatcaaaaaatctccacaaggcttaagcagagggagggtgagggattagaaacaaacaacccttcggagaaaatcacgagaggcttcccgagggcaaagtctccgattcattcaggtccgactcgatcggcgatccgacgaagctcgagcaggtgagggagacggactcggactcggagcacggaaccggtatattagggaggctgaagagggagcttgagagggggtctagccttaagctcgaacgcggggtggttggttgtaccagcagcagcagggaatcatggactcggagcactggatctcgagcctcgccgccgcaagcggttctacgcggcgcagctcggtcacgtcgacgatatggcggggattggatggaggaggtggaagat

SEQ ID NO: 391850 - DNA, 447 bp, Oryza sativa
acaataaaccaagtttaagaaccttgatgtatgctttgcaagtttgtggatctaagtgaaacctcctgacaagtttaaggactgccggtgcattttactcaaaaaagaatgtgcagcaaaatcaacagcatgtgattagcttccattaactcggaaaggccacataatattctccatgcgactgcaagaatattgtcgcctcgatattcatgtccaacaaaatcaacagccatgtgattagtacagtatgagcatgtggcttttcaacgagctcagcattttccatgatattcccatctagtgctccttgtgtatttatgattcaatcgtaatcttcagaatgtttggacctatatgatgttagactgactgactctcctccagaaggtcagaaactccccaggtgatctgatatactcacaacttggacgtggcattcagcaaaat

SEQ ID NO: 391851 - DNA, 762 bp, Oryza sativa
gaaactagaaacaaagaaaactttaataatagcctaccaactaacactgtaacatccgtgtttcggacctgctcatcagcagatgccatacagtacatgatgaagctcatttcaggtgaaaccaatctagggatgttacgcaaacaatgcaagctcaagcatgacacacaagtaaaaccaaccattctgtagcactgcctgaagctagctgcttacaattggcagtcacggtttcatcatgcccagaggagcatgagaaacttctgactaaaacaaactttgttcaagcatcagcacacagcacaacacatgcccatcaaaggttgatgcccaagtggaagaaatgtgcagatcgaggaaagaaactaaaatttacctaaataatcgcatagttattttgtaacatttcttgggccgaggtaagctcgatcacaactttggacgagtaatcagtgtgcttgaagtctaactttgttggccatcaggtccttagaatgtagtgtttatagatttaacagctggaaccacctagcttttcgcagctcatccctggcagttgttctcatttttttcatgttacgaaggtaggtgctgcctgttcggcgaacaaaaatcttctcaagaggtaacccattagcaccaaagaggtctgcttacatatggactcttccatcatctttagagcatctaatattcaccacttcaagatttttgcaggcaaatgatctttcctttagtttgacaccaatatttacaacacaa

SEQ ID NO: 391852 - DNA, 624 bp, Oryza sativa
  unsure (1)..(624): unsure at all n locations
ggagcgtgtanctgngtgctcggtataanaagaaaaacagaggagtcgaaganaaaggatagcttcagtaaagcctagcaaagcgcccatcagaaaccctagcaggagccccgccgccgccgccgccgcccgccgtcgtcatcctccctctcgccctttcaggtccccagcccgccgcgccgcggatcgagtcgccgtgtgaagaaggccagcgtcaccatggcggacgaggagcaggtggagaggaaggaggaggtctccgagcttactccttttgacccaaccaagaaaaagaagaagaagaaggttgtgatccaagatccatctgatgaggtggataagttggcagagaacactgagagcttgacagtcgctgagactggtgagccaagctttacaggcatgaaaaagaagaagaagaagcatgtggagcatgatacatctcttactgaagctggagatggtgaagatgctatagatgatcaaatcggagaggatgaagaaggagaagggattgtgctnggaggtgcaactcgatacccttgggaaggcactgacagagattatacatatgaagagctgcttggcagagtatttaatatcctgcgtgagaataatcctgat

SEQ ID NO: 391853 - DNA, 687 bp, Oryza sativa
  unsure (1)..(687): unsure at all n locations
caccacctgcttcctccgcggctgcgtgcgccgcctccccaacccttcgtcctccccgccggccgccgctgagatccgacgcgccggagcggagtcgctgagattttgttcctgctggatttctgaaattttactggaggactagagatatcaagacaccaacaacaaactagtacaaagttttccttccagttaatctgttcctggatctccttgccatacgcgaagagtgggatactatgcagtaattggttaggaggtctttactgaaccataatggctgatactccaacttcccgaatgattcatcccttcagcaatataccgagccaaaacctgaagcagttccagtattctgataatccacagcacccttgccacccttataggggcaccttcagacacccacgttgtgccacatcattatggcctaaagtcacattcaccggatgctggttatgaaagccaggctactcctaacaagtacacattggactcctctgaaggtgctggttgtatgagacatgattctccttccagtcaaagtttcacaaccagaagtggtagccctctatctccaggggaggacagccactctggactcgactgatgggatctcctggaggcgctgtcttgtgtaatgaggattctaaaggacggaaacnnaaactgagggactctttagct

SEQ ID NO: 391854 - DNA, 462 bp, Oryza sativa
  unsure (1)..(462): unsure at all n locations
agaaggcgctgcagctgccggagtaccccaacgcggcggagtggaggcggtgctcaagacgatcgaggcgttcccgccgatcgtgttcgccaccggaggatacgccgccatgcagcgcgtggacgcagtggaccctcgatttcacccagcacaagcgagcagggcgacaggtacccgtgaattggcacacagggttgatgaagcccttggctttatgtctgctgctgggctaacagtggaccacccgttgatgacaagtactgatttctggacctcacatgagtgccttctcctaccctatgaacaatctctgacccgtcaggactccacaactggtcatttctacgactgctctgcccacatgctatgggtgggcgaacgcactcgccagctcgatggtgctcatgttgagttcctcaggggtgtggccaacctntttggcataaggtgagtgacaaaatg

SEQ ID NO: 391855 - DNA, 1444 bp, Oryza sativa
  unsure (1)..(1444): unsure at all n locations
tgggacctcttcatggagcagcttgacgataagatgacaacagatgatgtgtttctttcctttctaccgcttgctcacatccttgaccgcatgatcgaggagtttttctttcacaaaggagcctcagttggctattatcatggggattcgaatgccttgagagatgatctcatggagctaaagccaactctactagttggggtgcctcgagtgtctgaaaaaatttatgaaggtatctttgaaggccttatcagaactcagaccactcagaagattaattttcaatgctctgtataaccgcaaactggcaaacatgaaagcaggctgcacgcacaaaactgcttcaccttttgcagatatgttggctttccgcaaggtcaaagcaaggctttgggtggtcgtctttcggcctattaatctcggggtggggctccattaagtaatgagatcggagaggttcttgagagtaaccagctgcggcatactttatccaaggctatggtttaacagaaacactgggacctagcacggtctgttaccctgatgacatgtccctggttggaactgttggcgtggctgctacctatacggaattgcgattggaagaagtgcctgagatgggttacaatccacttggtactccttcccgtggtgaaatatgcgtccgaggaaacttcttaaccggatactataaaaatcctgagctcacgaatgaggtcatggctgatggatggtttcacacaggtgacattggagagatgaactcagatggaatcctgaaggtaattgaccgaaagaaaaatatattcaagttgtcacaaggggagtatgttgcagttgaatacctggagaaagtatatgttttccctccaaccgttgaagatgtctgggtatatggggacagcttcagatcaatgttagtggcagtagttaatccacatgaagagaacaccatgaagtgggcagaatcaaatggctgcaagggttcttttgctgaaatatgcaagtctgaaggccttaaagagcatatcctgaaagagctgcaatctgttgcagcaaagaacaagctacggggatttgagtatgtcaaaggtgtaatattggaccctattccttttgaccttgaaagggatttggtgactgcaacaatgaaaaagaaaagaaacaacatgctaaaatattacaagcctgagattgagaaagtataccaaaaactggaggaacagagggttgccgccaaatcaaagtaaagaaatatgttccctttgaacactaaatgaaaagctagaatgccattgtaaatttttcaatttttagataatggatatcgttccggcctctacatgtaaattttcagttgaactttggtactcaagattacatgaatgcaataaaatgtatatcgtgtgatgccttgtgtnnnnnnnnnnnnnnnnnnnnnnnn

SEQ ID NO: 391856 - DNA, 648 bp, Oryza sativa
  unsure (1)..(648): unsure at all n locations
gaaaaagtatatggttttcccnntccaaccgttnngaaagatgtctgnnggtataatgggggaacagcttcanngnatcaatnggttaagtgggcaagtaagttaaatnccaacatgaaaggagaacaccanctgaaagtggggcagaaaatcataaatgggctgcaaaggggtttctttttgctgaaantatgcaaagtgctgaaggcctctaaagaggcatatcctgaaagangctgcaatcatgttgcagcaaagaacaagctacggggatttgagtatgtccaaaagggttgtacatatttggaccctattttccttttttgaccttggaaaagggattttgggtgaactgcaaaccaaatgaaaaaaagaaaaagaaaacaaacatgctttaaaattattacaaaagccctgaagtattgagaannaagtatacccaaaaaacctggaaggaacaagagggttttgccagccaaaattcaaaagttaaagannnaatatgtngtcccttttgaaacacttaaaatgtaaaagcttagaatgccnnattgtaaatttttcaatttttagataatggatatcgttccggcctctacatgtaaattttcagttgaactttggtactcaagattacatgaatgcaat

SEQ ID NO: 391857 - DNA, 544 bp, Oryza sativa
ctagatctagatcgcgagcggacgcgcctttttctttgtattggaatcagtgcttgctgactaccataacattaaaagtttcggaggaagacaaagtatcacacaacatttaactttacaaactaaagactgttcaatacaagtcaatgttcttcagagaacagtttttgtatacactcacaaaggtctgcagacaattcttggccaaagtctctctcaagtgtggcagccaatatcaaccttctaacatgttcctctgtttgtagctaaaattctcccaagaattatccttgtgtgtgtgatcgtgttcagtcaagtgttttatgtcataagtcagtggcatgagatattgttcgttccgtaactcaagttttggaggcttgtgtctgacatatctgtcatccatctctgtggcccgccatcgtctccaataacattgtaggcataggatgaaagcccgacattctctccacatgagcttgcctctcccatgttatatagcctttgtgttcttgacagcaccacaaggtttggaaaatgttga

SEQ ID NO: 391858 - DNA, 652 bp, Oryza sativa
  unsure (1)..(652): unsure at all n locations
cgtccgccacgctgtccgccattttcttcgatcaaacacagcacacaggattggacgccgagacgaggaggaagaagaagcgagcgaagttgtgttggatcggagtggggaggagatgttgagggcggtggcgaggtgctgcgggcactggccgccgggggcggcggcggcggacgggatgctgtggcagacggagctgaggccgcacgcggcgggggagttctcgatggcggcggcgcaggcgaacctggccatggaggaccaggcgcaggtgctcgcctcccccgccgccacgctcgtcggcgtgtatgacgggcacggcggcgccgaacgccttcccgcttcctccgctcccgcctcttcccccatgtccaacgattcgagaaggagcaaggggggatgagcacggaggtgatccgtagggcgttcggcgcggcggaggaggagttcctgcagcaggtgaggcaggcatggcggccagcggccgaagatggcggccgtgggctcctgctgcctgctcggggctatctccggagacacgctctacgtggccaacctcggcgaactcccgcgccgtgcttcggccgccgcgtggttcgggggcggggtggccgttcgccgnagcggctcancggacgagcataacggcggc

SEQ ID NO: 391859 - DNA, 726 bp, Oryza sativa
  unsure (1)..(726): unsure at all n locations
caaacatttccagctcttgaaaagttcgtgtggatacgttgtggcatttgaaggatggcaatggcttctgctctgacgaactgttgggctatttctcgttcatctcagcgtggatccaagaataatagttctgatggttccttcatggtgccagctcggaaccacaatcggatcaacagaaagcacctcttgctccgagaaaaggatgcttcaactggttggcagatcaccaaagctgcaacagaaaattccaccaatgctgttcacaccccaatgaagactaaatggtgggaaaaagaacatgaaatcctgcaacatgaaaaacattgaatcacaagacgattttgacaagcagctcctgttggccagcgataagctcaccgtggtgcacttcttttcccctagttgtggagcttgcaaggccctacaccctaaggtatgtcaattggctggcatgcatccggaactgcagtttcttatggtcaactccaatgaacaaaaggagatgtgccgcaggcctcaatgttcatgtattgccaatgttccgcttttaccagaggtgcagaaggccgtatctgtagcttcagctgtacaatttcaactatttataagatcaaagatgcattgaaaaggcatggggttcagctagagaatcttggaccagataagggcttggagaaatcagaacttcagaactctgatattgacgcttcatatanacatgga

SEQ ID NO: 391860 - DNA, 911 bp, Oryza sativa
ccgatcctgagttttgatcaggtggtccaggagggggagaagcgaggggtcagcgggcccagcttgcccgcggatatgattgaggccgcaaagagcgtcgggattcagaagctactgctgctgagatacttggacatgcaggcatcggcttggccgttgggtccagccattaggtcctgctcacttctccggaacaggatgctagttgacccttcatttctctttaaaatcgggactgagatagtcattgacacatgttgcgcgacattcgcggaggtacagaagagaggggaggagttttggtcggagttcgagttgtatgcggcggatatgttggtaggcgtagttgttaatgtagctttagttgggatgttggcgccatatgctcgatttggtgggggatctgcatctccaggtcttcttgggcgtgttaggcatgcttatgactctctcccaagcagcgtgtttgaagctgaaaggccaggatatagtttttccattcaacaacggataggaacatacttttttaagggtattttatatggtacagttggattcttttgtggtcttgtgggtcaaggaattgcgaacttgataatgactgccaaaaggagtgtaaagaagtcagatgatgatgtacctgtcccacctctgctcaaaacttctgcattgtggggtgcattccttggtgtgtcttccaacacccgttatcagattattaatgggcttgagcgtgtggttgaggcttcacctgttgccaagcgtgtcccagctgtttctctggcattcactgtcggtgtgcgctttgcaaataacatttatggaggaatgcagtttgtggactgggctagaatgaccgggtgtcaatgaagggaaggcattcttattttcatgttatcattcacagcgat

SEQ ID NO: 391861 - DNA, 594 bp, Oryza sativa
cgtccgcccacgcgtccgagagatggagcttcgtgagctcctcagtttctacaagttccctggtgatgagattccaatcatccgtggatccgccttgtcagccttacaggggactaatgatgagattggaaagaatgccattttgaaactaatggatgcagttgacgagtatatccctgatcctgtgaggcagcttgataagtctttcttgatgccgatagaagatgttttctctatccagggccgtggaactgttgtgacagggcgtgttgagcaggggacaatcaaaactggtgaagatgttgagatcctaggtttgactccagtgagtaaaatatctgatttgccttttattacttaagtccagtaatgtggtttataccgccttctagacgtaccaaatttattcttgagagtatgacctgcttggttctgaagattcgagaatccacaatctttgtaggtatatcttacccacgatttttttacaccatatgcacatttgacttcacgcaaatattcgaatggaatatgtatattgtataatgggttaagctaaaatatttttttaccactattggttttgaaagaaaa

SEQ ID NO: 391862 - DNA, 1605 bp, Oryza sativa
  unsure (1)..(1605): unsure at all n locations
gacgacattaacaaacgactagctgaattacatttacaagaaaaggaagctgaatcaaagaacaggaaattagaagaaagagagaaaaaaatagctgaaagggaagaaaaagtcagtgcaagggaaaaagttgggcttcagaagcttcttgaagatcataatgtgaagcttgaatccaaaagacgagattttgatttacaactggagaatgagaagaaatcatttgatgcaatgttggtacagaaggaagctgatttggtgcagagggaaaaagatgtcagatcttcggaggagaagctttcgaaaaaagaacaagtattaaatgaaagtaagaaaaaattggaagaatggcaaaatgatcttgatacaaaatcgaatgctctgaagaagtgggaggaatcactacaaaatgatgagaaacagttatcggaacaaaagctgcagattgaaaatgaaagaaagcaggctgagatgtacaaattggagcttgagagtttgaaagccacagtggttgctgaaaaggagaaaatattgcaagagcagaacaatttgaaacttacagaggaagagaggcaagagcacatcatgcttacagcacaactgaagaaagagattgatgaatacagaatgcgaagcaactctctttctgaggaaactgaagatttgaggaagcagcgtcagaaatttgaagaagagtgggagcagctggatgaaaaaagaactcacttggaagaggaagccaagaaactgaacaatgaaaagaagaatctagaaaggtggcatgacaatgaagaaaaaaggctaaaggatagagaggatgagttggacataaaatacaaggagcagggggaaaatctcgcacttaaggaaaaatccttgatcgataatatagaccatcagcgtttggaaaatgaggaattgctaaagagagagcgtgctgatcttcaacgaaatttgcagctccatcggcatgaattggagatggagatggagaaaaaacaagcgagcaaagagagagaacttggagagaaggaaaatgagttaaataggaagatggactttgtagaaaatgagctcaaacgtgcagccgaattgaatgaatcaaagattcagaagatactattggagaaaaaacagctgcagaaggaaaaggaagttcttgtggaggataggcaaaaactggaaactgacaaggcagatatcagaagggacattgatagtctgaacactctcagcaagagtctgaaagagcgtagagaagcatataacagggacaggaataacctcatcgatatatttgaaaagtacaaggtgtgcaaaaattgcggggttattatttttgagggcttggatgccctagctcttaaagatagcactgatatagaatatcctagtcttgctgttgaggcggatgatcgttcccccaatcctgacaccttagcccaagagaccggagcacttgttaattcaggtggccgtttatcattgttgcagaagtnttcaaggattttcaagttttctcctaggaggaggctgancaatcatctgaccagcaagcagttaggacacagctttngtgcaagctagaggagctcccagacgtga

SEQ ID NO: 391863 - DNA, 492 bp, Oryza sativa
ctgtgtcctgtagagaacagtcaggtcactcggcggagcagaagaaaaagttagatcagaggagagctcagagctcaaagagttgggaagccatggcgggagggcagctcaacgtgctgagcacgctcgaccaggcgaagacgcaatggtaccacttcatggcgatcgtcatcgccggcatgggcttcttcaccgacgcctacgacctcttctgcatttccctcgtcaccaagctgctcggccgcatctactacaccgacgattccaaggacacccccggcgcgctcccgcccaacgtgtcggccgccgtcaccggcgtcgcgctctgcggcacgctcgccggccagcttttcttcggatggctcggcgacaagctcggacgcaagagcgtgtatggtttcacgctgattctgatggtcgtgtgctcggtcgcgtccgggctctcgttcgggagctcggacagggcgtcgtgtctacgctctgcttctttcg

SEQ ID NO: 391864 - DNA, 365 bp, Oryza sativa
catttttcctctactactagtaatactcttctctcttctcacagggagtgtgtgtgcctccatgacagtgctcgctctccctgagccgagagagtaaaggctctctccttcacacacctaccgcctactctcccactcttcttcccaccccactcgtgtgcgcgccactgccgccggcgatggcgccaatgccggcgccggccgtggctctggcggttctggtgctcctctccgccgttccggggtacttctccgacgacctcaacaccgacgcgcaggcgttgcaggcgctgcggtcggcgtgagggaagtcggcgctgccgtcgtggaacagcagcacgccgacctgcattgggcaggggtga

SEQ ID NO: 391865 - DNA, 355 bp, Oryza sativa
  unsure (1)..(355): unsure at all n locations
gtccggcgagtaataataattaaatggctgacaaaatttctaaagccgcccccgttcttggacgaaggattaaattccattatcgaaaaaaaaaaagaggaagacgaaatggaaggccgagatgatcaaaatccatggaggaagctagcatgcgaggtgaaagattggaagtaggcgtaatacaagcatgaggcgatcatccgccatcgagattacggagacgtaaattcagcagctgcacagtttgttcgacgtcgtcatcgttgtgttggtgcgagtagcaattttatagcagcagcagcagctatgtcgatgtgggcggcctcgncaggccgcggcgagcgtgcctccggcg

SEQ ID NO: 391866 - DNA, 239 bp, Oryza sativa
ttttttttttttttttagacaaaaagaactgcctttttttgtttttttttccattcatgtgacacctatctacaagcaaagactgaaacttggactcattcaaccatatagcctgatgacacatactacttgggacaacatgttacacttccagtttcagagacagttcaggaacaaatcaaacaacaaacatatcaagcacataatggcccccttcttccgacgcacttagcatcgtc

SEQ ID NO: 391867 - DNA, 531 bp, Oryza sativa
cccacgcgtccggcaagagctgcagcgaagccatggagatcgagctctcacccgtgctcctcctcctccccttcctcctcctcggcttcctctacctcaccggcggcgtgctccgctccggcgggaacgcgcggcggcgtctcgctccggctcctcggggactgcccgtcatcggcaacctgcaccaggtgggcgcgctgcctcaccgcgccctgcgcgcgctcgccgcggccaccggcgcgcctcacctgctgcgcctccgcctcggccatgtcaccgcgctcgtggcctcgtcgccggccgccgccgccgcggtcatgcgcgagcacgaccacgtgttcgcgacgcggccctacttccgcacggcggagatcctcacctacgggttcaaggacctcgtcttcgcgccctacggcgagcactggcgccacgcccgccgcctctgctccgagcacgtctctcagcgccgccgctcccaccgatacggacccatgagggagcaggaggtcgcgctcctcgtcaacgccatca

SEQ ID NO: 391868 - DNA, 407 bp, Oryza sativa
tttttttacaacagtgctgtttgctcaattggttagctcaaaactaatttacaattcaattgaacgattttacatgccaccagtaaacagcccactccatcctctctccctccacaatgacaagcagggagcatgattttttttttgccccatcgtatcctatataggaaatgtaccattactatgcaatttttttggtagtttggggaagaaaatcaagctagagagagaaaaaggatggagtgggctgtttactggtggcatgtaaaatcggtcaattgaattgtaaattagttttgagctaaccaattgagcaaacagcactgttgtagacacatggtactctggactgtgaaatagctgccgatacatatatacagggggggcacagtgattaatctgagatc

SEQ ID NO: 391869 - DNA, 702 bp, Oryza sativa
cgggcttccctcgccgccgccgccgccgccgccgccgccgccgcagtgaccacctcgctcgccggcggactcgattggctcaccggcggcgacggaggaggaggaggcatctgcggcgttcggcgcgaccccggagatggaggggttcctctgcgaccgcctgctcgacgcggcgcagcccatcgccgagcgcttccgggcgctcttctccctccgcaacctccgcggcgacgcccctcgccgcgccctcctccaagctgcaagggactcttcaaacttgcttgcccatgaggctgcatttgcactaggacaaatgcaagatgctgaggctatccctgcattagaggcagttctcaaagatctttcacttcatccaattgtccgacacgaggctgcggaagcgcttggagctattggcctggaaaagagcatttccctgctggaggagagtttagctgttgatcctgccgcggaagttcaagaaacatgtgagctggctattagacggatagaagagcaaaagaatactagtggagttgaaagtgcaactgtttcaccttttctctcagttgatccagcactgcctgcaaagcaaggacttccagtagaacaactaagggagcttcttctcaacgagcaaagaagcatgtatgaacgttatgcagctctctttgcactaaggaatgacagtggagatgctgc

SEQ ID NO: 391870 - DNA, 706 bp, Oryza sativa
ctatgcttgcgtgggaagatccatatggcgcgggggcggacgcgggggcttcactagataactattctatactgggaagacttgttggagaagatgcctttgtccgaattgcccctgctgtggcaggtgtagctgatgtttcaacggctcattatctcttcagggcccttgtcggttctgaaaaggggctttctttagatatagggacaacataccttggtgaacttctgaaagttcatcatgggaggcaaacacataaaagtggagatcattttttgtccgatgagcaagtcctatgcataggctctagtagaaaaagacctgttctgaaatgggaagaaaacactgcgtggcctggacacttaaccttgaccaacaaggcactctattttgaggccattggactgacaagtaccaataaaccattgaagcttgaccttacagatcgtaattcaagggttgagaaagcaaaggttggaccatttggatccagattgttcgactctgccgtatctgtttcatctggttcagtgtcaaatgagtggacattggagtttgttgattttggtggagagatgagacgagatgtatggctcgcattcattagtgaaatcatttctgtgtataggttcattaatgaatatggaccaagggatgatgatccagcaattcatcatgtatatggtgcccacagagcaaggaaaag

SEQ ID NO: 391871 - DNA, 800 bp, Oryza sativa
  unsure (1)..(800): unsure at all n locations
atttagacgaaatgcattgtatctatacaagtggaatgttgccaacgggtcagtcggtcagataacagcaatagctgacaacggcataccattatctgaacaagatgtgctctttgttcgagtcgtctggattgatacttcaggtcaacataggtgccgcgttgtgccagccggaagattggatgaaattgctaggaaaaagggtattggtctgacttttgcatcgatgggaatgacttcatttactgatggcccagcagatggaacaaaccttactggtgtaggagagatcaggcttatgccggatatgtcaacactattgaggcttccatgacgcgaagaaatggtaatggctgaaatgcatataaggcctggggaagcctgggaatactgtcccagaaataccttgagaaaaggcacaaaagttctgctagatgagtttaatgtgacaatgatggcgggttttgagaatgaatttttcctacgtaaaaaagtagtaagtggtgaaaaggagctgtgggtcccatttgacaataccccctactgctcaactacagcattcgatggtgcatcatctgtgttgcaagaagtatatacttctcttaaagcggcggaaattgtggttgagcagctgcatgctgaagctggaaaagggcagtttgagatagccttgaagtatgtgttgtgcactcttgctgctgacaaactgatatatgcccgtgagattattaaatcagttgctcgaaagcatgggctacttgcaacttttctnnnnnancctgannnnnntgatattggat

SEQ ID NO: 391872 - DNA, 480 bp, Oryza sativa
ctatatctgcgagcggccgaccttgtgtttttgggctgacaccaaatttattgacaccctggcctacacaacaaggccagcctgtgaattccaggataccattgtgatatgctggtttttttttattgggaatgctctcacaagatggattgggatatacagggtgactcaatcataatatgtgttattttatatgaccaaaattgacagtagtatggagagactctctaagacttatcccctctaccaaaaaaaaatgtttttttcttacagattgaatgaacaaatcttaactgtacaagcaaacacttcattgtgcagagaacccctctagacttcctcattgacaaaccagcatagattgttccatccatgagcctcaaagctggtagcacaagaagagtggtgattcttttgtacacctatttggaaagaatttggaaggaagatggtgacaaaagttggatttttctttggatt

SEQ ID NO: 391873 - DNA, 520 bp, Oryza sativa
gacatcacccgtgcgaaagagctcctgggctggaagcccaaggttcccctgcgtgagggccttcccttcatggttaccgacttccgcaaacgcatctttggcgaccaggaagcctaatctgcagcagctggtggcatgtattaaatttcaacatgacaacggcacacaactcattaaaatcctataacttgtactttatagtaactacatgtggagaagttaaatcgggtagaaatacttggaaaggaaattggtgccttggttctttggttgcttcatacctcacggacaaaatggccatggctgaatacatagctagttctttggacacatggggatgctactaatactatcaatctatcataggcactactgtaagctactgtcttttttggtcttgctcatagaagccatatggtgttatacatgtaatctttattggaaactcgatatatgtttcagtatgaacagaacattccacttgcttacatgaagcatctttttaaacttttttttgacc

SEQ ID NO: 391874 - DNA, 305 bp, Oryza sativa
cccacgctgtccgcccacgcgtccgcccacgcgtccgcggacgcgtgggttaaaatcctataacttgtactttatagtaactacatgtggagaagttaaatcgggtagaaatacttggaaaggaaattggtgccttggttctttggttgcttcatacctcacggtcataatggccatggggggggtgcatagctagttctttggacacatggggatgctactaatactatcaatctatcataggcactactggaagctactgtcttttttggtcttgctcataaaaagcatatggtggtatacat

SEQ ID NO: 391875 - DNA, 580 bp, Oryza sativa
tttttttttttaagctaacggaacgtttattcacacaatggtgttcttatctgataaggggaccaaactgtcatgacagtgcggtaacttcagttatcttaacacaaacagcagacagcatgagagcaacacaacatcataaagttcttatcagacatgtgtcatagtaacccaacataatcacacaatggacaacctttcagctcaccacaccataatgatacattatgggagtagcattttatatgtacatgtctagaagttcatcctacaaaggggggcagcagaagaagaaatagacaagatgaaaatgagaaatggtgttcgccattggacgtgatgagatgaaccaagtcggcgtatgatacacctctttctttagatcggcgggatgttcgaaaacgagaagcccttgtaccctttgtaagcatagtaggcaattcttgtgtagtagaacccagggatgaacatcacaatacccagaatcatgaagaagattccgtgcgcgcggtcgccgccgacgttgttggcggccatgaggacgccaccgatggcgccgagcgcgccgaacgcgaggagc

SEQ ID NO: 391876 - DNA, 436 bp, Oryza sativa
ttttcactcactcactcacactgaactcctatggcctccgccgtcgtagccaagccaccggccgccgctccggcgagccgccgccgatgcttcgtcttcgtagagcgcgccgccgccgccgccgtcggcgtcaacgcggcgatcgctgccgtcgatgaccaccgcccagttccggccgcggccgccgccgccatggacgacgtcgtcggccgcgtcgcgcggcctgcgcgccccagcgcgcgcgccatcatggaggggacgcacaagcagatcagctccggcggcgcctcgggcggctactgcaccgtgccgtggtgcagcatctgcaccgggaataacccgttcgccattgccgagttcttgctgtgctgcaacctctgcggcgtccctctcgccggccgccccagcttcatctacattggagagaaggcgttct

SEQ ID NO: 391877 - DNA, 727 bp, Oryza sativa
  unsure (1)..(727): unsure at all n locations
gagggcgccgtggtctgcaacgtcgagcaccacgtcggcgaccgcggcgtcttcgccagggcgtccggcgactacgccatcgtcatcagccacaaccccgataacggcacatccaggatcaagctcccctctggtgccaagaagattgtccccagcagctgccgtgccatgatcggtcaggttgctggtggtggcaggactgagaagccgatgctcaaggctggaaacgcctaccacaagtaccgcgtgaagaggaactgctggcctaaggtgcgtggtgtggccatgaaccccgttgagcatccccacggaggaggtaaccaccagcacattggtcacgcctccaccgtccgccgtgatgcacctcctggccagaaggttggtctcatcgctgcaaggaggactggtcgtctcagaggccaggccgccgctaccgctgccaaggccgacaaggccacttagagtgttacttattgttgctactatccatattcgctaccatgcttatcatcgctagattaaaggacatgtattccagtatggtcgtgctttttgcttggtactctggtcacatttgtgatgaatgttcgcagttttcgtggtcatggtctggattctacattccacctaaagaagtttttacctggttatttaatcctagagttgttgaattagctcatggtaattgtaagtannnnnnnnnnnnnnnnnnnnnnnnnnnnnnnnn

SEQ ID NO: 391878 - DNA, 421 bp, Oryza sativa
atttcgagtgctcgagttcctcaactcccagtgcaggtcttaacccttgaggctactaatatagacatcagaaaaccttaccgtaacggttcttgctccagaagcgtctggttcttcttcagtggtatccttgaactcagctccaaccacaccaaatagttcgtatgacaatcttaatgagtctgtgagaagatctggcttgggtaaacatcgagctggttttcgaagaatgaattcagtccttgctggctcaccaaaagaaagtgacaatggaggaaatagaattagcacttctggaggctgtactcatctgtggttgcagagtgcggttcctttagggttgtattcctgcacgttcaagcaccaccgtcaagcttgagctacttccattaacggatgggatcattacactggatacact

SEQ ID NO: 391879 - DNA, 632 bp, Oryza sativa
ccgcgtcgcgccgtcgatccgacgccgatgcgggggccggcgccggcgacgacggcaggcgcgggggggaaggtgacgccgaacctggcgatggacgcggaggggacgcggctgctcaacctcaccgtgctgcagcgcctcgaccccgccgtcgaggacatcctcatcaccgccgcccacgtcacgctctacgacttcaacatcgagctcaaccagtggagccggaaggacgtcgagggatcgctgttcgtggtgaagaggaacaagcagccgaggttccagttcatcgtcatgaacaggcgtaacaccgataatctcgtggaggatctattgagtgactttgaatttgaacttcagcctccgtatttgttataccgaaatgctgcacaagaagtaaacggtatttggttttataaccaacaagactgtgatgctggtgcaggtgtttttggaaggatattgaatgcttacgccaaagtgcctccaaaagcccaaagtaccctccacaaaaagtgagtttgaggaattggaagctgttcctacatccgctgctatagatggcccccttgaaccttcttcgtcgtccactgttctagtttctaatgcccctgatgaatcattgactgattatt

SEQ ID NO: 391880 - DNA, 490 bp, Oryza sativa
tccggtgcgtgccacgtaccactactaccgtcggcggaaaaacaattgggatttgggggccccggccgttagcgcgtactgtgccacgtgggatgctgacaagcccctggaatggcgccagaagtatggatggaccgccttctgtgggcccgttggtcccactggtcaggatgcatgtggcaaatgtctctcggtgacgaacacggcgacaggggatcagatcacggcgaggatcgtggaccagtgcgccaatggggggctggatttagactgggacaccgtcttctccaagatcgacagcgacggtcaaggctaccagaatggccacctcatcgtcgactaccagttcgtcgactgcggcgataactagcagctaatttaaccactcttataaacttccctacatatatatacacatttcggacagaggagtaattaatatatctctgcctgatgactgaataaagtggctggtgaataattgtaatgc

SEQ ID NO: 391881 - DNA, 470 bp, Oryza sativa
cgctcaccgcaagctctcccctgtacccacccaccgccaccgcggctactaccccgccgccgctatcgccgccgccatcacgagctactagtagctaccgggctatcgccgccgcttgccctgatgccgcagcaggaggtcgccgaccagatcgccgccgcggcggcggagcggggcctgcagaggagcggctcggccagccgcctcaacgcgggggcgccggagttcgtgccgcgggtcgccgcccccgtggtgccgccgccgccgccgccggtgatccgcgtgttcgccgcggcgcctcccccgccgcgggcggcctttctttcgcgccgccgccgccgcatcaccggccgtacgagtactacgcgcctgtgaggggcggtcggttcgccgacgccgccgtcgtcgaggagcatgaggcggaagtggacccggatgcgacggatgcggcggagccactggtcgacggg

SEQ ID NO: 391882 - DNA, 423 bp, Oryza sativa
  unsure (1)..(423): unsure at all n locations
gctcgaacggtggccgagcgaaccaaaaaaaaaaagaaaggaaaaaaaaaaacagcgcccccccccgcgtccccacacccgtatcgatcgaatccgcgcgagtttaatcccggaaaaatcgcagaaaaattcagagtggagtgttgattcgtccgatacccatccatcatcgtgtccctgtctgtcctgaggtgtagtttggtttccgcttctgtgttggggcttgaaaccctaggaatggcggaggttgaggtggcggcggcggcggcggcggcggagggggtgctgcacaggaggatcgagttccacctcgcgaggaggtcgcactcggtggtggcggtcgggggaggcgggttccggatggagacgctgaaccccgacgcgggtgacagagcggcggcgggggcggcgcanggggtgggg

SEQ ID NO: 391883 - DNA, 592 bp, Oryza sativa
cccacgcgtccgcccacgcgtccgtgcctttgccgatcgtggtaagggcagagggagggagagagcggcggcggcgacgccgaaaacattcttcaggcagggcgagaaggtcgtcggccatgtcaacgaccttctcggacttcgatccgatcactgagcgccgccatgtcgagaggcagaggcaagagcgcaggcgcgtcatggttgcagccggcgccgcgtcggtcattcttatcatcatcgtcatgggcggcgcggccgtcgcctacaacgcgagcttcggtgatggtggctcctcttcctcctccggttcagcgtcaggtggcggcgcgcagcccagcctgcacggcgtgtccaagatcatcaaggcgatgtgcgcgcagacggactacaaggacacctgcgagaagagcctcgccaaggccgccgcgaacgccagcgcgtcgtcgtcgtcgtcgtcgcccaaggacgtcgtgcgcgtctccgtggccgtgatcggcgacgccatcgagaaggcgttcgacatgtcgagcgcgatcgtcagcgacgacccgcgggtcaaggccgccgtcgcggattgcatggagatcta

SEQ ID NO: 391884 - DNA, 613 bp, Oryza sativa
  unsure (1)..(613): unsure at all n locations
ttctcggctgaacaggggaggcggcgagcagagcatgggagaggaggggatcctgcagggagggagaagttatctggcaatttcagggtgttttgagttaaaggaagttaaaggaaatttgatagtgatagtgttgcaatttgggttttatcaaatcagctatggactcagtggtgttggagtgtggcgacatctccgcttcccaggaagaactccttgcccactcctcattcctcaatggtggtgatgatggtgaggtcttcagcacacctcccacaactcaagaggacgccatcaccatgtgcaccctccccttcacccagtcccagtccccagcaccagcaccattgccatcaccagcagccgtgtcgcgcaccacccctggatgcagctcctcagaggacaaccgagacgatgagatgagcgatattgtcaagcagcggcgcaggcctagggtttgcacaagaaaggtgaggtggggtgccaagatcaggaccccaaccccaagcccagatcgcaccacctntgaagtggagaacaaggatggtgatcctctgtacaaggcagttctcattattccccacagggatagcactcctgccattcctatgga

SEQ ID NO: 391885 - DNA, 451 bp, Oryza sativa
aacagctatgacgtactacgcgttcggtcctctcgctcttcgctactctgtcgtgttcttctcttgtgcaatggatctatggcccaactatttgatccagccacaaaccaatggcaaactcatcgacaaggaagctttagggagtgtagatttgagagactacaagcatttgagcctcttcagaatgtgaggtcggaagctggtgtgaccgagtactttgatgagacgaatgaattgtttcagtgcacaggtacatttgtcatccgacgtgttattcaacctcaaggccttctaatacctcgatacgccaatactcctggcatggtctacatcatccaaggaagaggttctatgggtctaaccttccctggatgccccgcaacttaccagcagcaatcccaacagtttttgtttcaaggcgaaagtcagagccaaaagtttatagatgagc

SEQ ID NO: 391886 - DNA, 687 bp, Oryza sativa
  unsure (1)..(687): unsure at all n locations
cgactacgaccagttacggctgcntcaacccgctttcaanacccctcttcctcccgnccataactccctcctcccaggccaaagtctcctccctccagagcaatacccctgggctcgccatcatgtacgccgacttctactccccactctacgacatgggcgaatccccctccaactacgggtttagcacgaatttgagggcgtgctgcggggcgggaggagggaagtacaactaccagaacggcgcgaggtgcggcatgtcgggagcctacgcgtgctccaacccgtcgtcgtcgttgagctgggacggcatccatctcacggaggcggcgtacaagcagatcgccgacgggtgggtcaacgggccctactgccacccgccgatcatgccctagatcatcgccggcggcggcgacggcggccggaggatggccggctagctgctgctgatttgatttgtttagcagaagaagagaagaaaaatggatagcaagaggaagaagaagacatcttgcgatcgactgggaaatgaataagatggtgattagttgattttcgttgtgggtggttaatttgtttttgttttaggtaatgcacatttgtgtagtatgtatgagattgggaggcaatttaattatgtgttgcaattaattaattaaatcttagtaattaaaaaaaaaaaaaaaa

SEQ ID NO: 391887 - DNA, 635 bp, Oryza sativa
cactttagagctttctctttctgtgtgtagtgtgtgcaactaggaggcttgttccatactagtttgctaggtcatggaaaagagcgagattttcgtaggagcacactcatatgcagctatatgtgcttttacactcatcataggatggttagctcactgggtatacagatggataaatcctccatgcaatgggaggcttcctccgggctcaatgggcttccctattgttggtgagaccttccaatttttcagaacaagtccatcaatagacatgccaatttactacaagcgaagactggagaggtatggacctatattcaaaactaacataggaggccagcacgtggtcatatcccttgatcccgaggtgaaccagttcatatttcaacaagaggggaagttgttccaatcctggtttccagaaaccacactaaacatctttggaaagaagacactcaccacgtataatagaactgctcacaagttgatccggagcttcgtatgcaagctctatggccctgaaaacgtgaaaaaatcactcctgccagaactagagaactccatgagggaaagctcggcgtcatggataggaaaacctagtgtcgaggtgaatgatggcgtgtcaaatatgatct

SEQ ID NO: 391888 - DNA, 487 bp, Oryza sativa
  unsure (1)..(487): unsure at all n locations
agngaaacactataccatgattacccaacgcgnaattaccctcactaaaggaacaaaactggagctccacccgntggcggccgcgatccgtccggcacgaacgggttcggccgcctcgtctggtccagcgaccaccacgtcgtctccagcccgatcgccgtgacatggacctgaccgtcgtcgcgctcatagctagatcttctggatgatccatcaatggcgggcgcaagagattatccgggataattagcgtgtaatctgccgattagtgtggcgaagtatcgtttcaatttcttagctccagccttgtttagttgttcgaactgtggcatagcgaggaagtgagtgagtgagtgagagtgatccgagttagctccactcctaacaggagtccaaaaaaattaaaggataatgaatggaccagcaaagcaagtggttgctcgtagtaatacagatcaatctcaggtgatttatatctgcatttcgt

SEQ ID NO: 391889 - DNA, 475 bp, Oryza sativa
gttgctactctgcctccatatcttcctttcaacaaccgaaattgtatatccagtgcttgtgattcttaagtgtgattctgcagttttgtctggctctttgttgatatttattgcctgtattgtttggctgaagcttgtatcttttgcacatacaaaccatgatataaggcaactgaccatgggcggcaagaaggttgataatgaactaagcacagttgacatggataatttacaacctccaactttagggaatctaatatacttcatgatggctcctacactctgttatcagccaagctatccccgaacttcatgtgttagaaaaggttggctgattcgtcaaattattctgtacttgatctttactggtcttcaaggcttcattattgagcaatacataaatccaattgttgggaattctcagcatccattgaaaggaggactcctaaatgcctgaaagaacgttttgaaactc

SEQ ID NO: 391890 - DNA, 511 bp, Oryza sativa
  unsure (1)..(511): unsure at all n locations
cggacgcgtgggactcgatcggaggagaccatggcgacggcgaggctccgatccgcctcctccctccgcggggtcctcctccgccactgctccgtgggaaccacctcgccgccgcaagttttctcccgcgtctcagatcttcaggctcctggatgtattgcatggaagcatttctcaacattcaagcctaatcctcttccaaaacttgatggccttggttcagtcacttgtttgtacagtcaggcaagatgggcttctcaagctgctgctgttaaagaaactgaaaatagtggcagcaagataagcattgggccaaaatccaagcagatcaaggaagatgacaaagatgacaggctagtttaccagggacctatatcatcgaccataaggaaaagtgaggcttctttctctttccacctgctgnctttntnngtcgtttggccctnnnataacatttatgacattcnanatatgaatgtaattctaatggnncttttnnattnantgtatt

SEQ ID NO: 391891 - DNA, 394 bp, Oryza sativa
ccaagaaaatcaatctcagtatcctcagttgttcacagagcagtcgggtttaattggacattatcttctcaaacagagaaatgtccatcactagagagtacaccattaaagaatcacaagttcatcctcaaaccaataactattaattacagacttgagcacaaggggcttacaaatataacaaaatgccctgcacataacccatacaagctaacaatgaaatgaaccgaagtacattcgaaattccgaacgcatgtcatattatgtcatggggggtgctaccaagggagcagatgcaggaagaacagagaaaccaatgtctccggggactggacggaatgacgcgtttctctctaggttctcccatataagctttctccgctcctcagatgca

SEQ ID NO: 391892 - DNA, 460 bp, Oryza sativa
  unsure (1)..(460): unsure at all n locations
gtaaatcaacagactacactttgttaagtccgcctcccaaagaaattttgctaccttctgtccacacctctaaacaaaaccacctatgatagctaaaaaaataccaatccgaattaagataatcgcgtcgcccgcctccatcttctcaaattgctttttgcccacataattagtcagagtgatcagctgaatgcttttcccactcagcagtgctctaaaatgttactgacaaattcattttgccaaacaaatttagttcatttacattccagaaatgtatatgtcctatcagttgaacatacttgcagggattattccttgagtccttgtctccttgaagttagttgttattgggccaatgttgaattattcagtggttttgctgaattttcatgctttattgctctgcaaaccatggttcctgatttctactctggngtactattttngggtcagactg

SEQ ID NO: 391893 - DNA, 484 bp, Oryza sativa
gtctaaagtcaaaacatcttataacatgaacggagggagtataagacaagctttgaactcttagcttgtaatgaacctatacaattacaaaaccactcatatatattgactcatatgtgctaattcatttaaaaccgacaaattcttcctcctccgtggaatgaaaatatatggaatcaacacctttgagtaacttgtagtcggtaagtacacggtaagcgcaattaagatcgtgtgcaagaacttgtagtcgatcttctacacgctgaggtacaagtcgatctgcaggacggcgttgttggtggtggcgttgaaggagtgcgtcctgaggaggccgtacccggcggcgccgcggagcacgccggcgccgccgaccaccggcagctccctcacctcgtcgaggatggcgtccctggcgagcaccgacacggcgcccgcgcggtgcacccccgccgtgaactccatgtggcgctgaacagcagcg

SEQ ID NO: 391894 - DNA, 528 bp, Oryza sativa
ttggtttcgatggtggcgatgtcggccaagagcaagaacagcgtgctgacattggagaagaagcagggctggtctatcccacaacttccggagctccggttcccttgggatttgcatgaagacaagggcttctctttgagcttacatggctctgcctcccctcatggtgggctgtttgctagcgtcggtctcaaagtgtccacagctgcaccagcagtggcacccagtcctgccgagcatgacttcaagattccgttcgctgatcattgcataaagtatgtctcctcagcagtggggtaccaagttcctgggactgaggctgaatctgtcaatgaggaagaggtggtggatggcaaggctgtgaagaaagccaagaaacgtgggctgaagctgaaaattaagattgggaacccacatttgaggcggctggttagcggagccgttgcgggagctgactcgaggacttgtgtggcacctatggagacgattaggacccatttgatggctgggagcaatggggactctatg

SEQ ID NO: 391895 - DNA, 530 bp, Oryza sativa
caagttgtttctcagtactatcagctgcagtgtcctgccaggggttcatcccttacttttcacccgttggatcaccttcatcctctaaggtttcaccggccaggtgaaacaggttcttcatattgctggttctactattgatctgcggtcatgtgatacaagtttagaggtggctgagatgcgcaatgcgctatttgccgaggaggaatcgactgctttatcaacatgggctgtggcatccatttgtggatgcctcaggttggagcatgtaatgacactttttgctgcagcactgctggagaaacagattattattgtttgttctaatttgggaatgctttctgcttcagttttgtccatcatacctctgatacgcccatatcagtggcagagtctactcataccggtcttgccaaacgacatgatggactttcttgatgcacctgttccatacatagttggtgtgcagaacaagacatccgatgtacattccaggctagtgaacgccgtggttattgatgccaacaaga

SEQ ID NO: 391896 - DNA, 622 bp, Oryza sativa
  unsure (1)..(622): unsure at all n locations
atttaagttagtagcagagcgtaatgcctatatccatgctcttgttgcctatttcaatgtgtccttcaccaaatgccataagatgatgggcttctcaacaggcccaagatcaaaagccactcacgggaaccaaactgttctgtacctggagaatgtactgaccatctgtgagggggaaaccatcacaggcagtatgactgttacaccgaataaaaagaatcccccagatattgacattaagctcctgctacgccctaagtgggcatagatgccaagtgtcaagaacacaacactacaagatgcggtgatcaatgcgagctcagctgccctgcaatccattaaattttggttgaccaagtatcttgtttcgcaaactgtgcttgttcccgtgatcctgtattaacatacgttatttatgttctttgggatctaagcataagtagaaaatagattgaactggcctgccgatatgagatttgctattttgcaaaactatgttgtcttgctggctggtggtattggtaatgaatgcgttgacaatgatgatggcaattgctgtgtacgttttatgaaaatggatcaatgacgtattgccngtttgccaaaaaaaaaaaaaaaaaaa

SEQ ID NO: 391897 - DNA, 406 bp, Oryza sativa
agctgcttcacacccccaactgtactgcgcacttggtgatcgagacgaggctagctaggataaggcgcggcttcggcggcggcggcggtgggcggaccggacggcggcgagagttggtgagtagtgagagtgagtgatcggtgtggagatgagcacggcggcggcgaggccagggcggcggttcacggtggggcggagcgaggacgcgacgcacccggacaccatccgcgccgccatctccgagttcctcgccaccgccatcttcgtcttcgccgccgagggctccatcctctccctcgggaagctgtaccaggacatgagcacgccgggagggctttgtggcggtgtcgctggcgcacgcgctggcgcttggcggttggcggtggccggttggccgtcaaacaat

SEQ ID NO: 391898 - DNA, 416 bp, Oryza sativa
tcggtgctgtgtccaccttcggccgccgccatggacaggaatggtgttagccactaaaaaaaactaaataaataaaagggcctccgctgggaactcccaaaggccaaggcggaggtggggaggtgcctgtagagcgattggattcgtatataaagaaaagcatcgttggccttgcccaaatcctgccgcacatgccaaggttcataacaacatagatcctgcaagtcttgagacgctagtgcaggagaagaaagacgagctgttccgtctgctacttcagatggatcttcacaatggctcgtgtgaaaaaagtgccgaggagaacaaagccatactgaggcctgcttcggcaattccgtgctgagacgcgagataatggtaccttgtccggtgctgatacgaaaaacttggccaat

SEQ ID NO: 391899 - DNA, 545 bp, Oryza sativa
aaattcacaactgtagcattttaattcacgtgaggaatattgacaatgtagcggtagaacaaggataaggtcaagacctacttttacacggagtacacacaataattacaaaaatgaaaatgaaggacacggcaacattgtctgaaattgcactccagcccaaaaagatgcatccggcaaaatgccggccatcagaacgatggaaaaggctcaagaaatctgtgaccgcataattcaccgtgttagctgaggacattgttttcttcggcttcatctacttcgcaggaagatgaactcaccagtttcaagattaaaacctggtgtctaaattttcatgagttcctggtccttctgcttttggatagcttcgatctttttcatgtacctcgtcagtaactttttggagatcagcggacaaatccttcacgttatcttcagaaagttttttttccttctcaagcttatcgtaagctttgatggcatctcctcctatgttccttatagcaaccctgccttcttcagctaatttagcaacagtaattacc

SEQ ID NO: 391900 - DNA, 511 bp, Oryza sativa
cgctctcagacttgagtaacatgttgggagagctgaagggtatggcattggatatgggcacagaaattgaaaggcaaaataaatcactggatgctttcggtgatgatgttgatgaactgaacttcagagttaaaggggcaaaccaacggggacgccggttattgggcaaatgatgccatcaggttgtcgaaccacagcaactctgtttctagcagttttctccatcccatgggattcaggacttgtgagtgcgattagcagatgcgcctacttcatctggatattctgtcgtgtctgaattctgagcaaatattcagattcccgtgttggggtgttgtatgagaaatcgtcttatacacttggtgtatgataaggtgatagcttcaattacttggtgtaggacataaccaccattccccttttctcttagaatcttgatgtaatctgtactcctaaatatgccagaacgagatgagaagagaattgaatcaagcgatagaattactccagc

SEQ ID NO: 391901 - DNA, 464 bp, Oryza sativa
ctttcgccaactcgtttcttgttttcaaagttgtgtttgagtctgttcaagacgaagatgaagtgcaggtaggataattgaagttggatgatcctacacctccctttaagtatttcattcactcccacaacaactgaattatttgtttggtggctgggtgtccttcttcaaccgtgcatattttcattgtgctaaaaatgttatatttcctcttgagttaaagtggtctcaaatatgaaatacctaataatgttttccctttctaatcctaaataaattaaattcctgaatatttctttgaaaatgtttttttagtacatatgaagtatactgtataccacatatgcttcagtatgtatatgtgtaaagcggcatattaattgggatatgaaggtgtatgggcgtaaaatcggggttaggttataattgtaaatttcagtcaattgcaggttaagctggtatcc

SEQ ID NO: 391902 - DNA, 877 bp, Oryza sativa
  unsure (1)..(877): unsure at all n locations
cccacgcgtccgggcttcctccttcccctccgagcaccgccgccgccgccgccaccgccaccgcagcctgaccgctcggtctccggcaaccagacaaaatggtgagagtcagtgtcctcaacgatgctctgaaaacaatgtacaatgctgagaagcgtgggaagcggcaagtgatgatccgaccctcatcaaaggttatcatcaagtttctcatcgtgatgcagaagcacggctacattggtgaatttgagtttgttgatgaccaccgctctggcaaaattgttgttgagctgaacggacgcctcaacaagtgtggtgtcatcagccctcgcttcgatgttggtgtcaaggaaatcgaatcatggactgcgaggctgcttccctccagacagtttgagtacctgccggnanttnatnnnntttaatnttaattaaaataatattaatataaaatatttttttatcattatattttaaattaattttttataatattaatattttataatataaaaaataatataatattatttaaattatatttattataatttaatttttatataaaaattattaattttatatattattttactatatttatttaatttacaatattttattttttattttattaatatatatantaaaatatatataatatttatttattatttaaataatttatatttattatttttaaatataccatattaattttttatataaaatanaattttttatttatatttatataatattatcatttgtaattaactcttatatctaaaaattttatatataattacatactttttattaaatatattcttatcttatatatatactatttctaataaattattactattttacg

SEQ ID NO: 391903 - DNA, 453 bp, Oryza sativa
  unsure (1)..(453): unsure at all n locations
tacgcatcttaaatcgcttgcactggagagtgtatattatgtagttgaggagcacgccgcaggcagtctagggatggatgatggattgagtgagtgatgtgtgcaagtgctaatccaatatggaaggaagaagttgtaaagatgaggaggaagaagaagatgagtatacgtactctgctgtacaaattttatttagcactagagagatgaaangaaangagagaggnagctgttagctgtcaatatgagtgagtgatgngttgttgttgatgctgtaacataactagagtactactcagggcacaaaactagcctaagncctaagcctttgtttttagtttttacagttttaagctgaaggtaattagtatcagctttgctgaacctggtttgttaanttttcggtggccccccgtccngcnngncnttggcctttaatntncncccgggggc

SEQ ID NO: 391904 - DNA, 739 bp, Oryza sativa
ttattctcctccttcccctgcgcctcctccaccgaccgtgttgacggcgcgcgcgtatatcccctcgccgccgtcgtcgacgacgccgtctactccgtgtgaggaccggattggttgaaaggctgatcgaggtgcttttattgctaactggagcagattgtgcagtttctttctttctctatgagaattctctcagtttgttgggcaggctcttgagctaccaagtatgtcagcttcaaatgagaagtggattgatgggctccagctctcatcactgctctggcccccaccacaggattcacaacaaatacaggcacaaattctggcctatgctgagtactttggccagtttacagctgacagcgagcaagtccctgaagatatagctctagctaattcaaagctgctatccatcaaaagaaaagcgccttgtagatgaagtattagcaacttttgttcttcatcatcctgagcatggccatgcagttgtgcatccgattctgtcacgcatcatagatgggacactcagttatgatagaaatggtttcccgttcatgtccttcatctctttatttagccatacttctgagaaagagtactcggagcagtgggccttggcctgtggagaaattcttagagttctaactcactacaacaggccaatcttcatagttgatcaccaacatagtggaagcgaatgtatcatcacatctgatcaggccccatcatgtgagtctat

SEQ ID NO: 391905 - DNA, 1074 bp, Oryza sativa
gcattagagcctctccaggtttatccaattatagaggaaaaggttaatgccttgaatatgaatgcagagatccttaaccgtgctgtcaatgaagggtttagtggtggtgaaaggaagcgcaatgagattctgcaactctctgtcttaccgtgggcggcggcgtgaaactgtggtccaaaatgcaattcactgatatatttatgaccaataaatataggcaaaagtttcctgaaaaaagtgctagaagataatattttatgagacagtgcttccttgaacatttttacctgtcagaagaatttgtttgactatctagttatgtacttcgataaatttgtgcctcttatttgttttctcattatccttctctgccccttggggcctgatttagctctccttgacgagattgattccgggattagatgttgatgcactcgaatatgtagctaaagcagtgaatgggatcttgacaccaaacagctctctaatgatgattacacactaccaacgtctcttggatcttattaagcccagctatgttcacatcatggaaaagggcaagatagtgaagacgggtgacagagctttagccaactacattgatgagtctggctacaaagcgattgctactgcgtagcatggagccatggagaaagatcaaatacttgaatgacttgttgggttagttcccagcctctagcctacttatcatgacagatttcagatttgtcactcggttccatacatttttagtatgcatgatgagagcagtgcatactaaattcagtagatgttgagttagtggcttagtgccccatttagctaaacgtgttaactctgaaagtggagcattgagttctccattgagtataggtcactttccctactttttgaaattttggattacagtattaagacatgaagaaaagtatcttgtgtatacacgattgacaaaattttcatggttttatctacaatttagccagttttgaatattggctgttccttcaattgttcatacagctataaagaattccaaagtttgtggtctgtttccaaaaaaaaaaaaaaaaa

SEQ ID NO: 391906 - DNA, 509 bp, Oryza sativa
  unsure (1)..(509): unsure at all n locations
nnnnnnnnnnnnnnnnnnnnnnnnnnnnnnnnnnnnnnnnnnnnnnnnnnnnnnnnngcaagacaatggtgggataacaaaggtagcaaccacccattggtattaaactgatgatctccaacaactagcagattaatttctcaagttaaaaaacggctagagctaacaaagagttcatgacgcctaactagattctgctttcgttttctcagcatctaaggctgagagcccctaaaagctcaatgcagcagattgagatgtgattatcagctcacttctacgaccaaggagcccgcctaaaattcaatgagacagattaagatgttcttcactatcagcttacttctacaactgaagagttcctaaaactaaacgcaacagatcgagacgttcccgaccaccagttcacttccttgggtgtggaacagaattcctcagctgcatgaccttcttatgagaattggagtgtatgtcactcacaaaagttggactattagcaggcctgtatt

SEQ ID NO: 391907 - DNA, 912 bp, Oryza sativa
tattcgctctcgtccccttccctctcctctctcgctcgctcctcttccgcggcgcgcgcgccggcgactcgccgcgtcgggccggccgacaaccgccgcgagggagaagccccctccccttggggggcacccatgacgtcgtgcgggtgcctggtgctcgagaaggtggaggaccacggcggcgaggcggcggggagggggagagggaggctcgcgcagggtggcggcggcggcggcggtggctgcggatcgtgcgcgggggagtggaggagccggtcggagaccatgttccccatctacgtgatggggagctcgcgggccagctccgccgcggcggcgcggggcatagtcgacgccgccggggaccccatatgggaggccgtcaagtcggaggccaagtctgaggcagagaaggaacctattttaagtagcttcttgtacgccagcgtactatctcatgactgtctcgagagggcgttgagtttcgtccttgcaaacaggctcgaagatccaacattgcttgcaactcagttaatagacattttcaatgatgttatgatgaacaacaaagatatacgccgttctattcgccttgatgctcaggcctttaaagacagagatcctgcctgtgcacaatacagttgggcattgttgtacctcaagggttaccattccgtgcaatcctataggatagctcatgtattatggaatcaaggtcgtaaagttctggcattggcactgcagagccgtatcagtgaggtttttgcagtggatatacacccagcggccagaattggagagggaatattgttggatcatggaacgggtctagttattggtgaaactgccattgttggaaactgggttttattaatgcaaggtgttacacttggttgtactggcaaggaaaat

SEQ ID NO: 391908 - DNA, 838 bp, Oryza sativa
  unsure (1)..(838): unsure at all n locations
gttgttttgcatgcagttgtttctggtgttaaggggcgattttttgatggctgcagggttttaccatctgttattcaagtgacatttatggaagtattgcgagccacagtgactccgtgatcaaaaaggtggggttgagtaccatggtttgcaattacggacctgttagaaactaagaaaattgtaattataagtagacacaaatgacgtgcttcaacttttgatattggttacaaatgtgacctgctcaaatttggggaaccattccatcctcccaatcatcagggttttatgctgaaagaactgaagaggtggtatttccaggatggtgccgggacagtcttgctacttgcgctttaagaaactggggatgatactggagtatggccgcgcattttctggaagttcatcaatattttgaagaggtgatatattggagcactgcagtccgagaaatgatttttacggcctcggtcttttctcaggctttcagcctcccaggcaattgaatttattgaaccattagtcataaactaatactaacacacatagcacattcttaagaaatagatagaccttggtgttcgcatagactattgtattgcacagttttgtttccttaattattgattcattttccctaataagtgaaaaccgtattctttttcaccaatacaatgatgctaattcttttttttcccctgtgtaacatggattgctgatcctccccaatacaatgatgctaattcttatttcttttttggttccctctntgtaacctggattgctgatcctactaaaactaacagngacaaatagaggactggtttcactggtt

SEQ ID NO: 391909 - DNA, 435 bp, Oryza sativa
  unsure (1)..(435): unsure at all n locations
cactaaaggnaacaaaagctggaaactnccaccgacggtnganggncgctctagaactagtgggatcccccggggntgacagggaattcggcaagaggtttcgatgcgctggtgtctttgtcattcggcgcgtggattgagccacaaggccttgtggtgcctcgatactcgaacactcctgctctagcctacataatccaaggaaaaggttacgtaggattgacttttcctggttgcccagcttcacaccaacaacaattccaactatttgaacaaagacagagcgaccaagctcataagtttagagatgagcaccagaagattcacgaatttaggcaaggggatgttgttgcacttccgggctagtgttgcacattggttctacaatggtggtgatacaccgggctggtgttgtctatgtttatgacctaaaaa

SEQ ID NO: 391910 - DNA, 375 bp, Oryza sativa
  unsure (1)..(375): unsure at all n locations
gggaaaaaaaatctgaccatttcttgatttcttcttctcccttctctctctcccgcactccatggaccaagagaagcatcaagcccatggccctggcgctgccgacgccgccgccggcggtggctctgttgcgaaggacacgggcgacgattttgagttctgtgtactgtcgtccggtgggctcgtctctgccggcgccggcgccgcggcggccgacatgtgcgtggccgacgaggtgttctcccaggggaagctgctgcctctaaggctctcgtcggcggcggctggcgatgcggccgggcttggtgttctgccgcggtcggagtcggtggcgtccaccgnggggttcggctcgcgggccgaccgccggngcgc

SEQ ID NO: 391911 - DNA, 813 bp, Oryza sativa
gaagcactgagtatcaaactattttaatgtacatagacaagatgtttgacaaatctagttttacagagtcccaactcccaagttcgtcacttgctgaacacacaagttacattccattttattatcggccaagcggccatctgctgcacattattgcctataccattcccactgacagcaggaagatttccctcagatctcatcacgtcgaggacctacagtcagtgtgcctcatctactgcaagaggtacagtcttcgccagttcacggaacttcaatatgtagaacatctcaagatagcgcctggtctcccgcctctcaagcttcgagacatacttccagaagccataaaccccagccaatgtcatcaacctctcagagtagatcttccatgtatatttctcatatatacgttgtaggcctctattagaaacttccacccaatggttggggtcttgtttacattgttcgaagaagtcagctatcagatttgcagcttgatccggatgataaggatctatgtggaaccctgagatcccgtgctctataatctcggcaggtccaccatggactgttgcaaaagtagggagtccacatgtcatggcctccacaacagtgagaccgaatgcttcgtagaaagctggctgcacgaaggcaccatgagtatcagctatgtagcgatagagctcaccattgcgagccctgttcgtctgagccgagatccaacggaactgcccaaacaagttataggtcttaataagttcatgcatcttctcaatctctgcgatttcttctctgtccttggatttcatg

SEQ ID NO: 391912 - DNA, 553 bp, Oryza sativa
  unsure (1)..(553): unsure at all n locations
attccaaaacaacgccacatccgtgcagagctaccacttggatggatatgcattctttgttgttgggatggactatggactgtggacagacaacagccgcggtacatacaacaaatgggatggcgttgcacgctccacaattcaggtattccctggcgcttggacggctgtccttgtctttcttgacaatgcgggtatatggaatctgcgggtggagaacctggacgcctggtacctggggcaagaagtgtacatcagtgtggttaacccggaggatagcagccacaagaccgtgcttcctcttcccgacaacgcgattttctgtggtgcgctggtcaagtttacaaagggagccatcgcatagattccaatactcagaagccttctcagataaacgcagctgttggaagatgggtttccttcatggcatggttggccctttggtagagcttaattagatctgtctgctggggtgatccggagacgagagagctcanagctggtcccaaacatggatgagctcttaactcaagttagtaggggggggaatttt

SEQ ID NO: 391913 - DNA, 685 bp, Oryza sativa
  unsure (1)..(685): unsure at all n locations
tcagctcagctttttagtcttgcagttgcatagaataatcaagagccccaaaaagcggagttattgacgtggtgctgaaggcgatcagcgatgagtcactcactgatgagtcgctgactatccttgctctgctatcaagcgaccatgagacggtggaggagatcggcgagactggtggcgtgccttgcatgctccacatcataaaggatgaccaatgcaaacgtaacaaagagaatgcggtggcagtgctcttctctatctgtatgtacgaccgcacgaaacttagggaggtcgtcgaggatgagaacctgaatggctctctggcctggctcgcacagaatggcacttcgagggcgcggaggaaggctgctggtatccttgacaagctaaagaggacaattcacaaaacgcactactcctgttagtccggggctgggtgcgtcggatatgtaactagacgaataaggttgggggtgttcatttggtgtatatattgacctgcatatatgtctactctttggttcggtacataagtttacanttttcagatttttntaaannanncnaaacaaaaaaanaaaaaaaaaaaaccncnagggggggcccggtacccaatcccccctatagtnantcttnttacaattcnctggccgncnttttacaacctcttgactgggaaaaccct

SEQ ID NO: 391914 - DNA, 484 bp, Oryza sativa
taggtttaggaacactctgcggtgctgtcgggtatcttggatcgacactgtttgtgaaaaggatctacaggaacataaagtgtgactaaaaattgaccccggtttagacagatggggcgaaaaactttgtatgtgtggcttgttccgtgaagtgatcagccatgttttggtggccaagaagccagggcagtttatggagtacaaacgttcttcggcgacattgctgggatgccatggtttttgttttcttgtcccttttgttctctttgatccccctctcggtgccacaattttcatgttcaactagccatatatagctgcgatcatagtttagatgttagtatataccagagttgttattcttgagcctcatatctgtgttgcttcacttaaagctgtaagatccatgacatttgttgacctttaatgatgaaaacatctccgaaagacatcattttcagattttatgcttgtgttttcctgc

SEQ ID NO: 391915 - DNA, 451 bp, Oryza sativa
  unsure (1)..(451): unsure at all n locations
nnnnnnnnnnnnnnnnnaaatggataaatgatgggatttattttgttgtaacagcatattatctgttgtctcgggacaaaatttcttcttcggctatttacagtttggtcaggtttcaacagagggatgcatcaaaattacaacaggaggacggagcacttgttcaaaaaggctcaggaaaatttggtgtgattaggtgtttctctattgatacagggatcacataactctgaaataggatataggtgaaaaggaaaggaggcgggcacatcagagaaagaagcgcctattgctggcttcctatggctaaagttggagctcgctaatgatgcagatgatacaatgtgagaactaaaaatactgacagaacaatgttagctgccgaacccaaatggtgatttactcctgcttccaccttccccggactgctcgttccattttcgtaactcgt

SEQ ID NO: 391916 - DNA, 795 bp, Oryza sativa
ctcgtctccccccttcctccaatatatcggcggcgatcccggctcgaggagaggaggctccgccgcgattttttcggtgtcgcatcgaaattatgattttcgatgcattttaggctaaaagtgctcgggtctgaaacctacgtgcttttcttgtcgccgaagatggtgtcagcaaatatacatcgacgcacatgaacagcgatgatgcgttgctgaatccgtctgaagctgcaataagcatgacggttttgcaaattatgatactaaaccattcatgctgctacgccctcgtctggaactttcttcttctgatgcaaccgtgcacaagcaaacctagcctcgaagcgattgtgatgagttttagaggtggtgcgggttcgatcacgtggagttctattggtgttcagtgactcttggcaaaagttctcttgtaaaatcgacgacgatggaaaggtacaaagtgataagggagataggcgatggcacctgtgggaatgtttttagggcttataacactgaaacaaatgaaattgttgcagttaaaaaaatgaagaggaagtttttccaatgggaagagtgcattagtctgcgagaggtgaaggcacttcaaaaactgaatcatcccaacattgtgaagttaaaggaggtgactatggaaaatacgagttgttcttcatttttgaaaacatggaatgcaatttgtatgatgtcataagagaaaggcaagctgctttctcagaagaggagatacggaactttatggtgcagatactgcaaggtcttgcatatatgcat

SEQ ID NO: 391917 - DNA, 532 bp, Oryza sativa
  unsure (1)..(532): unsure at all n locations
ctccgctcgtccctgcacacagaatcctcctcctcttcctccgcggcggcgccgccgccgccgagttctccattgatccggcgatggccggcaaatccaatcccgtctccaacaatcaggaataattaagaccctgtcgttgtcgggtctgatcgatttggagaggagatggacgccggtgtgggtctccgggcgaagcccggcgcctgggccggactcggaaacccacgccgctcttccacggcgagggttccggtgaggttcgcggtggagaagttcgctcagccgttggttttgggctctgatcgccggagctgcggtgccaaactgaaggtttcgtgttccaggaaaccggcaggtattgacaaaacctattactctgctgatgaagctcttgttctaaagcaaaaagcagaggacgtggtcccttatttgaatgaccggngtatttacttagttggaatgatgggttctggcaaaactacagttgggaagatattagctggagtattagggtattctttctttgaca

SEQ ID NO: 391918 - DNA, 465 bp, Oryza sativa
  unsure (1)..(465): unsure at all n locations
ctgcatcgttccatgcgcagctcaatctttgcctcgtcaggttttgctcattggcgtctccatggataggctcctcgcctgcctccttggcttcctgttgatcgcttcagtaggaagccatgccgctcggactccggagcaatactggaaatcagctcttcccaactctcccatcccgagctcgctctctcagcttctcagcactgcaggcggaggcacgtcggtgaacgtcggcgggggcggcgtccatgtcgacgcggggcacggcaagcccggcggcacaaccgttgatgtaggcaagggtggcgtcggcgtgaacgtgaagcctggttacggcaagcccggcggcaccacggtcggcgtcgggaagggcggcgtnggagtaacgtcaagcctggctattgcaagcccggangcaccagcgtcggcgtcgggaaagaagcgtnggcttaacgtgaagctngg

SEQ ID NO: 391919 - DNA, 437 bp, Oryza sativa
  unsure (1)..(437): unsure at all n locations
tcaaaggtggagactgcgattcacttccactcccttccccactgccttcctcctctcactctcactccccctgcgaccgccgccgagaggcatggcggagaagctccactggcgccgatgcctcgagtcaagctcggcacccggggcctagaggtgtccaagctggggttcgggtgcatggggctcacgggcgcgtacaactcgccgctcgacgacgacgccggcgccgccgtcatcgcgcacgccttccgccgcggcgtcaccttcttcgacacctccgacgtctacggccccctcgccaacgagatcctcctcggcaaggcgctgaagcagctgccgcgggagcaggtgcaggtggccaccaagttcgggattcggcggggcgccaacgggtgcgcgccgtgtgcggccggccgagtacgttcgcgcttcttcna

SEQ ID NO: 391920 - DNA, 1401 bp, Oryza sativa
gagctgcaactttcaggggagtcagccaagttagtgaagcttggggaagcagtttcaaagggaactgttaataatgagacacttggttacttcattgggagggtctatcttttcctaacacgtttgggtattgataaaaaccggctacgcttcaggcagcatctacctaatgagatggcccattatgctgctgactgttgggatgcagagattgagtgctcttacggatggatagaatgtgtgggcattgctgacagatctgcgtatgatttgcgagctcattctgacaaaagtggtgttccacttgttgctcatgaaaaattctcaaagcctagagaggttgagaaacttgttatagtgccctcaaagaaagacctggggcttgcttttaaggggaaccaaaagatggtggttgaagcattggaggctatgagtggagaaagaagcaatggacatgaaagctgctcttgaatctaagggagaaacaaatttccaagtgtgtactcttggaaaggatgtggtaataaccaagaaaatggtatcgatcagtatggaaaagaagttggaacaccaacgagtcttcaccccatcagtcattgagccttcatttggcattgggaggataatctactgtctatttgagcattccttctacacaagacctagcaaatcagaagaggaacaactgaatgtcttccgggttccctcctattgttgctcctatcaaatgcactgtgttccccctggtgaagaatcaggagtttgacgacgctgcgaaagttattgataaagcattaacaacagcaggcatctcgcatattattgacactactgccatttctattgggaggaggtatgcaaggacagatgagatcggtgttccattcgcggtaacagttgactctgcgacaagcgtgacaatccgggagagggacagcaaggagcagatccgagttggcatcgatgaggtggcatcagtggtgaaacagctgacagatgggcaaagcacctgggccgatgtttcatttaagtatcccagccatattggtccccagggtgatcaggagtgaaaatcctgaaccctgttccaaagaagcaccccaaatggccgttgattgacttgaggagaaatagttcttcctcgtttcatgcaatctggcaagaacaaagtttgtcatacacaaatatacaactcttggacgcccttacatctctccattgttctttttgctctctttcaaaagtttcacctgatttacatgttcacaatacagaacatagcatttgattttctgctgaattcgtcctgttaacttgtaagggtcgcaccaagaattgttcacctaccttcaaagttccaacaaacgagctgaagctttgagttaaaaaaaaaaaaaaaaa

SEQ ID NO: 391921 - DNA, 548 bp, Oryza sativa
  unsure (1)..(548): unsure at all n locations
aacttattcaggacactgactaccccgcccagagagaataagattgaagccttcgatgtggatgatgaggagcctgtgatggatcctgcatggtcacacttgcagattgtttatgagctgttcttgaggttcattcagtctccagagaccgatgccaagttggcaaaaagatacatcgatcattcatttgtcctgagattacttgacctctttgactcggaggaccctagggagagggagtacctcaagacgatacttcaccgtgtctacggaaagttcatggtacatcgaccatttataaggaaggcaatcaacaacatcttttaccagttcatctatgaaactgaaaaccacaatggaattgcagaactattggagattttaggaggtatcataaatgggtttgcactgccacttaagggagggagcataaggttgttccttgtccgggccctgattccacttcatangccaaagtgcattgggatgtaccatcaacagttgtcttactgcattacacaatttgttggaaaaggctgcaaactcgc

SEQ ID NO: 391922 - DNA, 882 bp, Oryza sativa
gaatgcaactgtatgatccttgcatgaatatatgatgggtcgaggaagaaagccatagacattagtagacaacaactcaaacaaaaacggagaaaattaaagaagaacagatcaaaaccagagaaaatgcggggcacacaccggacggaacggaagccctacgagtcgctggcgctcatgctctcatgccgctcgtcgccgccgccgccgccgccgccgtgatgctgatgctgacgatgctgacttgagccttgcgctccattctgcgccgccgcgccggcgtccggctgcgcggcctgtgcgcggtaggcattgagcgcggcgaggatccccgggtgcccctcgccacccccgccggcgccggcgaggccgagctgctgcccgccggggagcagcgccattggtgtcgccgggaagttcatgaaatgaagaccgcttggcacgccacggtacactgtggccgcgccgccgccgccgccgctccctgactgcgggaacgtccaaatcgactcgccgccgcctcccggcggagcgccgccaccggcggcctgcgcgttgctgctcggcaccatccacaccgtgcccgcaggaatttggctctgcgtgtacccggccatctgctgctggtactgctgctgctgctgcatttcttgctcccaccgccgcttccgggagaggtcggcggcggccggggaggccgacgccgacggcggcgacacgtcaaggccgacgctaccggagtggaagctcagcagaagcggcgacgaggaggaggaggtggcggaggacggggcgtcggccgcaccgccgaacccgaggccgacgacgcggtcccacgcgtccgccgcccgcgcgccgccgacccatcgcgccggacgctgg

SEQ ID NO: 391923 - DNA, 999 bp, Oryza sativa
gggcgcgctccttctcggcctagcggcggcgcgcctccacctccttgtcatgtgctaaggcaaaaggtgcataatccaatgtttgtccaatgtaacaactcaaaacttgacacaaatagttcctctcgtacaagttttgttctgtttggcattaggccgccggattcttattgtaaagctcaaatcctcggtatcccaacacaaggggtagaaaaaagcataaatcaaatcaagagaagcctcatctacaggtatgagttgctagtctgcaaaatggcctaactacgcatttgcaaatttgatacccttctcaattgaagccttgagctcgcccttaagattctccagtccttccttctcaaagtctgacagctggcccaacccaagaacttcctcaactccattcttcccaagcttcaccttggaggcaaagaatggcagctctgttacagttgattgcacaaaagagcattcaacaacgtccggcactccattcagaccctttaagcaagcatttgcgaaaacagcaccagcatacgccatggacaaggttgcagagccctttccagcctttgcttcaacaacttcagtcccaccatcctgtgttctcttggtaagagccttgatgtcttcatcagacaacgcattagttgcaggagttgcctgtgagaacagtggcaggatggtgatacccgcatgaccaccaacaactgggacattcacatcagtaactggtacattggcctttccagcatagaaagtcttagcacgaacaacatcaagagtagtcacaccaaacaacttcttctcactcgtaagtcccagccttcttgaaaacctcggcagcaattgggaccgttgaattcactgggttgctgatcatgttgacaagagcattcgggcagtacttggcaatggcggtgcagaggttcttaacgatgccggcgttgatgttgaagaggtcgcccctggtcatgccggacgctgggcggacgctgg

SEQ ID NO: 391924 - DNA, 485 bp, Oryza sativa
gaagaatgaaacataatttcattgtcctatggccttcctggaggcttggagcagagatgtcttacatcagaatatcacataacttggtagtacgatgagggggcccatgtgggaaaaagcagccggagggttcttctgaaccagaatgccaaaaagattgcttacaggaaacacatcacataagctgaaggaacaatgcgcaagcgcagcacagaaatacagtgaatatgccatgaaatccatggttatggcgagtgattttgtttgctctcctatttaaaatgcttacagaaaaggttaagagtccggagatggtactggcctgatcaaacgataaacagcatctcctgcagtgattcagtttattgccaccttggaagggcaagtgtggtatcatgggaaatatgattactgaagttcagacgcggacaccatattcagatattttggtgatcctttcttggagaacacatctctggtttttc

SEQ ID NO: 391925 - DNA, 864 bp, Oryza sativa
  unsure (1)..(864): unsure at all n locations
aggcccgggcacgggcagctgccgggcaaacgaaaagccccatcgaaattaagggcccccctccaggggcgggggagatcgcgcacaggaatgtacggcgacaaccggggcattgctgtacaaagccaagatgcaaaaattgccaaacacgaggcaacgatcgcattgccatcggcatgtcaggggaatgcccaataggcacacaacaaatgcttactactacatgatgtacgaaaggggccaaagggcttatgtttattacaaacaaccagttgtctactacgatcatactatattttttttctaccgggcgaagcatatgcctcctgcaggaacaaaaaaactaaacaggaagaatttcagaacgagattaactaccatgatacgagttttgacaacaacagctgatcagagtgttctccatgaataagctgggggcggtagctccaaagctcgatctagccatttttcaatgcggagagggagctttctgccaaggagaggcatgactccctctgtttcttgtattcgtcgtaccgtagaaaaaagtatccaagatagtcgaaatcaatgggggatacctttgcctgaataagagcccacaacgcccagtaaatgtgtgatgctaatctataggtgtttgtttccacataaaggacatccagatcttgcagttggacctcacttggcctatcaggttgaagatagttcctgaagaagtggtattgagaatttttatctggatacaagctatagncgcaatcatagcctgcatattcattgaaatggtttgcaatatcataaccacggnagctgtacgacccatactcgaaatcaatgagtagagcttttcttccaaaattt

SEQ ID NO: 391926 - DNA, 385 bp, Oryza sativa
ttgtttatgaccagaggcatctcgattcatatcaacatctaaataaagttttctacaattgctgctgtttgttaaaaaaaaaaaaaaactaagatgagaatagcaacgttccgtttgctcattagctctggcacactgcaaagcacgaaaaaattcatcggacaaatctacagagataaaagtcttgcccacaatcaggctctgatgtatggaattattgattaccgtagtgaagtagttggtatatagatgacagatcaaacagcagcacggaaatgcttctgaacatgatgtgttgcacgcgtggctgaatcaacagtcactccccctttatttgagagaaactagataacatggctgacctagaatttgctcggacgcgtgg

SEQ ID NO: 391927 - DNA, 725 bp, Oryza sativa
atttcctgaaagagtcatccactgtttttcctttttgaaaacagtcaatgccccacgacaaaaatgttcaatgggataagagagtaccaataggattaaactgtttttttaccatcatgtttttacagtgagtaacgagaccaaaactccaattggtttaattagtacgtaccaattagagaaatcttcaaaaaatgaaccaaaactccccgcgattaccttccacaattccaccttttcttctctacacaagccaacgaaaataagggaggaccagatgtgcattcagtgatggtggcagtgtaggagcctattgtgtaggcggctgaccgtctgtcttcgcattgtggcaggtagtcatcgcctgatttcatgaaccttgttggcgagcggatcgcagcctgtgcgaggccagtgccggggttgagaaatccgaccaccgggacttggaatctcgaactcgcacgtggccagaggaaggggctggtgccggggtcaaccgcgaaaacagggcggcatcactaaggccagatcggagcaagagggaggagcgccaaaaatcaaatggaagacatcaaacccaaatcgtgcttataacttatttaaactgtataactacgagaatccagtttgtgagtattttttaagctctgttgaacacatgataacatcataatattgtattcacatcatcacaatacatgatctatttaaattgagaaaat

SEQ ID NO: 391928 - DNA, 471 bp, Oryza sativa
  unsure (1)..(471): unsure at all n locations
acatgttccaagcaattccacgatttctgaatcattaacacacacggagctggcaaaatggagctggaaaaatctagaagtatcacacattgacacaccactacaattataggatagatgaaatgaatacattgtgaaacaacagtcatcacttcttcatttttccatctctatcattcagtcaagcatatttgatcccttctatagatttttatagacttctattttgttatcctctcctgcagtaagctgtgtgcatctttacaaagatcagtgctctcagggtcacttgctttcgtaagacgcaattgcatacgtcttagagtgattgtcaaaataaatgaaccaaaactccccgcgattaccttccacaattccaccttttcttctctacacaagcctgaaacagagtaaacatttgttttcacatggaanaaattccatcaagcagttggccataatgagaaagag

SEQ ID NO: 391929 - DNA, 434 bp, Oryza sativa
gatcagaaaagatcccagagaatctgggaaaatggagaaaatattagctggaaaaaaaatgctttgatccttggaaccagactattagagaaagcatgaactaatacgacttcgcaaaaattgcaacttcctcggctggattgccagtcatgaagcatttcttagcgccctctggctgctcgaacgggaagcatctgatggtggcgctggtctcttctttcaccttcagctcatcagcatcgctagctgaccatggccctctcgcccatttaccctcggcaatggcctccttcagttctccatatgagcttacatcaactatgttactatcacggaatgcaatggccttctgtagaagggatgcttggatttcccactagacgaccttttatatggtccaccagtattgatcggacgcgtgggcggacgcgtgg

SEQ ID NO: 391930 - DNA, 294 bp, Oryza sativa
  unsure (1)..(294): unsure at all n locations
nnnnnnnnnnnnnnnnnnnnnnnnnnnnnnnnnnnnnagtgtgatcaacttgatgcttattattgccttgaaatggcgagtcataagttacagaaaatgaacactatgtacacaggcctgaatttttctcttgaacaaggaaaagataaatatgcactcagatggtcagacaacaaaaggccccgccaacataaatcagttgcagatccggataacttttttcacttgaatgccacatacagtcccttacttatttggattatttgtccagcggacgcgtgggcggacgcgtgg

SEQ ID NO: 391931 - DNA, 585 bp, Oryza sativa
  unsure (1)..(585): unsure at all n locations
cccggngtcgacccactgcgtccgcccacgcgtccggccgtggntcgtgaactcggaggtctacccgctgcggcaccccggcgtgtccggcggcgcggcgccgtcggcgaactgggtgtcgaacctgccggtggcgcagtcgttcctgtcgctgccggacgccatcggggcggcgtggacgttcctcatcttcggcgggctgtccgtggcggcactcgcgttcgtgctcgtctgcgtgccggagaccaagggcctccccaccgaggaggtggacaagatgctcgagggaagggagctccgcctcaggttctgggccaagcgccgccaccaccacggcggcgacggcgacggcggcggagaaaagaccgccggcgtgtgacacgacacgaggcctgtttatttagcgttttgatgactgattcgttgcaaatgaacgaaggagcgtggatttggtccgatcacgcacaaactttgtttcttttatttttaagtttattaaggtaaaatttagtttaactttttgaactttgttctctggtttcatatgcattcattttttttaaatcgtttgttttctgcttttgg

SEQ ID NO: 391932 - DNA, 637 bp, Oryza sativa
ccagcgtccgcggccgcgtgggcggacgcgtgggctcggcgcatccacgcaacccacccgtcgcgagtcgcgagcagatcaaaaaccccatcgccgcggcgatcaccggagggaccaggccgggcggccatccgtactccgccgcgatgatgaacgacggcgatgtggcgcggcagctgaagcagatgacggacttcatccgccaggaggccgtcgagaaggccgccgagatcgaggccgccgccgccgaggaatttcaaatcgagaaactacagctggtggaagctgaaaagaagaggatcaggttggaatttgaacggaacgagaagcaaggtgatatcaagaagaaaattgaatactcaaagcagctcaatgcttcccgactttgaagttcttcaagctcaagatgatttagcgatgtctattttggaggcagcagggaaagagctactgtacataacccgagatcaccatgtatacaagaatcttcttaggatatttattgttcagagcttgctgcgtttgaaggagccagctgtgattctgcgctgcaggaaggaggatcgtgagcttgttgaatcagttttggagtctgcaaagaatgaatttgcagacaaagcaaatatttatcctcctg

SEQ ID NO: 391933 - DNA, 638 bp, Oryza sativa
ccagcgtccgcccacgcggaaagaaaatggctttcatcaaggtagtgttctcggtgttgctcccggtagttgtctccatgctcgtggcaacgacgacaatggcggatcaccgtggccaggtggtttatacccccgggcagctatgcgctgccggacggggctacccgatgtacccgctgccccgctgccgggcgctggcgaaggccagtgcgccggcggtgccgtggacgagcaagtccggcaagactgctgccggcagctcgccgccatcgacgacagcttctgtaggtgccccgcgctgagccacatgttggttggaatgtacaaggagctcggtgcacccgctaaagggcaacccatggacgaggtgttccctggctgccggagaggcgacatgaaacgcgtggcggcgagcttcccggcgtttttgcaatgtagacattcccattggcattggtggtgtttgctactggctgagttatcctatgaaccccgcgactggccactaagaaatagctaccttgtgtgtcttgtgtggtacctatataattagtgtttccttttgcttggaaacatatatatgtggtgaataaatgatgaactctgatagtcttatgatgaaaaaaaaaaaaaaaaaa

SEQ ID NO: 391934 - DNA, 658 bp, Oryza sativa
  unsure (1)..(658): unsure at all n locations
aaaccagtagaantaccnngnaanggaanaagnggttcnncgggggnnccnttagaaaaannatccccgggnaaagattgcaagagnttnnnngcgngngnatagaanacccggncangnnnnnncccangaccnaagccgggggccnggnanacctaataccgacggngcggcggcggngaccccccggggggngcgggngcggtgctgccaccagcntgagggaggtggcggcgcgctncccgntgngacgcgctgcgcgccatggtggaggtgctcgtcgaggaggaggaggccccgctggcgtgcaagaaggggnccatggccgccatcgccgaggggctccccgggcgcgacgagtgcgacctcggcacgcgcgccgtcgacggcggatcgcgccgttgccacttggtgattaattgatatctgatgctgtttaatgataaataataatcgccattgttatattctagattatttatttatcaaacgaataaaatgattatggtcgcgtgccatgcggggtcgtgcggcggtgtgtaattatcatgtgatgggcaataaagagcaggtgatgagtagtaaaaaaaaaaaaaaaaaaaaactcgagggggggcccggtacccaattcgccctatagtgagtcgtattacaattc

SEQ ID NO: 391935 - DNA, 458 bp, Oryza sativa
cgcgggtatccgataacgctttgatatccgaatttcggccgctccgttgacaaagtaatcccactacacgagttattcatgaaaacattaacaaggccgcacatattcggacttattctctgaatgcatcacagagacggattcagtgctacgtaggtgtcccggatcgtacccaaccgcacgcgggcgcgatgagagaacatcacgaaataaacacgcagaaaacatcacgatcgaaacagacaacacacacgcccaaatggcatatcacaacagggggtaatttggctttttgatcgatcgatcgatcgagcttaaatttccatgaccgttttgagcagctggtccatggcctcgggggcggcgtaggatttgggggagttgggcttgagcctccacttcttgaaagggtggaagaggatttcccccccccaagggaacggcttcctcgggctggg

SEQ ID NO: 391936 - DNA, 539 bp, Oryza sativa
cgagaaggggaatagtacatttaattgtgtcaaatattcaacgttaacaagatgttgtttgtgcactagccttcaaaaagtgaaggaatgcctattcatcacaatgaactgatatggacggctgtacaacttacagctagtatgatttgttgaaggtaaaaacaaatcattcgacatgcatctcgtatctaaacatagactgcacaatgccattctgaactctgccagccatgtcgcctcccaaatcggtggatctccaagcggtaaaccgcataagtttcctccaaagttcgaatggttcatgcactttgttcatctgtttctctgttcctgttctttgatatcctcgaacagaacatgaacatcagcaggactgttgatagcatgaatagtctaaagcaggttcttagctcctgcattccaaggccaaggccttcaagtttcctcttatcgggactgctctttcctgccgcacttatctcaacaatgtctcctcccattgggacccagttatccactgcaccttgggatactaattg

SEQ ID NO: 391937 - DNA, 494 bp, Oryza sativa
atcaagatacaatctgcagatggaatttagttaggatccctgattttagcagtgtggtcttgcaggaaaaaaagtacaagattttccttcgcggggggaagatatatatggctcagtttgaactagtgctgcttgatcaacgggagccacagaaaacggcagaagaaaacaaaatcttcaaaacgccagttttgatctcattgtctgcagatggtatgcttcattccgtataatctcgatcctaacataattttcacaaaattcttcccctcgaaagtgttgcttgtcacagagctgaacacaaagctcctgagggccaggatgaacaacatagttttgcttcatttacatgcttcacagcaagaccaattaaccatgatcctacactaacatcatcatgtgcatatgtccggagaacagacctgtttatagagatgaattgagctacagcctttgagatgacaaacatttcaccagaagcttggcggaagtac

SEQ ID NO: 391938 - DNA, 845 bp, Oryza sativa
atagtaagttgcttatgcagacaggattatattgaacaagactgatttggttgataatgcagaactggaggtgttaattaacaaaattaagctcataaatgggatggcacagatgagaaaaacaaagtttggtgatgttgacatggattttgtgctaggaattgggggctatgatcttgataggattgagtctgaagtccagttgcatgaaagaaaagagacaggtcattgccatgctggagaagaacatgggcatcagcaccatcatggacatgtccatgattcagctgtctcaagtgttagcattgtttcggagggagtacttgatcttgatgaggtgaatgactggcttgagagactcgttgaagagaaaggggaggatctttatagattgaagggtgtaatctccgtaaatgagtcaactggacgtttcgtatcccagggtgtgcactctatgttggagggatgcccagctaaaccatgggagccggatgagaaaagattcaacaaattagtatttattggaaggaatttggatgaagctgcactgcgaaaagccttcaaaggctgcttactgtgaacactctgatcacgtattgagtcctgggaagccatgcatatatcaaactgtacaagatgtttgccttgtgctcgctgataaaatgcttactgtttgtcaccaacgtattaggccaatctaaatgtgttgcatgtcatacgtgggtggtgggtcatggtttacgtttatttgtggtatcctcatctgtgccaggatcatacctgtgtatcatggacaatcagacaacagagtaaacttttttaagggaaaaccaagagttcatgtc

SEQ ID NO: 391939 - DNA, 538 bp, Oryza sativa
  unsure (1)..(538): unsure at all n locations
tcgtagaaagaaaacctctcgtctcctcctccttgcgccgccaagacgagtcgcggctgaacaggggagtggcggcgatctccatctggcgagcagagcaggggagaggatcatgactacctcaaggcgtctctcagataggaaagtggcacggtttgagaagaacgtcaccaagaggggttctgttcctgagacagtcaagaaaggaaatgattatcctgttggacccattgtgcttggatttttcgtctttgtggttgttggttcatctctctttcagatcatcaggacagcccaaaatgctggatacttctgagaactgtagtggccgcttatatatatagtctcggttaccttcaggaacatggttgatatatgtagctgttcgtcactccaaaaggagaaacttatggcatagctagttcgctatgatgttaccttgtcgttgtaccgtgccttaagtcattccgataacagatcgatttataccccgttatacttggtgcttnnnnnnnnnnnnnnnnnnnnnnnnnnnnnn

SEQ ID NO: 391940 - DNA, 709 bp, Oryza sativa
  unsure (1)..(709): unsure at all n locations
ggggattccttgatacggccgcgtcgaaaagggaagcccgcatcaagcggcggccggacggcgacgtctcgctggccggctgctgctgctggagtctctcgtggtattctcaactgtttgacttctcagtctcatctcctcgaaccgtccgcctcggagctcggaagcccccaaacccaaccaaaccaccgtgcacgcgcgcgatggctgtggtggaggaagaagagggctcgccgccggcacccgccgccgccgccgatcccgcctcctctggttcaagtgataatgagataactgtagaggaagcttcttttgtgcatactgaacctccgcaagatggctctgtcccacctgtggtttcctctaatatggaggtccttcatgacaaagttaaaaaacaagtcatcaaagaaggccatggcaagaaaccatcaaagttcgcgacgtgcttttgtatgtccataaatggtttgatcattccctatatttatcctggtgatttatagaatgaggctaatatattccaccttcattagcatttgtcttatcatcacatttcatctcgttgttgtttctatggaagttcccataataaagagaacttattccctgtgtatcaggggcccagaacatacattttggaaagttacatgtaccaaggggctcagtaaaaaaaaaaaaaaaaaaaangggcgggcccgcaaaccgc

SEQ ID NO: 391941 - DNA, 503 bp, Oryza sativa
tcgttaaaattcagagttgtaaaagaagaagaaaaattcagagttcaaaagttcagtgagaattatcttgcaggtgctgcattatgggggacgagaagcatcctagctcgaagctttcagagattctccggccaggaaagctgctgcaccggcggcggcggctcgtctccgagttcgccgacgtagggcgggaggacgcgttgcacgagagcgacacggtcaagtacagggtgttcgccggcacgtggaacgtcgccggcgtggcgccgccggacgacctggacctcggcgactggctggacgccaaggccgactcctacgacatctacgttcttgggttgcaggagaatcgtgccgctgaacgcgaggaacgtgcttggcccgacgaggagctcggccgccatgaaatggaactcgctcatcggcgacgccgctgaacaggttcactaccggaagaagaagacgagacgacgacgaccacggcgacgacgacgaaggggcgc

SEQ ID NO: 391942 - DNA, 695 bp, Oryza sativa
cggacgcgtgggcgatccatccctctaccagtcaagaaacaaggaagattacaccaacaaacaagctagctagccaatggcctcgttgtcctccttccggctcgccgtggcggtggcggcactgttggtcgttggctcatgtgccactgagctcaccttcaaggtcgctgagggctctagcgccaaaagtctagagctcgtcaccaacgtcgccatctctgaggtggagatcaaggagaagggcggcaaggactgggtggcgctcaaggagtcatcgtctaacacctggacgctcaaaagtgaggcgccgctcaagggccccttctctgtccgcttccttgtcaagaatggcggctaccgtgtcgtcgacgatgtcatccccgaaagctttacggctggctctgaatacaagagtggcatccaactctaagtaatagacatgcgtactcttgtgttgggtcacatgagaattatgaacctctaaataattttgtcttaaaagagatcacgccatgcgtgagcaagcaaacaattaatttcttgtggttattttgttgtaataagccagtggcaaaataaggcatacatgtgtccttccaaaacattgttgtggagctatatgtgacattgtttggaatatatgtcatttatataagatatatggaaaaatattctaggtgaaaaaaaaaaaaaaa

SEQ ID NO: 391943 - DNA, 528 bp, Oryza sativa
tgggtgcatgataatattaaccttaaaataattttgtcttgaaaaagacacgctacgcgtaagcaagcaaacaattaatttcttgtggttattttgtggtaataagccagtggtaaaataaggcatacatgtgtccttccaaaacattgttgtggagctatatgtgaacacgatttcgaatatatggttgtgtgtgtgtttttttgaaataattcttaacctctctatgattccttttttttcaaaagagagatcaagtctgcatttggggaagccaataattaattttctatggttattttgtgaaatatgtcatcaaccaaataaagcattccgtatgccatgtctgcatgttgctgcagaggtatatatccagacgattttgagtatattacgtatataatatttgtgggaaaaagtatagttggtgaaccttcatctagatagtttcttacattttatttttctaaagtttgagtacatatgtatatgtatttccatatcaataaagctcgtttatcttctttc

SEQ ID NO: 391944 - DNA, 520 bp, Oryza sativa
tttgctctagcgccactagtctagagctcgtcaccaacgtcgccatctctgaggtggaggtcaaggagaaagggcggcaaggactgggtggggctcaaggagtcgggctctaacacctggacactcaaaagtgatggcaccactcaagggccccttctccgttccgcttccttgtcaagaaccggtggctaccgtgtcgtcgatgatgtcatccctgaaagctttactgccggctctgaaatataagagtggcatccaactctaagtaacaggcatgcatactcttgtgttgggtcatattggaattatgaacctctaaataattatgtcttaaaagagatcgctccatgttcgagcgaaccattaattaattttctattaattaattttctgggggtatttttttgtaatgggctagtggcaaaataaggcatacatgtgtactccaaaatattgctgtggagctatatgcaaagcatggttttgaatatatgttatttatataagatatatgggaaaa

SEQ ID NO: 391945 - DNA, 741 bp, Oryza sativa
ttacccttcaagaaacaagaaagacaacaccaacaaacaatctatcttgctaatggcctcgttgtcctccttccggctcatgcgccactgagcttgccttcaaggtcggtgagggctctagcgacactagtctagagctcgtcaccaatgtcaccatctctgaggtggaggtcaaggagaagggtggcaagtactgggtggggctcaaggagtcgtcgactaacacctggacgctgaaaagtgaggcgctgctcaagggctccttctccgtccgcttccttgtcaagaacggcagctaccatgtcatcgacaacgtcatccctgaaagctttacagctggcactgaatacaagaatggcatcaacctctaattaatagacatacgtgctcttgtgttggttgggtcgcatgcgaattatgaacctctaaataatcctatctcttagaagagatcgtgccgtgtgtgagtgagcaaacaattaatttcttgtggttattttgtggtaataggccggtggcaacataaggcatacatgtgtccttccaaaacattgctgcggagctgtatgtgaagcactgtttcgaatatatgtcgtttatagaggatgtatggaaaaatagtatatttggtcagctttcgttaagacgattccgtctgtttgatttcccaaagttttagtacatatgtatgtccaaatcaatgcagcccatttctcctttttagctaaaaaaaaaaaaaaa

SEQ ID NO: 391946 - DNA, 830 bp, Oryza sativa
tcactgtcacaggtgcttgcttagcttagcttagctttgctgctgctccttctcattcataagccagcagctagctagcaagcagcacacacatatatcacaggccatctctctatccctaattaagctatatactccatatagctagctaaacacaggaggagtggaggaaggagaggctagctgatctagctatctgcagtgattagttaaaatgatggcttctgataggttggatgcagaaaggatcatagagtacttcaagggcaagagcatcctcatcactggagcaactggctttcttggcaagattcttgtggagaagatactgagggtgcagcctgatgtcaagaagatctacctgctcgttcgcgccatcgaccaagcatctgcaaaccaacgcgtccaatctgaggtgacggagacggaggtgacggagacggagctgttcagcgtggtgaaggagaagcacggcaagggattctcgcgattcatcgaggagaaggtggtcgccctcgccggcgacatcatctacgacgacctgggcctcgatcccccgttgcttcaacacctcgccgacaacctcgacgtcatggtcaatggcgctgccaccaccaacttctactgcaggtatgatgtgtcgctggatgtgaatgtgctgggagtgaagcatctgtgccaattggccaagaaatgcaagggcctcaaggtcttcctccatgtctccactgcttacgctggcggcgagcaggaggggctaatccaggaatgggcgttcgaggaggggtgggcgctgccagaggcgatgcacctggacgtggacgcggagc

SEQ ID NO: 391947 - DNA, 587 bp, Oryza sativa
ctcattcataagccagttgtatgctagcaagcagcacacacatatatcacaggccatctctctatccctaattaagctatatactccatatagctagctaaacacaggaggagtggaggaaggagaggctagctgatctagctatctgcagtgattagttaaaatgatggcttctgataggttggatgcacaaaggatcatagagtactccaagggcaagagcatcctcatcactggagcaactggctttcttggcaagattcttgtggagaagatactgagggtgcagcctgatgtcaagaagatctacctgctcgttcgcgccatcgaccaagcatctgcaaaccaacgcgtccaatctgaggtgacggagacggagcctgttcagcgtggtgaaggagaagcacggcaagggattctcgcgattcatcgaggagaaggtggtcgccctcgccggcgacatcatctacgacgacctgtgcctcgatccctcgttgcttcaacaccttgccgacaacctcgaagttatcgtgaatggcgctgccaccaccaacttctacggcaggtatgatgcgtcgctggatgtg

SEQ ID NO: 391948 - DNA, 651 bp, Oryza sativa
ttgttaccagttaccctcaatagaaacggtgctaatggcccagaacaagaccatggctctgctccttgccacccttgtggcggtggttgcggtagtacgagccaccgaagagaaggatatagaagaagctgtgtgctcagagcattgcaacgacgaggaaaaagaaggcaccatcgaccacaagcactgtgtagacatctgcatcctcacgaacagggaactttttggggccttggagagaggaatgaagccctcgatggagcaattcagcgctttgtgcaatgaggggtgtagcaaagaatttaaggaggatcctgccaccaacaagaagtgcgtagacagttgcatcgtcgatgctaaggaactcaatggacacttagcgaaaggtggcgcttctagtgttcccgcacgtgcatgattgtgtcgagctgcacatctgttccttcatccatgatcgagggacgatacccattaatggttcccacccagcggtcggccttgtattacattgtcctgttgttccttttgcctcttcaattgtttcattatttggtgttcataacttctatgtgatcgatctggtctgttgttctacccaatattgttactaaaagcatttgttatctttaattgattaaaaaaaaaaaaaaa

SEQ ID NO: 391949 - DNA, 970 bp, Oryza sativa
ttcattatctgaattaacacaacgttttgatggtcgaaaggtaatgcttggtgttgaccgacttgacatgatcaaaggaattccgcaaaagattttggcctttgaaaagtttctcgaagaaaaccatgaatggaatgataaagtggttctacttcaaatttgctgtgccgacaaggaactgatgtccctgagtatcaaaagcttacaagtcaggtgcatgaaattgttgggcgcataaatggccgatttggaacactgactgctgttcctattcatcatctggaccgatctcttgatttccatgccttgtgtgccctttatgcagtcactgatgtggcccttgtaacatcgctgagagatggaatgaatcttgtaagctatgaatatgttgcatgccaaggatcaaaaaaaggagttttgatattgagtgagtttgctggggcagcacagtctcttggagccggtgctattttagtaaacccctggaatattactgaagtcgcagctcaatcaagcatgctttgacaatgtcatctgatgagagagaaaagcggcataggcataactatgctcatgtgacaactcacactgcacaagattgggccgaaaactttttgtatgtgagttaaatgagacagttgctgaagctcagctgagaacaagacaagttccacctgatctccctagtcaagcagcaattcaacaatatctgcattccaaaaatcggttgctcatattggggttcaattcaacattgactgagccagttgaatcctctgggagaaggggtggtgaccaaatcaaggaaatggagctcaagttgcatcctgggttgaagggccctttgagagccctctgtgaggatgagcatactacagttattgttcttagtggaagtgacaggagcgttcttgatgaaaatttccgagaattaatatgtggttagcagcaaagcatgccatgtttttac

SEQ ID NO: 391950 - DNA, 900 bp, Oryza sativa
tctcttagcttgttaggggtagttgctgggtcgattcaagggggtctctggggggccttgtctgcaagaaaggaaaggaggttatcggttaccattccttctcgcagcacaaatgcccttggctatggagccttcctaggactttatgcaaacttgcggtatcaactattgtgtggactggatcagtatatggtcaggcgatttgatgttcttggtgtggcaatcttcttcagcacagcactaagattgacgaatattcagattggtgaatcatcgagacgcacatggcttggggaggaagctgatccacagtactcagatcggctgctgagagcatataaaagaccagtcgaggttgctggagaccaacaagattcaaggtggtttatatcgaaggatgcgattgtatctggccttggtcttctcggcatcaagcaaggtggaacagaagctgcattgtccaagccccgcaggaagagagttgtccgaaagaaagttgcctcaacctgaatttagttggatgttgtctaatgctggaacaattttgctttcgtgccactacgccgtattgagttctacccagccaggcgaacgagggaaaccgtagctggcagccagccttgcagtctgtcgcggaaggcatcgaaccgccggcggtggtcataactgggagggttcagaactggaggccctgtaccattttgtatcttttttcttctcgctttctgataagaattgacatcccgatctcttgtactggcgtgagccaagtagactcggcatagttgtagtcctggagattggtaaagatacagtcggtaatatgagcaaaaccattccatttttgatttaggtcatgtagttgccgatgtattgcttgagcattacaaagttgatgcc

SEQ ID NO: 391951 - DNA, 772 bp, Oryza sativa
  unsure (1)..(772): unsure at all n locations
gttcttgcggacggagcaggatcttcaaggtctcaaccatctgataggtaagattgtagaatcaggggcgaaggattttgccagggcaatcctcaggacttcattgctcgcatcttgtgtcgttgcctgccaaagcaaggcgcttactttaggtgatagcaaggaaatcatagctcagagattacatgatcgtctacaagattgtcctggtggtgaacgtttacaaattgaggcaggtgccaaagtgcagaagtttatagaatgggcattgcagtgcattcatctgcatcgttgttctgaagatacagagtgttacaaagcaaactgcagcactcaccaagaggtacagttccatctatcagcgtttaaagccttcttggacatagctggtgacaatctcagtggcaagattttcactgaggcattcgatgcggcctgcttcccacttacactattctcaactttatttgaacctggatggtcttctgggagttcagcagttgccatacaagggcttttgtcattgctggtggaaggaggtgctgagaatgtaaatcagtgttttctagaagcttcacgttttggaagtactgagcttgtacgcattctgctaaagattgctcatcagaacagcttggctgtcgatgtcgatcttgctctagtctatgcttctcactactgcaaatttgaaacgatggcatgcttggtggatgaagggcatgccacatctntcctttgtcccttagtaaaagcttttgagcgtggttgcttg

SEQ ID NO: 391952 - DNA, 445 bp, Oryza sativa
ttagcaaaagcttcctagctagcttgcctaccattgccatcctctcccctccaacctctccctccattcgcattaccgcgcaaaggaggaagaagaagaagaactcactcgcaggagcaccaatggcgaattctgcgtcagggctggcggtgaacgacgagtgcaagttcaagctccaggagctgaagacgaggagggggttcaggttcatcgtgttcaagatcgacgacaaggccatggagatcaaggcggagaggctcgggcagactgccgagggctacgaggacttcgccgccaccctccccgccgacgagtgccgctacgccgtctacgacctcgacttcgtcaccgacgagaactgccagaagagcaagatcttcttcttctcctggtcgcctgacacggcgaggacaaggagcatgatgctgtacgcgagctccaagga

SEQ ID NO: 391953 - DNA, 724 bp, Oryza sativa
tgctcatagctatatacccagttttagtttcatactcgtcacccgacaagcaagcattccctcggcatacgttgagccgggctgctctaatcatgagtgagagccccatatttcttctggatgcatttacgaaccttattgtttactattcaccgtctgctgatccttcacttccttttcctccacctcatgactgtcttttgagaaccatggctaatgagttgaagcagggcaggtgtataacaccaaagctgacatttatccatggaggacgagaagatccagcattgtttgagaggtatcttattgaagagcaagatgttgacggtacagggtttacaagtggcaaagggttctgtatcgctccgtgagagcatcaggcatgctgcaacagacatcatcgagacagaaagtagtatctagttcaagacgtagcacatttcagctccaaaatcatggagtagattgtatgaagtcatcatagccttcattccttcatatagatatagccttggagcaataaaaggggaggggatcttctggcatcatagttgcctgtgtgtctgtgtcactgtcagtagcttaactttgtggcatttcgtgtatatccggtacctcttttattttgtatactctttttgttacggaacgcagcgatacaaagaataacacatcagatttatacagtataagtaaaatgattaattatattgttcaggttccc

SEQ ID NO: 391954 - DNA, 1002 bp, Oryza sativa
tatatgtccgagaaatatattcggatgttagattaatttttgccaatgcaatgaagtacaatgatgaacgacatgatgttcatataatggcgaaatcattgcttgagaaatttgaagagaaatggctccagcttcttcctaaagttgaaaatgaggaaaggaaacaaaaggatgaggaatccaacggtgttccaaaagtgaacatttctccagaagaagctattgcaaaactagcaaaagatactgacaatgagctgattgaaatcaacaagcagttggaggagcttcggcaaatggtggtccagaaatgccggaaaatgactacatatgagaaaagaaaactgggtgcaggtctctgccacctgtctccagaagagcttactaaggcattggagatggttgcacaagacaaccctagcttcgaagctaaaggagacgaactggaacttgatatggatgctcagagtgagacaaccctctggaggttgaaattctttgtgagggaagcattggaacgacaggccaacgtcgcttctggcaggactgatgaaaatgcgaaaagaaagagggagatatgcaatgctctggccagaactgcttcaaaaagagtcaagcagcaacctaattagtggcctctgaccattgtgcatttgtgtcttcacttgttgtttagaatgtttctgagaaatagccttgcaaaataatctcttccttctatggagcatgtaaataactagtctctgcttagctgtgtgaggttgcaacaatagcgaaatgtttcccaaaaaaagggtcttatgttccacctgtagattgtgtgttccatgcaattgtaccatcaagaaaaatctagtatagcgttgtggcgccatttcactgtggccattagcccattactcattccgaagagcaaactgtgaaaaaaaatccataagaacaaaatgtgatttttgttttcaaaagaatgaacaattcttagcattccaaaaaaaaaaaaaaaaa

SEQ ID NO: 391955 - DNA, 493 bp, Oryza sativa
aaaggaagctggacggcatccaggtggagctgcaggcccctgacccgagtgagatgagcatggacatcgtcaagtcgcgagccctctgagaaacacaggccggttactgcaatccccaggagcgaaaaggcgttaatttgctacagctcctctgcctacaattccttcccgttggcgatggtcaaccattttcttgtcattcttttcctggaagcaaatgtgttgcattctgtatgagactgtattgccgtttttctctttcccccgtcgttggtgccatagtcgtgttactgctgtaaactagaacatgctttcgttttgagacttggatacttttctcatgagtccttccaccatgctggtatgctaaatcagtaaaggccgtggcgtcatatggtgccagttgtgaagcctgttgtacggtgtaccgtagtaaatcactgagttttcacccctttgatttttctcatctgtttggatgtcgcccctgtac

SEQ ID NO: 391956 - DNA, 734 bp, Oryza sativa
ttctgattggtggccactatggtctacttgacacccaaacttttttgccaaatcctgattactatagtgctctactatggcatcggcttatgggcagggaagttctttcagttgatatcaatgcgccgcgtaaactgcgtgcttatgctcattgcaggaaacagcagcaaggaatcaccctcctgttgatcaacctgagcaataccaccggatacaacgtcaccctccagaatgacatcaatgtcagccttgacaaaacagccagccttcataagcacaattctttctcacacagcctcagaagagcggtttcatggctggggcgcaagccgtcaagcgacgtcgcgaggagggaggagtaccacctgacggccaaggacggcgacctccagagcaagacgatgctgctcaacggcgcaccgctggaactctcggacgacgggcggcgttccggcacatgaggccctgcggctcgttggctgtcaaactcgccgggtgtacctggcaccgaacatcgattcgccctttgtagtttcttccaatgtttgaggccaaggcctgttcttgagtgatcaatcttgccttcttgttgagtattacgcccttagaatgttccatttgttcttttctggtttaaatagcaaaacccttggaatgtaagcctttagaatgtaaaagaatggagtgttccatttgttcgttttctggtttgaataacaaagcctttagaatgt

SEQ ID NO: 391957 - DNA, 560 bp, Oryza sativa
atcaagtccaaggaacagctgcttcttgaagctaatcaggttgctgagcagcaagaagcaacaattaaggagctccggagtgaaattaaaagaaaagaaattgatttttccagatcgaatgaattgagaaaggccaatgaacagaaactaaaaatcgccgagcaagaacttgagaggcagaatatgggatggttagcagcacagaaagagttaaaggaagtggcgcaactagcatgcaaggatatggatggtatcaaggatacagtcagtgacttcaaacgtgtgaggtctctgctggatgctgtacggtctgaactaatcgcttcaaaagaggctttctcctcctctcgaaaacagatagaagatcaagcagtgcagatgcagaaacaatttcaagaactctccggtcaaaggctattgctttcatctttcaaccagaacttggaagctgctcggttggagattcaaggcacggcaaaggagctcaatgctgcacagtctcgctgtcatgaactttgatcacttgtacttcaggaaaaggagaaggttgagtctctgga

SEQ ID NO: 391958 - DNA, 509 bp, Oryza sativa
  unsure (1)..(509): unsure at all n locations
aaaaggcaaagctccttccttctcctctgtctcctcctctctagagagagaaacagaaaaaaggaggagactagggctctgctcctccccctgcgccggttggtcggagctctgcctcctcctgattctgctgtcccctcccctccccgatccacctcctcctccatctccttctcctcccgccgatccgatgcgtcatcactagcctcccctcccgcgcttccaccaaccactgcccctccaccctcacctcgtggtttggtaatttggttggccgcttgtccccttccatccaccgatccaccttcccgttgctgcggggatggccgtcgtcgagacctccgccgaccacgccgcgcctccgccgcccgagggggacgcccgggagagggagatgcgggatctggaggaccctgctctccaagctccaccccatggccgaggagttcgtcccgccttcccttgncgcgctttccccaccggctacgcctattaccccacccccaccc

SEQ ID NO: 391959 - DNA, 403 bp, Oryza sativa
  unsure (1)..(403): unsure at all n locations
acgagttcttggaaaacaatagtcttggtcgtgcactttttggacgtggagatcatcaattgaaactagactggccaaaacgatataatatctgccttggaacagcaaaaggcttgtgctatctccatgaagaatcaacattgaaaatcatccatagagatattaaaccatcaaatattcttcttgatgaaagactgcaaccgaaaatatctgattttggtttggctaaactgaatgatgaccgtgggcgtatgagcactcggatagctggaacagttggatacatggcacctgagtatgccacgagaggttgcttgacatgtaaagcagatgtatacagctttggagtggtgacattagagattggtagtggaatgagcaatacangtagcatgtcagatga

SEQ ID NO: 391960 - DNA, 579 bp, Oryza sativa
cccgactcgaccgaccgtctcaaccgagcgagcagctagctagctgcggcgatggcctccagagcggcggcggtcgccgtcctcctcctcgccgtggcggcggcgccgctcttcgccgcggcgagcgcgcatggccgaggctaccttggtgccaagtcctggcctcctgacggcagcctgagctcatcaagctccggcgaggctgcagcggcggacgtcgacgacggccacacggactggaagtgctactcctcctgcatgagcaagtgctgtcaccgccacgacgacgacgacgacgacaaggccaatgccaaggccaacgccaccgccggcgccgccgccgtcgggctcgacgatgactacaagtgcaagaagcagtgcctcggcaactgcttcaaggacgtgccggccgtttgctaccacaagtgcgtcgacgactggtgcgcgaagctgccaccatatagctccgcgaaggtgcagtgctacaagaagtgcggcgataaatgcttacaccacggtccgaagcctgggcccaagcccaagcccaagccgagcccaccaaaacccatgcctggaccg

SEQ ID NO: 391961 - DNA, 1209 bp, Oryza sativa
ccgatccacccgccggtgaggaaggccgccgccgccgccatgctcagggtcggcgggaggcccctcaccaccgccctcgcctggcgccccgccgcggcggccggcgccaggggcccgctcgccgggggctccctccccggcgacgacgaattctcgcgtgagccccagaggccgcgcttcgccgtggattccccgttcttcgccgcttcgaggggcttttcctcagaaactcttgttccaaggaaccaggatgtaagcttgactgagcttccagcaacagtgtcagctgtgaagaatcccagtgcaaagattgtatatgatgaatataaccatgaaagataccagccaggtgacccaagtaaaagagcgtttgcatactttgtgttgagtggtggaaggtttatttatgcttcgcttctgcgcttgctcgttttgaagtttgttctaagcatgtctgctagcaaggatgttcttgctcttgcttcccttgaggtggatctctctagtattgagcctggcaccactgtgaccgtgaagtggcggggcaagccagtttttatcaggcgcaggacagaggaagacatcaacttggcgaacagcgttgacattggatctcttcgtgacccacagcaggatgcggaacgagtcaagaaccctgagtggctggttgtgattggggtgtgtactcatctgggctgcattccacttcccaacgctggtgactttggtggctggttctgtccatgccatggatcacattatgatatatcaggtagaatccgtaagggccctgcaccatacaacctcgaagtcccgacctactcatttctggaagagaacaaattgctcatcggctgagattacattgaccacagggtttaaaatcttatggcacttctattctctgttggtttgacgtttcacctttttgttgctctactttgttggacaccttctagtaaagaataatgagctgctacttggctactgttaattaatttccaagtttggttctgttacctgaaatcaataggagttatcttgtaattgtcttacaagctggcacagtgaagcttatatgttgtcaactgacatcccttctcttcaatcttcgtgtatgtgattgaatgtagttgatttgtttgttataagaaacgtgtcggcaatttcatttgtgacatcatgatcatagaagtgccatcaaacaaa

SEQ ID NO: 391962 - DNA, 1103 bp, Oryza sativa
  unsure (1)..(1103): unsure at all n locations
tcgtccttcttctccgacggcgaacaccgtccatcgcgagaactcttacctcgtcggcgtcggcgtcggcgtcggcgaggaggagcaaacatttacggctggcttgcaatcttaatcttttgcagtgttcgtcattcaggaggctcccggccgatccggtggatcggatcggagcgggagcacaaactgcaaattgccacggtccttgcacttgatttccggagccaggaggatgatttgctgcggcggcgaggaggaggagacgtacgctccccgtgcagccagtcgcagtcgcagcaggcgcccgacacctgcgacgcagtacaatgcaggccctcgtaagccaagaggaccaaatgcacccaggagcggcggcccgccaccgaaggtgctctccatcgacgtgccagccatctccatgggcgagctgaacaacatcaccggacactttggacagagtgccttgataggagaaggttcgtacggtcgaatctacagggcggtgctgacctccggggagccggttgccataaaaaagcttgagcccggcgtgtcaagcgactctggagcagacttctctgctcagctgtcaatgggttcgaggctcaagaacgagtatttcatccggctgatgggctactacctggatgcaaaccgaagaatcctggtctaccagtttgccacgcacggctccctgcatgacatcctacacgggaagaagggcgtgagggacgcggcgccggggccggcgctgaactggagccagcgggtgaaggcggcgtacggcgccgcgagagggctcgagtacctccacgagaaggcccagccgcccatcgtccaccgcgacgtgcggtcgagcaacgttctcctcttcgacggctacgagtccaagctcgccgacttcaacctgaccacccagcctcccgacggcgccgcgcggctgcactccacccgcgtnctcggaaccttcggctaccacgcgcccgagtacgcgatgacgggacagcttaatcagaagagcgatgtgtacagtttcggagtcatcctactggagttactgaccggcaggaagccagtgggccataccatgccgtagagacagc

SEQ ID NO: 391963 - DNA, 485 bp, Oryza sativa
tccaaatctcctcgcgacctcgaaaccctagcctcctccggccaccgtcgccggccacggtgagcggccccacccccccgcagccatggcctccccggagggctccacgtgggtcttcgactgccctctgatggacgacctcgccgccgccgccggcttcgacgccgcccccgccggaggcttctactggacgacgcccgctcctccgcaggcggcgctacagccgccgccgccgccgcagcagcccgtcgcccctgccaccgcggctccgaacgcctgtgctgaaatcaatggctctgtggactgtgaacatggcaaagaacagccaacaaataaacgtccgagatcagaaagtggcactcgaccaagctccaaagcatgcagggaaaaagtaagatgggacatgttgaacgagaggttcttgggacttggtgctggcctggaaccaggaagacacccaaatgacaaatcgttatatgacgatg

SEQ ID NO: 391964 - DNA, 603 bp, Oryza sativa
gtgggcaaaaagcgagagagatctctcccgagctcgatccggtccaccgcgacacgaagacgaccatggcgatggctcgctcccagcttgccgccgtgttcctcgccgtcctcgtctcggtggcgccgctcgccggcgcggcggacaacctccaggacgcgtgcaaccggacgctgttccccaaggtgtgcatccaggcgctgacgacgaacccggagagccggacggcgaacgcgcggcggctggcggagctgtcggtgtacgtggcggcggaggtgggcacggcggtggcggcgttcgcgcaccacgagctgaacggcgtgaaggaggacgccctgttcaagtgcgtggacagctgctccgacgacatcgaggaggcggtggcgcacctcagcgcgctcacccgcgagctcaccgacgccaagttcctcgaggtcaaggcctggctctccgccacgctcggcggctcctccacctgcgaggacacctgcaaggacgcccccatcagcgagatcaagaacgccgtcgtcaccaagagcctcgagttcgagaagctcctccggggcacgctcgacctcatcaccgaggccctcggcttcatgt

SEQ ID NO: 391965 - DNA, 573 bp, Oryza sativa
ctcccacacgcacacagtcctcagtatcacacacacactcacgctcacgctccactacaacgcactgtacacagttgattattagctagttgggtttctggcccggccgccggcgagatgggcaaggacaagcaccaccgcgactggatcctccggcggtgctgcggctccatcgccgcctgcatcctcacgctcgccgtcctcgtcggcttcatcgtgctcgtcatctacctcgcgattcacccctccaagccttctttctacctccaggacgtccagctccgcaacatcgacctctccgaccctgccatctccctcaacctccaggtgacgatcgcgtcgaggaacccgaacgacagggtgggggtgtactacaagacgctgcacgtgttcacgacgtacagggaggagccgatcacggtgccggtggagctgccggcgatctaccaggggcacaaggacgtgtcggtgtggtcgccggtgatgtccggcgagtctgtgcccgtggtgcagtacgtggcagacgccatgaggcatgacatcgcagcgggctacgtgctgctgcacgtcaag

SEQ ID NO: 391966 - DNA, 466 bp, Oryza sativa
  unsure (1)..(466): unsure at all n locations
tcgtcaaactgcaattaattgtttgtttcgcaaaacaagcatcctcgcctcggcgtcccagatctctgctgctgggctgggctgcctgcctgacaagagaggcagcagccatggcgttcgaccccttcaccgacaagaacgccgtcttccgccgcctcaaggccaagcccgagaacaagatgtgcttcgactgcagcgccaagaaccccacctgggcctccgtcacctacggcatcttcctctgcctcgactgctccgccgtccaccgcagcctcggcgtccacatcaccttcgtcaggtcaacaaacctagattcatggactccagatcaactgaagatgatggcttttggaggcaacaatcgtgcccatgctttctttaaacagcacgggtggacagatggtggcaaggtcgacgnaaagtacacgtnaagggttctgagntgtacaggcagancttcaaaagg

SEQ ID NO: 391967 - DNA, 494 bp, Oryza sativa
ttatctttccacttcaaattggtcggagaagaagagggcgttcgcgcatggggaaggcggcgagcatgagggtggcgctggtgtccgtggtgctcgtgggcctgatcctggtttccacggcccacgccgcgcggcccgagaagctgcccgccgtcgtctccccctccatcgcccccgccgtcggcgaggtcgtcgatgccgccatcaacgccgtcgatctcctgggggtctcgaagatgcaggaggccaacccgtacactcgcggctgcagcaggatcaaccggtgccgcggctgacggacggcacgcgcgcgtcgcaattatacatgtgtatttgagtattgatcatcgacgacgacgatgagctagctggtggacgattgatttcgcgtggtggcgattggatctaattacccgtgtgtgtgtactactccgctcctccgattttaaatatactccccaattattaacttgtttaaaaaaaaaaaaaaaaaa

SEQ ID NO: 391968 - DNA, 468 bp, Oryza sativa
tttcaaataaacaaaccacttcaaattggtcggagaagaagagggcgttcgcgcatggggaaggcggcgagcatgagggtggcgctggtgtccgtggtgctcgtgggcctgatcctggtttccacggcccacgccgcgcggcccgagaagctgcccgccgtcgtctccccctccatcgcccccgccgtcgccgaggtcgtcgatgccgccatcaacgccgtcgacctcctggcagggtttcaaaaaccgccgggggcccggttaccgccacccggcggtacggcggttaccggcggtaacggggtaaccgcgcaaaaccgcgacaaatttacaaatcgaaatttggattccaaaattcgggcaaaccgcgcggtttgacgcgggtaccacgcgggttggcgcggttaccggcgatgtgtaatgggtcgacagtaccggcccggccatttttttttttttttcattttt

SEQ ID NO: 391969 - DNA, 619 bp, Oryza sativa
ctctctcataccttccgctacagaggtatttatagggagagatcggcgccagcatccctgatcatattcagttctgagtttttcttttggcagggagagggacaaagatgagtcttttcggcctcggaagcaagaaccagaagacattcaggccaaagaagaatgcaccatctggcaataagggtgtgcagctgaagaagcacattgatgcaaccttaggaagtggtaatttgagggatgcggtcaggctgcctcctggagaggatctcaatgaatggctagctgttaacactgttgatttcttcaaccaggtgaacatcctttacggcactctgatggagttctgcacgcctactacatgtccaacaatgtcagctggacctaagtttgagtacagatgggctgatggaattcagatcaagaaacccatcgaggtttcggcaccgaaatatgtcgagtatctgatggactggattgaggtccagcttgacgatgaatccattttttctcagaaacttggaacccccttcccacaaaattttcgggaagttgcgaagacgatattcaagcgccttttccgtgtttatgctcatatttaccacacacattctcagaagat

SEQ ID NO: 391970 - DNA, 564 bp, Oryza sativa
ttcgtgtacgcgtgggcgacggcgaaggggccggcgggggtctcccgcgctcgcgcgggtctaacctgccgctgccggcgccgcactccgacccaaacctccagttctccgggacggacgatgacttctccaaccgtcacagcagctcgtcggcgacgggcggcgcgagccccgggtactactccgactacccgtccagcttcagcggcgagtgctcgccgtacaacatgtcgccctggaaccagaccatggcgtcgccgtggtcgcaccacagcgacgcgtccatggccgggctcggcggcgcgccacgccatggcgcccgggaccagcctcatcggctcgctggtcagggaggaagggcacatctactcgctcgccgccaagaccgacaccctgtacaccggctccgacagcaagaacatccgcgtgtggcgcaagcagaaggattcccgcgggttcctgtcggctagcggccttgtcaaggccatcgtcatctccggcgagcgcagcttaaccggggaccgtgaccgcaagatcagggtgtggcaggcgtctgccaagaac

SEQ ID NO: 391971 - DNA, 577 bp, Oryza sativa
tcgtttggacgaaaacatcaataactgcgggtctttctttgccattggcgaaaccttttcggacaccaccaactcgacgctatacgcgctcgagcgcctcactgccgccggagaaggtaaacgcagtaaggaggacctggaaactgtgcacaagtggaccaagaatttggagacccaatacgatgagaccgcgagcaagtgcaagttaggtgatctgttccaagtacggtgacaagaaggtccccaccgtttgggtcatagacctgctcacgaccacagccacccgcctcctcaatgccataaagccatgattgatcgatcgatcatcccttcaatcttagctatatataccttccactaaattttttttatttatattttggataattcccatgatatatatgtaataagggcgtgatgcgcatggatatcgcatgcatgctgcatttgtaacattgttatcaatatttgaaaatatttttttcaatattgtaattactagcaaagtgtgtcgatgtgttgtaacggaccgaaaaaccaaaatgcaataatggttaagctgaaaaaaaaaaaaaaa

SEQ ID NO: 391972 - DNA, 380 bp, Oryza sativa
tcgttcatcccacgccttccccccccccattcgtcgcctcctggcccgggggccgcgagcaaaacccccacccccaaatcgcagcctcgctcagctcgatctctctctcgtctcgccatggcccccagcgacgacctcgtctacatggccaagctcgccgagcaggccgagcgatacgacgagatggcggaggcaatgaatagcgtggcaaaagccagacgaggggctgacaaaggaggagaggaacctcctctcagttggctacaagaatttgattggtgcaaagcgtgcggcaatgcgtatcattggatccattgagctaaaggaggagacaaagggcaaggagagtcatgcaaggcagacctgctgagtatcctccc

SEQ ID NO: 391973 - DNA, 692 bp, Oryza sativa
tccacacggacgctgacgcatcatagcacagagctagtggcatagctgttcttgcatgaaccgaggtctctacagacattgggtttaaacggtggtttctactgctagctgccatgatttgtccagttgtgtacatcttagggcttaggaacttaattggaaccaagatgttaccaatatgatatgttcgattggcaatttgaagcacctgcgttatctgtctctaaattgctatctgcaagaactgcctgaatcggtgtctggtgtttacagcctggagacattggtgatttccaatttgagaatatggagggcaacatacttccacaatcttgtcagccttaaaagtctgcatgtatatttcgagtttttggatggatcattggatcaattttgcaagcttgatatgttggacacactatgtctgaagagatgcagtaacttgccatacttacccttacatgtaggaagcctcatcaacttacagcgtcttaaactcattggaataccaaacatccggaatttggatcatgcatctttcaagtacagaagaaataacagcataacaaggtaccaagaagcaacatttccattcttggaggagttagaactcgataaattgtgcaaactagaagattggtatggaataccacaatcagattgcccgaaattgcagagacttacaatcagag

SEQ ID NO: 391974 - DNA, 686 bp, Oryza sativa
tcgttctcatcgacatcactgacggctccaccgccatcaccatctccaactcccacttcaccaagcacgatcacgtgatgctgttcggtgcacgcgacgactcgccgaaggacaagatcatgcaggtaacgctggcattcaaccactttggcaaggggctcgtgcagaggatgccgaggtgcaggtttggattcttccacgtcgtcaacaacgactacacgcactggctcatgtacgccatcggtggcaacatgaacccgacgatcatcagccaggggaacaggttcatcgcgcccgacgacttgaacgccaaggaggtgaccaagagggagtacacgccgtacgacgagtacaaggagtgggtgtggaagtcgcagggcgacgtggatgatgaacggcgccttctttaacgagtccggcggccagaacgagcgcagctactgaccagctcgacttcatccctgccaagcacggcaagtacgtcggccagctcaccaagttcgccggcacgctcaacttgccacgtcggcatgccatgctaattaacttagacatatcagcaacgatatggaagaggacgagagaaagctaattaaccatgccttaatttgtatatatatgaaaatctgacacatttgtacattgtgtaaaactttataattgtcagaagagaaaaaaaaacgtac

SEQ ID NO: 391975 - DNA, 427 bp, Oryza sativa
tcgctctttcacaccatatcctataatggcgaactcaccgacgccgacaatgctggcgttcctggctcttgggctagcgctcctcctctccgccaccggccaggcgagcgcgcagaactgcggctgccagtcgaacatgtgctgcagcaaatgggggtactgcggcacgggcaaggactactgcggagatgggtgccgctctggcccgtgctacggcggcggcggcggtggaggaggaggaggcggaggtggtggaggcttgaggctgaggcagcgtccagtatgtagagagcgaggtccccggtgcgttcttcaatgggatcaagaaccaggccccgaacggttgtgccggcaagaacttttacacacgacagcctatttcttaacgctgaccacttctactcgggctttgccaggggtccgacca

SEQ ID NO: 391976 - DNA, 814 bp, Oryza sativa
  unsure (1)..(814): unsure at all n locations
tcgtccccaatcctcccaaggccgtgaaccacaaaccgacgagcacagcgggcgcgagggcggccggcgccgggcggagcacacgcctctttcacaccatcatcgccagcgccggatccatccacgatgggcggcggcaacgggcagaagtccaggatggcccgcgagcgcaacatggagaaggccaagggcgccaaggggagccagcttgagaccaacaagaaggccatgaacatccaggttttagttttggatgggcatattaaaatctgatgaactgtgttggcggatggcatgaggcccttcgaccaaatttgccgaaacccgtggcgaaggctatgaaccaaggatgatgcgaggcgaagggtcgcgtgagtacctgccgaagaaggacgacttcgccatagccagtttgccctggcatccagcgaagaaggacggcttcgccatgtccagttcgccctggcatccagctcgaagaaggacggcttcaccatgtccagttcgcccccgcaaaggccgaagaagccttttcggcccatcaagcttaggggctatagggccgacggtcgcctgacggcccatcaagggcccataagtcctcttgacattatgtaaccctataaacgtccctttcataagggcaaccatgtaaattcccccgtataacctaaatcctagtagtaagaacctgtaatggggctataaatagtcccctagggccatgtaatgngggatcccaagaaaattcaaaatttaatacacttcgtttcttttccaaccattgttgagtaacgacgtctttcgacgtatg

SEQ ID NO: 391977 - DNA, 519 bp, Oryza sativa
ttctcccagctaccactcttcacaaagcgatagccggaggaagaagaagaagcaacagcagcagtcaagccaacccgtccggcgtagcaagaagcaaccgaggcagcaaaaggaggaggagggaggactccactgttcgcttgtatcgtcttatgggggaagaggatatcagcaacgacagcaagagcagctgcggctgcgaggacggcacggtggaggctccggcggctgcggcgccgaaggagaacggccgagccgcggacccgcgcctccaggccatctccgacgccatccgcgtcgtcccgcacttccccaagccagggatcatgttcaacgacatcacggcgctgctgctccggcccgccgcgttcaaggacgccgtggacatgttcgtcgagcgctaccgcggcatgcgcatcgcggccgtcgcaggtattgaagccagaggattcatatatggcccagcgatcgcactagcaattggagcaaaattcatacccgtgcgcaaacctaagaaac

SEQ ID NO: 391978 - DNA, 689 bp, Oryza sativa
gttgttcttttagatggaggaccgctttcacagaaaaggagtattgaattcacatctgatcctctcgcttcaagcacatgggaggaggtgtcagaaaagaatacgctgatcacaccagtgcagtgtaaattcatctggaggcaattcaatgcagagacagagtatgctgttgcacaagcaatttctatgcaggaagcacacagacgtagcaataactggctgccacctgcatggactgttttgcttctcgcaattttaggttacaacgaatttatattccttctaaggaaccctttatatctgctggggctcttcgtcgccttcgtagtatcctatgctgcatggttgcaatatgacatcacagcctattttcgccatggcacgctctcaggtcttctgactattacatctcgggtttctccccacaataatggacatcataacagcagtcatcaacatgagtcacaaccagaagagctcctcgcacccgcctcgacatcgtcccccgcttcatcctcaaagcttcaggaaccaggcgcagcaacagtctcaggctcaggtgcagtatcaggctccaagttcactgtcatcatcctcttcggtgggctccaacagcgatgacgaatcctgaagcctcataaaacatccctgtagaagacacgttccagtctccaggaaggactttgtat

SEQ ID NO: 391979 - DNA, 482 bp, Oryza sativa
cgcttcgttcatcagcttgaccgcctcacctcaccaccccaagctagacgacctcgtcttcctcctccacctcctcgcgacctcgcattgttagatcagcctcgattcatctccaatctttcggcgccgctcccggagagagggacagcggcgcaggcggtgagcacgaggaggagcagagctaatcaaaagccctctcgccgctcgagctctcgtgcaccgtgccgccgccgccgacgccgacgctgacgccgacggcttaattcagtcttgtcggctacatctcttggcgtgctgaaattggtgggagcacgagagcggcgccaatggggacgaggccgtgcgccggcgtggcgtcggcggtggcggcggcggtggccgttctgctgctcgccgtgtcttgcttcgccgcggcggcgacgacgacgcagaagcatggcagtatgtcagggaagggcggcgacgtgctggaggacgacccg

SEQ ID NO: 391980 - DNA, 591 bp, Oryza sativa
cttaattctaggatcttcttcaattctgctcttctggttctttgagagagtgtgcatgtgtgagagagaaattgctgattaattagcttcagcaattcttgtggtacatagtatacatagatagaaagagagagagagagagagagaaagcaagcaagctgaattgatgcttgtgtgtgcttgtgttgacatctgtatacacatgtgcacggttctttgttaaatcacttgatgattgcaggtaattaaattaagaagagagaagcatatatatacatttccagtagaattgtagctagagtgatctatagctgccggccggcgaggcgatctcgatggcggcgtactaccacggcggcgccggcacggacatccagtccggcaccgacggcctgcagacgctgtacctcatgaacccgagctacgccggctacggagccgccgccgccgccgccgccgcgcccggggcggcggccaacatgatgctcctgaactcggcggtgacctccatgacgccggtgtcgttcggccaccagccgtcgccgtcgtcgtcgtcggcggcgcacactttcgtcggcatccctctccagg

SEQ ID NO: 391981 - DNA, 795 bp, Oryza sativa
attccctcatcccattaaatttgctcaaataattaaatatgacaggcatgggttcttccatcggccgtgccaccattttctactgcgttgctctatccataattgccggcgccgcagcgacacaggtgccccccaccgaagcagagtccgtagaaggtagtagcacatgcctctcctgcaaaaattactgatcagctaactaatgcgttcattttttttggtacacgtactgatcacggcacgcgcttgtggctgcacgtatgcatatcccagcggcagagcttgcgtcctctgccttcaaggccgacacgttgccctcagcctcccgcaagctgatggccgttagtgacgtgccgctagcgccggtgtgcccggtgcggttcgacaagatgaaggggcccgccatcgagctgggaaagaagtgcaagacgacaggggtgaaggtgtgctgtgaggcgttcaagacattcgcatgcccgcacaacaagctgatcaatgacgtcaacaacggatgcgcggacgaaatgttctacaccatccacacctacggccaattgctgccgggaaccatcttcaagaaatgcctcgagggaccgcatgggatgaagtgttgaattcgatcgtgctgattcgacttgctcgatcgatatcgctccgttgttgctagcctccggcctgatctatactacctataacgatgaatgtccctttcgtcatcttgcaatgtaactaaacttacttttattacttcgaaatgcaatgaaccacaaaaggtttattaaaaaaaaaaaaaaa

SEQ ID NO: 391982 - DNA, 438 bp, Oryza sativa
  unsure (1)..(438): unsure at all n locations
cccncttcccattaaatttgctcaaataattaaatatgacaggcatgggttcttccatcggccgtgccaccattttctactgcgttgctctatccataattgccggcgccgcagcgacacaggtgccccccaccgaagcagagtccgtagaagcggcagagcttgcgtcctctgccttcaaggccgacacgttgccctcagcctcccgcaagctgatggccgttagtgacgtgccgctagcgccggtgtgcccggtgcggttcgacaagatgaaggggcccgccatcgagctgggaaagaagtgcaagacgacaggggtgaaggtgtgctgtgaggcgttcaagacattcgcatgcccgcacaacatgctgatcaatgacgtcaacaacggatgcgcggacgaaatgttctacaacatccacaactacggccaattgt

SEQ ID NO: 391983 - DNA, 686 bp, Oryza sativa
  unsure (1)..(686): unsure at all n locations
tggacgccaggaaaaaacccctacattcctccctcttctttgccgcggcgccgacatcgatccatccctaacaaataacacgatgtcgcgcgccacggtcgccatcctcttctacatcctcacagccgccgccgccatcagcgcggcggcgcaggccccagcggagtcgccatcgaagagcacggcagctgccacccctgcaaaggcacccaccgtcgcatcggcaccgaggaaggccggaccagctgccgcgccgacgaccaccgtggctacctccgcgcctgctggtggcgacgaggtgtccatcccccctacgccgttcgccaccgtggtgtctcccgtcgccgatggacctgccgatgcggctgacgccgatttctccggtgccggtgctctcaagaggtgcgctgccgttgccggtgtcgcggctgccattgccaccgtcaccttctactaagatgccggatgcagagatgtggagtgtcatggtgagctgttagggtggacagcaggaggaaggcgttattgtcgttgggaggggccacatatttcctggttttgctcatctcacttgcttgtgcaacattatggggtcgaccctatatcaattgaatgcatttgaacgcctgataaaacttttctggaacnnnnnnnnnnnnnnnnnnnnnnnnnnnnnnnnnnnnnnn

SEQ ID NO: 391984 - DNA, 699 bp, Oryza sativa
ctgctcgtttcccatcatcttcaatctcatcatttcgctgaccaacgccctcaaagagtgacatagccttagcattctcctcatccttaaccttcttgaatatatccctaaatcccagttctctaaggactagctcacgaagcctgcaaagaagaatgcaatctggtggccctccattactctctgggttcttcttcaactcctcgagcattgcagtgtacctctgggcaaacttctcggccttggcgggcgcatcgggcaccgtggggtcgttctccgcgcgctgcctgaaggaggggacggagttgaggaagaggtcgatccactggatctcgacgggggtggcctttcgcgggttgtcggaggcgaagcggtaggggatggtgcaggccctgtacgtgctctccaccggcgcctgcagcagcgggaacggcaccgacggcgacgagctctccatgtgctccggcttactagtcagatcgctcctcctgctcgtcggcggcggcggctgggattcgtggggtggttaggtaaccgcctaaacttggggcgccgtgagatccggcggtgaagtggttattctgcacgcgaggaagacggaggagaaggcgaaggggaagcaacctgccgctcgccacagatgcatattctgctcacgtaacatgggctatagaggccggaatggcctaatgcctggcc

SEQ ID NO: 391985 - DNA, 784 bp, Oryza sativa
ttggttctgctcatactggtccggctttaacccctgctgaagttcttatagccattcatgatattaatcctgaaaaggatagagttgccctgaagaaggtcactgatgcttgcacagcttgctttgaacagcgcacggtatttactcagcaagttttggagaagtcactgaataaattggttgacaatgtaccaattccacttcttttcatgagaacagttattcaagcacttgatgctttcccagctttggttgattttgtcatggaaatactctccaggcttgttaataagcagatatggaaaatgccaaagctgtgggttgggttcttaaaattggcatatcagactcagccacgctcgtttgatgttattttgcagttacctccaccccagcttgaaatagctctgaataagtaccccaatctacgaactcctctttgttcctttgttaatcagcggaacatgcacagcatcttgcccagacagattttgaaagttctgggcttcaatcaatgaaccccaccaggcaccaattccatttgtgcctgctgcaatgcaaacggcagatgcaacctcctctcttcctggtgcaactcttatgtgaaatgtgatgtataaactccaatcagatgcgagaaggctttcctgatcacaagtacacacactgccttgtgaacaacgatgatatgtgagtaaaacagagcccagacaaggacagcggtgtcactcaaaagggtctgcgtttgctggacttgtttcaacaaaagtacaggttgtcagca

SEQ ID NO: 391986 - DNA, 1055 bp, Oryza sativa
attttctctcctgtgccgctgcacatatatatagctcccaccatcacgagtaatctaacagaataaatcatgggaccagcccacggccacctcgtcctcctcgtcgccgcggtggcgttgctgtcagctggcttcctcccgcacgctgtggcgaagaagggcggcgccgtgccaccggcggttgctgacatatgctctcgcactccattcccagacacgtgcaagagcaccgccgggcggcacgcgtccaagtacccggtgatcgacgtcgtggctgtgctcaacatgcaggtggacgcgttctccaagcgcacggcgcatgcgagggagcgcgtgaccaaggtgtcccgcggcgcacagcctcagcagacgcaggcgctgagcttctgcgacaccatgtacatgaacacccaggacaccatcggcgccgcggagcgggcgatcaccttcagagacaaggctacggcgaagatcatgctgcagctcgctgtgcaggactttgagtcgtgcgatcggcccttcaagcagtccgggatcaacaaccccttggagaagatcgacgtagagctcaaccagatggcacaaaactgcatgacactggccagcatgatatgagactcatgaaggactgaatcgatgagaatatgagatgtcacgtcattcgatcaggatgtccacggatttggggaggacctgggtttggtttttccttcttttacagaaatttcatttactaattttgtgttttattttcttgacagtgtctaaatttgttaattatcacgaccccgacctgcgtttgttgtgtaggtcttttaacgtggaagaaaggagggccttttacgtttatcattttgtactgagttcactaatttgttccatttgattgattgatgttttgtgttaatctttgttgttgttagtgtcgaatagttaattactaggggttccttcccccgttgctgcagggcagtgtgggtatatatataaagttgtaacaaccatacggccgttttcaaagctcgtatgcaattccatattttgccttttgctct

SEQ ID NO: 391987 - DNA, 502 bp, Oryza sativa
agaacataaaattcggttcatcaaatcagaaggaatttgtttgttgaagctgtagaattgtagtgaagagatcgatagatcgatcggcgatggatttggcggcgtggtttgggccggtgaattcggggctggtgctgctgatactgacaatgctgctgcgaaacctgcagaatttccagctgatgcagacgttcgtggcgcggcagctgaaccggcgggcgcggcggctggcggcgctcatcgacccctacctgtcgatcaccatccacgagtacgacgccggccggatgacgcgcagcgacgtgttcgccgagaccaaggcgtacctcgacggcgccgtcggcacgcgcgacgacgtgcgccacctcaacgccgaggacgcgcgcggcggcggcggcggcggcggcgcatgcgaagggggctggtgggtggcgctggcagcagtagcagcaaggggctggtgctcagcatggcggacggcgaggaggtggaggaccacttt

SEQ ID NO: 391988 - DNA, 507 bp, Oryza sativa
tgacactcgagctgagcacgtctagctagctatatctctcaacatcttccgagctactactagtagctagctagctagaggaagcagcagcaatggcgaaatcttgcaccttggtactactacttgtcgcactggtcgggctctcacttcttgtgagccccattgcttgctcccgcaagctcagcaagccgaaacccaagccgaagccgagcatgaagaagccggtggtccgggctcacaacaactacaccggtagcccgtcggtgacggtcaccaccggctgggccgccgccggcgccacgtactacggcgcccccaacggcgacggcagcgacggcggcgcttgcggctaccagaccgccgtcgggcagcggccgttctcgtcgatgatcgccgccgggagcccgtcgctgtacaagggaggcaaggggtgcggcgcgtgctatgaggttaaatgcacgaccaacgcagcttgctccggccagccagccaccgtcgtcatcacct

SEQ ID NO: 391989 - DNA, 534 bp, Oryza sativa
ttcacgcgtccgcctcactccatttcgcagtccatgaccaagtgaagctctcgccgtctcgcggtgacgccaccatggcgagggcggcgagggggaaggcgccgaggccgaggccgaggccgccgcgcgggctggcggcgagcctccggcggctcctcgccggggccggcggcgggctgggcgtcgcggcggcggcgtacgtcggggtggactacctgcggtacctctccccggcgtggcacgggcggctgatgccggcgctgtgggcggcgctggcgctcgccgccgcggcgcgggcgccgttctaccgccactggtccgccgagctccgcgccgcgctgccctttctcggctccatcgccttcatgctcggggccttcctctgcgaggccgtctccgtccgcttcgtctccgccgtgatggggctccagtggcacagatctgctgctccactttctgacactgggcaatggctggctttaccattgaacgagaagcttcctcaaagtgtggctggaccactgagagcccatg

SEQ ID NO: 391990 - DNA, 642 bp, Oryza sativa
tcgatggcctcctcgatcgatcgatcgatcgaattgatcgattaatctcctcctccaccaaccaataatataatccagttgtctctgttggccgctcgttgcgaccacgccactacagtcggggcaaccatgggtgcttgtgcaaccaagcccaagacgctcgagggaaaggctcccgaggaggccactcccattgaggcagcacccaaggttgcccttgagaccacaatgatctccaataaggaggttgtggctgatcaagcacctgagaaggtagtggaggaggccaccgcgatggcagagttaccaccaaatgatgatgccattgtcatgcaagacaaggaggaggaagttgaagaaaagatcgtcgaggaggagaagccttcagccccagctgcagaggtgaacaataccgaggtggtcgaggagaccatagaggtaaagaacaccgaggtggacaaggggaccacagaggtgaagaactccgaggaggagaagccaattcagagctgataaacgaccatgtaaattcgctccatgattatatatgctcatccttatgcgtgtaatccattagggttggcatatatatctagttccatgtgacatggatgaaccatgtaatctttgatgtcacccctt

SEQ ID NO: 391991 - DNA, 589 bp, Oryza sativa
  unsure (1)..(589): unsure at all n locations
ttgngttcggccaaacatagcagcagcagtttgcgtacttcggccgcacctcacctgccaatccttgtacgacagcgccctgccaaccatctgctctctctaagctctagctctacctttcttcctcctcgatccatccatcatcgatcattcttcttcttcttcacctagctagcttgctcccgccagacggctctaatataatgaaccatcgctagctagttcatcccatcgtacagtgcactagtatagtatatggaggagtacgtgaccgcgggaagcactactcctccgccccatcttcaccagctgctctccggcaccggcgctgcaccaccaccgtcgtctcacgatgacgcccatcctcaccctcatcctcagagcagaagaacagtgcccgcgcggcggctgcggcagagacttgagcatgaggtgagtgagctgaacaagcagctgcggaacgaggaggcggtgcatgatatcctaaaccgcgcccttcagcactnaaacaccaccaaatcatcatcatcattgtcgtctccatccgtcctccacaacatccctgcattcatcccgaanaaggccaagg

SEQ ID NO: 391992 - DNA, 486 bp, Oryza sativa
tcgttaatgttcaccgtggaattcatgttctcagtgcccaggctgccgttgcatatgagagtgcaagagcaaaagttgcagattctgtcaatgccgctaataggagagagattgtttttacacgtaatgctactgatgctatcaatttagttgcatattcgcggggcatgcccaacttaaaacaaggtgatgagatcgttcttacgattgcagagcatcatagcgctgttgtcccttggcattttgcttcccagaagactggtgctactttaaagcatgttgggctaaccaaagaaggggttccagacattgagcagttgataggtcttctgtcatacaagacgaagattgttgttgttcatcatgtctcaaatgtactcggttcaatgcttcctattgaggatattggaacatggtcaaacagaatcggtgctaaagtccttgtccatgcttgtcaaagtgtttcttatatgcctgtcgatgttc

SEQ ID NO: 391993 - DNA, 565 bp, Oryza sativa
  unsure (1)..(565): unsure at all n locations
ttcattatgtatcttccactgaagtagaaagctatttcaacctatcttgctatgaaaacccaggcatcactgcttgtcaagaaatgctagagaggaacaaaaactcctggagcgacttaaatatctctaaaagtttccatcttcctccactgaatgatgagaacatacggaagtctatatttggtgatagagactcttcagggaccatccctggtgataccctatctacaacatatttccccagactagacggaactgattacaagtttggttttcagtttgatgattcagaatatatccgccaagaggatgacaggagaaccttggaggctctctatacattcccgactcttctgccatgtgtaaatgaaaatgtcccgctgtcagagatcttacctttgcagaaagatagcacacttgcctcaagagctttgaagtttattcagagcatgagtttgagagatcctcttcaaccagttggtatcatccaagaatgcctttctaaatgtataaagagacaggttgatcacattggcaagcnaatcttggtcaaagctaatggggg

SEQ ID NO: 391994 - DNA, 507 bp, Oryza sativa
ttgactttgagaacggccttgttagcctggactcaaggcaaatggaaatcactgacttctttcgtcaacgctaccagtgggatgtgctagcagcaaggtcaatatgggcttttgggcctgaaaagcagggtcctaacattctcttagatgacaccctttcagtcgaggtggataaaaacttgctcaatgcagtcaaagattcaattgttcaagggtttcaatggggtgctagagaaggtccgctgtgtgatgaaccaattagaaatgtgaaattcaagatcttaaatgcaaacatagctcctgaaccgttgcaccgtggtggtggtcagataattccaacagctcgtcgcgtggcttactcagcgttcctaatggctaatccacgccttatggagcctgtctattatattgcgatccatacacctattgactgtgtctctgccatatattacggtgctatcccgtcgtcgagggcatgtaacagcggatgtaccctaaccaggaact

SEQ ID NO: 391995 - DNA, 536 bp, Oryza sativa
gtcgtccgtagcgggagggagggagagagtacgtgcgggcgtccggaggtctcagcgcacgcccgcggccgggccgtcgcgccgatcgcgatggggtcgtggcggcgcaaggcctacggcgccctcaaggactccaccaaggtcggcctcgccaaggtcaacagcgacttcaaggagttggatattgcaattgtgaaggccaccaaccatgtagaatgccctcccaaggacaggcacgttagaaaaatattcgtggcgacctccattaaccgccctcgagcggacgttcaatactgcatctatgccttgtcaaggagattgtccaagacaaagaattggacagttgcattgaagacattgatagtggtacataggctcttgagagaaggtgatcctacattcaaagaagagttcctggcctactcatacaagggaagcgttttgcagagagcaaacttcaaggacgattcatgccaattagcttgggattgctctgcgtgggttcgcgcctacgcgctcttcctagaagaacggtt

SEQ ID NO: 391996 - DNA, 527 bp, Oryza sativa
cgtccgatcaaaccctagctagctagctagctaagctagcacgcacccatggcgtcgtcttccacctcgagctcgctcgccgtggcagcgatggtggccgtcgtcctcctcctcctgggtgccaccgccacgtccacccaggcggcgcgcctcctcgacgaagaactccccaccgccgccatcccggcgatccccggcgtccccggagtgccggcggtcggccccgggatcccggtgatccccggcgtgcccggagtgccggtggttggccccgggatcccgttcgtgccggtgatccccggcgtgccggtgatcgtgccgatcatccccggcgtgccgatgatcgccggcatgacaaccctgccagtgccgccatttgtgccgccgattgatcccggcgccggcgccggattccccggcgtgccgccggcgtcgtcgaccaccgtgcaggaagacccacagccgccgatgccgtccgtcgttccacccgtgccataggtgttaatcaactccggcgagccaccatg

SEQ ID NO: 391997 - DNA, 773 bp, Oryza sativa
cttccgcttccccctctcgagtctctcgcctctcccccgtggccaacccacacaccgcgggttggaggaggaggaggaggaggtaggggaaatccccgtcggccgtcggctcggcgccgaatcgatccgcttaggcttcttctgctgggctcttccatgaagcaaatgaagtttataatgcacatactaatgttcagtatattatactgagaatcaactttattctcagctgtatatacactagtatgccagccattggtagctacttgaaaggatggtgaaacgcatatgattacccatgatgagcatgtgtgttccctttttttattagtgctaagctggaaatcaataaatccaagatattcatggagcatgctacctgtgatgatgtgcatgagcatgctataaatgtatcacatggagaaactgcatcaacatcaaccagtcatcaagatttgcacagtgattcagatgattcacatcaggatgataggccttcaacaagcacacaaaccccatcaccacagtcttcagcatcaacttcgcccactgcatataacaccagatatttatcctttcctagaagagatagtatgtatggtcatggaagacgtatttggaattctggtttgtggatctcgcttgaactggtcatatatgtagaacagattgtagctgctattttcgcccttgtcttgttatgagacgaacatccgtatgcccctttatttgcctggattattgttacacaattggctgcattgcagcattcc

SEQ ID NO: 391998 - DNA, 478 bp, Oryza sativa
agaagcgcaaggaggataggcggcggcggcgactgggcgaaagtgatcagagctcgcgaggatgaaggcgacggtgaagggcaggtacgagggcgacaaggccacggccgccgccaccctcgccttcaccccctccgccgccgacctccgcttcaaggcctccgccaccgatgccgccttcgcccgcgggccctccctcgagggcctcatcctcaccctcgagaagcccgggtccttcctcctcgacctcacgccccactcctaggatgtgcgcttgcaattcatgaactccgcgctgctgctcgaccgccgcgtcaggctcacctacacgcactccaccaccctctccccgggccccgccaagctgaccgcccgcaccgccctggacggatgcctgacctttgatccagacaacaaggttagcctctaccacacgctgggatcctccggatgccgagtcaagtactcctacgcacac

SEQ ID NO: 391999 - DNA, 608 bp, Oryza sativa
catttccatcatcgtcgtcgtcttcttcgatcgatcggctgatccagtaattcctcgatcggtggacgtacgccacgctactatcatcatatcaatccccgatcgacaggttaacatcgatcgatcatccaagccagccatcgatccatcagaataagcagctagcttggagaccgatcgatcgatcgatcatatgtcgattcgattcgatccgatggagagcagaagcagcagcagcagcagcagaagcgtggtgatgatgtgctgcgtgctgatgttgatgattgcggcggcggcgcatgcgggcgagcaggaggcggaggagtgcgctagcccgatgagcatcgaggaggcgtgccggggggcatcggagacgcaccacgcggtggcctacgaccactgcgtggcgtcgctgacggcggacccgcgcagcagcagcagcgaggcccgcagcctgcacgggctcgccatgctcgccacccgtatggccatcgaccacgccaccagcaccgtctgcaagatggacgacctcgcggagctggagcccgaggattcttcgtcgccgtcggacgcgcgcgcacggttcgagcactgccttgagcagtacg

SEQ ID NO: 392000 - DNA, 998 bp, Oryza sativa
  unsure (1)..(998): unsure at all n locations
caagcatctctcttcttcactagctacttctccaagttgaagagatcaaagctagaatgggcagctgcaagattctcctggtcacagctctcctggtcggcattgcctcccagcagagctctgccaccaggaacctgcacggagatcatcacgtcgcggaaaagaagttcggcggcggcggcggcggctacggtggcggtggcggtggagggtacggtggcggtggcggcggcggcggctactcaccgtcgcccacgaccggtttcaccgggagctgcgatttctggaagagccacccggagaagataatatcgtgcatcgggtcgctggggagcatcgtggggtcgttcggggacgtgtgcagcggcttcttcgggagcaagctgcagacgctgcaggacgcgctgtgcaagcacccgcaaggactgctacggcgacctgctccgggagggcgccgccgcgtacatcaactccgtggccgccaagaagcaggccaagttcgcctacaccacgcagcaggtcaagtcctgcatcctcctcggcctcacctccaaggccgccgccatcgagcaggccgccttgttcaagaaggccaacctcgcctgccactacacctagctacccatacctcgccggccggccggccatctctccggccatctctctctcttagctagttggtagctagtgtcgtcatggtgttgatgatgaataagtccttgcatggatgcgtcgtggcaaaccatgcgtatattattcaagaattgtgtgagtgttcagatctgacctcagctgtggcttgtgtgcgtttgcagttaaattgatgaggtgcacggcgccacgacgacgtctcgtcgtcggtgcttagttgcatgctttgtttgcttttcttagtttcttggcgatgtacttattaagagaataagatgagtttgatttggttnatgaaaaaaaaaaaaaaannnnnnnnnnnnnnnnnnnnnnnnnnnnnnnnnnnn

SEQ ID NO: 392001 - DNA, 609 bp, Oryza sativa
  unsure (1)..(609): unsure at all n locations
ctcgtnttagctcggatctgtagcaaagagcgaagagcgaagctgcagcctgcagctacgcttgttcgcttgagacctagggtacgagcaacaataatagagagtgactgagtgagcgagcactgagtagcaagggcccggcacaaacaggacgcagccggcaacgtgtacgtcgaaccaaacagagaacagctagctaatcgatcggtcgccatgaccaaggacgacgccgtcccggtggccgtggcgccggcgaagcgcccgcccatcaacaagtacgccttcggctgcgctctcctcgcctccatgaactccgtcctcctcggctatgatatctcggtgatgagcggcgcgcagatattcatgaaggaggatttgaagatcaccgacacgcagatcgagatcctcgccggcgtcatcaacatctactcgctgttcggctcgctggcggcgggcatgacgtccgactggctgggccggcggtacaccatggtgctcgccgccgccatcttcttcacgggcgcgctcctcatgggcctcgccccgaactacgcgttcttatggccggccgctttgtggccggcatcggcgtcggctacgcgctcatga

SEQ ID NO: 392002 - DNA, 432 bp, Oryza sativa
  unsure (1)..(432): unsure at all n locations
aattcggcaggggggtnnngattgcgtctgactcctatctctagaagagagactagcaggagcttcattgctggtgtttgcaaataagcaagatattcaaggcgctctcaaaccttctgaaattgctaaggtactcaatttggaagcgatggacggaagccggcactggcagatcgtaggctgcagcgcgcacaccggggagggccttcttcaaggtttcgattggctcgtccaagacattgcatctcggatctacgtgctagaatgatgtgaacctcgtttctctgtagtatttatgtgctggaacgattgaacctcatttcttatcaacctcttcgtcttgttctgtaacggtgaactattggcatcatgatttttgagcatgatggttctgttttgtgcaccatgaccatctgaaaagtttcattcctt

SEQ ID NO: 392003 - DNA, 474 bp, Oryza sativa
gtacaatcttgagtatcttggtcgagttgttttcaacacagatggaattatgtatcctgacagcgcggttggtaccgattcacacactactatgattgatggtttgggtgttgctggttggggagttggtggaattgaagcagaggccacaatgcttggtcagccaatgagcatggttttgcctggtgttgttgggttcaagttgactgggaagttacagaatggtgtcactgctaccgaccttgttcttactgtcacccaaatgttaaggaagcacggcgttgttggcaaattcgttgaattctatggcgaaggcatgggaaagctttctttggccgacagggccacaatcgcatacatgtcgtctgaatttggagccacaatgggtttcttccctgtagaccatgtgacactcgaattatttaaattgactggcctgagtgatgaaactgtggcaatgattgaagcatattt

SEQ ID NO: 392004 - DNA, 701 bp, Oryza sativa
tcgctcctccttatattgctctggatccagccttttactctttatcttcaggacagacctcatcgtcagttccttccagggaatctattgctaacaagggggcttcccctcctcgaaacgatattgtcaatgaagaggttgatcagcgtcagaacaagcctaggagatactcagagatgaacttcagtcagtgaagcaccatgtaaggtgaatagcatctgaataagctgcttatggctatatttttaagcccttagtgatctcttgttttgatctggagcactttgggtggcttcttgtcctaagttatgttaggttataaacgcctgtttgtgctggtgtcacttcacagcagactcaggggtggcctttgttgcttgaattgtggttttgctcggttgtgatgcgttgagaaatgtcaaattcgttggttgcgtctgaagatgtgggcggttcttgaagagagcttggaataatgatctgcgttggttgataaaagtttgggttttttagtacatctttttagcgactgtactttgtgtcgatctgatatacctatcctcttatagtggtatttgttagcacaagtggctttatagctgcagtttgtatctcttgaacaatgtgtaaacctgggtgcgatttgtgacaagtttacagcttgaatgagtcagttagtccggttccatcttggtagcaac

SEQ ID NO: 392005 - DNA, 639 bp, Oryza sativa
  unsure (1)..(639): unsure at all n locations
tggaaatcacaatggccgttaccttggtgacatgcaggttctggatttcaaatgtttatcatggtcgaagctagaagctaaaatacaatcagaagaaccttcagacttgactggaacagcttcgcttcctccttgtgctggtcatgcactggttccatggggaaacaagatcctctgtcttgcaggacacacaagggaacctacagaaagtctcagtgttaaggagtttgatccacaaacttgcacctggtcaaccttgcgcacttatggcagatcaccgagctcatgcggtggccaatcagtgactcttgttggaggcacattagtagtgtttggaggtgaaggtgatgggagatcccttctgaatgacctgcacgttcttgatctcgagaccatgacttgggatgaatttgagaccacaggcacacccccttctccaaggtcagagcatgctgctgcgtgctatgctgatcgttatctcttgatatttggcgggggttctcattctacatgtttcagtgatctacatctccttgacatgcagacgatggaatggtcaagaccagaacatcagggtattacncccgaaccaagagcagggcatgcaggtgttacggttggtgagaacnggtttattac

SEQ ID NO: 392006 - DNA, 410 bp, Oryza sativa
tcctcctctctcgccaaacacgacgacgtcgcctcggtttagtcgtcgtcggccggcagccggatgacgggcagtagttgtccggccgattcttcccagctgctgtaccctcgccggggtgcccccaccaccaccaccacctcccgtcctcctctccatccgctcatcgctcatgcgccctacgacgtcgtcctccaccgatctgtcgtcctctccatcagctcagctcgtgatcaggctgagctcgcgagcttctggtgctatataaggctgggtggtggtgcaagtgcgaagcgagcggccggtgaggacgatcgatcgagatcgagcttgacggcggcgagaggaggaggaggggagacgatgagcgggcgggggaggggggacccgctggcgcttgggagggtggt

SEQ ID NO: 392007 - DNA, 479 bp, Oryza sativa
gcggacgggaaggaagaaatcttccccatctggtcgtctcctccgctccttgcgcccaagacgagccgcggctgagcaggggaggggcgcgccgatctccatccggcgagcagagcagggtaggggatcctggaggcaacatcagtttcgctgcaatctgacaaagtggagggtctaaaagttgaagcttcttttatgtctgaacaagacttgctttacttgggatcagttggattgcttggagaatattctcggacaacgagaaaaaggcacaagctctcgcttggaaggccctgctgcgcactggtttctgctgattcatttcaaggatacaagactactgttccttttggctcttggtgcttctgatattatctcagcgaaagaaaattaatccaagatggctctgcaaaacattggtgcttcaaaccccgtggaatgccttctacaggtataagatgcccaggatgatcaccaaa

SEQ ID NO: 392008 - DNA, 548 bp, Oryza sativa
  unsure (1)..(548): unsure at all n locations
agccgccgcaagcaaatttccccacgcttcgcgaaccctcgtcgggtcgatcccgccgccgccgccgacgtccccaaatccaatccgcccatcgcaaggaggcagcatcagttttgctgcaatctgacaaagtggagggtctaaaagttgaagcttcttttatgtctgaacaagacttgctttacttgggatcagttggattacttggagaatattctcggacgagaaaaaggcacaagctcccgcttggaaggccctgctgcatgcatccgaagccttgtcaatttatgcaaacttctggctgctcttggagtgcactggtttctgctgatccacttcaaggatcaagactattgtcacttctggctcttggtgcttctgatattatctcggtgaaagaaaattaatccaagatggctctgcaaaacattggtgcttcaaaccgcgatgatgctttctacaggtataagatgcccaggatgatcaccannatagaaggccgtggcaatggcatcaagactaacatcgtgaacatggtggatatagca

SEQ ID NO: 392009 - DNA, 641 bp, Oryza sativa
  unsure (1)..(641): unsure at all n locations
ggacaaattaatcagcacaaatgcacaatatataaacttaatctctttgttattaccatttttttttgaacggcacttcattattactggatgaactatgtcctatagcctagacagaaacatgggactgcctatgttgatatcttccccccatcattcaatcatcatcatctggaaccaccttcttgatcttggcgtggccatcttcatcaggcttaagcctgatatcaccggagtcgtaatagctgactctattgcctgcctccgctacctcaagcacagtcggagtcggaggacgggccagcccctcgcacaccttgggaggatggcccttgtaggccttgcagatgtaagcctcgaagttctcgtaatcctcgtagagcggctgaccgtcgacgaccaccccagggaacgtacttgtggggaggctgcaaagcgtcagtctgtcttccatacttgagcgagagctggtggccgccttcgcccttttcgcactgtgagaggttnggatnaaggttaacttcccaaacaggatccccnccgttgttgtggcccccccctccccccattannaaaangaattcccccaatcggctctcatggcagcncngggttnagaaccccctnccgcgnnaantgtc

SEQ ID NO: 392010 - DNA, 901 bp, Oryza sativa
gcccatacaagttttcaggctctcggtcccttctcgtgccgtctccccgccgccgccgtcgcccagcgccgcgcctccccgcccgccgttgccggcgacaagcccccgcagggagcgggctacctggagtccaagctgcagcctcgccctcccgctccgtgcgccgggcagcagcaagcgccgccccaagccctagcctcgctgcctgccaggtgcctgaagccccctcggcccgtgctccccttcctgtctgcttgtcggattcaccgattgtagcccgcaggcattttcaggatgggcagtgaggacacaaaagatatgctgaagaatgtggactggaaaacagttggtggtggttcagtgactactgacccaagccaaccagttgttaaaaagcgtcttccaaagaaaattagacaagttcctgaatgctattttctgcctcggcgatctttgccttctgcattggcaatctatggcgctgtgtgtgcctgctggagttggcgcacggatgctgcttgaggtttggataaacaaaaagatcaaagaggacagtgccattgtctgggaaatgggcaaatgatttgattgctacctctgaagagttctccttgctcttgtgttcagctgctaaagctgcatctcagaaataatcctagctatattgattcagattatcttttgattcccagacaaagtaaaactatcctttctaatgtacggcactgccttatatctacattcctgatttcattttgaatgctagcattacagtatggtgtaacaggcagtatcagaaataacggtgttccagaacgagccatttctgtttgacattatcagtagtccgtcatacgaattaattgattgtgtggacagtagtgattacatgctgtgatgg

SEQ ID NO: 392011 - DNA, 522 bp, Oryza sativa
tcgctggcgaccttcctgacgacgccgacgagctcgacctccccgacggtgaggcgatccaggcgttttcaggatgggcagtgaggacacaaaagatatgctgaagaatgtggactggaaaacagttggtggttcggtgagcaccgacccaagccaaccagttgttaaaaagcgtctcccgaagaaaatcagacaagttcctgaatgctattttctgcctcggcgatctttgccttctgcattggcaatctatgtgcgctgcgtgtgcctgctggagttggcgcagggatgctgcttgaggtttggataaacaaaaagatcaaagaggacagtgccattgtctgggaaatgggcaaatgatttgattgctacctctgaagagttctccttgctcgtgttcagctgctaaagctgcatctcagaaataatcttagctatattggttctgattatcttttgattcccagacaaagtaaaactatcctttctaatgtatgacactgccttacatctacatttctg

SEQ ID NO: 392012 - DNA, 652 bp, Oryza sativa
tcgatttagaaaacggcgcccactatgaacacctggaggggactaaacatgctagaaacatctctcgtcgctctccaagatctctcactggacaagatatttgatgaagccggtaggaaggccctatacaacgagatcccgaaattgatggaacagggttacgtgtacctgcctggtggagcgtgcttgtccgggatggggcgccatgtttctttcgagcaagctgtagcatggaaggtgctcggagaagacaacaatgtgcactgcctcgccttctgcttcgtcaacgggtccttcgtgtgacccaaaatccaatccaccatgctcgcagtcatcgtcgttgtcgtcagatctccattttttgcaatctctgtagaagagaggacaccaaaccaaccacaaacctgtcagctgttagctaatgattctactagcttttctagatctttgaaggcaaaatgctgccggtgcctgtaaaaagtgtgtgcgtgcgtgtgtaaatttgggcgcgttttgcactaatttgatctggggtaaggaggcgctggctgctgctgtgctgtagtttggtaaaagttgagtacactaaccttggatggtctcgaactgtatgatgaaattcctagcagtaaaatttcaacttggatccgtg

SEQ ID NO: 392013 - DNA, 557 bp, Oryza sativa
tatttgactgaagcaatgtacagaatgatgtggggatatttcttccctggtgatgaacagcacccacaaaagcggcaggaacttttcaaagtctccacaacagcagggacacggcgagtaaagaaaagcacatctattgctgaaacgaacagtcccagtaaacaatcatcgaaagactccatgcttttacaaaagcctgaacttcgacgcacatcttcgtttgacaggacgtgggaggaaactgttgctgaatctgtagctaatgaactcgttacacaatttcagagtcagtcaaatgcgccgcctgaatctcaagatgctcctaaggaagccaaattagtacgatctgctcgctctactcgtgaagagaaaaaaaatatggaccctaatgaggtgaaacaaactagacctcagaaaatgatggacttccgcaacataaacataagtcaggttgaattgcagctcacgtacgaggggattgccatttgctgttagtgatgtaggctactaatgggatacctttcatcgtgaagatttacttggacatgggcgagctt

SEQ ID NO: 392014 - DNA, 465 bp, Oryza sativa
attgataaagtgaggttccgtaagccagtaattgcagggaataccttgatcatgagaatgactctgaccaagtatcagaaaagatttggtcttgccaagatggaaggaaaagcttacgttggtggtgacctagtgtgcgagggggagttcctcctggttagcgcaaccgaatagtgcaaagggcacctagtattgtgtgattctcttgtagaatcattgattagaacgggatgaggttcattgcttgagaagagttgagttttgaactgaacttacggctttgaggctatcttttcattttacctattaggtgaattgagttcaaatgtccaaggcgccatatgttccgttcaggcgcttaattctacctatctggctgtggttgctgttgtaaacttgtaatacatgatacaatctcttccataagaatttcatgaaataaacagtgcttgttcggttgtgctt

SEQ ID NO: 392015 - DNA, 542 bp, Oryza sativa
tgtcacgctcggtgtgttcactccactgacatgcttcaagcgagtcgattcactgaaatacacgtcggccttatcggttgctctggccgtcgtgttcgtggtgatcactgccggaatcaccaccatcaagctgatgagagggcagattccgatgcctaaactgttccctgatgttcatgactggagctccacctggagacttttcactgcagctccagttcttgtgaccgcctacatttgccattacaacgtgcacccaattcacaacgagctcaaggaccactcccagatcaggccaatagtgcgggcgtcgctgctgctctgcttggccgtgtacaccaccaccagcttcttcggcttcctcctcttcggcgaggcaacgctggacgacgtgctcgcaaacttcgaactccgacctcggcatcccctacagcttggtgctcgacgaccccgtcagggtcagctccgtgctccaccctcatgctcggcttccccattggattccatcccctgtggtttaacatggacggcctctttttttc

SEQ ID NO: 392016 - DNA, 593 bp, Oryza sativa
  unsure (1)..(593): unsure at all n locations
gcagtttgtacgtacggtacaagctcgccgtccggcgatcatccttgataatctcaattaaaattatacatccctttgttatcgatcatcgatcatcagattggtggctggctggctgggccttatcagtttggaaccggatgctggttgaggagcagagttggaggatcatccctctggttccaggattcgttcctgttggcgttggtggagggcccagcacaccataaatataatgggcatcttctgctgcttccagtccgaggacagaggaggcgacggggacggcgatggcgacggagcgcctccctcgacctcctctagcggctgcagcaacagcagcagcagcagcaagacgaagaatttagcgtcggagcggagcctgggcgggagcagcagggacaacaacagcaacctggtgaacctggtgaacgagatcgtggcagagtcagtgacttaccggcaccagcgcgtggcggacgagatcctgaagatcggcaaggngaaggtgacggcgcgggcgttcacgtacggcgagctgtcgaaggctacgggcgggttcagggcggagtctctgctggtggaggggggtt

SEQ ID NO: 392017 - DNA, 351 bp, Oryza sativa
ggtggatcatccctctggttccaggattcgttcctgttggcgttggtggagggcccagcacaccataaatataatgggcatcttctgctgcttccagtccgaggacagaggaggcgacggggacggcgatggcgacggagcgcctccctcgacctcctccgagcctgcccctcgtccccagaagctgcagccgccggaggacgacgacgatgaccaacgccccgccgcataatcaatcatatcgatcggctctctctctctctctctatacatgtactaccactatctatataatatgtcatatacttctacttcacttatacagtatatagctacagtacctacctacat

SEQ ID NO: 392018 - DNA, 929 bp, Oryza sativa
  unsure (1)..(929): unsure at all n locations
agatttgcatattaaagcctcccatcaacttcttgcacacaccctccctttggctttcatctgcatctattcagttgcagattgagagccaaagacattatcttgattctatcaggagggttgtgctagcgaattcttgttagcaacaaattgacatattgctcggcacatccccaccgagaataccaagatgacgttctctggtacacaggacaagtgcaatgcttgtgacaagaccgtgcatttcattgatctccttaccgcggacagtattccctaccacaagtcttgcttcagatgcagccactgcaaaggcacactttcgatgtgcagctattcgtccatggatggggttctttactgcaagacccattttgagcagctattcaaggaaacaggcaccttcaagaagaacttcccctcaggtacaaaggcaaacagtgaacaggctaagattcccagcaagctgtcctctgtgttctgtggaacccaggacaagtgtactgcctgcaagaagactgtgtatccattggagaagatgaccatggagggtgagtgttaccacaggacctgcttcaagtgcgcccatggcggctgccttctgacgaacgcctcctacgcctcgcacaacgggatcctctactgccagaaccacttctggcagctgttcaagaagtccggcagctacgacaacctgctgaagcccgnctccgncgccgccgagaacaccgtcgaatccgaggtcgccgtcgcggagcccgcgaaggaagacccggagacggaggaggcagccaaggaagaagaagaagaagcgtnaacggagcaggtcgcggaagttgtttntagaggaccangagcaattaattaggaaggaccttccacagtgccattttcaaggggaaaaaaggatnttttttacatgtttccat

SEQ ID NO: 392019 - DNA, 674 bp, Oryza sativa
  unsure (1)..(674): unsure at all n locations
ctttggtgggcaatacttgcgacggcccacaagtgaggatatagatcatatactacaagttaatgaatctcgtggctttccgggtatgttaggaagtattgattgcatgcactggaggngggagagttgtccgagagcttngaggggacaattcacccgtggtgactataaagtcctaacaattatccttgaagcggttgcgtcatatgacctttggatttggcatgctttctttggtgtcgctggttctaacaacgagataaatgtgctgaatcagtcccctttattccttgaacaagtgagaggggaggctcctcgtgttgatttttttaggaggggtgaggtggccaacatttgttagtaccaaattgacatattgttcggaacatgctcaccgagaatactaagatgacgttttctggtacacaggacaagtgcaatgcttgtgacatgaccgtgcatttcattgatctccttaccgcggtcagtattttctaccacaagtcttgctttaattgtcgtccctgtttaggcactttttttgtttttatttttcttttctttttcttattttttcttctttttttacttttttgagcagctttttaaggtaacaggactcctttatgaaaaaattcccttaggtacaaaggcaaacagtgaacaggtttaga

SEQ ID NO: 392020 - DNA, 520 bp, Oryza sativa
tttgtctcccaccaccacttccccccttctccgatccctcctcccatggacgccgccaaggataccaccgccgccgccgccgaccaaaaccctacccccaaccctcccaccgccgcagctccacccgatgactccgcggcggcggcggcggcggggagacggcccttcaccagcctcacccaggaggaggccgacctcgccctcgcccgcgtcctccaggagcaggagcgggcgtacatgatgctcagcgcgcaccacggcggcgactacgcggcctccgatggtgggagctacgagtttgacgaggaaggggaggggagcgattttgaggacgaggatggggacggggacggcgacggggaggcgctggatgaggacgaggaggtggccgacgcagacgcagacgccgccggtgacccggctgagttggaccccgcgcggtacgaggacgacgaggccttcgcgcgggcgctgcaggacgccgaggagcgcgaggtcgccggccgcctcatggcgctcg

SEQ ID NO: 392021 - DNA, 486 bp, Oryza sativa
cccatggctccccctctctgacctcgccggagcgccgccgggatctcgacggtgatgccgccgccgccgcctcccccaccgcccccggcggcgccggatccgccgcagctccatggcgtggtcatcatcaccctccctcccccggaccagccctccaagggcaagaccatcaccgcgttcacctacaccgacgacgacgtcaccccgcccccgcctacgcctccgccgacgcatctgccgacgcgggctctagtgcccgcgggggcgggggcgggggcggaggctaggcgatcgaggcgggggttctcgccgcggcgggcggcggcgatggtgctcgttctcggggcgctcgccgtcgcggcatactactccttctactcggacgtggccgtccagttcttggggatgcaggaggaggcgcagaatgagaggaacgagaccaagtcgttcctgctgccgctgtaccccaaggcacggcaggggcgc

SEQ ID NO: 392022 - DNA, 873 bp, Oryza sativa
  unsure (1)..(873): unsure at all n locations
cgcacctcaaccagttcagtcatccattctgtcttctctgcagatactgagagccaagatgagtagcaaggttcttctgatcagtggtgtcctggtggggctcctttctctgagctcatgcaggagcctgggagagttgtctgaacagaagacctactcttctactactcagtatggtggctccccaactccatcatatggatcagatggtggttacaaaccaacaccaaccccaacaccagcttacggctctacaccaacaccatcttatggcactacaccaacaccatcttacggcactacaccaacaccatcttacggcacgacaccaagcacccccagcacacctgatgtccctgaagttccgacaaagcatgatttctgtggatcctgcgattactggaagaaccatccagatgttatcatctcagctattgggtcccttggcgacattggcaagacactcggtactgcttgcagtttgatcactggcaagaagctagaaaatcttcatgatgcactttcaaacactggaactgatggtactggtgctctgctccgcgagggagcagctgcatacctcaactccattgtgaacaagaaattcccttttaccacccaacaggttaaggattgcatcgtcgtggccatgacctctgatggcgttgcttcttcccaggctgagatcttcaagaaggcaaatgattatcactactagttcaagaggtgtttcctggctaaattatttgctcctatgtgtttcttcattgatgtaatcttgctgtttgataaatccattgtattcttttggtttgcaatgtaataccaccatctaagatatttgatttttatnnnnnnnnnnnnnnnnnnnnn

SEQ ID NO: 392023 - DNA, 1817 bp, Oryza sativa
ttttgcttcgccagaatgaccaccttgggctgggttatcagctaagatgggttgtccatcatcatgcccttaatgaaggtcatgatcattatgcacctgtggagagttccgagcgaggcacatgcggcgcacctcagaaatagctttcatacacctgaaggagtgaagcatgcaaggaagcaagtgacattattgtttaaatcgtttggaggaaccatcgcatggtcgctcttccagtggttcttcgcctctgggccgggctgtggcttcaaattcttccccacatttggcctcgaggcatataaacacggattcttcttcgatttcaccatggccaatgtcggcattggcatgatgtgcccgtacatgatcgtgttctccgttttcattggcaccatcatctcgtgcggtgtaatttggccgtacatcgagtcaaaggagggcatctggtacccaagcaaccttgggcccaacagccttaacggcatcagaggttacaaggtgttcatcggcttgtccatgataatggctgactgcctcttcgtcttcctctgcatcatggtccggacaacatgtgccatgatcaagcggcgtcggcaggcaatgcaaggtggtggcggtaatgcgcagccattccagggtatcgacatcgccgatcagccggtgaagagcttcgatgatcgccgcagggcgcaggtgttcctccgggacgagataccggactcggtcaccattggctgctatgtcctcctgtcgatcatctccatcgccgccatcccctcacctctacccacagatgaggtacagccatgttgcgctcatctacctcgccgcgcccgtcttcgccttctgcaacgcctacggcttcggcgtcaccgacatgaacctggctagcacctattgcaagatcgccatgttcgcgttcggctcgtgggtcggcatcaagagcggcggcgtggtcgccgccctggtcgccggcgggatcaccatgtcgatcctgggcaacgcggccgacgtcgcgcaggacctcaagacgggctacctgacgctgacgtcgccgcgcgccgtgttcatcagcgaggcgatcggcacggcgctgggatgcgtcgtcaaccccaccgtgttctgggtgttctacagggtgtacaagatgggcagcggcgacatgggcgacatgccctacgccaagctttaccgcggtcttcgccatgctcagcgtcggcgacggcgagcaaggcctgcccaggcacagcatgctcctcttcaaggtcttcttcgtgctcgccctggcgctcagcgtgttccgggaggtggcgagccggacggagtggcgcatccggcgctacatcccgagcaccatcggcatggccatcaccttcttcatgccgccgcgcgtgcccgtcggcatgtgcatcggcagcctggtggcgtacctgtgggagaagatggacgccggccgcgggcggatgctctcgccggcgctggcgtcggggctcatctgcggcgacggcgtcggctcgatcttgctgtccatgctgacactcatgggtgccagggcgcccatctgcatcaagttcttgtctcgaggtgacaatgtcaagttggacgccttcttggcaacactccatgacatgagatagctactagctagctatccatgtagggaaactagatcattttctcaggtgtcaaaacttttgtacatatgtatccacgtcataggggcttgagttaggagtcgtggcaaactgtataatcaagtttcagttcagtctataaacacagtttgatctcctctatcaaaaaaaaaaaaaaaa

SEQ ID NO: 392024 - DNA, 502 bp, Oryza sativa
gcagtgagagtgacagacgacacatagaaggttttcatggagaaagtactggtgctctccttgatatgtatttcactctgccaaggatgggtggtgcaatctttagaatatgatcatacagcaagtattgagtgccttcgcgatccgatgaagccgctgtacaacggcggcatcatccagaacggcgagttcaacagcggcctcatgggctggtccacgcaccgcgacatcaaggccggcctgagcagctcgccgtccggcaacaagttcgccgtggtgcagcgcgccgactccctctccggcgccgccgtgccgtcgcgcagcgtctaccagaagatccagctgcagggcgacacccactactcgctgtccgcgtggttgaaggtgtcggccggcgccgcgcacgtgaaggcgttcgtcaagacgcccaacggcgagcgcgtcgtcgccggcagcgtctccgcccagtccggctgctggagcatgctcaagggcggcatga

SEQ ID NO: 392025 - DNA, 552 bp, Oryza sativa
tgttactttaaacgagggaagactagttggacttctttaggtggaattatgctcagcataacaggcacagaagcattgtttgctgacctttcgtattttcctgtacaagctattcagattgctttcactgtggttgtgttcccatgccttcttctgcaatatactggtcaggctgcgtttatagctgcaaacacaaaccaagtcagccatgccttctatatctcccttccagctcctatactttggccagcatttgccgttgcaacagcagctgcaatagttgctagtcaggccactatatctgcaacatattcgattatcaagcaagcacttgccctagggtgctttccccgagtgaagatcatccatacttccaagaagtatctcggccagatatacagccctgatattaactggatcctcatggttttctgcatagctgtcactgcagggttcaaaaaccaatcccagattgcaaatgcatatggtactgctgtgatcatggttatgcttgtgacaacatttctgatgatccccatcatgctgctggtg

SEQ ID NO: 392026 - DNA, 643 bp, Oryza sativa
  unsure (1)..(643): unsure at all n locations
aagtgcttgccaaggccnnnttaagttgggtaacgcccagggttttccccagncnacgtcttgtaaaacgaccggccagtgagcgcgcgtaatacgnctccactatagggcgaattgggtaccgggccccccctcgaggtcgacccacgcgtcccggcttgtttgccaccaggaacattctatcttacaaaagttgattcgatgtacaggaggttctatgacaagaaagccgccgagggaaaaatcaagggctgcaacggcattgcaaacggtcactgattgggtgccaagaatgctgtgagctcacgcgcattattagccatcttgttgctcagtttgatgtatttattcttagagtgctcagtctagatatcttccaataattcattgttcccctcgtgcccctcagcttgtttttactttaagctgaacaataaacctttgtgtagtactgtagtagtactaggtcctagtatccttgtttcctctagctctattgcttcattgttactagctaattccctccccatgctttattgttctcagtaatatcctgcaaaactgttggctgtgtgcatcttatgatgcagacgttgaagatgtaatttttatcttatctaaaaaattcagttaagtcttgagc

SEQ ID NO: 392027 - DNA, 1071 bp, Oryza sativa
tttgtccacatgctccatgtgtactaaatctacaaacgtgagcttgcaagagaatacccggttgctgatggaaaactttctcagacatgctatctgatggctcttgattcgtgctataggcaatattgtaccaagtatgaaaagatagtgggagaacaattctcgatttctgatgcagaatactgtgtcttccattctccatataataagcttgtacaaaagagtttcgcccgactttatttcaatgacttcatgcgtaattgcagcacggttgataatgatgctaaagagaagcttcagccttttgcaaatttgactagtgaagaaagctaccaaagtcgtgacttggaaaaggcctctcaacaagtagcaaagcatctgtatgatatcaaagttcaaccatcaactctgcttccaaaacagatcggtaatatgtacactgcatctctttatgctgcattggcatctgtgatctacaacaagcatgacagtctggatggccagcgaattctcatgttttctatgggagtggattgacatccactatgttttcgttgagactacatgatggtcaacatccctttagcttaatgaacattgcttctgtgcttgatgtgacgacaaagcttgagtcaagacatgtgacctcacctgagaagtttattgagacattgaagctgatggagcaccgctatggagcaaaagattttgaaacaagcaaagataccagcttgttgccaccaggaacattctatcttacaaaagttgattcgatgtacaggaggttctatgacaagaaagccgccgagggaaaaatcaagggctgcaacggcattgcaaacggtcactgattgggtgccaagaatgctgtgagctcacgcgcattattagccatcttgttgctcagtttgatgtatttattcttagagtgctcagtctagatatcttccaataattcattgttcccctcgtgcccctcagcttgtttttactttaagctgaacaataaacctttgtgtagtactgtagtagtactagggcctaaaaaaaaaaaaaaaaaaaaaaaaaggg

SEQ ID NO: 392028 - DNA, 1050 bp, Oryza sativa
tgtagatccgatccaggaagagctcgccgccgccgctgccatggcgctctgggacgtgacaagcacagggaagagtggggaaagccgatgcccaaagttctgtcttggtactgaggtgtttctgagctttggtaattcagttgcttcaacccgcttcttgctccaagatgaattcaacatacagacaactaaatgcgataactgcattattggcttcatgttttgccttcaacaaattgcttgtattttctctatagttgccgctattgttggtagtgaagagctttcagaggcttcccaaatcctttcctgcttggctgatatggcctactgctcgggttgcgcctgtttgcagacccaacacaaaattgaaatggacaagagagatgggaagttcggcccacagcccatggcagtgcctccaatgcagtaaatgtcgcgcatcgatcagcctattccacctcctgttgggtacacaccacaacagccagcatacggtcagccttatggtggctatcctcctgctccgcctgctcaaggttatccaccagctgcttaccctccggcaggttacccccagggtggcgcataccctccccctggctcttatcccccacctggttcctacccgcctcagggctcctaccctcctccacaaggttactacggcaagtaaaggaaatgcagaaattggagatatgtctttgtgacgaaatcggtatattgtgaacaatgtaaacattagggtggttttgtagtggttattaaataggttggatgtcgaattatattaattcgatcctgtgaactggtactgggtggtaaactgcaaacataatttggattcctccgggtgtggtatactgtgaacccgtttcgtagaaattatcagctccccgtgttgatcattcttgaatacgttcttctctgaataaaggatcgccatgaaatgtcaacttagatttggaactttttatcagaatttggtgataacattgcctgtgtagattgttgcttgtctacaacgaacaatcaacaactggagcttgt

SEQ ID NO: 392029 - DNA, 512 bp, Oryza sativa
  unsure (1)..(512): unsure at all n locations
gctcngttcgcaggccaacctcgacaagatgcagctccgccagagctaccgcaacctctggcactccgatctcaccagcaccatccaggccgacttcccatattgctgcctcgcgctctggtgtggaccatgtgtgtcatacatgcttcgaaaagggctctgtataatgacatgtcaagatatgtctgctgtgctgggtacatgccatgcagtgggaagtgtggtgaaagccgatgcccagagttctgtcttgctactgaggtgtttctgtgctttggtaattcagttgcttcaacccgcttcttgctccaagatgaattcaacatacagacaactaaatgcgataactgcatcattggcttcatgttctgcctccaacaaattgcttgtatcttctctatagctgccgctattgttggtagcgaagagctttcagaggcttcccaaatccttttctgcttgactgatatggtctactgcttggtttgggcctgtatgcagacccaacacaa

SEQ ID NO: 392030 - DNA, 610 bp, Oryza sativa
tcggtagttgttgggcccccggcccatttagcccactcccaccccagcctccgcccccacccccgtgtgccggcggcggtgtagatggtcgtggcgtggtggccgtcgcgaggatttcgggtgcagagtacggtgacttgggtgccgcactgaatctatgatccggtctgacctgctttggttggatggaggagaaccggagaagtggtgtttcgagtattcaggttgtctttgaaacatttactcaggtgttgttgccagttgccactactattttttaccagtggtaccccaaaaggagtgatgcttaggtgctgaaatctcttgcatgtggtcgaaagagcagtaacattcacttcttttacctgaaagtaatattgaaatataaactgtacttttcttgatgtgatttcttgccatgtgaacatcagaacccctgttcctcttctatccaaattaagttctatgcagttatgtttgtagatgaaaactttctgggatagtattagcagtacctggtgatagtttcctaagcatgcttccaccatggcatgtgtatgaacgtgttatcaagcactttattttagcttatggaattaacatgttacat

SEQ ID NO: 392031 - DNA, 809 bp, Oryza sativa
tctttctgtcgcgctcaggctcagctccctccccgaccccgagagagatagcgtagcttcaattcgctactgctccctgcgcgtgctcctccaagctactagcagtctcccgcctccgtttacccggtccggctccggcatggacgacgccacgtcgtcgtcgtcgcgggcgccgcggcccaagacggaggagctggacgcggcgctccacgccatggggttcgagatcgagcgggtctcccccgcggaggtcaccggccgcctcctcgtcacccccacctgctgccagccgttcaaggtgctgcacggcggcgtgtcggcgctgatagcggaggggttggcgagcatgggggcgcacatggcgtcgggctacagccgcgtcgccggcgtgcagctcagcatcaaccacttccgcagcgccgccctcggcgacaccgtcctcgtccgcgccgccccgctccacgtcggccgctccacccaggtgtgggcggtgaagctgtggaaattggatccatccccgaaggagaagggggctcagatctctgaatccagggtgactcttctctgcaatctgccggtgccggagagcgtgaaaaatgcaggggaggcgctcaagaaatactctaaactgtaaccataataataattaaaagtccaaagcttcatttcgatgctggaaatgaaatggtttgatcccccgataatgtgccatattgtaagtctgttgtaataatgtatatgtcagaggagtcgaggtgtttggtttgggacaattttattgttcttcatgaccaaatttggtcgtgcgc

SEQ ID NO: 392032 - DNA, 468 bp, Oryza sativa
tcgctctcactcaaaacaacgtcgggggcagcgcctctccccaaccttcctcccaccagcgccgacgctccccctccccctccctgcaccggtgaccggcgccaccgctccatctccccctcttcctcctgtctcaccggcacggcgcggcgactgggaggggacccaccagcagcgccgcttcccctcggccactccccccttcctccaccggcggcgctctccttccggcacgaagtcggcggcggcggcggcttcctcaaccccttgtcacctccctcccgcggtatatccggcggcggtggcggtggcggtggcggcgtcggcgggaggaggtggatccggcagtggcggcggtggctccctccgccccctctcgcctcccttctgcggcagatctagcggcggtggcggactcgcggcggacatgggtggatccagtggtggtggcggctgcggaggacagat

SEQ ID NO: 392033 - DNA, 382 bp, Oryza sativa
aggttatttcctgtttcttgctcctcccctgtgttcccggcggcggcgatggggtgcgcggcgtccaagggcgcggcggtggcgtcgccggcgtacgaggcgaccacgacgtcgtcgtcgtcggcgtcggcggcgtacagcgtgtcgaggagcgcgtcgacgggcgcggcggcggcggaggtggcgtcgatttggagccggccggtgcggctcgacgcgtacgaggatgatggcgacgggaagaagaaggcggcggcgcgtgggggtggtggagtgttcgtccgtcgtcgtcgtcggcggtggcgtgcggctcgggaacatccacaggtacgtcgaggcggagcaggtcgccgtccggtggccgtcgtggctcagcgccgct

SEQ ID NO: 392034 - DNA, 550 bp, Oryza sativa
gtcgtcgctcgctcgtccaagaaaaccacgatctccttcctctttccaccatccacgatccaatccattcggtcgccgtcatccccctcgtcctcctctcgtgacagatcacttcctcaagacttcggatggaatccattaagacacaatctcaaggttctgcctcttctgttccaaagaacccagccatgtcctcttgtcggaagaagaagtctgacgacgctacgttcctcgaagatctgaaagaccatatcgacgagttcatccatgcctccatggatgagcacaagcattgcttcaaaaacaccatccagaagatgtttgggatgtcaaaggttgtcgcagaggttccgctgaagcaaaagaagctgaagtcgagagcgctttgcctcttcagaccagtgtctcgagtaggatgcatggctgatggcagctttgtttgccttctgttgcctgtgttccgtcctgtggagcttaacaatcagtaatacctgtaatagcagtgaatatgggagtctactgctttatgtttccttgtattttgctgttt

SEQ ID NO: 392035 - DNA, 677 bp, Oryza sativa
  unsure (1)..(677): unsure at all n locations
gatgccgttgagnaggcggccggtaattaccgctaccgttattcaaccctntcgccgcttgcgactccgggcgccgccgccgccgccgccgccgccgccaccgccatcgtcgtctgccgccgccactgccgccgccatctgctgccgccgctctactccccagatctacacaaaccaggctgcttcgctctcgcagatcaccggcgtctcaaacaagctagggtagtcgtcggggggaggggggcgcttgctgctccctccgccggcaccatctccagtgccggtgccgtctctccctactggatccggatccggagtcgcgcctgcactttcttcatcctggtcgagccgagccccttgggatctaccgttgctgtctgtatactacttcggatggaatccagcaagacacaatctcaaggttctgcctctgttccaaagaacccagccatgtcctcttgtcggaagaagaagtctgacgacgctacgttcctcgaagatctgaaagaccatatcgacgagttcatccacgcctccatggatgagcacaagcattgcttcaaaaacaccatccagaagatgtttgggatgtcaaaggttgtcgcaaagcgttccgctgaagcaaaagaagctgaagtcgagagcgctttgcctcttcagaccagtgtctcgcagta

SEQ ID NO: 392036 - DNA, 530 bp, Oryza sativa
atccaaaggggagtgttttggcaccaatggctggtctggttgtaaaggttttgcttaaagacggggcacgggtggaggaaggtcagcctgtcatggttatggaagcaatgaagatggagcatgttgtgaaggcgccttgtgccggatatgtggaagggctgaaggctactgccggacaacaagtttttgactctagtgtccttttcaccgtgaaggagaacaagccaaattgagaaacccaggcagagattcacgacctgtacagctcaattcacagacgcttcataagttggctgatgatgctgccggccgtccaaaagcaagcaaataataagcgacaacatcgagttcacaacacaaaagcaagcaaaaataagcaacgggttcatctgtgtgaataaattagttgacgagctcccaacccaccccctgttgttgttgtcgcaaacctgaaactgtacagtgtacattactgctgtcacatacagtgacaaaaacaattaaacctcatttgttcttccattgccctg

SEQ ID NO: 392037 - DNA, 507 bp, Oryza sativa
tggatagagggcaaaccaggtatacatgattgattttggactggcaaagaaataccgggacacttcaacacaccagcacattccatacagagagaacaaaaatttgactgggacagctcgatatgctagtgtaaacacccatcttggaatcgaacaaagcagaagggatgaccttgaatctcttggatatgtactcatgtacttcttaagaggaagtcttccatggcagggtctaaaagctgggaccaaaaaacagaagtacgagaaaattagcgaacggaagattgctacatcaattgaggctctctgtcgcggatacccttgtgagtttcaatcctacttccattactgccgttcactacgttttgaagatttgccagactatcaatacctgaagagattgttcagagaccttttcattcgagagggaatttcagtttgattacgtttttgactggaccattcttaagtaccagcagtcacagataccagtgttccaccacgtgc

SEQ ID NO: 392038 - DNA, 509 bp, Oryza sativa
  unsure (1)..(509): unsure at all n locations
atggacctatgatgcaatgtgccatgatctacttgaaatggatggccaaaaatacatatatgaggtgtcgaaagcgggatcagaacctgagagaaaggaggctttattggaggatcatgatcctctctgggttgagcttcgccacattcacatagctgatgctagtgagaggttgtatgataagatgaataactttgtttcaaagaataaagcagctcaacttcattcaagagatggtggtgaaatttctacaaaggatctgcagaagatcgttcaagctttgccacaatacggtgaacaagttgagaaattgaccctccatatagagattgctggaaaaatcaacaagtttatcagagagtatggtctccgtgacattgggcaggtggagcaggatctagtttttggagatgcagccgcnaaggaggtgatcagtatcctcaggtcaaagcaggatatgagcccagaaaaccaatttgnggttgcctattaaaatatgccattgtatt

SEQ ID NO: 392039 - DNA, 480 bp, Oryza sativa
  unsure (1)..(480): unsure at all n locations
tttttggaggatgataaaagtaagcggcaccatcgtggacggaagtctaaggcctcatcccaagtttcaggtgaaaatcacacagcattagctgctttgaaggatgccgcttcaactcaacaaaagagtgcaacgccaaggagtctagctcaagaagacaaatctccaaaggagaatggagatacccgtacaaatggtgttactgaatcaaaaactgaaaggaatgccgatattgctctaaccagcaatcgaagcaaatctaggagccagagcatgagtgctaaccactcaatgagcaagagtatgagtatcagtccaaggagaagcccagtcaaaaggtcagccatcagcccgaagatatcattgataagcaggagtcctgatgtccaaggccatggtagaagtcctgtccgtgctcctgaaagaagtgaaagcaggagcccacctcgagagangagcatcagcatgagccctcagaga

SEQ ID NO: 392040 - DNA, 1688 bp, Oryza sativa
  unsure (1)..(1688): unsure at all n locations
cggacgggnagagatgaaatcaagcaagcaagaagagacgagacgagggagagaaggagaagagggggccggccgcgggcgtcgtcgtgttcctccccccctctctctcctctcctctcctctcgatctccatccttccttccatccattcctccccgcacccttcgcattgctctcgtcgtctcgattcggtcgaggatctccaggaaaagaggaggaagcgatatgggttgcttttcatgctgcggagcggatgatgtcggcaagaagaagaagcgcgacgatccttacgtcccgatccctgatccaggtggtaactatggacgtagcaagcccgggcccccagccccttcgcgttctccccccaccagcagaaatctgccaattgcagtaccggcaattccccttgatgaaataaagggaataaccaagaacttcagcagtgatgctctcatcggagaaggctcgtacgccagagttttctttggtgtgctgagagatggcaggagatctgcggtgaagaagctcgactccagcaaacagcctgatcaagaattccttgtgcaggtttcagccgtttcacgactgatgcatgagaatattatccaacttatcggatattgcgctggagggagcatccgtgtccttgcttatgagtatgcaccgaggggctccttgcatgacattctccatggtataaagggtgtgaagggagctcagccaggaccagctctatcatggatgcagcgagtgaagattgccttgagtgctgcaaaggggcttgagttcctgcacgagaaggcggagcctcgtgtcgtccaccgtgacatcaaatccagcaacattatgctctttgacaacgatgttgcgaaagtaggagacttcgatgtatccaatcagtccccggacatggcggctcgcctccactccactcgtgttcttggcaccttcggttatcatgctcctgagtacgcgatgacagggcagcttagcacgaagagcgatgtctatagcttccgagtcgtgttgctggagcttttaactggtcgcaaaccggtcgatcatacgcttgccccgtggccagcagagtcttgtgacatgggctactccaaggctaagtgaagacaaggtgaagcaatgcgtggatccaaggcttgaaggggattatcctcccaaggctgttgccaagatggctgccgtagctgcgctgtgcgtgcagtacgaggcggacttcaggcccaacatgagcatcgtcgtcaaggctctgaacccactcctcaacagccgcccgaacaatcgccccgcctccttcaccgacgccggcgagcgatccggattatgagcacgccatgaccatttttctcatcggactccggtgacaccacgacgacgggagggaaggctcggtttccatggattccaaatgtgtaaaaattcagtggaaatgaagagggtagctctgctgctgcctgtcttgttcttgcctcgatctccagactcctgttgctgtaaattgtcgcaatccctcctgattatgtgttcctctcgacctcttgtagtagtttgagaaatggatgaatatatatacttcttgcttgtccacttttaaattacactgtcaccagacaagttttgttgttctgcgtacaatgggcagattaataatccccatctcataaaaaaaccaa

SEQ ID NO: 392041 - DNA, 578 bp, Oryza sativa
tttccacgcgtccgaaatgcccctcgcgccatgcccctcgccgcccctcccctcctccccgtggccggcgcgcgccccgcgccggggcggcctcctccgcgcccgcgcggtgcgggcggcgccccggccgccgagcaagtggtcgctgggtagctggcgcagcctgacggcgctgcagcagccggagtaccccgacaaggcggagctggatgaggtgctccggacggtggaggcgttcccgctcgattgtcttcgccggcgaggcgcgcaagctggaggagcggctcgcggaggccgccgtcgggcgcgcgttcctcctccagggcggcgactgcgccgagagcttcaaggagtttaacgcgaacaacatccggtacaccttccgtgtgctcctccagatgtccggggtgctcatgtttggaggccagatgcctatcatcaaggtaggaagaatggcaggtcagtttgcaaagccaaggtcagatggctttgacgagagggatggagtgaagttgccacgctacagaggggataacattaatggggattcattcgatgagaaatcaagattgccagat

SEQ ID NO: 392042 - DNA, 343 bp, Oryza sativa
ttctaccaccacctccatctcgcagtcgcagtgccagctaaggccttgtacagggcttcgctccccacacgttttcttctccccctccacatctcccctctcgccgccgccgccgccgcattccgttcagggacttctccgccggcgccatggctgccgctgcaaggttcttggcggtcttgctcctcgttcttgctgtcgcggcggcgtcttccgcggcggcgtcgttggctggcggcggcgaccgccacctgcagctggggatgctgtccaccggcggcgagtgccggggcacggtgggggactgccttgaagggggagacgtcgacggcgaagaagggga

SEQ ID NO: 392043 - DNA, 440 bp, Oryza sativa
agagtggagaggcatgggaggcatggcagctgctccttttccaggcaaatgcttcctcctcctccaacaagtacccaagccatcggcggcgctggccgcagctcacccattactactaggacgccgtcggctggctgccctcccggagacggccgcagcgtgcgtggccgccgcggggttggtgggagtcgcagccagcttgctagtgggcagggcggcggaaggagcacgacgagaagaggaagaggaggaggaggaaggagtgctcggagtgcggcgggacggggctgtgcccgcggtgcaaaggggaaagggttcgtgttcaggcaactgccggaggaggcggccagcaaggcccggaaggcggccaagaacatggccaccagatacacttccgggctgcccaccaagtggacctactgcaaccggtgatccttcac

SEQ ID NO: 392044 - DNA, 1309 bp, Oryza sativa
gtccattcgccagccacacctctctccatcctctcgttctctctctggctcctcttgctctctcccccgacggagaggagagaaggcgaggagccgggggagatgggatcggactcgccgcccaagaaatggggcctcagggagcagcgcgaagcctacctccggtggttctccctcgccgacgacgatggagatgggcgcgtgacggggaaagacgcgctcaagttcttcgccatgtcgaatctctcccgccccgagctgaagcaggtctgggcaatcgctgattccaagcgtcagggttatcttggattctcggagtttatgaccgcaatgcagctggtttctcttgcacaagctgggaatgagattagtcaggacacccttgcacatgcagatttggagacgttgctacctccgacaatggaaggtctggacaaaaaactaaaaaataattctatgagcaagagcaactctgatattgtcgtacgtcatccgtcagaattgcctgcatcagccaactggtttaactccaagtcaggaaagaagattcctttaagatcagttacttcgatcatcgatgggttaaagaaatcttacattgagaagttgaggccactagaaaaaacatatcagttcgatgactttgtttcacctttgctgactagcagtgatttcgttgcgaagccaatggtcatgttgctgggtcagtattccacaggaaaaaccacattcataaagcatttactgaagacaaattatccaggtgctcatattggtccagagcctacaactgacagatttgttgttattacttctggacctgatgaaagatgcatccctggaaacacaattgccgtgcaagcagacatgccatatagtggcttgtcatcttttgggacagcatttctatcaaagtttgaatgttctcagatgcctcatccactactggatcatataacctttgtggacactcctggagttttatcaggggaaaagcagcgaacacagcgtaactatggacttcactggagttacatcatggtttgcagccaagtgtgacctaattcttctcctatttgatccacataagcttgacatcagtgatgagttcaagcgtgtaattgggtcactccaagggcatgatgataaaatacgtatagttctgaacaaagcagaccaagttgatgcacaacaactcatgagagtctatggagcactgctatggtcgcttgggaaagttctgaacacaccagaagtcatgcgtgtgtcataggttcatttaacgacagcccattaggagacagtagct

SEQ ID NO: 392045 - DNA, 514 bp, Oryza sativa
ctttgcctgaatcacgcaacaatggcttggagatgcagtccgtaaataacaaaggactcgttgaagaactagaaaagttgcttgatcgcttgcgaattccacaggagtttgcagcatcattaactgggggttcgtttgaagagtcacgaatgctgaaaaatgttgaggcatgtgaatggttgacaggggccattcgcagccttgaagtgccaaatctggatccatgctatgttaacatgcgagctgttagggaaaaaagagcagaactggagaaactgaagacaacttttgttcgacgcgcatcagaatttttgaggaactacttctctagcttggcggactccatgataagtgacaaaagctacttttctcagcgagggcaattgaagcggcctgatcatgcagacctaagatacaaatgcagaacttatgcccgacttttgcagcacttgaagagtctggacaagagcttgttaggcccctttaggaaagcatactgtcattctcttaatta

SEQ ID NO: 392046 - DNA, 542 bp, Oryza sativa
ttcaaaccaaacgccaattaatggcttgaccagccaccgcgcgcgccgccggctttcgccgacgccgaggaggccggccatggcggcgccgcccaggcccataccctccatccaccggcaaccgcccaagccaaccaccacccacgtcgcccgctgcttccgcgacccgcccaaagcccccgacaccaacagcaacaccaacccgctcctctccctcctctccgccgtgcccgactgggccgacgccgtctccgagcgccgcatccgcgaccgccgcccgctctacacccacgccgactggcgggagcaccgcagctcccgccgccacctgcgccacctcctctcctccctcaccttccgcgtcatcctctccctcgcgccccccgtctccgccttcaccgccttcgccggcgccattgtcacctacaacacccttcttcccgtctacgccctcaccgtcttcttccctccctaccaggttaccgcccccggccttgcccttctcctcgctttccgacccggggcttctacggccgtttgac

SEQ ID NO: 392047 - DNA, 529 bp, Oryza sativa
ttccgacctgtcccggccgaccccaccgctgcgagctgcggcgcgcgcaagcgggatttacagccacccacaccaccaaggcaccaacgcatccatccaaaccgccgcccgccgccgcccggcgtcgtcgtcgtctccacgctccctcgccaccgcgcgccctcccggcctagcccgccgggcccccgctgctaccagagagggcgatggcgacggcgagcggcgtctccactcccctgcagctcccctccacgcggcgcggtgggcggctgctgctcccgccccggcagcccggccccgggcaagaacgcgttcccgcggagagcagccggtggtgccccggcaggtacattttttttgaagagagattctgtatataaagaacagagttgtcatcaatttttaccattgaaacaaagcggaaggttgcaagcagcagttctgcctgttactccacctttgttagatgatgaaagaaaaaccgcagcaaatgtgtgaagaatatggattcaaacacattggagaacag

SEQ ID NO: 392048 - DNA, 1000 bp, Oryza sativa
gtagaatatactttctccttccttgtgcgtgagcgtgagtgacaatttgatgaaccgcgggttggcgcagcggcgaacctgctgttcctggagagccccgtgggcgtgggcttatcgtacgcggcggtgaagccgcaggaggtgtacagcaccataggggacaacatgacggggcacgactcgcacaccttgctgctccggtggctcgaccggttcccggaatacaagacccgggacctcttcatcgtcggcgagagctacgccggccactacgtcccggagctcggcgtcaccatcctcgacaacaacttgctcccgcacgcgacccccatcaagctaaaaggaatcgccatcgggaacggcatactggagttcgcggctgagcaaacgcagctggaccagtacctgtggcagcacgcgttcatatcggactcggcgcacgcgctcatcacgcagagctgcaagtaccccgacgaccacccgtcggcgctctgcgagtcggcgaggaaagcggcgtatagccggattggcaacatcgacatctacaacatatactcgtccacctgccacgaacagaaagtcaggccctcagcctccaagtgcatggatttggctgatccgtgctcccaatacttcgtggaggcgtacatgaaccagccccaggtacagaagacgatccatgcgaacacggagttgaagtatccctggactagatgcagggtttacaacctagaccacttcggcgactcgccaaagtcaatgctgccatacatcaaggcagtgataaccggccgcatccgcatctggatattcagcggcgacttggatgcgatggtgccggtgacggcgacgaggcagtcgatggagaggctccagctgcgggtggcggcggactggcggccgtggtcggcggacggcaaggacgttgccgggtacgtgatcgcgtacgacgggctggtgttcgcgacggtgcgcgggtcccggcacatggtcacgatcg

SEQ ID NO: 392049 - DNA, 542 bp, Oryza sativa
ttgttatcctcccactcccaccagccggtttcgcccttttcgtcgccatccgctccttgtcgccgtattggatgagaagctccacggtgccgccgagctcaaccttggcagattgagggacggtgtcaacctcggcggcggattgaggcggcccctcttctccaccccttatcggtgaacacagatgcaagtggtgtgggtcgacgactgcagatcgagcgatgaataacatctcatttggtcatggatcctgacgggtgagatctactcagctattttgcattcgtgcatggtgggtaccgactcaccatcagcctctccaccacttacattttcctggtttttcctgcttagcagagtttgatcgttgcgaagtctctaggccgcatcccgtgcagctgagcgcaactggcgctctggagactcggatctggtgtacctgcgggtcagccatcgtttagagagcaatcttctttatactggaagagaaatcatggcatctatggaagacattggaagtgcattaatccccctagtgggta

SEQ ID NO: 392050 - DNA, 961 bp, Oryza sativa
  unsure (1)..(961): unsure at all n locations
gtctcctttcccctttcccgcaaggctcccacgctgacgaaatcgacgccgatttcccgaaatccccaatccccaatccagaatccactcgcttttcgataaaatttctgttgattgcgtcgaaaccttcgcaatcctctcgcacgcatcacgccttgcgcgccgcatctcgtagccctgaattttgatttgattctgctgcctccggcgcgcccctgattggcgaggaggctggcggctggttgtggtgggtgcggccatggcggcttcgacggcggcggcggtggcaccggactggtggaacgacgtgaacaactcgccgatgtggcaggaccgctccttccacgccctcgccacgctatacggcgccgtctcgttcgtcgcgctggtccaattgatcagaatcgaatgtagagtacctgagtacggatggacgacacagaaggtgttccatttcatgaactttatggtgaatggagtgcggtcaatcgtgtttgtgctccgacgagatcgtgcaacttgtgcagcctgaggtatttcaacatgtgctcattgattttccggggcttgcattcttcacaacctatgctctgttagtgctcttctgggctgagatttactatcaggcacgggcaatgtctactgatgggctcagaccagctttttatacaatcaatggagtggtctatgcaatccagataatactttggatggcgttgtggtggaaaccagttcgagcaatggtcatcttgtctaagatgttctttgcagcgacatctttatttgctgcccttggatttcttctctatggagggaggctatttctgatgttacagcgttttccagttgaatcaaaagggaggcggtaaaaagttgaatgagggttgggtatggtgacaaccatatgctttttctggcttcttgatccagatgcggtaatgatggtnctaaaagcggtttg

SEQ ID NO: 392051 - DNA, 703 bp, Oryza sativa
tcggtctcttctccggctctctctctcttctcctcctcctcatctcggcaaaaccaccaccgcattgccggtatatttagttaagccgcgatagaggagggagggatagcgtagagggagagggaacaggggagggtggcgagctcctgaccatctctctccgccctctccgtttcgccgctcctcgccggatccatctccaaaagaggacgtcggagaagatgatgggcggattcctctcccgggtcctcctgttggcctttggctacgcctatccagcatatgagtgctacaagactgtcgaactgaataaaccagagattgagcagctcatattttggtgtcagtattggattctagtagctctgatgacggttatggagagatttggagattttacaatatcatggctaccattttactcggaagcaaagctgatgttctttatatacttgtggtaccctaagacaaagggaactacctacatttatgggactttctttaggccatatatttcacagcatgagaatgaaattgaccgtaatttgcttgagttgagagctcgagccaccgatgtagttgtcctttattttcaaaaggctgctactggaggacagaatacattcttttgacgttttgaagtatgttgcttctcaacaccatctcagagggcaagtcaacaaccttctaggagccgaacaac

SEQ ID NO: 392052 - DNA, 536 bp, Oryza sativa
tttaaagaaaggtgggagtctttaggtttctactcctaaaaattgtttctttcttatgtgcagcagtcggtgttactaatgggggagatgaaccagccgccgccgccgccggtggccgtgccgccgccgatggtgatgcagccaatcatgcatccgcccgtcggcaccggcgccgtcttcccgccgcacgagcagctccaccatctcgcctactgcgttcactccaacccttcctgggttcaggtggccgcacttgcattcctccactatcttgtgacgctgggttctactgtcatgcttgcatcaactattgttcctgcaatgggtggtaccccaggggatatggctcgtgttattcaatccttcctatttatgagtggcatcaatactctgctccaaacacttgttggaacgcggctccctacagctatgaatgcttcctttgcatttgtcgtgccagtactgtcaatagccaaagactttgaacaaaataactatgcgagcagtcaccagagatttactcacacaatgagagc

SEQ ID NO: 392053 - DNA, 777 bp, Oryza sativa
cggacgctggtcgcccctccgccgccgcacgccgccgccatgggtatcgacctcgtcgccggcggccggaacaagaagaccaagcgcacggcgcccaagtccgacgatgtctacctcaagctcatcgtcaagctctaccgcttcctggtgcggaggaccaagagccccttcaacgccgtgatcctgaggcggctcttcatgagcaagaccaaccgcccgccgctctcgctccgccgcctcgtcaggttcatggagggcaaggagaaccagatcgccgtgatcgtgggcaccgttaccgacgacaagagggtctacgaggtgccggcgatgaaggtggccgcgctcaggttcaccgagaccgcgagggctcgcattgtgaataactggtggagagtgccttaccttcgatcagctggcgctcccgcgctcctctgggccagaacacggttctcctgaggggtcctaagaacgccagggaagcagtgaagcactttggtcctgctcctggagtgccacacagcaacaccaagccttacgtgcgctcaaagggaaggaagtttgagaaggcgagaggaaggaggaacagcaaaggcttcaaggtctaagttatcgcctgctattcgtgtggttgcactgaatgggctacatagctcttgtttgagtttcagagttcttgtgttgttattactcaagtgccaggatcagctaaattttgttcgaatgttatgcactttgaatcagagaattacaagcgttggcagcaaaaaaaaaaaaaaa

SEQ ID NO: 392054 - DNA, 559 bp, Oryza sativa
  unsure (1)..(559): unsure at all n locations
aatggttgtcctccaccaagatccccttcctcctcctcgccgtcctcctcctcctttccgtcgccttcccagcggaggtgatggcaggagggcacgggcgcggcggaagcagcggcggcggcggaggggtggccggcggcgggaacctgaggccgtgggagtgctcgcccaagtgcgcgggccggtgctccaacacgcagtacaagaaggcgtgcctgacgttctgcaacaagtgctgcgccaagtgcctgtgcgtgccgcccggcacctacggcaacaagggcgcctgcccctgctacaacaactggaagaccaaggaaggcggccccaagtgcccctaagatgcatgctttgtttcttttcttctttttttttaccctatgaataatacctcctcctactaggtctacattgggggcactgcctcactgacactggtttagctcatggatccggttgattagttaaatggtgggggggttatngcttagatctggggctataagtattagtttattctgttctagtagggggtgtgttgggggaatgtgtgtgagaa

SEQ ID NO: 392055 - DNA, 540 bp, Oryza sativa
  unsure (1)..(540): unsure at all n locations
caggagtnaacacgacgcgacccgagccggagaaggggaagggaaggcggcggcggcggcggcggaggaggaggaggcgcgaggggaggcgagcatggtggtgcggatccggctggcgcggttcggctgccggaaccggccgttctaccgggtgatggccgccgacagccgctccccgcgcgacggcaagcacctcgaggtcctcggctactacaacccgctccccgggaaggatggtggcaagaggatggggctgaaattcgacagggtcaagtactggctgtctgttggtgctcagccatcagatcctgtgcagcgcatcctttttcgagctgggcttctgcctccacctccaatgctagctatggctcgaaagggntggacctcgtgattaggcggcnatnngtgtncgnagngggnantntcngtggnnaattggnaatgttttnnggnattgtgccngtnantncnnaannttgngnngatnnggaatnncggngngnncnggnnnnntatntggggncnnctttnttgtnctta

SEQ ID NO: 392056 - DNA, 484 bp, Oryza sativa
  unsure (1)..(484): unsure at all n locations
ttttgagttaattgctagaagaatgctatgatgtccttccctcccttgcaaggccatgtaacagcatacaattatacttctgttgcaggtactggctgtctgttggtgctcagccatcagatcctgtgcagcgcatcctttttcgagctgggcttctgcctccacctccaatgctagctatggctcgaaagggtggacctcgtgataggcgcccaattcatccgatgactgggcgcccccttggatcttgagggtgtcacggttgttgatgactccaatgttcccgaaggtggtgctgaggaacctgtgtcagaggagtgatgctgcagtaggtctccacttgtttgttgtgcctctgataagatcatgagtactgtacaatatggaaacttcctaatcatgtaatcttccattgttttctaataatttacaaggtcgtagtgctgcactatgagttnnnnnnnnnnnnnnnnnnnnnnnnnnn

SEQ ID NO: 392057 - DNA, 626 bp, Oryza sativa
  unsure (1)..(626): unsure at all n locations
tttctnagactcagagcggcggcgagcgcggccggtcgccgnggnaaggagttggtgtggagagggcggggagatggttgtccggatcaggctggcgcggttcggctgccggaacaggcccttctaccggctcatggccgccgacagccgctccccgcgcgacggcaagcacctcgaggtcctcggctactacgacccgctccccgggaaggatggtggcaagaggatggggctgaaattcgacagggtcaagtactggctgtctgttggtgctcagccatcagatcctgtgcagcgatcctttttcgagctgggcttctgctccacctccaatgctagctatggctcgaaagggtggacctcgtgataggcgcccaattcatccgatgactgggcgcccttggatcttgagggtgtcacggttgttgatgactccaatgttcccgaagtgggtgctgaggaacctgtgtcagaggagtgatgctgcagtaggtctccacttgttttgttgtgcctctgataagatcatgagtactgtacaatatggaaacttcctaatcaatgtaatcttccattgttttctaataatttacaaaggtcgtagtgctgcactaaaaaaaaaaagt

SEQ ID NO: 392058 - DNA, 507 bp, Oryza sativa
ttcatctgcacttgcactgcgccatggcggcctcgaccaccctcgccttatcccaccccaaaaccctagccgccgccgccgccgcggcccccaaggccccgacggcgccggccgccgtctccttcccggtctcacatgccgcctgcgcgccgctcgccgcccgacgccgcgcggtcaccgccatggtcgcggcgccgccggccgtcggggccgccatgccgtcgctcgacttcgacacatccgtcttcaacaaggagaaggtctccctcgccggccacgaggagtatatcgtgaggggtgggaggaacctgttcccgctgcttcccgaggcgttcaagggcatcaagcagatcggagtgattggatggggctctcaggggcctgcacaagcccagaacctgagggattcactagctgaagcgaagtctgacattgttgttaagattggtctccggaaaggctctaagtcatttgatgaagcacgtgctgctggctttactgaagaga

SEQ ID NO: 392059 - DNA, 678 bp, Oryza sativa
  unsure (1)..(678): unsure at all n locations
gtacaactgaaaatgtgttactgtccagcatgccacgtgatgagtttgacatcaatgggtatacaagcgacctccacaggctggaatcgagaaccacgtcagagagattgctatccgtgacagagactgggaaagttcctgatttcgaaggggtgcagccattggtgctgaaagggcttatgtctagtgttagccatggatctgcaattgaggtgttatctaggattaccatcccaacatgtgattctatatttgggagtcctgagacaaggctgttgatgcacatcacaggtcttcttccatggcttgggttgcagctcaccaaagatgcatcttccctcgggtcatcttcacctatacaagagcaggatcagaaagcttactatgtggcatccaacatttcggtgtggtgccgtgtcaaatctttagatgatttagcggaagtcttcagagcataactcctttggagaaaatcatctcccctagaaagatcttttgcacggngcttcgccgccaatattgttccgnagtngttcccaaangacttcaacctcttggaattttngggaccttctttaggnctcccttgaganaaggccncttggtttatnanaangtnggggttcnaantnnttaaacacttttaagnaaccccatnggnnccactnaaaaccctaa

SEQ ID NO: 392060 - DNA, 876 bp, Oryza sativa
gtaaagacaggatctggaaaaactcttgggtatctacttcctggatttatgcatattaaacgcttgcaaaacaacccaaggtctggtccaacagtgctagttttggcaccgacaagggagcttgcaactcagattttggaagaagctgtgaaatttggcagatcatcaagaatttcttccacgtgtctatatggtggtgctccaaaaggcccccagctaagagatttggatagaggggtcgatgtcgttgttgctacaccaggaaggttgaatgacatcctagaaatgcgaaggataagccttaagcaagtgtcgtaccttgttctagatgaagctgaccgtatgttggacatgggatttgaaccacaaattcggaagatagtgaaagaaattcctccttgtcggcaaaccctcatgtacactgctacttggcctaaggaagtccgaccaattgcagaggatcttcttggtcaccctgtccaggtgacccttggaagtgttgatgagcttgttgctaatagtgctattactcagaatgtggagctgatcacaccgtccgaaaagcttcgccgtctggagcaaattttgcgatcccaggattcaggttcgaaggtactaatattctgtaccactaagagaatgtgcgaccaacttgcaaggacacttactaggcaatttggagcttctgccattcatggtgataagtcccaaagtgaaagagagaaggtcctgagccattttagatctgggcgatctcctattttggttgcaacagatgttgctgcacgaggcttagacatcaaagatatcagggttgtgatcaattatgatttccccactggcattgaagattatgttcaccggattggcaagact

SEQ ID NO: 392061 - DNA, 550 bp, Oryza sativa
gtccatctcctctgctctgctctccttccaccggctaacgaaccactcgccatcaaagcccccagagagcgcgccatggcggcgcagcggcggtggccgacgtcgacgctggcggcggtggcagtcgccgtagtagtactactggcggcgtcggcggcgacgacggcggaggcgcagtcggcgccggcggcggcgccggggccagcggggccggtgctggaccaggcgtgcctgacggcgctgctgaacatgtcggactgcctgacgtacgtgcagaacgggagcagggcgcggcggccggacaagccgtgctgcccggagctggccgggctggtggagtccaacccggtgtgcctctgcgagctcctctccggcgccggcgactcctacggcatcgccgtcgactacttccgcgccctcgccctcccggcatctgccgtgtttccacccctcccgtcttcaactgcgcagcctttggattcaatgttccaatgggcccaacgccgtcgccttcgccggcaggcgtctcgcccttcggtgagggcccaca

SEQ ID NO: 392062 - DNA, 647 bp, Oryza sativa
ttttatataggtggaccaggtgggggcgatggctgatgcttgagggcccttgagaatgttgccctgttaattcgcgatgaagactttccaaaggtggaccaggaggaccagtaggggcctgacatggataaaaccaaaggacgaagtgatgcaaatgcacaagttaaattaagtggtgtaaacttttatgaagatggagatgttacaagtgctgctaataatgttacaactagattgactacaaattcaaaaggccaggcgtcttcctcttcagaaatgctaactggcagacagcacttgcctcaagatgctggacctgctatttctcagacatctaacggaactttccctagtcttgaaaagaccgaagaagtttgcatagaagctgggagagaattaccaacagataaatctgctgcatttgaagatgagaatagcagggcatgcaaatcaaaggcagagctaaagcagcaacaatttcattctgagaagagtagcagtttacctaaatctgcagaaggtcatatcccatcttctgctgatatatcaagaaaagaaacacctggggttcagagactcaaagagcagggaagtctaagaacagaaagggaaagagagaaggacaaagaggcttctcggagactggc

SEQ ID NO: 392063 - DNA, 574 bp, Oryza sativa
tctgctctccctctccatcttcctcttggtgcgcgcttgcctgcttgctcgtctcctctctctcccagtgggtgcgtttgtgcgagacttgaggctgagcgagaggggaggagagatcgtgctccgcgagggaacggcggcgaggagctgggtgcatctcggttggacttttcctactggaactgcagtactttcaacatgctttttgcaaatgcctgcattaaggatgaataaaatgttaagcaccgactatttagggacgcaggagcttcattcattttgcaagaccaccgaaatattggaagactcacagtctcaagagattgcactcgatagaacagccgtggggtcaacacttctaagtcatcaaaatgtttgctctacttctgaagtatcagggggaaactttggaatcgctgaagtcagttttttacaggatgaatatgatgcaaaaaccaccggtgtactgccaccatcatttttgttcctgggctttagatctatgctccctatatcagtaccatcatcatcatcatctagtctggagactgtcctcttttctgactcaacgtac

SEQ ID NO: 392064 - DNA, 420 bp, Oryza sativa
tctgacactgtgaccgaagaccggttcggcttggagcatggcaccaaaggttggcctgatgcactcgatcatcacttcaggcggctcctccaatacagaatcagtccatttttctgctgatggggagatagcatgcgcattctagcatacacatgcccttggcctgctgaccatccaaaggcgaacgaatatcactctgatccaagactagcagcatatgctgtaccatatgcacctatcctatcaggcactgatgctgcgaaaaattccctgcgaagagaggttgaaatcttgaaatcagaggctcattggtcggaactcttacttctatctgtcgggatgagccactgaatatggtccaggatgatgtaatctgcaagcatctctaatgagttgcggtcatatgcatctgaatgtgcg

SEQ ID NO: 392065 - DNA, 966 bp, Oryza sativa
  unsure (1)..(966): unsure at all n locations
ctgctgcacctgccggtaccgaatcgcaggttcgggctagacccgaagtccggagttggaagcgatcgatggcggctactacgacgggacgagttgttgcactcggcgcggtggccgtggtggtggcgctgacattcctcgccggcggcgcggacgccgactgctacgacttctgcttcaaggactgcatggccagggagaacaacatggtcgactactgcagctacgcctgcgacaagacgtgccagccggacaagcccacgctgtactcgtcgtcgtcgtcgtcccgcctcgccggcgacatggagtgccaactctcctgcgccttgggctcctgccaccgcctccttccggacggcaagggcgccgtggaggcctgcttcgggcagtgctacgacggctgcaagaccacggcggcggccagactgccgaggcctctccgcgccggccactacgtgctctctagtccccctgatgacgtagaccatgatccggaccaccgctacgtgttctctagcccccatgatgacgtagaccatgatccggaccaagtgttcgctagtccacctgacgacatagaccgccatgtattcgctgctcctcctgatgttctcgctgctcttcctggtgagccggaccacgcctgacaaaactgatcacacaacttcgctacctgctgcgaacgaataatctagcgctgcatgcagcagcagcatgcacacatgtgcacactaattatatgtcatatgcacttctatgtcgcaatatatgtatatgttctccatgtaaagatagcgtagtagcgtgtgagtgactgtatgcgtgcagaaggccggattggtccactactagactgcttgctatctatgtgtaagcgaaagttcagagatatcactgctcatttgttttcttccccaaaaaacaacaaannnnnnnnnnnnnnnnnnnnnnnnnnnnnnnnnnnnn

SEQ ID NO: 392066 - DNA, 653 bp, Oryza sativa
gcggaaccttagccctcgaaggcctcgagccctcccctaccttgttctacctcctcccatggaggtagaacaagttctatctatcacctccaactccaaggtagacaatatcaccaatggcgacaatgtgatcatcatccctagtgtgagcacggaggagaaggagcacatcaatggagctgcagagacaaatcatgttgtgatgatcaccgctgcttccatggacagaaccgacggcgacgacaagacgacgatggaggaggagtcggacgtcggcatcgccatcgccaggagcgcctcctccaacggaagccggcagcaagacaagaagcggggcgcgttcggcctcttccgggcgatgttcatgtccttcaacggcagcgccagcatcaagaagagggccgccgccaccatgggcaatcagaagaaggccgaggcggccggcggcggcgccgcggctgccgtggcgagggcgtccagcgacgtcgcgtcgtggaagaacctcgtcgacggcatgcgcccgctccgcctccacggccacctggagtactacccgccgccgtcgccgacaggagcgagggcatgagcatgaccagcagctactcgtccgcccaggacctgcaggagcttgtcaacgtcaatggccatggaaa

SEQ ID NO: 392067 - DNA, 646 bp, Oryza sativa
  unsure (1)..(646): unsure at all n locations
cgagcaacttctgttcgctccattgcatgtgcctccatcacaaggccgccgcaagcaccaaaacccagatgacgctgtgctcgccgccgccatctcctccgccttctaacccgcgccgcgcgcttcctcctcctcctcctccagagcaactacctcctcccccgcctctcccctctctaaaaccctagtccttctcgcccgccatggggtacgcgcagctcgtcatcggccccgccgggagcggcaagtcgacatattgctccagtttgtatcaacattgtgagactgtgggtaggacaattcatatggtcaacctcgatcctgctgcagagcacttcagctatcctgtatctacggatattagggagctcatatcattggatgatgtcatggagggaacttgggatgggaccaaatggcgggcttatctattgcatggaggcaccttgaagacaatttggatgaattggttggatgagcaactggagggttatttgggtgatgactatcttgtgtttgattgcccaggccagattgaactcttcactcatgtcccagttctgcgtaactttgttgaacatttgaaacggaaaaatttcaacgnttgtgctgtgtaccttcttgattcacagtttgttagtgatgt

SEQ ID NO: 392068 - DNA, 772 bp, Oryza sativa
  unsure (1)..(772): unsure at all n locations
naatctcaaggatgcgaagcgcagaatactagcgggggtttgacaagaaagagcttttttaacggccccgcctttggaaccgcttcatcggcttatcagtatgaaggtgctgtcaaggaggacggaagggggccaaccatttgggacaaattcgcacatacatttggaaagatcattgacttcagcaatgctgatgttgcagtggatcagtaccaccgtttcgaggaagatattcagcttatggcagacatggggatggatgcatatagattctcaattgcatggtctaggattttcccaaatggcactggtgagggcaaccaggcaggcattgatcactacaacaagctaatcaacgcattactagctaaaggaattgaaccatatgtaacgctctatcactgggaccttccacaagctttggaggacaagtacactgggtggcttgacaggcagatcatcaatgattatgcggtatatgctgagacgtgcttccaggcatttggggacagggtgaagcactggatcaccttcaacgagccccacaccgtcgcggtgcaggcctatgacagcgggatgcatgcaccgggccgctgctcggtgctcctgcacctctactgtaagaaagggaattcaggcaccgagccctacatagttgctcataacatgatcctctcacatgccacggtttcagacatatacaggaagatattcaaggctatgtcagattggggagctgggtcttattttgaatgtttatgggactatccat

SEQ ID NO: 392069 - DNA, 434 bp, Oryza sativa
atcaatttccttcctcccgatcgagcaagggggcgaaaggacgagctacggaccgagccatggaggaattcaaggctcgctccttcgtcgccttgtctccctcgggtgaaatttcatcaatataggaaaatagattataccatcagtttttgcacacgcggatgaaatttgactaggagaggcaccatggagaaagtcgaggtcgatgggaacttcattggtacgggtaattggaagctgcatggagcactatgtaagcaacttcacaaagtagttcttgaagtattggatgttattcctgtccttgaagctacaaggcctggaaacagttctggacttcttgcattgagttccttgcgcatagctgttgagaaggccaagaatctacttcagtattgctcagagtgcagcaagctatacttggcctttacagc

SEQ ID NO: 392070 - DNA, 624 bp, Oryza sativa
  unsure (1)..(624): unsure at all n locations
tttttaatcaagaaacaagcaagattattctagccaactggctagcttgcgaatggcttccttgtcctccttaatgctcgtcacggcagtggccgcattgctggtcattggctcatctggcactgaggtcaccttcaagatcggtgagtcctctaccacctctacactggaactcatcaccaatgtcgccatatctgaggtggagatcaaggagaagggtggcagcgactggagggggctcaaggagtcatcggctaacacctggaaaatcaaaagtgatgcaccgctcaagggccccttatccgtccgcttccttgtcaagaacggtggctatcgcgtcgtcgacgatgtaatccccgaaacctttaaggccggctccgtctacaagagtggcatccaggtccagtaatggacatgcatgtccttgcattaggtcacatggaaattattagcctctaaataattatctattcaaaagagagaccgagtctgcatgtgaacacgtcaatagttaanttnctattgttattttgtgacaacagactattgacaaaatgaagcataccatgtgcccttcccacatattggtatggagctatatgtgcacacgattttgaataaaan

SEQ ID NO: 392071 - DNA, 467 bp, Oryza sativa
  unsure (1)..(467): unsure at all n locations
ccggtgtcgagggcaccagggagaagctcacagatgagcagatcattgacctgatcatcacccttatatactctggatatgaaaccatgtcgacgacctcgatgatggctgtcaagtacctgtcagaccatcccaaagctcttgagcaactcaggaaagaacattttgatatcaggaaaggtaaagcgcccgaagatgccatcgactggaatgatttcaagtccatgaccttcactcgagctgttatcttcgagacattaagattagctacagttgtgaatgggctgctgaggaaaactacccaagatgttgaaatgaatgggtatgttatcccaaaaggttggagaatatatgtttacacaagggaaataaattatgatccattcctgtaccctgatcccatgacattcaatccatggaggtngctggagaagaacatggaatcacatccacanttcatgctgttt

SEQ ID NO: 392072 - DNA, 776 bp, Oryza sativa
ccgggactttcccctcctctcacattttccccaaataataatagaggaaggggaaaaacacatttgcagccacatcatccatggcctctctccgcaccattccggtgatcttcggcatcctcttctatgtccttgccagcactgccactgccaccgacgcaccggactacgtcgtccaaggccgtgtctactgtgacacgtgccgcgccgggttcgagaccaatgtcaccgagtatatcaagggtgccaaggtcaggctggagtgcaagcactttggcaccgacaaggtcgagcgtgcgattgacggtgtgactgatgagaccgggacatacaagattgagctcaaggacagccatgaggaggacatctgcgaggttgtcctcgtccacagcccccttgcaaactgctctgaaatcgaggccgaaagggatcgtgcccgtgttttgctcaccaggaatgtcggcatctgtgacaacctgcgcttagccaacccactcggctacctcaaggacatcccactgcccatctgcggcgcgctgctcaagcagttcgacctggctgatgatgataacgagtaatgcgatgatcgtcatggaaccaccggagaggctgcattaattataaatcagttacatggcttgcaaaatagcatggatgtatccgtaaaaggcagaatctaagcatatctgtccaaaaacatgaaaaatgtacatcttcattcatctaatgttacttacaaccttgtgtcttaaaccccaaaaaaaaaaaaacccaaa

SEQ ID NO: 392073 - DNA, 509 bp, Oryza sativa
tcagctttcaagcatggcaagacgaataagagacccttttccttaattttgtttgatcattccctttcagctttgattttcctggtatgacatgaagcattgttcagattatttgttgtctgaagcccttatcaagatttgattccagattacctagaaactcaagctttcaataaactaacaacgatggaggacggcatggatttcagccctcataaaaatagcacagaacagaatcgaaccagctttgaagaagatgatcaattcagcattcgatcagcaccctccaaaccatctccagacaagaaatcgaagcccaagaacaagccgaatcatcactccgacaagacggcgaacccgccgccgcagaggcccgagacgacggcggcgctggtgacgacgacccgcagcagcagcaacagcaggaacaaaccgtggcgaggccgtcagcacggcagcctggacagcatcagcagcggaagacacggagcacagcttggagagcagca

SEQ ID NO: 392074 - DNA, 440 bp, Oryza sativa
ttgttcactcctcttcaattctcacgcactctccgggccagtgatcacacacacacacgaccgctcgctcggttgcctcgctgctgccttagcgagaaaccgggagttagcgagcgagccgtcgtcgccggcgatgaggcaacaacaagcgggaggagttggcgacggggtgagcccgggcaatgtccccgtgtgctactacgggcccgggggccgcgtgccgtcgtcgctggagcggcgggcgcgcgccgccgaggtgctcctgcgctgcgccgcctgcggcctcgccgtgctcgccgccgcgctgctcggcgccgaccgccagacccgcgtcttcttctccatccagaaggtcgcccggtacaccgacatgcagtccctcgtgctcttggtgatagcaaatgggatggctgcgtgttatagcctaatccagggtgcaa

SEQ ID NO: 392075 - DNA, 524 bp, Oryza sativa
tttgctcacacactgaggtagcataggcatggctagctcacccccatgggctccaccaagaacgccatgtcttcctcgggtctcttcctcgccgcgctgctgctgctctcgtgcagctccatgagcagcgcggcacggtggctcgaggaggagtacccgccgcaccccgccgtgccggagctgcccaagcatgaggagccgccgcaccccgtcgtgccggagttgcccaagcacgaagagccgccgcaccccgccgtcgtgccggagttgcccaagcacgaggagccgccacaccccgtcgtgccggagctgccaaagccggaggtgccacacgccgccgtgccggagttgcccaaacctgagctgccgccacaccccgccgtgccggagctttccaagcacgaggagccgccgcaccccgtcgtgccggagcttccaagcacgaggaaccgccgcacccgtcgtgccgagcttctaaagacaggagcccgcgaccccgcgtgccgagctttccagcacgagag

SEQ ID NO: 392076 - DNA, 570 bp, Oryza sativa
cccacgcgtccgggactgtcccgagggaggaaatgtcgtcgaaagatggtcctaaaacgagaaaaatctttgttggtggtattccaccatctcttactgaagataaattgaaggagcatttctcttcatatgggaaggtagttgagcatcagataatgcttgaccatggcactgggcggtcacgaggctttggctttgtcacgtttgaaaatgaggacgctgttgaaagggttatgtcagaagggagaatgcatgatcttgcagggaaacaggttgaattaaaggaggctgagcctaagaaacctggcgggggggattcttagctctaattgggggccatagtcacggggagtggtggtggccaccgtagttcttaccgtggtagtggtggtggcaattctggaagcagcagcagcggtggctatggtggatattggtggtggctatcggtcagctgctgcagcttattacggtagcacaggttatgctggctatggcagaggttatggatattgaggtaaccccgcatttgggccatgctttggcttttgcttttggggctcaatggat

SEQ ID NO: 392077 - DNA, 1204 bp, Oryza sativa
gtttatactttcaatcagagccagtatcctcgtgtggtagccgatgagttcttgccatggccttccaaggggaagacctgcaaggatggctggtaccctcctggccatggtgatatcttcccatccctgatgaacagtggcaagcttgatttgttactttcacagggaaaggagtatgtgttcattgcaaactcagataacttgggtgctatagtggacatgaagatactgaaccatttgatccacaaacagaatgagggttgcgtggaggttaccccgaaaactctggctgatgttaaaggtggcacactgatctcatatgaagacaagggtcagctcctggagattgcacaagttcctgatgcacatgtgaatgaattcaaatccatcgagaaattcaagatcttcaacacgaacaatctatgggtgaacttgaaggctatcaagcgccttgttgaggctgatgcactaaagatggagatcattccaaaccctaaggaagtggatggagttaaagttcttcagttggaaacagcagctggtgcagcaatcagggttctttgatcacgcaattgggtatcaatgttccaaggtcccggttcctaccagtgaaggcaacatcagatttgcagctagtacagtctgatctatataccttggttgatggctttgttacacgcaacccggccagaacaaacccatcgaatccctcaattgaactgggtccagagttcaagaaggtcgggtgtttccttggtcgcttcaagtcaatccccagcattgttgagcttgacaccttgaaggtttccggtgatgtttggtttggctctagcatcacattgaagggcaaggtgaccatcacagcccaacctggtgtcaaactggaaatcccagatggagcagtgatcgagaacaaggatatcaatggccccgaggacctttgagcgaaaggatgcagagttcacaaagagagatcatatcaccattccatataatcaatcaagctccacgacattgtggagaatatttttgatccaatattgcttcggcataaggaataacaaaattagtacatgtcttttacctacttgactttgcttcttgttctattttctccttgtgagtgggcaaacaagtcatgtcccggcaaaatatcatatgaacatatttggttacatatctgttcaacaatcagcaagaaaac

SEQ ID NO: 392078 - DNA, 645 bp, Oryza sativa
ctccggtgagcatcgaggaggtagaggccgcccccgactccaacggcggcggcgaggaagccaatcggccccgcgtggaaggcgacggcgaaggtgtcttgcagagcaacgagtcctccgcgaaggtcgatgagccggtagctacagagaacagtgacgctgctcctgctgaggcatctgtagatgctgtgaacggcaagattcctcctaccaagttgattccccaacatcctctggaaggtgttacattgacagaaagaactgtacgtattactgggaataagaagcagatagaagcggcaaaagatattattaagcaagctatgagtcaggttttggtagaagcaaatggtgtaacacggacattggttttgaataggccaaagcagttgaatgccctctcctctgcaatgataacgtgttttttgaggtgcttcactgcttatgaggaagatgatggagttaaactattgattgtgaagggaaaaggaagagcattttgtgcaggtggagatgttgctgcagttgtccggtctataaataatgatagctggaaatatggtgctcattttttccgaaatgaatttctgttaaactatatcattgcaacatatagcaaacctcaggtttcgcttctaactggaa

SEQ ID NO: 392079 - DNA, 488 bp, Oryza sativa
  unsure (1)..(488): unsure at all n locations
cggacgnggaagaggaaaaatactacccgtcctctgcttctctctttctttctcttgctgtgttttcttcttcctccctactactcgggtttctgtccagatctccggcgagcatcgaggaggtagaggccgcccccgacaccaacggcggcggcgaggaagccaatcggccccgcgtggaaggtgacggcgaaggtgtcgtgcagagcaacgagtcctccgcaaaggtcgatgagccgctgctcctgctgaggcatctgtagatgctgtgaacggcaagattcctcctaccaaggtgtcttgcagagcaacgagtcctccgcgaaggtcgatgagccggtagctacagagaacagtgacgctgctcctgctgaggcatctgtagatgctgtgaacggcaagattccccctaccaagttgattccccaacatcctctggaaggtgttacattgacagaaagaactgtacctgcccgggcggccgctcg

SEQ ID NO: 392080 - DNA, 816 bp, Oryza sativa
gtggccgcctgccaatggggagcccctatgggccgccgatgcatatggcagggcctccatattctgctggatccatgatgggaccaggtggaatgtatgggatgcccatggacagatatagcttgggcttacctgctggtcctggtccaatgggcgcgagggctggttcatattccgaggaaggatcccagaagaagcctgcaggagctgggcgtgataatgattggaaatgccctaattgcaacaacattaactttgcattccggacagtctgtaacatgagaaagtgcaatacaccaagacctgaaaaccaggggtccaaacctgatggtgcaagaggtccaaaaccaaagatgccagaaggtagttggaagtgcgagaagtgcaataacataaactatccattccgcacaaaatgtaaccgtccaagttgcgaggctgaaaagccatttcagacaaacaatgctaatgagtcatctgctgatcaggacaatcagtgagtcctagaacagttatgagggtcaagaaggtccagcgtcgtcgtcaaggttcagtctgaatgtctggggtctatctgtgtcagtagtcgctgctgtatccccttgagaccttagttgagtcgtcgtcctaatggtaaacgttttggagtggcaactggagtcatggatttctttattgctacagattttggttaagaacatcccttgtgaatttgtcatatacttctgaagcttggttgctttgtcttggttactggtactctgggaaaatggcaatttatgatataaatttcaattagctaaaaaaaaaaaaaaa

SEQ ID NO: 392081 - DNA, 552 bp, Oryza sativa
taagcgaattgagagtgctggtggggttgttatgtgggctggaacttggagggtaggtggtgtacttgcaatgtctcgggcatttggcaaccgcttgttgaagcaatttgttgttgcagatcctgagattcaggaacaagaaatagatgatgaattggagtttctgattttagctagtgatgggctgtgggatgtggttccgaatgaggaatgctgtttcactcgtgaagattgaggaggaacctgaggcagcagctcggaagctgacagagactgcattttcccgagggagtggtgacaatatcacatgcattgtcgtgaaatttcaacatgacaagatggacggtgattcctcaccaacaagcgataaaagctgattccatttgttgtttgttatacatgttgtcggtcgtttaacttcagctggattttcccggcttcatatggtcccgacaatggcgtagctggtactaaagacccgcttcatgttcccctgtctatatatccctaattttggtgcctctggtggtttacaagttggtattgctatcc

SEQ ID NO: 392082 - DNA, 829 bp, Oryza sativa
  unsure (1)..(829): unsure at all n locations
tttcaaacctatggaatatacgatttcagaccagacaacggctatatacaagatcagcatgctgctttgagaaccagaaatttctatcataccgatgatgcttttgcagattcaattagcacagacttctcagatgctacatcaagcgaatggtcactgtttaccagctctgatgaatcctcatttacgactgaaagcactagagattcattcagtgttgtggactatggtgacaatgctggccttgatccaatttcctctatatttgggccttattatgctcaagaccatcctcctggcagttttgcctcgtgtacaaggttgtcaccttccaatccacaaacaaggtacttccaagagaacacaggctttgtctcagattcttccatgccggctcacctgcccggcaatgtacatagaggaagatatccagacagggcctgttcttcttcagctgaacctcctgcttcagcaaatccgcnaagcgtatatggtaggtatggccttagtagagaaggttttgttcaaacatctggattttgtcaaatgtaattgtctacatttcatagttttagctggagtttggcagttgtggttaccactgccattaaataccgcctcatgttcttttatttcagatgaggcatatttaattttagctgcatatcctaggttagttgagtgagtgactcaatgtagcaggccagcagggtaattagatttgtctaggtgcctagcatttcaggagatatatgttagaacacagtgacaggctttgtgccatccattgttcaaccaaaagccagtcatatcatttatctagttgctc

SEQ ID NO: 392083 - DNA, 490 bp, Oryza sativa
caagagctgcttacctaacatacttttacaactccaccattgtccattgccaaaggccttcgatctcgcctcccagatctgccccgcgtcggcgaagatgaagatcaacgtgcgggggtcgacgatggtgcggccggcggaggagacgccgcgggtgaggctgtggaactctagcctggacctggtggtgccgcggttccacacgccgagcgtctacttcttccggcgcggcgaggcggcggcggcggagggcgggagctacttcgacggggagaggatgcggcgggcgctggcggaggcgctggttccgttctacccgatggcggggcggctggcgcacgacgaggacggccgcgtggagatcgactgcaacggggaaggcgtgctgttcgtcgaggccgacgcgccgggcgccaccgtcgacgacttcggcgacttcgcgcccaccatggaccttaagcgcctcattcccaccgtcgactacaccgac

SEQ ID NO: 392084 - DNA, 530 bp, Oryza sativa
caaataactaacacccatcagcaacaatggcatcctcttgtctccttctggcctgtgtcgtggcagcggccatggtgtctgcagtgtcatgtgggccgcccaaggtgccgcctggccccaacatcactgcggcctacggcaaacagtggctggaagctaggggtacctggtacggcaagccaaagggtgccggccccgacgacaacggcggcgcttgtgggtacaaggacattgacaaggctcccttcctcggcatgaactcatgtggcaatgaccctatcttcaaggatggcaagggctgcggctcctgctttgaggtcaagtgttccaagccagaggcctgctccgacaagcccgtcatcatccacatcaccgacatgaacactgagcctatcgccgcctaccacttcgacctctccggccatgcttttggtgccatggctaaggaaggcaaggatgaggaactccgcaaggcgggaattatcgatatgcagtttcgtcgcgtccgctgcaagtaccctggtgagact

SEQ ID NO: 392085 - DNA, 530 bp, Oryza sativa
tcgtttttcgtgtggggtttccgtattattgcattataatattgctcaaattgcaccttctgatcccactacaatattgcaatcgattctcactttctcatcacctgcgattgtgattgttgttgtaagcagcaagatgggtgccggcggcaggatgacggagaaggagcgggaggagcagcagaagctgctcggccgcgccggcaatggcgcggccgtgcagcggtcgccgacggacaagccgccgttcacgctggggcagatcaagaaggccatcccgcctcactgcttccagcgctcggtgatcaagtccttctcctacgtggtccatgacctcgtgatcgtcgccgcgctgctctacttcgcgctggtcatgatccccgtgctgccgagcgggatggagttcgcggcatggccgctctactggatcgcgcagggctgcgtgctcaccggcgtgtgggtcatcgcgcacgagtgcggccaccatgcctttttcgactactcggtgctcgacgacatcgtcggcctcg

SEQ ID NO: 392086 - DNA, 534 bp, Oryza sativa
ctcctctcctcctcccctgcacagaccactcgtttcctccacaaagagggagggaacaagggaagggtgtcgcccgccccccaccccgatctgcctccgccgctccgctcctccgcgcctgcgaaatctaccaacgctaactcagcaagatgggtgccggcggcaggatgacggagaaggagcgggaggagcagcagaagctgctcggccgcgccggcaatggcgcggccgtgcagcggtcgccgacggacaagccgccgttcacgctggggcagatcaagaaggccatcccgcctcactgcttccagcgctcggtgatcaagtccttctcctacgtggtccatgacctcgtgatcgtcgccgcgctgctctactttcgcgctggtcatgatccccgtgctgccgagcgggatggagttcgcggcatggccgctctactggatcgcgcagggctgcgtgctcaccggcgtgtgggtcatcgcgcacgagtgcggccaccatgccttcttcgactactcggtgctcgacgacatc

SEQ ID NO: 392087 - DNA, 502 bp, Oryza sativa
gtaccaaccaaaaggcgcgcgaacacacgagtcggcggcggcgcggcgatggggagcaacacggaggtggagaagaagaaggccccaacggcgctcgcgcccatcgcgaagcctctcgccggcaagaagctctgcaagcgaaccctcaagctcgtccggcgagcatcggaggccaagtgcctgaagcggggagtcaaggaggtggtcaagagcatccgtcgtgggaacaaagggttgtgtgtaattgctgggaatatttctcctatcgatgtgattacacatgttccaatacttttgtgaggaagctaatattccttacatatattgtgccatcaaaagaggatcttcgctactgccgtggactactaagaggcctacctgttgcgtcctggttatgaccaagcctgccaaggggagatcaatgaagaggtgaaggagaaactgaagtcagactacgaccatgttgtagcttgagttgcagaggttacatcttcaatgttct

SEQ ID NO: 392088 - DNA, 454 bp, Oryza sativa
tcgttgttcgcgtggggcgcgattgcggctagggttttattcctttcctcacaaacacaccctctcccccctcactacgtctctctcctctctctctccgccgccgccgccgccgccgactcttgcctttcccacgccctcgatcttggcggctggagagccatggcgatgcagtccggcaggcgagcctcgtagccaggaggggtcagttccccagtcacccaccccacacacgaagatagcgagcttgtagcgtgattttttttgtaggccgtcgaactcgcacctatggcgaccgcgaacccctttgacctcctcggcggcgacgacaacgacgaccccgcgcagctgctggccaaggcggccgtcgcggcgcagaaggccgaggcgaagaaggccgcgtgccggcgtgatctatttacttcactcattgctacaatgcatatcatattcc

SEQ ID NO: 392089 - DNA, 463 bp, Oryza sativa
  unsure (1)..(463): unsure at all n locations
gatanagtcacattccctcctctctcctccttgcagggcctgtctgtttctcaccatagtcaggaaggaaagaaggaaggaagaggaaaaaaaaggatcatcaaccatgtcgaattcggcgtcgggaatggccgtgtgtgacgaatgcaaactcaagttcctggaacttaaggcgaaaaggagcttccgcttcatcgtgttcaagatcaatgagaaggtccagcaggtggtggtggacaggttggggcagccgggtgagagctatgacgacttcactgcctgcttaccagcagatgagtgccgctacgcggtatttgattttgactttgtcactgatgaaaactgccagaagagcaagatattcttcatctcctgggctcctgatacatcaagggtgaggagcaagatgctgtatgctagctccaaggatcggctcaggaaggagcctgaccgcatccaagtg

SEQ ID NO: 392090 - DNA, 515 bp, Oryza sativa
ttctgaagctgaaagggcacagcatcttaaacaaatccatgatctccaagaacatctgcgagaaaaggaaagccaaatgcttgcattagaggaacagcatagggctgctcaagataacattatttacaaagatgaacaattgagggaagctcatgcttggatggcacgagttcaagaaatggatactttacagtctcagacaatgcaagctgagttacgtgatcgtactgagcaattcaatcaatattggattagtttccaacaacagtatgttgagatgcaaaggggttttctgcataccatacaacaacttcagctagaactaaatgaattaagagaccgaactggagcaccaaaagatggttcacaaactgcacaggagagttcggccgagtcaacacttggtcagaacaaagggaacaacatggctgcaaatggtagtggaacaacagatagtagtcagtcagtgaaaagtaatggagttccagattgttccacaagggaaacagtaatgc

SEQ ID NO: 392091 - DNA, 465 bp, Oryza sativa
ttgaataacaactagaaaagcttcattagcagagtgatcgacatggtaattaaatggcgtcgtcgttgtcgcccatggcgatgttcgtcgtggtcctgatgtgcgcctcagcaatggccgcccaggcgcgcctcccgccggggtctagcccgctggtggcggcgtgcacggcggggccgttctccaagctgtgcgtcaaggacctgggccaccgcctgctggacatccagacggtgctgacgtcggtgtcgaaccacggcgccgccatcgccggcgcgccggggcaggtggacttcaggtccctggtcgccgtcgccatggaggccgccacggagtccggcgcggtggcggcgacggtgttcgaggggaagctccccgggttcaacaagtccgtgccggacttcaaggcctgcctcgacaactgcagcgtgacggtgtcgagcgccatgaaggagatccacggcg

SEQ ID NO: 392092 - DNA, 1443 bp, Oryza sativa
  unsure (1)..(1443): unsure at all n locations
aaccctcacctcttctctactctctctctctctctctctctctcaagctcggcggaggggaggcaagcaaagccttctcccctcgcctcacctcgcaatccaccttgggcgggccgtccggcgagctgagcgcggcggcgccctccttactcctccctccccacgtgcggccccgtcggagcacggcggcgacgaagaaccaggggggtgggggggcgaggaggagggcatcattccaccggctgattcattcttcttggctcgagtcgaattggagaggtaattgcttgccttctgaggaactgcgggagggagcgaggagtcgtggagcgactcttgaaggatggcggaaggtgccaaattccatgggatcgttggcgctgttggcgcgcatgatgttggcgggaacttctgtgacatggggtactaccagaagctaggggagggctccaacatgtcgatcgatagccttaacagcatgcagacaagcatatacggtggttcggttgcaatgtcagtggacaacagtagtgttgcatctagtgactctcgtaccgggatgcttaagcatcctggcctcaggggtccagtcattgtgtctagctattctgtcgggaacagcattttccgtccagggcgtgtgtcgcatgccttgagtgatgatgcattggcacaggctttgatggactctaggttccccactgagacactcaaggattacgaggagtggaccattgatttgggtaagctgcacatagggatgccatttgcacaaggtgcctttgggaagctctataggggaacctacaatggaggcgatgtcgcaattaagcttttggagaggccagaggctgaccctgagaaagctcagttgttggagcagcaatttgtgcaagaagtcatgatgctcgcaacgttgaggcactcaaatattgtcaagtttgttggtgcatgcaggaagccaatgggttttgggtggaatttgtgactgagtatgcgaagggcggatccgttaggaattttttgaatagaaggcagaataggtctgtcccactgaagcttgcagtgaaacaggcattggatgttgcacgtggcatggcatatgttcatggccttggatttattcacagagatcttaagtcagacaacctattgatttctggagacaaatctatcaagattgctgactttggagtggctaggattgaagtgaagactgagggaatgacacctgaaacaggaacttaccgctggatggctcctgaggtgatccancacagaccatatgaccaaaaagtcgatggtctacagttttggcatcgtcctgtgggagctagtaactgggaaccttcctttntgcaaacatgaccagcagtgcaagctgcattttgcggtggtgaacaagggtgtncgcccagccataccccatgactgcctccctgc

SEQ ID NO: 392093 - DNA, 543 bp, Oryza sativa
tctggttcgctacgcggtctccacccatcaagattgcagtaataatccaagctcaataaacgagccaatccgtcgaagaaggaagcagcggcgatggcggcgaggtccggcgaggtgcgggcgacggtgctgggcatggcggtgctggcgctgcttctgctgctcggccaccacgcggcggccatcgaggccaacgtcggcgtcacccgccaggccagcttcagcctgaacggcggcgccggcgccggcgcggttgctcgcgctggcgctggtgctggcgctggcgctggcgtcggcgctggcatcggagctaacgtcggcgttggcgctcgcgccggcgtcggtgctggcgtcggcgctggcgtaggtgcgaaggtcggtgctggcgtcggtgcgaaggtcggtgctggcgccggcgttggagcacgcgctggcgttggtgcgaacgtcggtgctggcgtcggtgcgaaggttggtgctggcgtcggcgttggcgctggtgctggcgtcggtgcgaaggtccgtgctggcgtcggcgttggc

SEQ ID NO: 392094 - DNA, 523 bp, Oryza sativa
  unsure (1)..(523): unsure at all n locations
atccatcaagcgaagaaaacccatcgcatcaaccaccaaatcgaaggcacgtaggtgagcaccaacagctacatcggccatggctcgcgcgctcgttctcgtcgtgatcctcctcgccgctatcgcagtggcaccgttcgcggaagcctcgacagtcaccggtggctccagggtattgttggcctccgacgcgcccgctgagagcccggctgggcctgcggcggccccaggcccagcggaagagtccagcagtgaatctgctccatctccgagcgccgctgatgcctgatcgagtaataatgaagtccaagtgaataattcttcatcccaagaacattgatcaagcatatatgtcctacccttccttcataaaggctaacagagcctcatttttatttttatttttattttttattgctttcttctgttgattgatcgtgttaatcatgcaatatgatgagttaatataagttcgatgaagatatttgtttcccattgttcaaaaaaaaaaaaaaannnnnnn

SEQ ID NO: 392095 - DNA, 753 bp, Oryza sativa
  unsure (1)..(753): unsure at all n locations
cgaaggaccccacccaaaatcacacgcgccaaccagatcaaacccacctcgcaggagaagagaagcgatctacctctcctcgaggtggtggtgaggatttggagttgaattgtggggagggggacctcgcgggtgttgccggtttggagcccaagatagggttatgagctgcttcgcggaccgccgctgctacgccgccagccgccgccaggacggcctcctcgtgttcatgttcttcatctcgattcccatacgtactagtagcagtagtagtaataattgtcattccagtagtagtattagtagtaatctcctgtaagcggggttcctcctcgcggctgcgtgtacggggacgggaggacccttcttcctcttcgtgttcatcttcttcttcttcttcctctcttccttcggcttcggcgctggcggctatggatcccaatagcctcaaaactggaggcctcttgcttccgaccattgagaggcaatgtgcttcgcctccatccgtcatcgtgatcggtgggggaatttcaggggttgcagcagcccgtgctctctccaatgcttcgtttgaggtgactgttttggagtccagagatcgcgtaggcggtcgtgtccataccgattactctttcggatgcccaattgatatgggagcctcatggctccaacggcgtttgtaatgaagaactccttngcaccattgnattggctaatcttggggctgaaattatatcgcactaagttggcgaa

SEQ ID NO: 392096 - DNA, 963 bp, Oryza sativa
gtcaacggagaggtttgatttgtttaggtggcatgtgcttgcatgtgtagtctactctgtccaagcatttgctgccatgaacaatacaagaacattatgatgatagcttgtagatccagaggaacaacgcaggaagtttctcggagcatttcccaggacaaatataagaaaatagacaaggtggatcgcagatcaaatgaagatatcctgtttgagttttctataatacagatcaaatggttatctgctgaagaagtaagcagaatattcttgtttactatgcaaaatgcccttctaatggccactattggatagttggggtagggcttttataaagaataagtgcggagcacacaagatggaataaaaaagaggacacgattacagcagcggatacggcagcataggcgaatatacggcagtaagagcacttccaatccaataaatctaagctaattgcaagtttagatgacatgttggtgaaagcttctcaatgcttttttttcaagggaagagaaaaaacgcaagataaccatttacgtctaagttggcctagatttaactgatgtcgtcgctgtacccttaagtttgccctgcggttagcaagtgtccaaccagcatagtaatcagctttctttgattaagtcatggtgtaccgtatctgttaattttctacgtcgtttgtgatacataatatacgtcgtgtatgcgtcgtatatggttacagtttgtcacgctcgtcgaccttctgcagctactacataatcctttctagtcaggtatagactgcatctaaactctactattgtttgcattgtgtgagagttttttttttttttgggtctttgccagtcataataaatcatgatgtaacttaaactatgtattaatagtgttcaatttagttggttgtgtcgtgtactccaccatatatcacacccccttctttatgtaccacacaaa

SEQ ID NO: 392097 - DNA, 637 bp, Oryza sativa
  unsure (1)..(637): unsure at all n locations
tcgctttacccttcccctggctcctcctcctgcgattccacttccatccggcggcacaggaggaagggtgctaaggggggatcggctccattcctcattcttcattccatttgcgcgcgtgattcgggtttcttttccttcttgtcacctgtttcttggtcggtttcccgccttctcagaggtcggtctattggatttggagcccggggcccagccttgcctcaacgtctgtgttgtcgtgttcttattggattcttgaccggattggattttggcggttccaatttttgttggtttgctccgattcttggttgatttggtcggaagatgatcaagtggggcatcggtagcagcgggacgccggcggattcgtattatgaggtccgctcggattgcacggatgacgtgcccaagagcaagttcaagatcaaggcaggaaaaacattgagtgtccggaaatggcaggctgcatttagcactgatggttgtcttgatattgcctcagtcctaagccggatacaaaaaggaggtgtgcatccaacagtaaggggagaggcttggcatgtttacttgatgttttgatnnnnnnnnnnnnnnnnnnnnnnnnnnnnnnnnnnnnnnnnnnnnnnnnnnnnnn

SEQ ID NO: 392098 - DNA, 492 bp, Oryza sativa
gtccgtttcggtttcggtctgggattttgaaacggggaggcggaatgctcgaccgatccctcaggccgccgccgccgcagcaggcggcggcgcaggcggaggcgggccccggcggtggcgagggaggggggaacgtggatcgggtgctgttcaagaacctcgtcgagatggtgccgctcgtggagtcgctcatggcggcgccgaagaagggttctgatttgaagagtgtgaagtcgccgcaaagtgtgtcggtgaaaaaacggagggatcctggagagacgggcaagaagagcaccgccgactccaatggtgagaatcggcgcggttgcgccagtcggtctgttggggggagaaaataaacccaaggataaggatgagatcgttttgctgcgtgagcagatcgaagagttgcaaaagacgctgcttgagaaagaggaagcactgaaatccgcggagagtttggtgggggagatgaatacattatattcgaca

SEQ ID NO: 392099 - DNA, 600 bp, Oryza sativa
  unsure (1)..(600): unsure at all n locations
antttcccaaaccaaatcccattccattccccgtccgtttcggtttcggtctgggattttaaaacggggaggcggaatgctcgaccgatccctcaggccgccgcagccgcagcaggcggcggcggaggcggaggcgggccccggcggtggcgagggaggggggaacgtggatcgggtgctgttcaagaacctcgtcgagatggtgccgctcgtggagtcgctcatggaccggagtcgaaacccgtcctactcgaggcgcgcgtcgatggtgtacacgccggcgccggcgaagaagggttctgatttgaagagtgtgaagtcgccgcaaagtgtgtcggtgaaaaaacggagggatcctggagagacgggcaagaagagcaccgccgactccaatggtgagaattgcgcggttgccagttcggtctgttggggggagaaaataaacccaaggataaggatgagatcgttttgctgcgtganaaatccgaagagttgcaaaanacgcttcttgagaaagaggaagcacttaaatccgcggagagttttgtgggttagatgaatacattatattcgacagtagatgagcttagacgccaggtt

SEQ ID NO: 392100 - DNA, 523 bp, Oryza sativa
tcaaagcctcgccgccgtcgccgccgccgccgccgccgccgccgcggggatcgccacgccatgtctccctccctcttgcttacctctaggggtacccactcgccggcgccacggccgcaaacccgtcgagcatcacaactgctcgtctctttcccctcgcgctgcagccgcttcgtcggcctccgcctcgcgcgcgcagccgccgattcgcaggggcccaacggcgctgcccctggatctggatctggtggggacggagagggcaaggcagccaatggtgccgacaccaaattgccaaagaaccggagggacatactcctggaatacgttaaaaatgtccagccagagtttatggagctcttcataaaaagagctccgccacaggttgctgttgccatgcgccaaacggtgactaatatgatttgggactctgccacctcaatttttcgctgtaactgtgacaacggttgctgaaaatctagctcagcttatgtacagtgttctgatgaccggatacatgttc

SEQ ID NO: 392101 - DNA, 601 bp, Oryza sativa
tcgttcgacccccaccccctctacgcctcgccatggcgtccgacaccaaggcagtagccgctctcttctccatgtacaacgacgacgaggaagaggatgacggcgacgagcccagacccccttcgccgcccgccgccgcaacctcctcgtcgccctcacctcagaccgaaggcgagggctcaaaccctaaccccaacgctgccgcttcttcggcgcccccatcccctcccctcgccgaggatccggccggccgcagaaccctagccagcccctacccctcgccggggctcccgccgctgccttcgcgccgctcgtcctcgcccttcgcgatttcgtccccctccccgctccgccccgccgcggccatgccgccggccgacctgccgcgcccccctcgccgtggcccgcttgctatcgtggactacgctcatgacgaaacggccatgtacgccggagcaggacgagagggtagatcaatggcatagacagatcgggtttggatgctcaggttgctgaggcaatgtctcagcagaacgatgcacctgaacagaatcaagtaggggcagctgcagcaatgagtgtaactggagcagaatggaag

SEQ ID NO: 392102 - DNA, 622 bp, Oryza sativa
  unsure (1)..(622): unsure at all n locations
ggcggcggtggacgtgagcaaggcgctgtacgcgttcaccaacgccgtgatctgccgggcggtgtccgggaggctctcccgggaggacgaagggaggagcgagctgttccgggagctcatcgaggagaacgcgacgctgctcggcgggttctgcgtcggcgactacttcccggcgctggcgtgggccgacgcgttcctctccggggtcgccgcgagggcgtgcaggaacctccggcggtgggacgagctgctcgaggaggtgatcgcggagcacgaggcgaggctacgcggcggagacgatggcggcggcgaacagcacagggaggaggacttcgtcgacgtgctgctcgcgctgcaggaggagagccaacgccatgatgggagcttcaagctcacgagggacatcatcaagtcgctcttgcaggacatggtcgcggcggggacggacacgtcgttcatcacgctggagtgggccatgtcggagctcgtcaagaacccgacggctatgcagaagctggaggacgaggtgcgcctnggagggggtgcgaccaccgccgacacgccctacctcaaggtcgtggtgaaggagacgctccngctccacccgccggtgccactgctc

SEQ ID NO: 392103 - DNA, 539 bp, Oryza sativa
atgtccctctcttttgaggagggcaccgccatttagttaattagtagttgttaattatcttcactaaccttaattaccctcacgcaaagcactctctaatcctcctcggcgctcgcataatcttgtatccctcatctcagattatcatcacctcgccgtgttagaaaaaagggagtaagttcgttttatcgtcggatttggtgagagttcgccggagtagaagaagatgacggtgacgccgcagatcacggtgagcgacgggaggctggcggtgcgggggcggacggtgctgaccggcgtgccggagaacgtgacggcggcgcacgcgtccggcgccgggctcgtcgacggcgccttcgtcggcgccgacgccggcgaggccaagagccaccacgtcttcaccttcggcacgctccgggaatgccggttcatgtgcctgttcaggttcaagctgtggtggatgacgcacaggatgggctcctccggccgcgacgtcccgctcgagacccagttcatgctcatcgaggtccccgccaccg

SEQ ID NO: 392104 - DNA, 433 bp, Oryza sativa
gcgggcggcctcgtcctcgtcgggacgacggcagacaatggccgccgccgcgatgatcctcccattactattgctattgtgttggtttctgctgctgtctgtgggcgacgcgatgtgttggttcaacgacgacgcatcagcatcggcaccagcggggtggttggtgtcgtggaccaatgggatgggttggtacaaggggatgccgcgggagttcgtggacggccacaaccagctgcgcgcgcgctacgggctgcagccgatgaggtgggataacaagctggcgaggcaggcgcggcggtggtccgacgccatgcgcggcgactgccagatccgccactccaccggcaacagcttcgccgagagcctctacatcgggaggaacggctgggacgccagggctttcgacgcccgtcgatgctggggcgacgaggag

SEQ ID NO: 392105 - DNA, 543 bp, Oryza sativa
tctttcgcctgggcggacgcgtgggcgacgcctgggcttgacggaaggaaacagaggggaagagagaggatcgtcgtcgaccatgatgcggcggcggctgggctgaaagagaaacagcatctcttgaggatcgtcgtttcgttgcatgggcaactactactcgtgcggcgcctcgtccacgtccagcccgacctcaccgtccttggtcgactactactactgctatcatcggtatccaagcagttgcagtagtacaagcacagcaacaagtagcggggggaggatgccgatccgcacccaccagcagaggctgtcgtccccgacggcggtgctggggcacgagacgccggcgctgcgggaggtgtacacggtggggcggaagctggggcaggggcagttcgggacgacgtacctgtgcacgcaggtgtcgacggcggcggagtacgcgtgcaagtcgatcgccaagaggaagctgctgagccccgacgaccgtgaggacgtgccgcgggagatacagataatgcaccacctggcggggcacgg

SEQ ID NO: 392106 - DNA, 648 bp, Oryza sativa
ctccattattccgactctcgtaagattaaggggggaggaattggagggcagaggccgccattttaatcagtggaaataaaatccacgcattttatatatttaatttaacccccaattttaacttagcagcacactagctagctagctgctaagttaactatttgatcaggttacagttgctggcctgacagttaattaatctcttgctggttgattagttgctatcagctacacgctctcgctagctgccactgtactaatacatactcccatctattcgcctgagaaaatatcgaaaagtagcagcaaagaggagcaggcaagatggtgatgaaccctgacgccgtccgcaatgtcgttggaatcatcggtaacttgatatcgttcgggttgttcttgtcgccattgccgacgttcgtgacgatcgtgaagaagaaggacgtggaggagttcgtgccggatccgtacctggcgacgttcctcaactgcgcgctgtgggtgttctacggcctacccttcatccaccccaacagcatcctcgtcgtcaccatcaatggcaccggtctcctcatcgagatcgcctacctcgccatctacttcgcctacgcccccaagcccaagcggtgcaggatgctcggcgtcctcacc

SEQ ID NO: 392107 - DNA, 472 bp, Oryza sativa
tacatcgcagccgccacaaaacccttctccccgcgcgcgcgccctccgctccttcctccgcccggctgcccgccgctcgttcgccaccgccaccgccgccgccgccgctgcgtcgatcgaagatgtatctccagtactacatcaacgagaagggggacaaggtgtacaccaccaagaaggaatctcctctcggtgttcccacgcagtctgctcacccagctcgcttctctccagatgacaagtactcacgccagagatacctgttgaagaagagattcgggttgctgccaacccaaaagccagcaccaaagtactgaaggagaaacctcggaccaccatgttccatggatcccacgaagagaatcagtcttgcctacctcgctatttacctgtatcactcaaatgatccggtgtatcgcgatgctatctacgaatcgtacttcctctcgaccatattagtatgaccatgaaa

SEQ ID NO: 392108 - DNA, 837 bp, Oryza sativa
  unsure (1)..(837): unsure at all n locations
gctagagctgtccctgccaaaggcaaataataccagaggaacacggcagcctctcgatctcgacaactcggggcggaataattctggtgttcttctcatcaccgatcgtttctgtacatgtaacaagttgaggatcgtggcgcctgcatgcatttggtggacgccacgtcaagaataaccgaggttacaggtgtctccccctgcatgcagcagggggcatctgcagcttgcggaactcggatggtttgagtttgaacgagttgcagcatgtcccccatggagtcccgtcctgatgatcttgttcctcccgcgatgcacaagccggcgatccaatgcgccgccgccgaggacgcgagcctgctgcgaagcccgacngtgtcgtcggaggagttcatgcagttcaagaggaaagccacgacgatcttggaggagtacttctccacggacgaacgtcgcggcgacggcgaacgagctgagggagctgcgcgtgccgtgctaccactactacttcgtcaagaagctggtctcggtggccatggaccgccacgacagggagaaggagatggcggccgtgctgctgtcctcgctgtacggcgacgtcatcgaccggccgcaggtgtacaaggggttcggcaagctcgccgagtcctgcgacgacctgtccgtcgacacgcccgacgccgtcgacatcctcgccgtgttcgtctgccgcgccatcatcgacgacatactcccgccggcgttcctggcccagcagctgacgtgcctgccggagggatgcaagggcgccgaggttcttcacagggcggagaaaagctacctgtccgggccgcacca

SEQ ID NO: 392109 - DNA, 582 bp, Oryza sativa
  unsure (1)..(582): unsure at all n locations
cggacnnggcncnaaccaagagctgctccgcccccctaccccgcaacccgttgctttgtgccgcgcctcgctttggtcttcatccgcctcagatctgattcgttctaggttggtctggggaagatggcgatcacggtgaggcggtcgacgatggtgcggccggcgtgggagacgccgcgggtgcgcttgtggaactcgaacctcgacctcgtggtgccgcggttccacaccccaagcgtctacttctaccgccggggccccgagggagggggcgcgccggaggggttcttcgacggggagcggatgcggcgcgcgctggcggaggcgctcgtgccgttctacccgatggccgggcggctcgcgcgcgacgaggacgggagggtcgagatcgactgcaacggggaaggggtgctcttcgtcgaggccgacgcgcccgacgcctccgtcgatgactaccgcgacttcgcgcccaccatggagctcaagcgccttatccctgccgttgattacaccgacgacatctcctccttctcgctcctcgttgcagtcgatctcgaccctcccgtcctcgtngcgngcgag

SEQ ID NO: 392110 - DNA, 801 bp, Oryza sativa
tcgtttttctccgggcttttaccagatgagggggggaatctttaaagcttgacatggttacagattgaccaaaaccatgtatccggcgcaatacctaaagcatttgccaacttaagaagtgagaagcatacttacatgaataataattgattgagcgggcaaaacccgtccgaattgtccagactgaatacactttggcactctcttgacgataacaacaatttgtctggacctcttcctccagaactagctgcggcaaaaagcttgaaaatacttcaggctgacaataataacttcagcgggagttccatccctactctgtattacaacatgtccggactatttaaactgagtcttcgaaactgcagtttgcagggtgctattcctgatctgagtgccatacctcaactggactatttggatcttagctggaaccagctgacaggatctatcccaactaataagcttgcttcaaatatcactacaattgatttgtcacataacatgcttaatgggactattccatcggacttttcagggcttccttatcttcagctattgtcacttaaaaataatcttttaggtgggtctgttccctcgggaatttgggctggcgtcaaccctaacaggaacgggagccttgtactgggcttccaaaataattctctcaatatgcttccagctgaaattagtcctccttcaccaaatgttactgtcgtgttatatggaaatcctatatgtgagaattctagtgaaactctgataatcaacctttgccgctgcagtcaataaacctggaaa

SEQ ID NO: 392111 - DNA, 549 bp, Oryza sativa
ctttataacctctctctctctttctctctctctcctcccaaaccctcaatcgtcgcatcgcctcctcctcctctcgccgctcgcagcgaaaaagccagcgcctcccagcgcccacgcgatcccgacgaatcgaatcgagtccgagacgccgatctcggattcgagaccgttgatttcaaccaacacaagccctcctccggatcgatccgctcctcttcagccatggcaggaatggcacccgaaggctcccagtttgatgctaagcactatgacagcaagatgcaggaactactgcaccaaggtgacaatgaggaattcttcacttcatatgatgaagtttttgagagttttgatgacatgggcctccaagagaaccttctcagaggcatctatgcttatggttttgagaagccatcagctattcagcaaagggggattgttcccttctgcaaagggcttgatgtgattcagcaggctcaatctggaacaggaaaaactgctaccttctgttctgggatcctgcagcacttgactttggattggtggagt

SEQ ID NO: 392112 - DNA, 420 bp, Oryza sativa
ctccagccgaagccgctcaccctcctccgcctccctcctcctctccccgtcgctcgccatggcagccttcgccaccgcgaccccctcgccggcgatctccgtgtccccctggagcatgtcgtcgctccgcgccgcgctcccctcccccacccgcgcctccccggcggggaagctccggtcgtcgttctcgcccgcggcggcggccacggcggcgtcggtcggctgcctcagctccttctccggcctcacccccatttcgcctctcctctccctcggggaagagacttcaagctgtgagcatcgattgtttggtattgatgcccgtggaaggatagtggcaatgagacatgggaggcgtgctcctaaacttagcagaccgccagatcagcgaaaggcacttctgcgcggtctgaccacgca

SEQ ID NO: 392113 - DNA, 1057 bp, Oryza sativa
  unsure (1)..(1057): unsure at all n locations
nnnnnnnnnnnnnnnnnnnnnnaaaaagacatcatgtccttgaataatatcaatttgtgtcttgtctgaacaattcactgatttcaataggagttttcaggaaacgatgacgaattacagcaaactacaacttcacacctcactaaccacgaagatatacatccaaatatccaatacacaaggaaaccgagatgagattgctcctcaagatggctcaaaatcgggctgtaacctgggagaacaacgatttgaagtcttttgttggtgtgcctgtgccttcaggctttgaagccaaatcaaatgccttgaactttgtctcttcatactgcagggcctgaacacaaacttcagcaacatcagctcttggaattgacttcgtgtctgtctggagaagttcatcgtcattgccaacaatcaactccctcactcccccgtctttgtcttgcagaccaccaggccttattattgtataagggactccactgtctgccaaatactgttctgacttgcgcttccaaaccagtatattgccattgcctaggctgttcagtggatggttaggatttgttcctcccatggatcccacaagcacgatatgcttcactccagcagctttggcagtgtcaatctgattcttttggccaatccaatccacctgctcaggatacattccatcttcatagtaaaactcaggcctcccacctttgctagggtcaaaaccaggtttcatctttggcacagcactcgtgaggattatgagcgcatcgacaccttgaacagcaggcacaagatgatctctgtcccttatgtcggcaatgtaaacatcattgcctccaccaatcttttgtttgctttcctctgttctcactaaacctctcacaacaaactggtcagacctttccttgagcttgttgtagacaatgtttcctgtgcggccgccggcgccggtgacgaggacggtggggcgggccgcgctcgagtccgccatggagatcgagacgaagacgaaggcgacgagttcacgaggaggaggatttgggaagcatcgagaaggtcg

SEQ ID NO: 392114 - DNA, 574 bp, Oryza sativa
tcgtttaaaattgttgatcaaggtggagtaccagcactctatgctggcttgatccccagcttgctacaggttctgccatcagcgtctatcagttatttcgtatatgagttaatgaagatagtcctgaaagtggaatgaatgcaaattaattcttgagcatgcacatcaagttcaagaagcccagctcacattaccttgacaaaattcaagtaaacagcgcatttagatctgtttttgtagcatttcttcacggaagcttcaaaggccgtgggagtaactttatcttggccaaagcctgaagcattgttcgctcgaagcttttcaccacaagattaccttatacacgatgaggtcttgttcgacatctgattcgatcaccgatctgttgcagattgatctgtcatagcaaaaacatatgggcttcttgcccttcagatttcaattaacaaattttcaacttttcatttttgatgtattgatgcatcgactggaaaggaaagtgggtttgctacttgctccaacctacaaagtggcatgttgattcccttttgcaagcatggcatcggttggtttc

SEQ ID NO: 392115 - DNA, 549 bp, Oryza sativa
tcatagtcgcgtcgcgtctccctcccgcgcgacggatccgagagccctaaaccctagaactccctcgccctcgcgtcggcgccatggaggacgaggagatggagaagaaggtgcagcagtacctgcagcggaaggggttccgcctcaccgagctcgcgttgcaggaggagcgcaaccgcatctccacctcctccgtctccgacgtcgcgctcgccaggtcggaaaatgatccggcaagatactatgatggttatagtaaactaagaacatgggcatacagttctctcgatcagtacaagcatgaattactccgtgtcctttacccagtgtttatccattccttcatggatctagtggcagagggacatacacaggaagctcggtcctttttccacacgttccatgaagaccatgaactgatgcattctagggatctccagaaactggaaggcattctttctccttcacatttggaggaaatggaactggccagatctttaaggaaaaatcaattcagaattaagtatgtgagtattcatatgagttact

SEQ ID NO: 392116 - DNA, 1206 bp, Oryza sativa
  unsure (1)..(1206): unsure at all n locations
tcggacgcgtgggcacgcacgttgccaccacaggctacgcaaaattctctcccttcctcctccaccacctccactccgacgatcctcctcctgatcctgtgccggccggcgatggcgtaccggttgctggagctcacgctggtctccgcgagcgacctcaagaaggtcactctcttctcgcgcatgcatgtctacgccgtcgcctccatctccgggagcaacgtccccatgcccatgcacggcacccacgccgaccgcaacggcggcagcaaccccgcgtggaacaccgtgctccacttccccgtccccgcccgcttcgacacccgcggcctcgccctccacgtccagctccgcgcccggcgctccttcggcggccaccgcgacgtcggggacgtgttcgtgcccctcgacgacctcctcgccggcgcgcacgacggcggcgagccgaggccggctagctaccaggtgcgccgccccatgtccgcccgcgcgcacggtacgctctacttctgctacaggttcaccgacgtcaagcatcccgccctcgaagccatcgaggccgcgaccgcgaccgcgacgagcagcgccaccaaacaagggcagtacgtgcccatgtacgcgcaggactctgatgagaaggcgacggagaagagcgtgtcgtcgccggtcaccgcctacccgccgccgtcgaacgccgtggtagcgcacccgccggtcgtgccgtacggcgcgccgtacggaggagggtacccaccgcatcagcagcagtacggttacgcgggtcagccgccgtacgcgtacaacgccggcccaccgccgccggcgacgtacagctacgcggcggcacaacagccggcggcgaggaaaggtggacgaatgggcatgggcctcggactcgggctcctcggcggcgcggtcggcgggatgatgctcggggaaatggtcggcgacatggaggctgacgccgcctacgacgccgggttcaacgacgcactggaattttaggtcttttgtcgtgttttcctgtgtacatgggcaatgcacctgtataaatttgtcacgtgcataagaaatttcacgatccaacaatgggaaacgcgatgtcaggccacaagggtaagcagatcctaaatcaacgctatatatatatatatatcatccagttcgtncnnnnnnnnnnnnnnnnnnnnnnnnnnnnnnnnnnnn

SEQ ID NO: 392117 - DNA, 406 bp, Oryza sativa
gcacgttgccaccacaggctacgcaaaattctcgccctgccttctccaccacctccgctcgcgacgatcctcctcctgatcctgtgccggccggcgatggcgtaccggttgctggagctcacgctggtctccgcgagcgacctcaagaaggtcactctcttctcgcgcttgcatgtctacgccgtcgcctccatctccgggagcaacgtccccatgcccatgcacggcacccaccccgaccgcaacggcggtcagctaccccgtgtggaacaccgtgctccacttccccgtccccgcccgctttgtcacccgcggcctcgtcctccacgtccagctcctcgcccggcgctccttcggcggccaccgcgacctctgggaccggttccggcccttcgacgacctcctc

SEQ ID NO: 392118 - DNA, 518 bp, Oryza sativa
tcggccagtttttcacttaactggctcccaggtcaacaagatctttgccgaaaatgcgtttgatgctgttatgcactttgctgctgttgcctatgtgggtgagagtacattggaaccccttaggtactatcacaatattacatcgaacaccttattgattttggaggctatggcgtctcatggagtcaagacccttatttactctagtacatgtgccacctatggagaaccagagaagatgcctattgtagaaaccacacgtcagttaccaattaatccctatggaaaagctaagaaaatggcggaggacatcatactagatttcacgaaggggagaaaggacatggctgtgatgattttaagatatttcaatgttatcggatcagacccagagggaagaataggtgatgctcctagacctgaactacgagagcatggaaggatatccggggcatgctttgatgctgcgttaggaaatattccagggcttgaggttaaggaacagatatcctacaact

SEQ ID NO: 392119 - DNA, 972 bp, Oryza sativa
  unsure (1)..(972): unsure at all n locations
gcggtcgttctggtactactttgacgacaccgtcgcacggcttgtgaaggccggctcgggggacaccgccctccttggggatggacgccgggcaacggacggtcatgttcgaggacgagtgtattttagtggacgaacaggacaacgtcattggccatgattccaagtataactgccatctcatggaaaagataaattctggtcatgtcctccacagagcgttcagtgtttttcttttcaactccaaatatgaattgttacttcagcaaaggtctgctacaaacgtggccgtcccacgcgtccggacaaacacttgctgtagccaccctctataccgcgagtccgagctcattgaagataaaaccctaggggtcagaaatgcagcacagcggaagctattcgatgaactgggaatacaagctgaagaactacctgttgaccaattcattcctcttgggaggatgctttacaaggctccatctgatggaaaatggggcgaacatgaactggactacctcctattcatggttcgtgatgtggagctcagcccgaatcctgaagaagtggccgacgtcaagtacgtgaatcgtgatgagctgaaggagttgctcaagaaggcagatgctggtgaaggcggcattaagctgtccccttggtttaggctggttgtttgacaacttcctcatgggatggtgggatcatgttgagcaagggactctggaggaggccatcgacatgaaaacaattcataagttgtagagtataaatcgttgggcaacgtccttagaaaataaagaattgttgctttaaccttttcacggaaataatccagaaagaaatacatgttcttatgcaggttttatgaggtagaagcaaaaacttaccggaatcatgctctgccaggagcttataagttttctattggagttggattggagtaatgttcaggcgnnnnnnnnnnnnnnnnnnnnn

SEQ ID NO: 392120 - DNA, 636 bp, Oryza sativa
gcagcacgtcttgcagagaggcgggcggctcacgccgccggcggggccacggagcagctgcgagaagctggcgtggatggcgaggagccattcgtcctcggggaccttgacggtgttgacgccggcgccggagggcttcagggcgtcggtcacggcggtgctagcctggacgcagctgtcgaggcacttgtcgggcttcttgcactcctgcacggcggcgatggcgtccttggtgaactgctccgccgagaacccgacgctggagatgcacagcttggcgaggcccttggcgtctttcgtctctgcaaactcgggcggcaggaccttcaccagttgctggcacgccttctcgtccgtcgtcttggggcacacggcctccttgttgaagatgttggggtcagggacggcgcccgcggttgatccggccgctgcagaggtctccttgtcggccgccgcagcggtctccttgccagcggttgatcctgttgccgcataggcctccttatcggcggcgccggcatcggctgccgcgacgaggacagcatggaggaggaggaggaggagtgtcgccattgcgggagaggcggccatgactgggctagctatagctttgtcgatcgatcgagatgataacga

SEQ ID NO: 392121 - DNA, 616 bp, Oryza sativa
tcgtttgaaagctgattcggagtaaacgggcagcaggtttggaagatgatgtttgggaaaacaacgcaccagctgtggataaagtaaaggatttccttgctggcgctggaactgatgctcctgatgtggatgatgaggaatacatgaattctaggccatcagtcggttgggatgatatgtgggccaagacaattcttgaaacatatgaagcagaggatgatgatggaagatcatctgggggatcctctcctgagtcaactggttctgtagaaacatccatatcgtcccattgtagtggcatgaactatccgtcgttgttcagttcaaaaccatcaggatatggggcttcacaacaaacgatacgtgaagaaccaccatcatattcaacatcagttctacagaaacgtgagtcattcgaaaacccccttgctgggcgtggtggtcggagttttggatcccatgaggacgaagacaggagttcagggaaccctcaatctgggaaagcactgtatgacttcacagcaggtggcgatgatgagttgagtttaactgctggagaagatgtggaaatcgaatatgaggtcgatggttggtactatgtaaagaagaagagacc

SEQ ID NO: 392122 - DNA, 547 bp, Oryza sativa
attatccaggagaaacactctgaggaatcttacaatttggcttgcatcctcactctccctccatatcaaagaaaaggatatgggaagttcctgattgccttctcctatgagctttctaagaaggaaggtaaagtagggacaccggagcgccctctttctgatcttggtctgctcagttatagaggttattggactagagtgcttctagagattttaaagaaacataagagcaacatatccattaaggagcttagcgatatgacggcaataaaagcggacgacatcttgagcacgcttcagagtctggacctgatccagtaccggaaaggtcagcacgtcatctgcgctgaccccaaggttctcgaccgccacctcaaggccgccggccggggtggcctcgaggtcgatgttagcaagctgatctggacaccctacaaggaacaaggctaagctaagctctcgtgccaaacgaattagataaaaagaaaatctgaccagctcaatcctgtacatttcccacttaggatctccccctctctttctctct

SEQ ID NO: 392123 - DNA, 545 bp, Oryza sativa
accactcagtgttcaccattgctgaccctccctctccaatccaagctccaacaatggctaaaccatccttgctcctccttcttcctctgctcatcttctccatcggcgcggctctcgcccgcgccgatctcatgctggacaggttcgagcagtggatgatcaggcatggccgcgcctacaccgacgccggtgagaagcagaggaggttcgaggtgtacaggaggaacgtcgagctcgttgagacgttcaactccatgagcaatggctacaagctggctgacaacaagttcgccgacctgacgaacgaggagttcagagccaagatgctggggttcagacctcatgtcacgattcctcagatttcaaatacctgctccgctgacatagcaatgcctggagagagcagtgatgatattctgccgaagagcgtagattggaggaagaaaggggcagtggtggaagtgaagaaccaaggagattgtggttcttgctgggcgttctccgcgtggcggcgatagagggatcaccagatcaagacggcgagc

SEQ ID NO: 392124 - DNA, 923 bp, Oryza sativa
gatcaccttgtcgtggccatgcttctcctgctggctttgtcgccgccggccgttgctgacgacacggcggtgctcggccagaaaggcggcgtcgtggaagggcaggcagcggggccggggaggtacgccgtgatattggacgccggcagcaccggcacacgggtgcacgtcttcaggttcgacaacaagctggacctcctcaaggtcggcgacgacatcgagctcttcgcctaaggtggatccctgggctggagctccctacgctggacgtcctccggattgcccgcaaactcccttattgccctctgcttgaacaaggcccaacacccttgttcctaccagacttattgaacaaaactccccttaaacttggggcaactgccggcactcagacttattggagatgaaaaggcgaaccaaattcttgaagcgctatttgcactatggcggttttgcttctcgcgtgcagatcctggagagaaaggatggaccatttagcaactgccatgctgcgcggattcagtggtaactacacctacaacgacaaacagtacgatgcaacgaccgcaccacaaggtgcagactaccacaagtgccagagaagaagtagtgaagttactgaaggtgaatgcgccctgcgaaaccaagaactgcagcttcaacggcgtctggaacggtggtggcggagcagggcaggatgacctctacgttgcgtccgccttctactacatagcttcccatgtacgtcgtgattacttaattaattagccagctaaattatttaacttctcaggcatgcttcagactggctactagctgactagttatgtaaatatatacccctaaatatgtgcatttaattatttgtataattatgttacatatataaattaatatttttacttgataaaaaaaaaaaaaaa

SEQ ID NO: 392125 - DNA, 473 bp, Oryza sativa
tgctctaggtcgtctctctactacgtgaacgtgacggggctcagcgtggggcacgcgtgggtgaaggtccccgcgggatcgttcgcgttcgacgccgccaccggcgccggcacggtggtggactccggcacggtgatcacgcggtggacggcgccggtgtacgcggcgctgcgggaggagttccggcggcaggtggcggcgccgagcgggttacacgtcgctgggcgcgttcgacacgtgcttcaacaccgacgaggtggccgccggcggtgcccccgcggtgttcggtgcacatggacggctgcgtggacctggcgctgccgatggagaacacgcttatgcacaggagtgccacgccgctggcctgcctcgccatggccgatgcgccgcataacgtcaactgccgtgtcaacgtcattgccaacctgcagcagcagaacatccgggtcgtttttgacgttgtcaactcccgt

SEQ ID NO: 392126 - DNA, 495 bp, Oryza sativa
ctttatgatactaattactactaaccgtgaaaagaagccgtcggttaatattcgatcgatcgatcatgtggtgtacgtgggcgttggggcgggtggtgttggcggtggtgttcctggttgcgttggctgccggcgatgcaccgccgcccaaggttcaccggaaccacggcaaggtcacggcggggccatggaagcaggcgcacgcgacgttctacggcgggcgcgacgggtcccgcacgctggacggcgcgtgcgggtacaaggacacctccaaggaaggctacggcgtgcagaccgtggcggtgagcacgccgctgttcggcgccggcgccggctgcggcgcctgctacgaggtcaagtgcgtggacagcccctacggttgcaaggtcggcgccgcccccttggtcgtcaccgtcaccaacctctgcccccccaatcccggccagtccaacgacaacggcggctggtgcaacccgccgcgcgagcactttgacc

SEQ ID NO: 392127 - DNA, 645 bp, Oryza sativa
  unsure (1)..(645): unsure at all n locations
cggacggnannctataaagataaagaacgcgtattagtacttgctgccaccaatagaccatttgatcttgatgaagctgttgttaggaggctccccaggaggttgatggtgaatttgccagatgcatccaatagaaaaaagattcttagcgtaatactggccaaagaagatttggctgatgatgtagatctggaagctctggctaacttgaccgatggttattcaggcagtgatatgaagaatctgtgtgtaactgctgcacattgccccataagggagatccttgaaagagagaagaaggagagagcatcagcagaagcagaaaataaaccattacctccccctcgttctagcagtgatgttcgttccctaagaatgaacgatttcaaacatgcacatgagcaggtatgtgcaagtataacatctgattcgagaaatatgactgagcttattcagtggaacgatctatatggagaaggcgggtccaggaagaagacttctctaagctacttcatgtagcctatcgctagcctatgtacatacaacataagcattagcgtaaagcggtccgggagatagacaagacatagctcttctgctgttgctcatgtataggtgatacccagtcaaattagtcgttgatct

SEQ ID NO: 392128 - DNA, 587 bp, Oryza sativa
cggttgcgtggccagctagcttttgcagagcgagcgaaccttcaacacaaaccggccagcttgttcctctcctctctctctctctctctctctctctcggtcgcagccagctaacttcgagtgtgaagaacactcacgctagctagctttctcaaggccacatacgctagctccgcctccacgcgcggcgtacgtctagtttgattgaggctgaagagagtgcgtgtttggtagaagaggctagctgttgacgatgtcgagcagaaggtcgtcgcgtggctccatctcggaggaggaaatcaacgagctcatctccaagctccagtcgctgctccccaactcacgccgacgcggctccagccaggcgtcgacgacgaagctgctgaaggagacgtgcaactacatcaagagccttcaccgggaggtggatgacctcagcgaccggctgtccgacctcatggccaccatggatcacaacagccccggcgcggagatcatccgcagcatcctccgctcctgatcggcaagcaacaccagcaagccggaccggtccggccgtcgggctatgtctactacgagataggccg

SEQ ID NO: 392129 - DNA, 566 bp, Oryza sativa
gccgggccgcgggccgggaccggaacggacaggccgacccacgcacgcttacttttggacctgcgagagatggaggtggggggggctaacgacggcatcctccccctactcctccgtcaccacgcgtccctgcggggctgcctctccctctcctgcggcggcagcccgccggagctgggcggcggcggcggccaccgcggcaggaggaggaggagaggagggtcgcggctacgagagggtgcccatggacacccccggcgcctaccgcctcgtcgaccgggccaccggccgcagcgtcatcgtgtggggcggcaccgacgacgtcagcatgccctcccccgcggtgctctccacgaccacgcgcgtccccgaccgcccaaaagaaaatgggagaagtacaagtattggaaattttggcagactcaaggcacagaaagttaaagttttagcaaggagatcagctcaccttaaggagagaggattctgggcgcataagcaccagccggttcagtgaaatctccgttctgattgagtctgacgaagatggcactcattttgaagagata

SEQ ID NO: 392130 - DNA, 566 bp, Oryza sativa
ataaagagtaaaattaaaaagaagtggttggtgacagcaactcgcctccttcctcctcactcctctcctacttcttgcctgcctcgcacctcactcttcttcctccccggccgaggcaacagtaacaccgctgcagcagcgaggaattgtgtcggcgagaatggattccaggatctccctcgtctgcttcctcgtcctcgcttcctccttgctgcattgcgccagatctgatggaagtgattcacagcttctcaagggcatcaacagctacagagcttccctcaaagtccctgcgctatccgagaacaagaatgctgcctgcttggctgagcagctagcacagcaattcaaagaccaaccttgcaccaacaccaccggagcaaacactgtccctggcaccgagcagcagttccccgactacccaaagtacctcgaccattgccatctcaacgcgtcggtgaccggagacggtcaggtgatgccggcctgcgttcctggacttgtacctgatgtggttctgaccatctaccccaagtcacagttcaacctgtatttgaatgacacca

SEQ ID NO: 392131 - DNA, 420 bp, Oryza sativa
tggccgccccctcctccgagagtccgaggtcgatcgccgtcgtcgctcgggcgctcgctcgcctgcctgatccggatccggcaggccggactgcgtaggtgtgccgcggcgagacgtgcgcgcggcggcgccgatcgacgacccgatcgatggacttcacctcgtcctacttccacgccttcggcaaccccgacttcgccgcggtcttctccggcggcggcagcgcgcaggccatccggccgggcaccaccaccagcagcagcggcggcgcgaaggcggtgaacgttggcaggggcggcgcggcgaggcagggcgccccgtccgtgttctgcgtccaggacgcggaagtggaggaggcgcaccacttcctcgacgagtgcaccctgtgtcgcaagggcctcgccggcgacatcttcatgt

SEQ ID NO: 392132 - DNA, 344 bp, Oryza sativa
  unsure (1)..(344): unsure at all n locations
tnatcatgttgtggctgcccgccgccgtctcgctcctcctctcgtcgtcgctgcatgtcgccggtgacgccggggcggcgtcgcctccctctccgtccggcgctacgacgccatcttcagcttcggcgactccttggccgacaccggcaacaaccccgtcgtcttcgactggtactccatcttcgaccccgtcacccgccctccctacggctccaccttcttcggccgccccaccggccgcaactgcgacggccggcctcgtcctgacttcgtcgccgaacgcctgggcctgccgttggtgccgccggtcttggcttacaacgggagtttccggcaggcggcaa

SEQ ID NO: 392133 - DNA, 527 bp, Oryza sativa
accgctctcacttctctcgcagagatggcgcacgccttcgccggcggcacctccgccatctgccgctgcccccacgaccccggccgagccgccctcgtatcccgccctcgccaccgcctccgtgtcctcgcgtcgtccctacccacgccggccatcgagggccagggcgtcgagttgtcggtgacgactcggcgggggcgggtgctgccggtgctcaaggactgctccctccgcgtccctccgggtcagctctggatgctcctcggccccaacggctgcggcaagtccacccttctcaaggttttggcaggatttttaaatccttcttctggtacagtgtatattaacaggccatgcagctatgtcttccaaaatcccgatcaccaggttgtgatgccgacagtggaatcagatgttgcatttggtcttggtaagctcaacctttcgttagatgaggttaggtcaagagtatcacaatcactggatgctgtgggaatgttaagctactctcaaaggccaatccaaac

SEQ ID NO: 392134 - DNA, 439 bp, Oryza sativa
gttggtggttctcgccttgttgtcgctgttcccgtgctgctcctgtctctcgcagggagcggtggaggaggaggacgacggcgtggtgcgcttgatggggctcgccggagaggccgctggctcgcctggcagtggcggcgggttcagtgcaaatggtaaatttagctatggttatgcgagctctcctggaaaaagatcctccatggaggacttctatgacaccagaattgatggtgtcgatggagagaccgttggactgtttggtgtctttgatggtcatggtggagctcgagcagcagaattcgtcaagcaagaacctcttcaccaatttaatcaagcacccaaagttattcagtgatacccagtctgcaattgctgaaacttacactagcacggactttgaacttctgaaagctgaaaccagccacaatcgagatgc

SEQ ID NO: 392135 - DNA, 758 bp, Oryza sativa
tttgccagaggtaatgaaatgtatcctgttgccaagccaagcaagtgttttgatatattccttaacctatttgatttcttaagtaatgatgccagaaaatgggtctggggtagttttagtcacctggaaaaggagtacaagaaagagcttcagggtggttctttggacaagtttcatctcatcaacaaatacatccccaccttttcatcactggttcagcttaaatcccaaatggacatggtacagtttattgttggccctggtggtagtatcttgtccattgttgaggaagaggcatctagtatgattgcttatgcactattgatatctgagcaacaaggaatatattcggaagctgcaattgtaaaggatgaagttattgctggtagaaaaattgataaagtaacaccaatcaactcgatcggagatactcctgtgccatctgcaattttatctccaaatgattctttagaacaagatcataacctatcaagaaatgtgtcatcgttatcatccgaggaatcaacatctggattttatgattcttttctatctgccttaaaagatctgcatcctgaattttggttgaataatgaaaagctaactttgaagggcaaatacactgttctgtgtatatatgcaaaacaattctacgatcttcggaagattttgtgtacatcagagattgcctatattttatctataagccgttgtaaagaatggaatgcacaagggtgaaagagcaaggcttttttttt

SEQ ID NO: 392136 - DNA, 391 bp, Oryza sativa
ctgcaagtgcaactgcaatgggtgaaaattcctggcaggcactaagtgtctcatggccattgggagatcttggctactgagatatcattgacatttccgaatgccaaaacatatattgtgcgaaatggatcatgtcaaccattggggctgtaaatactgtgcaaaaaatgaatcatgtcaagcacgttttgatgtggaggttgtgaccagcaaagggttcatcaggttagtcaatgtctgtaggaaaggaaaatgatgttaaaatgttgttgccgaaatgtattgggagcatgatcagtaaagcttgggatgacataatcaaatagtacaaacgataggaccatgtttgcctgtgcttttgcaacaaatcaatcacaaatactgtttctca

SEQ ID NO: 392137 - DNA, 1894 bp, Oryza sativa
  unsure (1)..(1894): unsure at all n locations
gccttgtttggcagggacagaacgaattagctgcgtactgcagcaactaataaacgatggatcgtcccaacctcgccgtggccgtggtggggctactggcggtggtggcggcgacgctgccggcgccgtcatggcagttcttcgacctattcctccccgccggccccagccaccgctcctccggcggagggtttggcaagtgggtgctgatgaaccacgaggagtacgtcgagaagaagtcgctgtacgccatgaaggccgccggcgacatcggcgggaagaccatcgacgcgagcctctcggcggcggaggaggccaaggtgacgtgggtggttgaccccaaggggacgccgggcgacaccaccttcaccaccatcgcggcggcgctcgagaaggtccccgaggggaacaccaagcgcgtcatcctcgacctcaagcccggcgccgagttccgggagaagctcctcctcaacatcactaagccctacatcaccttcaagtccgaccctgccaacccggcggtgatcgcctggaacgacatggctgccaccaggggcaaggacggcaagcccgtcggcaccgtcgggagcaccaccgtcgccgtcgagtccgactacttcatggcctacggcgtcgtcttcaagaacgacgcgccgctggccaagccgggtgcccgagggtggccaggcggtggcgctccgcctgttcggcaccaaggcagccatctacaactgcaccatcgacggcgggcaggacaccctatacgatcacatgggactccactacatcaaggatagcctcatcatgggcagcgtcgacttcatctttggattcgggagatcactctacgagggctgcaccatcgtntccntcaccaaggaggtgtccgtgctgacggcgcanagaggaccaagaccatcgagggcgccatagaaagtggcttctccttcaagaactgcagcatcaaaggacaagggcagatctacctcggccgggcatggggggattcgtcgcgggtggtgtactcctacacgggacatgtccaagggaggttggctgccgataggggtcggggatgggctcggaacatcgccaaagccggagggcgccggcatctactacggcgagttcaagtgcaccggccccggctccgacgccaagaagagggtgggttgggcgcttgacctcaccgcggatcaagccaagccttcatcggcacgcactacatctatggcgactcatggatcctcccgccaccagacgggaaatcagcggcatctacctcgacggcgagtaaatcaaccgcatcggcgatacccaggaactcaactgcaccggcgacggcaacggtaagtaactcaactgcaccagcgacacccagcaactcaactgcaccggtgacggcaagtaattcaactgcaccgccgacggcgagtagttcaaacccacctgccacgaagagtcactcgggtccaccggcgacgccaagtgcttcaagcacaccggcaaaggcgagtagataagtgcagcggcggcgcggtgagtcacaacttcatctacggcgattgaaggatcctcccgccaccaaagtgattcaaatatttcggagtaactattaccaatttaattgggcccaatcaattctgttttggaggcccgtttgttctttgtgttgtgttaattgggccggattggtcggccggccacatagatgtgtaacatttgtatttttttcccaattcatttttggtcttctatcagtgtacgcaccttcaaaatggtgaatttttacagaagtttttgaagaaganttgtgctcnnnnnnnnnnnnnnnnnnnnnnnnnnnnnnnnnnnnnnnnnnnnnnnnnnnnnnnnnnnnnnnnnnnnnnnnnnn

SEQ ID NO: 392138 - DNA, 518 bp, Oryza sativa
  unsure (1)..(518): unsure at all n locations
gggacgtccngagnaccgcgtggggctgcagttgcagctgcagcagcagcaactagtaactaataaagtgatgacgatggatcgtcccaacgtcgccgtggccgcggtggggctgctagtggcggcggtggcggcgacgctgccggcgccgtcgtgggggcagcagcagccagccaacaagctcatcaccagcacctccggctccggcaaagggttgtccaagtggctggcgatgaaccaggaggagtacgtggagaagaaggcgctgcacaccatggccaccgcggaggagctcggcgggaagaagctggacgcgaacctgacggcggcggaggaggccaaggtgacgtgggtgatcgaccccaaggggacgccgggcgacaccaccttcaccaccatcacggcggcgctggagaaggtccccgaggggaacaagaagcgcgtcatcctcgacctcaagcccggcgccgagttccgggagaagatcttcctcaacctcagcaagcccttcatcacct

SEQ ID NO: 392139 - DNA, 529 bp, Oryza sativa
tatagctgctgatcttggatgccacctagttcaaggatggcgccgccgccgctcgccggcgtggtggtggtcgccgccgcgctcctgctcctcctgccggaggccgccgagccccgcactctcctctcgctcgacgacttcggcgccgtcggcgacggcgtcgccaacgacacgcaggccttggtggacgcctggagcgccgcctgcgccaccggcgaccacaccttcctccacgtcccacgccgccaagtcctaccctcgtctggccggtcaccctcgccggaccttgcagggaggagatcaagctcttcatctccggcaacatcgtcgcgccggagagccccgacgagtggccggagggcggcggcggcggcggcgaatggctccacttcgtcggcgtcagcgacctgacgctgagcggcggtggcgtcatcgacggccgtggccaccggtggtgggcccggtcgtgcaaggcatagcacaacgcgaccgagaattgcactacccaggctgctccaaaggcgctgca

SEQ ID NO: 392140 - DNA, 518 bp, Oryza sativa
gtggccctagccctcgccctcgcctcccgctcccgcctccccgccgcgccgccctcgtcaccgccgcgcaggaccctcggtggcggcgggccatggcgtcgctggccgtctcggcgtccgcgtcggcgtcgggggaggaggtgacgcacctcgcgcagcgccaggcggcggagatcgacgagcagctcatgggcccgctcggcttcagcgctcgacctgctcatggagcttgcggggcttagcgttgcggcggcggttgcggaggtttacaagttgggtgaacatacaagggtgctagtaatctgtggtccaggaaataatggtggcgatggtctggtagctgctcgtcatcttcatcactttgggtacaagccttctgtatgttatccaaaacgcacgcccaagcctctgtattctggcctttgtactcagcttgaatcactaacaatccctttcgttcctgttgaagacctacctgcaatttatcggaggagtttgacatcattattgatgcaatg

SEQ ID NO: 392141 - DNA, 784 bp, Oryza sativa
ggttctttatcgagcttatcaacaaaagcatgatccagcgaatagaagacacatactaccttggcactattagtggttgtcacatccatgacatggtgctggacctcatccgcatgtcggcaaaagaagagaactttgtaaaaatattggatagagcacatgaggagcacaactcatcttcgcattgcagatcagtccgtaggctagcactgcataagagttggaaccagcataaaaacaataatccggcgatgggcatggagcagcagctgaggtcattcaatgccattgagtgccctattagcatgattcccctgcctgcgagattccaggttctacgtgtgttagcgctggaaggttgtgatgtcacaggaggctgtaaactgaagcatcttgggaagctgcttcagttgaggtaccttgggctgagaaatacacgtgttggtgagctcccaaagcaaaacactgcgggatctcgttcacctgcaggtactggacgttagggacactgacttggtggcactgccagcgacagttagcgaactaagccaattgatggccctgcgctccaacggcagcacaagaatgctggccagtgttgggaagctgacgttcctgcagcaactgcagctgagcctatctgccgagagcttgcgaagtttcgctctggagctgtgcaaactgaccgacctaaggatgctcgagctcgacattgatgtgtttgggatcgagatggttgagcgcacggcctccctcggcgctctggtggagtctatccacaccc

SEQ ID NO: 392142 - DNA, 621 bp, Oryza sativa
  unsure (1)..(621): unsure at all n locations
ngagcgtgnanctgntgcngngnancggtgcngtgtacngntngnggcgccagtccccatcctccctgccatcctccctgccgtgagtgccttcttgcgtcgagtttgagcaaagttgaatacagtatctgctgtgttttttaggacaagttgatactgtggaggagatgaagaggttacttgttcgtgggctgttttcttctccatccaggggtttgttgggcaaatctcctgtcaggcctgcactttgcaacgatgctcttctctccaggttcctctcaacggggaaagatgagaacacagtgaccgaaatcggagagaaggcaagatcaacagcggaacaattcctcaaggtggccaaggagaagactgacgaggtaagcgagaaaacaaaggaaacgatgcacgaaacaaaggaagcagtggtcggggagtcagatgacgagaaggagaagttcaagcagagggttgaggaggggaggtaccatcagaattaagtggctagtgctcaattatactccatcttgtagcttcagacttcagtgatggcctctgtcaaaagtcctagaacctgcagattgtccagtactactaggcttggcatgtactaggtagtatatg

SEQ ID NO: 392143 - DNA, 650 bp, Oryza sativa
  unsure (1)..(650): unsure at all n locations
tgtttcacacatttatgtgcatatgtatagggggatttttttatgtatctattcaggctatcccagcacttaatgtggtgtcagaaacttatgctacaaatcatggtctgaatcaagtaaatgcaaatcattttggagctctgaagcatcaaggagatcagactcaatctcttttggcgcctgatgtagattctcaatcagatcaattcataagttcttcggtgaaatctccaatggatggtaacacatctattcctaatgaggtgcctgctaggcagaacagtcttggactgtggaagtactcggatgatgacagtcctggtttaggagatcatccaagttcaggcccacagagcttctgtccagtgaccaatgaaagactattagaaatcaatgagatctccccagaatgggcttactctacagagactaccaaggtcgcggcgattgggaatttctatgagcaatacaagcatttggctgggtctgctatgtttggtgtctttggtgaccaatgtgttgccggagatattgttcaaactggtgtttaccgtttcatggttggaccacatacacctggaaaagtggatttttatttgactttggatgggaaaacgccaatcagtgagattngcagnntcacgtatcat

SEQ ID NO: 392144 - DNA, 524 bp, Oryza sativa
  unsure (1)..(524): unsure at all n locations
tgcacgaccaacgcagcttgctccggccagccagccaccgtcgtcatcaccgacgagtgccccgggggcatctgcctcgccggcgccgcgcacttcgacatgagcggcacttccatgggcgccatggccaagcccggcatggccgacaagctccgcgccgccggtatcctccaggtccagtacagaagggtgccatgcaagtacagcggcgtgaacatcgcgttcagggttgaccagggggcaaacccgttctacttcgaggtgctcatcgagttcgaggacggcgacggcgacctcaacgccgtcgacctgatggaggccggctgcggctggacgccgatggtgcagaactggggcgcgctctggcggtacaactccaacaccggcaaggccctgaaggcgccattctcgctccgcctcacctncgactccggcaaggtgctcgtcgcaaacaacgtcatccccgcgagctggaaagccggcgtgacgtaccgctccctgtgaactatctctaaataattaca

SEQ ID NO: 392145 - DNA, 956 bp, Oryza sativa
gtggactacttagagctgacctttccaagggaatgacggacgaaaacgcaaggtgcaaaggacttcatttgatttgtttgcgaaaagcagaaatgcattatatatcttgcttcatctcatggtaggactttccgttatctaaagaaaaatcttccgtctaacgataattctgctttacatgcactagattcccaaaacttttggtcgatggaccgtatggtgcaccggcacaagattaccgtgaatacgatgtgctacttctcatcgggctgggcatcggagccacccctttgattagcattgtgaaggacgtgcttaaccacattcaaggtgagggatcagttggaaccacggagccggagagcagcagcaaggcgaagaagaaacctttcatgacgaagagagcctacttctactgggtgacgagagaggagggctcgtttgagtggttcagaggcgtcatgaacgaggtgtctgagaaggacaaggatggagtcattgagctccataaccactgctcaagcgtgtaccaggaaggcgatgctcgttctgctctcattgtcatgctccaagaacttcagcatgcgaagaagggcgtcgatatcttgtcgggaactagtgtgaagacccatttcgcacgacctaattggcgaagcgtcttcaagaaggttgcggtcaaccatgagaaccagcgcgtcggtgtgttctactgtggtgagcctgtgctggttccccaactaaggcagttgtcagcagatttcacccacaagacaaacacaagatttgatttccacaaggagaacttctaatggtacaaattgagaaatacccgtgtatggttttgtatgtagttctttatcatgtgaattatatggtttctaatataatataaagttggacaaaaataaatgaaatgatggaagctattccccctttttaatatagtcaaccaaaaa

SEQ ID NO: 392146 - DNA, 627 bp, Oryza sativa
  unsure (1)..(627): unsure at all n locations
tgtggccattactcagctcacctactccagatctcgccatggcggcggcgtcgtctcggcggcagcggatggccgcggcgtgcttcgtcctcgccgcgcttgcgatgtgggcggcgcccgcggcgtgcggcgcgcgcgcggttcctcgtggggcgggggcgggggtggcggcgcagcaggcgaacgcgtcgtcgtcgtcgtcggcggcggcggacgagttcctggcgccgcacaaccaggcgcgggcggcggtcggggtggcgccgctgcggggaagcggcgacctggcggcggcggcggcgaggacgacgtcgcagcagcagggcgggcaggggcggcggtgcgggttcgcggacatgagcgggagcccctacggcgcgaaccaggggtgggcgagctacccggcgcgccccgggaggtggtggcgtcgtgggtggcgcaggggaggtactacgcccacgccaacaacagctgcgcgccgggcagcagtgcggcacctacacccaggtggtgtggcgccgcacgggaanggtcggctgcgccaggccacctgcaccaccggcgccacgctcaccatcttgctctacaacccgcacggcaacntaagggccagagccctacttaccg

SEQ ID NO: 392147 - DNA, 462 bp, Oryza sativa
catcacccagcactccagcagcattcagcttcccttcctctccccctctctttgttctcctctagctcatccccatacccaaacctccatcagatcacaacttcgctagctaactagagagcaaaggccgggcagtgcaggggggaaaaaggaagagagccaaatgggcaacatgctgccgtgcttggtccaaggcaggacgaccctcccggccgccatgaaccccaagcagaggctctactccctcaagctcctcggtcaaggccctccacaagctgaagaagaagatgatgatgaagcctaacaagggcaagaagatcggtagcagcaaaccgtcatcgccggcggcgcccgcggaagcagcttcagccacagcggcggcgggggcaggaggaggcgtagaggcggcgatcggcagcagtaagcccaaggtgagcccgcgaagagcggctcagggtgggc

SEQ ID NO: 392148 - DNA, 1641 bp, Oryza sativa
tttttatcatggccatcgcgctggccaacggggggggcttttcaaggactgggaggtcttccacggcatcattgtcctgctgcttatcaactccaccatcttccttcattgtagagaacaacgcccatcactcgccgctgctgttctcatggccaaccttgcacccaagaccaatgtgcttcgggatggccgattgggcgagcacgaggcaacaactctcggttcccggtgacattatcaccatcatgctcggtgacatacgtccctgctgatgctcgtctccttgagggtgacccccttaagattgaccactctgcacttactggggagtcccttccagtgaccaagaaccctggtgatgaggtcttctctggctcgacctgcaagcagggtgagattgaggccgtggtcattgccactggagtgcacaccttcttcggcaaggcggcgcatcttgctcacagcaccaaccaagttggtcacttccagacggtgctcactgcgatcgggaacttctgtatctgctcgattgcggttggtatcgtgatcgagatcatcgttatgttcccgatccagcaccgtgcctaccgcagtggcattgagaacctgttggtcctcttgatcggtggtatcccaattgccatgcctaccgtgctctcggtcaccatggccattggttcccacaagttgtcccagcagggtgctatcaccaagaggatgactgccatcgaggagatggctggcatggatgttctgtgcagtgacaagaccggaaccctcacccttaacaagttgagcgtcgacaagaacctcgttgaagtgttcactaaaggtgttgacaaggaccatgttttgttgctggctgcaagggcatctaggacagaaaaccaagatgccatcgatgctgccatggttggtatgcttgctgatcccaaggaggcaagagccggtatcagggaagtgcacttcttgcccttcaacccagttgacaagaggactgctctaacatacatcgatgccgatggtaactggcaccgtgccagcaagggtgctcctgagcagatcctgaccctgtgcaactgcaaggaggatgtaaagaggaaggtgcatgctgtgattgacaagtatgctgagcgtgggcttcgttctcttgctgttgcaagacaggaagtacctgagaagtcgaaggagtctgctggtggaccatggcaattcgttggtctgctgcccctgtttgatcccccgaggcacgacagtgctgaaactatccggaaggctctccatcttggtgttaatgttaagatgatcactggtgaccagcttgctattggtaaggagactggtaggaggcttggaatgggtacaaacatgtatccttcatccgcattgctcggacaaaacaaggacgcttcacttgaggcacttcccgtggatgagctcattgagaaggctgatggttttgccggagtcttccctgagcacatatatgagatcgtgaagaggttgcaagagaagaagcacatcgtcggtatgaccggagatggtgtcaatgatgcccctgctcttaagaaggccgacattggtattgctgttgctgatgctacagatgctgcatgagtgcttccgacattgtgctcactg

SEQ ID NO: 392149 - DNA, 622 bp, Oryza sativa
tgttttgtgtgccttcctctctgtaactctgtggatctgtcggagttaaaagacttaatgagtttatgtggtaggattgggtattaattttgatggtgctagctggcgttcttgatgattgcaggaagatgaagcggaccatcatcgtcaaagtggacttggaatgcgagcgctgctatgccaagatcgacagggtgctcaccaggatcagagacaagggtgagttcgtcatcgacgacatcgagttcgacgtgaagcacaacaaggtgatcgtgtcggggcccttcgacccggacaagctcgcagacaagctctgctgcaaggcgtgcaagatcatcaaggagatcgagatcgtcgacctcccgccgccgcctccgccgccggcgccggagccggagccggagccacccaagaaagaagagccccagccaccgcctcctaaggaggaggagaagcccgagccgccgccggcggtgattttcgtggagccaccggcgccggcgcccgagccggagcccgagccgccgaagaaagagccgccgtcgtcgtcgtctcccaagaggagccatgcccgccgccgccaaggtccgtgaggtccttaccctggccctaccctacccgt

SEQ ID NO: 392150 - DNA, 525 bp, Oryza sativa
tattggcaggccaataagtggagtcccagcaggagtacctgccaagcaggaccctaggatggccatggataggcagcccaaacaagataactcgagatcacagcatgacaagagacagcaggctactaaggtagtataccgtgtcaaaggtcaaggtcccaatggcctgagtgagtgaaaagtatccatgaaatcatcctcaaatcgcagtataaccaggaatcgcctttaagttcgtttgtacgatgttccatgtgagtgggcatgctgctactgggagaagcgacactggaagtctgcaagctcctagtgaaagcagccataggatttactttattttaccaccccatccatttacattccatcattgagttgttgtataacgtccaaaggagttggttttggttaagttatgatttaggacagggattcagacagaaactatcgtagttaggacaaaccttgagcaacaggcaaagcaccgccattgtaaatctgatagctagagcaactcttatgaacgct

SEQ ID NO: 392151 - DNA, 583 bp, Oryza sativa
tcacaaaatcaagcagctttattgtgcatttctctagctagctgtcgatgatggctaacgctgaagggggcaaaatggtatgtgtgacaggagcaggaggcttcattgggtcgtgggtggtgaaggagctcctgatccgtggctatgccgtgagaggaactgcaagagatccatctagtcaaaagaactcccatttgcaaaaacttgaaggagccaaagagaggctcagtctgaactatgcagatgtgatggactttgatagtctttctgttgcatttaatggatgtgaaggtgtattccatgttgcctcacctgtatccgttgatccgcgacttgtgcccgttgctgttgaaggaactaagaacgtgatcaacgctgcagcagacatgggcgtacgacgcgtggtgttcacatcaaccttcggtgctgtacacatggacccaaataggagccatgatacaagtcgtggatgagagctgctggagtaaccttgagttctgcaaacaaaaagactggtactgttatgccaaaacggttgctgagatggtagcagcagagcaggcatcgaaaagagggattcagc

SEQ ID NO: 392152 - DNA, 527 bp, Oryza sativa
  unsure (1)..(527): unsure at all n locations
ttatggttgcagttgctaagctcatgaatgcaacactagtaatccctactctggatcacaaatcattttggactgatccaagtgatttcaaagatatatttgatgtggaacacttcaagaaaactttagagggtgacatttcgattgtggattccttgccactagcttataaaggattgaaactttatatgagagcacccacttcttgggccaaggcttcttactacagagctttctcaaggacactgaagaaggccaaagttgtgaaattcacacatacagattcacgaattgttaacaatggtcttcccccatccatccaacgactccgttgtcgggcaaattatgaggcactaagattccacaaagaaattgaaggagctgagtactgctctagtagatagactgaggaatggatccaatcattatatcgcacttcacttaaggtatgagagggacatgctctcattactngttgcagcacaacctacacataagnggcagatgagctgngagaatgggctcac

SEQ ID NO: 392153 - DNA, 598 bp, Oryza sativa
tgtcgcgtagctcctattctcctcattgctggcttggcctttggctataccttcccttcatcaccccctagtataaagcaattcaattcccaatccccccggcccgaagtgaaggaagcggatcatggagctcgccatggattttgcgctccgcctccgcgacgccgccaaccaccacctctcccgctacgagcctctcgtgctcctcgccgcgcccctcctcgccctcctcgctgcccgcaccctccacgccgccgctgccgccgtcgccgaccgcggtctccgcaccgtcctcctcgctctagccatgacagccatcaagttgcttccgggagttagcgcctacatcaacgctgagaagaggaaggttgttgacccgctgcactcaggtggcacgttcacaaaaagtactctgtggaccgagttgccaattgttgggctttccaaccaagtgattaacgatcctcgaaacacttgaagcttgagatgtaaactggtagggaaaatgctcttggacagctcatattgttgggagtgaatccgacagttattttgcattgataaacaaggcttactctatgtttttacacaccaacct

SEQ ID NO: 392154 - DNA, 678 bp, Oryza sativa
aacctcctctcctcactcccctcctcctcctcgtccgcgacccaccacccaaagatctcgccctcctctcgaaaatctcccactctcctggccctccggggattcgcgcgcgcgctgcttcgctcgatttggtttctggctggattggatccggggaggaggagttgctgttcgtcctcctccaccaagaatcacccacccgcgagatccaatccaatcctctcgcttgcattttctgctgctgcgtgcgcgtgctgagatttcattcggatttgttgggggttcgctgagatcggagatgacgtcgccggcgacgacgtacgcctcgccgttcgtgctgtcggtgctcctcctcgtctccatcccggtcatcttcctcctcgcgccgcgcctcctcccgcccaagacgcttccggccatcccggacgccgacgagtccgacgacctcgcgctcttccgccgcgccatactctcctgctcctccccctcctccgccacgcccacgccctcctccgccgcgtcctacttcttccgccgccgccccgcccccaaggtcgccttcctcttcctcaccaactccgacctcgtcttctccccgctctgggagaagttcttccgcggccaccaccacctctttaacctctacgttcacgccgaccctttcttcgccctcacgat

SEQ ID NO: 392155 - DNA, 515 bp, Oryza sativa
aatccaaccaaagcaaagcaaaggagagagatcccggagaagaagtttgcgtgcaaggcgatcgatccatgagcctgaggcacatgagccgagtgggcgcgcgcgcggcgcaggccgtgcggggagggcgcggggaggtcggtgaaggacaaggcgcagtcggcgacgacgtcgacgtcgtggccggcggcgaggagcagcggcggcggcagcagggcacccgccgcggggtcggtggagaagggcagggtgagcgcggcggcggcggcgagggcggcggaggagaagcggaggcgggcggagcagtcgctgcgcaccgtcatgttcctctccgtctggggtcccaacacctgatgaagactagtactagtagatgtgtaggctagcgatagcttatctgcatacggtggtgtgaaggttttgttctgcgtctgtgaaaatctcagatgtgaatgaagatgtaattaagtatgtgaatcatcgtctatggatgccgaaaatactgtttattcttg

SEQ ID NO: 392156 - DNA, 395 bp, Oryza sativa
ctctttgaaaagaatttcaaagcttagccgaagatgccaatggagaggtcggtgtcgtgcgccgagaggccaccggcggcgttcggcggcggcgcagccgcggacctgcggtgctacagcgcgtcgtacgccacgtcgtacaagccgggcgctggcgcggcggcggcggcgggggcggggacgaacacgacgacgaaggtgatgaagcgcgccacgagcgccaacgcgtggtcgcggccgggcggcggcggcggcgtgcagcggagcgggagcaccaagacggtggtgtcctccgccgccgggtggagccccggcggcgggccgacgcccgggttcaacctgcggagctacagcgcgtcgtacgccgcgtcgtactcgccgttcgaggacccgag

SEQ ID NO: 392157 - DNA, 694 bp, Oryza sativa
acccaccccaccggttcaaacaggctcaacaggtcagcctattcattgttgatgagcttcatctgattggatctgaaaagggacatgttctggaagtcatcgtctctaggatgaggcgtattgcaagtcatatcggcagtaacatccggattgtggctctttcagcttcacttgcaaatgctaaagatctcggagaatggattggtgctacctctcatggccttttcaactttcctccagctgtccggccggtgccattagaaatacacattcagggtgtggatatagcaaattttgaggcaaggatgcaggcaatgacgaagccgacatacactgctattacccaacatgcaaagaatggtaaacctgccctggtgtttgtgcctacacggaagcatgcaaggttgactgcattggacttgtgtgcatactcgagtgctgagggtggcggaacacctttccttcttggttcagaagatgagatggatgctttcactggtggtatcagtgatgaaacacttaaatatactctgaaatgtggtgtaggctacttgcatgaaggtttaagtgatctggaacaggaagttgtaacgcagctgtttctcggtgggaggatccaagtgtgtgttgcgagtagcaactgtgtgctggggaagatcattgcctgcccatttggtggttgtgaagggaaccc

SEQ ID NO: 392158 - DNA, 432 bp, Oryza sativa
gtgcgtgccagattggtagtagtaggctggtagtagcgcagcggtagcctccttcgttatccccaaaccccgcgccgacgggcgtcctcctcaccgacatttcctcccacccccgcgcgcgccccgccgcctttctcgaacctccgccgcattcttgtcaccttgttgattcttcattcttgatttgttctccttttttttttggtgattttgttgtttcttggcctgctactgttggcggcggcgagcggtggtcaccggccgtgcgttcccttctttctcctcagccctcggctcccccgccggccggacacgccgccggagctgagttgttgaggttttgcagggaagggatacactccgatccccaatgccccgcgtttggtccgcccctgcatcctcctccacagattgctaggcttcaccggagat

SEQ ID NO: 392159 - DNA, 550 bp, Oryza sativa
ctcttctcctttggcttcctctcttctccgtgttcttcttgggcgctttaggggttcgcttttctagattcagcctgtcagcggcgacggcgagggagctgcgagatccggccgtgagatggtggtgatccgaaggagtcatcgtcatcgtcgtcgggttggagcctcttcgtccaagaacctgccttgatcttgcagccttgttcaagcttccgagtcttttgctgatccagggtgcagtttcttagcatgtgagtaatggcagctgctgaaacaagggctgcttggcagcgtgctgctaaccgctgccgggttcaagaggacgcaaagagagctccgaaactcggttgctgcccgccatctgggcaacagcatgagaccaacaatggaaatcaaacaaatccgcaagactgccatatccccaactttatgcctttaaactggaatgcaatgaactccaatctgccaaaagatacccaatggtggcttcagttgcagcccaattttgggtgccagaatgtgcttgctagcgaggacctgaattatatgt

SEQ ID NO: 392160 - DNA, 771 bp, Oryza sativa
ggactcttggttttctgttatgtatattctttggtcttgcacttgcactggtgtcaagtggcattctccctgcattcacggaggatattgctcggtctgtaaatgttgtgcatgttgttgacactacaacggtgaatagtggtaatacagaaccatcatcatatgttactctgttctccaatacacctggaaagttgacaaaggaattagtagaccttagagatgaagaattttcttgtgggaggaatagggctattgattttgttacatttaccatgaaatatggctgtttgagttacgaagggaccaatactggatggagcaaatcagaagtgccagtgctcagtttgaaaagtgattctgttaccaatgatgctcgacaaacaataatatcagttgatactatgtcatctacgcgttggtcactggcaatcaataaacaagaaattgatgacttcacagttcatgtggattcggagaacttggttccactgggtaataagagcgagatcgatgggtggcatacaatccagcttgctggtggtaaggactcaccaacaaaatttcagctaacccttttctgggcaagtaattccaaggatgcattcccaatgcaagtcgaatcagaagatcattctttcttactaaaactaagaacggatgtgaatagagttacaccgctggttggcagggttctcgagaagcttccaagatggtgtgcaccctttggcaagtctacttctccttatacattggctttcttgaccgctc

SEQ ID NO: 392161 - DNA, 538 bp, Oryza sativa
tgccgcctcccccacttggaagttgcaaagcgaagcccaccaacctcaaaaacccaaaccctagctctcctcgccgccatcccatggcgcgcctccacctcgtggtcgtggccatggccgcgctcttcgccgccgcggcggtggcgcagggcccgagcgcctccccgacgccggctccgaaggcgcagccaccggtggcgaccccgccgactcggccgccggccgtggcgccggtgtctcctcccgccgcccagccgccagtgacgacgcctcccccggtttccgcgcccgcgcccgtgcccgccccgagcgccgccgcgacaccgtgaccccaggcctcggcgccgaccgcggagccccccgtcctctcgccccccgcgccggctccggtgtcgatctcccagtccccgacggaggccccgacgtctccgtcgtcaccgagcgccgcgtacggagtctccccctccgacgccgcgtagtcgccgctgggccggcgagcagccgtcgggtgttctactggatcccgttccgagagagt

SEQ ID NO: 392162 - DNA, 772 bp, Oryza sativa
cttaattaaagagagctgtgtgtcttcttccgtaagggtcatttcaacacaatgttgaggtacaatggaagcctatatctcttagccactgatcagggttttttcagccaaagtgatttagtatggcaaaagttggatgaggtgaatggagatggagtttttctgaccagcaatttcacaccatttaaggctgaaaacccgagaaatgattcttggaatgaacagcaggctatgacaagtaccgctgactatcttgctcaatttgacaatactaccctgcagcactcgtctggaaactctgatctagagctagctatagcacttcaacaacaggagtttgagcggcaacaacctcaacgacaccagtcgtcaacacagcagcaggagccggtgccccagcagcaacagcagacacccaatcaatcacatggcacaggtcggccaggattagttgttggtccaacaacggcaaggaggccacctgctccacagccgacgacgccgaagaaagagaagtgcatcgtgatgtaaagatacaacatatcggagacgggacaggagaaaggaaaagggagggggacaaggagcatcacatagtatactgtaaagaatcttcttgtctactcttcttctttagtgccgcggcatagcagcagcctgttgtttttttagccacttttcccaatcttgagcgctcttcattttgcgtgttttttcttccctggtgtaaataaccttcaaagaagtcactaatacgtaaacagatgctgtc

SEQ ID NO: 392163 - DNA, 300 bp, Oryza sativa
tttgtatagtgcgagctaagcgcaattgggcgaacgccgcgagccgccgccaagccaaaccagagcactccgccgccgcgccatggcttccccggccccggcctcctcacctcttccacccgcagcatcaacaccagcacccgctttccccgcacccgcagccccagtaccaagccccaccgcctccgatgccgccgccgccccccgcggcgccactcaaagctatcgatctggaggtgaccgtcgtctcgggcaagcacctgaagaacgtcaactggcgccctggcgacctccgcgcct

SEQ ID NO: 392164 - DNA, 838 bp, Oryza sativa
  unsure (1)..(838): unsure at all n locations
acgaagcaaggcgcttaggcgcacgcacgcacgcacatctctcgagcccctcaccctccccttcttcctcctccttccgccgcattgctcgtcgccggcggcgaccataccctacccctctctctccctctcgagcggcggcggaggcggtttccggtagtggcggcggcggcggggacaggaagaagccatgtgcgatttggtggcgagaacggggcggcaccagcagcgctacgagcatgggcgtcgactcgtggccgggtgcataccttttagatataaggataacaatgatgaaacttctgatgatggccacaggaaacttgtggaagttctcatgatcaactcccagagtggatctggtctcctaatttcctaagggaggatgggagaatgatgaaactgttgaagaggcagctgctcgtgaagctattgaagacgctggagttcgaggagatttagtgcaattattgggcttctacgacttcaagagcaagacgcatcaagacaagttctgccccgagggattgtgcagactgcggtgttcgcgcttcgagttaaggaagagcttgcctcctggcccgagcagacgacccgcaagaggacctgcctcactctcagtgaggcggtggagcggaccggttacccatgggtgcgcgaggcccttacaacgggtttcaccacctggcatgagaactggagcaacggggacgaccatgtngacccaagttcaagatgaccgcacctcangcatcagggccaggggtcatgctctcttttaccattctagtggttcagaacattgaccatttcggcgtatgtgtntcctgatgcttca

SEQ ID NO: 392165 - DNA, 654 bp, Oryza sativa
tgaacggctataattaggcggttccaaaacgcgcccccacgcttttgcgcccacgaccccccgcgactcccccgctaattacacaactcgccaccaccgtaacgggcaacgcccagaagcgtccgcctccccctccctccgagggcgagatcggaacaaggcccccacccaaccaccgccgccgccgccaccggcgatcgccggcgacccccgggccacgggaggcgccccgccctcctcgccattggagaggaccttctctcctgctcggattcgtttgctctggtggtggtggtggggctttgctggcgcgaggccgcgcctgccatgccggagaccgggccctacggccacaagaagaccgacggcatctgcgacggcgtgtgcggcgagcctgcgtcaaaggcagttctgaccatgtcgaggctgagatgtgcacttcggggatttgattccacagcactagtggccctattgatcggagtgccagttctaattttaaggagatatgctcatggtcagaaggtcacatacttcctcaggccagtatgggagtctcctcccatgcccttcaaaactatccctcattactaccatgagaatgtcaccatggcgaaactctgcaagatgcatgggtggaaaagtccggagacc

SEQ ID NO: 392166 - DNA, 555 bp, Oryza sativa
  unsure (1)..(555): unsure at all n locations
gctgcaggnattcggcacagtgcacatnctgaaatgatttacataacccaccttttggaagaagagcctgaaaaacttgctgggnccattattggctgacacttatgtcacattgctgaagggtcgtaatgcatggtatgggcagaaactagctaaaggtgaactgacactagagatgggtgacagcataaaaggcaaaggaaccattcagggtgtctctgcagtcgatgcattttatgaactcctgagtcaggatagcttaagcgtaatgcatcctgaagccaacagatctgttgcaccggttgagatgtgcccaatcctgaaggcactgtacaaaattttgattcaagagggaacttcctcctgattcgattcccttcaggccataagagatgaaaccatgtatgaatccacgtgaaagaattgagatggccccgggccattcactttaccggccatctcttcttggtcancctaaggggntnccaagcttngggngtccccctttttttngggcaaaacccgaaaccnngggcaaaangctnngnngcncnt

SEQ ID NO: 392167 - DNA, 388 bp, Oryza sativa
cctgattcgatccttcaggccataagagatgaaacaatgtatgatccacgtgaaagaattgagatggcgcagggccattcactttaccggccatctcttcttggtcaacctaaaggagatgccaaagcttaggcagttcttccctttttttttggtgctagatatcctgtaagctctgtgtgctattatgcttgctgctgctgctgttgttgtaacactagtgagttccagcaagggaccaagatctcagttgattgcttcaagacttgttgagcttgttatgtagtttgatttgttaaacgcctgaaatgtgtacatagacgttgttttgtgtgatccaataataaaatatgcaaaaggtaatgttcaaaataaaaaaaaaaaaaaa

SEQ ID NO: 392168 - DNA, 711 bp, Oryza sativa
ctccgctcccggtgcgccgccggcgagccgcagccgccgcccccctctccgcgccggcggcctcctccgccctctctgccgccagtccccggccgatcccatcgccagtcggcgggcggtctccccgcgggtggggtgggggcgggacggacgatgaagccggtggtggggatcgtggtgtcgaacaagatgcagaagtcggtggtggtggccgtcgaccgcctcttccaccacaagatgtacaaccgctacgtcaagcgcacctccaagttcatggcgcacgatgagaccgaggactgcaacatcggcgaccgggataagcttgatccttctaggcccttgagcaaaaggaagcactgggttgttgccgagattcttcgtagagctaaggtgtattctccatcagctgctgcagcagcagtttctgctcaacctggtgccacagttcaacaggcagaagctgctagcaaatcataaacatagactcctcttctgcaataaatggacactttttcgggattttcttttatgttgagtaactgaagtatcatctttgtggctcccttcaaatgcactcgtgtttttgaaccatgtgaatggtggttatcaactcactgagggtgcatcttcaaatacttagaaattcatggatgcaacacaccatatccatatgtagaacggaatcttctattatgaattgtattcatccaa

SEQ ID NO: 392169 - DNA, 641 bp, Oryza sativa
cggatcgtggccgtggctgaagaaagcaactcaaccagctgccctcccaaatttctctcctcttgccgacgactcggaaaaaaaccgcggacaccgcgtccgctcgacggagggaaggggatgagctcctcgtcggcgtcggctgtgccgccggaggacgacgtctgctcggtctgccacgaccgcttccggatcccctgccaggccaactgctcccattggttctgcggagagtgcattatccgtgtttggaatcatggaccttctgtacagccttgcaagtgtcccatttgccgtcgccttattaatcttctggtaccagcaaatgtatcaatagataatgatgatgatccgcaaattcagcatgttctaggagaggttcagcattacaaccgcatatttggtggaacaccccgcaacctgactcagaggttgcaagacctaccctttttcatcagaagactgttcagggaactactggatccccagaggaccctcccacttgtcttcagggcgaggatggtcatgatggtagccctgagtgcaatttatgtcctgagccccattgacaattctttcttgaaaacgtgctggggctgtttgtaattttcgatgtatcttctttttctttttatctgtat

SEQ ID NO: 392170 - DNA, 538 bp, Oryza sativa
cagagatctttgagcagcgataccctgttcttttacatagatttagcatcagggagaacagtggaggttctggtttccacagaggtggtgatggccttgtgagagagattgaatttcgccggcctgttgttgtgagcattctttcggagagaagggtgcatgctcccaggggactgaagggaggaagaaatggggcccgtggtgcaaactatctcgtcaagaaagatggtcgtagagtttaccttggagggaagaacactgttatggttaatgctggtgagattcttcagattctcactcctggtggtggtggttttggctctccttgatggctattcttgtggacgatcatctacctcgcttctgggtactgtcatttctacttctttagtcctacttttatccacaaataaaacatgcagaaggcagaaacttgcacaaatattgcctgatacagatccaaactgctattgttgcttctgggacattggagctgaataaggaagcatgttgcttgttttaaaaaaaaaaaataaaa

SEQ ID NO: 392171 - DNA, 618 bp, Oryza sativa
  unsure (1)..(618): unsure at all n locations
ttcgatccggcgatccccggcgagcgagagatcgaagcaagctgctacacagatctcacgacatggccgaggcggcgtcggcggcggcggcggcgacgacggagcaggcgaatgggagcagcggcggcgagcagaagacgcggcactcggaggtcggccacaagagcctcctcaagagcgacgatctctaccagtacatcctggagacgagcgtgtacccgcgcgagcacgagtgcatgaaggagctccgcgaggtcaccgccaaccacccatggaacctgatgacgacgtcggcggacgaggggcaattcctgaacctgctgctgaagctcatcggcgccaagaagaccatggagatcggcgtctacaccggctactccctcctcgccaccgccctcgccatccccgacgacggcacgatcttggcgatggacatcaaccgggagaactacgagctggggctcccgtcgatcgagaaggcgggagtggcgcacaagatcgactttccgggagggacccgcgctgccggtgctggaccanctggtggaggaggagggcaaacatgggtcgttcgacttcgtgttcgtcgaacgccgacaaagacaactacctcaacta

SEQ ID NO: 392172 - DNA, 551 bp, Oryza sativa
  unsure (1)..(551): unsure at all n locations
atcagcatacaactagctaggntccctgcatgccctcccgcgtccaacgtgagcaacatcaccgaagccggtcgctgatcggaggaaaacccaaaaaagaaagaaaaaaacgacgaaatggcttcctccccgtatcacgccgccgtcggtgtcgccgtccttgccatcctcctcgccgcgccggctgcggaggccggggcacctaccgccgcgccgttggccaactactccctcgaggacgcgtgcaagaagaccggcccacactacggcctctgcatcgtgacgctctccgccgaccggtccgccaagtcgtcggacacggtggggctcgccagggtggccgtcctggcggcgcagaagaacgcgtcggagacggccacctacctctccagcatctacgacgacgacagcatcgagaagaagacggtgcagctgcagcagtgcctcgaggactgctcccagaggtacgaggcggcggtggagcagctgacggacgcgacggtggcgctcgacaccggggggtacgaggaggcgaaggcgctggtggcggc

SEQ ID NO: 392173 - DNA, 463 bp, Oryza sativa
  unsure (1)..(463): unsure at all n locations
gtcccggagaagatcatacacgaggcgaacacgccggtggtgatcgccgtcgcggcggtggaggaagaagagccgaacacgatcaagtcgccggagccggagaaggagatcgcgaccaccgccaccaccatcatcgaagaggaggaggtggtcgacgacgacgagcccaagaaaggcgacgccgctgctactccagtgcccaccgactcgcctgccgccgcctcctcgacggaggaggacaagttcgtcgcggtggtgaaggaggaggacaagttcttcgcggtggtgaaggaggatgacaagttcgtggcggtggtgaaggaggcgatcaagaagcagcgtgacgacgacgccgacggcgacgagctggtgcggagggtcaaggggagcagggtgaaagacggcgatggagaagaaggtcggaggaggagcagcctcgccggcgggagttggcgcggcggan

SEQ ID NO: 392174 - DNA, 631 bp, Oryza sativa
  unsure (1)..(631): unsure at all n locations
tcgtagaaattcaataattacacacaaaaaaaataaggcataagaaggcagctgcagctgctagctgctgttgttgttggtagtagttttttgggcaccaattttccatggagacgaaggtgaggatgagctgcaggttgggcactatggtggccctggtgctggtgggcgtcgtgctggcggcgatcctgcaggaggccaccgtcgacgcggcatcgtccagcagcgactcgccggcggcgaaatcgggcaccggctacctcgactacggcaacctcaaggcgaagctgcctccaccgggcgtcgccgttaccaagaggccatgcatagcaaaagagaaatgccgcggctgatcgatcgatcgatcgatcatcaccgacgtacccagacggatgaaacggatcgacgtacgtactgcttatggtgtcagcgtgttcttgttttttttttcttttcttttctttctttccgatggaattgaaacgtgtgtgttcttggttttcttcttctcatggcatcgccttggctttctatatataatgaggtttttaatgtcactaattaattaaccacctgggatatataggccacattggtgaaaatccnnnnnnnnnnnnnnnnnnnnnnnnnn

SEQ ID NO: 392175 - DNA, 491 bp, Oryza sativa
ataaccctctgactggtggaccctctcatatcctttttcccactcccctctatccactgtttccgccgccgccgccgccgccgtcgccgcccgccgcgccggcgttctccccccgccgacgaagcacggcgtggagtgtagacgcagcctcctcgctctctctcacgccggcgagcagggtctggagccaggagcgacgcggcggccggggccggggcctccatctcggttcgaaccgcactgaaggtccctccctgcattagggcgcacaatggcactgacccttctcagagggatgcgaacgccggttgtagctagaaggaatgctggcttgttcttcaccacattgcagtctccgttgttgtcccgcttcacgatgagagcggagagcgcgcgggccgcagcgcccaagtcgattcagctggcgaccaaggaggcggcggagcacaaggcgcagggcttcggggcggtcatcgggatcgagacccatg

SEQ ID NO: 392176 - DNA, 669 bp, Oryza sativa
ttatttacgcaccgtggcaaggcgccattttcatagacttctttagggtgtgcgtgactttgtcagtgaggtcgccgcagtgtaaacgccaaccaaactcccactagcagagtagcagtccatcagcacataaacccttccattccaaccccaattagcactagatcgtcatcgctatcggctgcagcaaagaatggcaggagctgggaggactaggagcacggccatggcggcgtggtcgtactcgtcgctgctgctgcagctgctgcttctctcgatggtcggccgtactagacggcgcggcgaccaccggcggcggcggtgcccggggcgccggcgccggcggcggactgcacggacgccctgctgagcctggcgggttgcctgagctacgtgcaggaggggagcacggtggcgaagcccgacgcgccgtgctgctcggggctcaagggcctggtgaagaaggaggtggcctgcctctgccaggcgttccagggcagccagaacttcggcgtcacgctcaacatgaccaaggcgctccagctgcccgccgcgtgcaaggtcaagacgccgccgttcagcaagtgccacctttttatttcgggccggactggtggtgcttctgctcccgcttcattcttcggggctcgtttttggggggtcgcccct

SEQ ID NO: 392177 - DNA, 460 bp, Oryza sativa
gtgaaccagagcgtgccacttatggatcctatagtcacgcttttcggcagtgtccatgagaacatgcctcatgctggaggaagcatgcggagtacattgtttcccaactttggtagtatgtttagtgtgacagatcagcaccccaaggttgatcaatgggatgaggagaaccttcatagggatgatgaggaatacgcgtctgatggtgctggaggtgactatgaagacaatgtccacagcccgttgctgtcccgacagaccacgagcgcagaagggaaggacattgcacaccatgctcatcgtggaagtgctctgatgtatgagaagaagaagcctcttggaagagggtggcgaggcggtgagcagcactggcattggtgggggatggcagcttgcatggaaatggtcagagcgagaaggcgaggatggtaagaagggaggaggatttaaaaggatctac

SEQ ID NO: 392178 - DNA, 530 bp, Oryza sativa
ttttagtgtccctagatatggaaggaagagaggcaggcttatggtaagccctggtgaatatttgtgggaggtcagtaagtggtggcctgattaagactgcatcagagaaatttgtggttatctttctttactaatgacggcattgacgagaatgaagttcccaaagcgctatgtcattgtgctgctgacattcatctgcacaaatgtttgttacatcgagcgtgtcggattctcgattgcttacaccgtggcagctgatgccattggcgtgaatcaagcaaacaaaggcatgatactttccatgttctactatggttatgtcttatcacagatccctggtggatgggcagcacagagaattggaggtagacgtgttctgctgctgtcatttgtgcatgtggtctttgatatgcggtttaattccactagaccccaagagagaagtcatcctggtcctttctcgcctttttgtcggcgtagcacaaggattcatatttcctgccattcacactgttctggcacaatgggtg

SEQ ID NO: 392179 - DNA, 485 bp, Oryza sativa
tttttgagggggcgggcgtgcgtgcgtcgtcgatcgtcgacagtcgtctcttgccaccatgtctttcaccggcacgcaggacaagtgcacggcgtgcgacaagaccgtccacttcatcgacctcctcaccgccgacggcgtcccgtaccacaagacctgcttcaagtgcagccactgcaaagggattctctcgatgtgcagctactcgtccatggacggcgtcctctactgcaagacccactttgagcagctcttcaaggagacggggagcttctccaagaagttcgcgccaggttgcagatctacagacaaggaactggcaagggccccaagcaagatatgttcagcgttttctggaactcaggataagtgtgcagcctgccagaaaacagtgtacccacttgaaaagctaactctggaaggtgagtcataccacaagagctgcttcagtgctctctggaggctgcatctgacccctcttctac

SEQ ID NO: 392180 - DNA, 1825 bp, Oryza sativa
  unsure (1)..(1825): unsure at all n locations
ttttcccactcctccccctcccaatcccaagtcgcgattactccccaagccgcgagagagcccgagagtaaactaatcgccatccgccaccgcgcagccgcggcagctagctcgcgagaagaaaacgccacgcgacccgagagcgagagagagagagagctaagccgccgtgcgccacgccaccaccaccaacccatcccaatctctctctctctctctcctcgtgctcctagctacaagaagaaccccctcacccccaccccggacacctacctagccgctacccctctctcttcctcttcttcttcttcttccctcttcttgtggtggtgggtttgacccaagaacggaggagggatagggcgggcggcgatgggggcagttcgggggattttggtcgtggcggtggttcttgcggtggcggcgattcttgctggggcggcggaggggaaggtgaacgggaaggcgaaggggaagtacagggcgctgttcaacttcggggactcgctggccgacgccggcaacctcctcgccaacggcgtcgacttccgcctcgctaccgcccagctcccctacggccagaccttccccggccaccccaccggccgctgttccgacggccgcctcgtcgtcgaccacctcgccgacgagttcggcctgccgctgctgccgccgtccaagctcaagaactccagcttcgctcacggcgccaacttcgccatcaccggcgccaccgcgctcgacaccccctacttcgaggccaaggggctcggcgccgtcgtctggaactccggcgccctcctcacccaaatccagtggttccgcgatctcaagcccttcttctgcaactccaccaaggtggaatgcgattgaattctatgcgaattcgctcttcgtcgtcggcgagtttggtggcaacgactacaatgcgccgctgtttgcggggaagggccttgaggaggcctacaagttcatgccggatgtcatccaggctatctccgatggcatcgagcaattgattgctgagggcgcaagggagctgattgtacccggtgtgatgcccactggatgcttccctgtctacttgaacatgctcgatgagccggccgatgggtatggcccccagagcggctgcgtccgtcggtacaacacattctcatgggtgcacaatgcacatctcaagcgcatgcttgagaagctccggcccaagcaccccaatgtgaggatcatatatggcgattactacacgcctgttatccagttcatgcttcagcccgagaagtttggattttacaagcagctacctagggcatgctgcggggctcctgggtccgttgcgaaggccgcttacaacttcaatgtcacagccaaatgtggtgaggctggtgcaaccgcgtgtgatgatccatcaacccattggagctgggatggcattcacctgacagaggcggcttacggtcacattgccagaggttgggtatatggtcctttcgctgaccaaccgatcttccaatcttcatgagaaagtcacttcttccgttgtaattgtagaggtgtatcacgatagtgcactgaaatggagcagggaaagtagttcttccatatggttccaaggttgcatacatgtatattttcattctattacattcattgcagtcaggtacaaaggtggaatagggctgtcaaaagcttgattttgtttatttgtcaggcgacataactatgaaaatgtaacagacacatgattgtgtaaattgcctccggaaatatgatacaaattgtctttttgagtaaaaaaaaaaaaaaaaaaannnnnnnnnnnnnn

SEQ ID NO: 392181 - DNA, 533 bp, Oryza sativa
tgctgagagcacgggcaaaactagggtttcgggtggtctcgcggaggcggagaggccgcaatccctcgtgctctccgatcctccggagcccccgccggccacggggagctcgccgatccgatcaaccggggttccggcctccggccccgcttcggcgggaggtttactcgtatccgcttcccctaccgtctcgtctttgcatttccgctcgcttcgatttcgccgtggcttgatgcctctgatctctctcgttttgcttggattttgccgttggcccgatgatgattgcgatttagaccctcgcgaatcgatcgattggttggttggttgatggatggatagataggatcggctcggatttgaggctcgccctttgcatctgcaagcgggttgaggtcccgagaatggctagtaccgcgttggctcctccatgatctgggcgctgaaacatgctgggggggtcggagaggcactgacatgtgggcccgcccacgcggcaggaacatggtttactgctgcttctgctatactat

SEQ ID NO: 392182 - DNA, 504 bp, Oryza sativa
ttgaacgaccaatcactcagaaggagagaagggtgacgctgagtccaattgatctgacgctgagagtaaaggtgaagaccattcaactggagatgatatgccccaaagcaatactgtcctagaggaaagcagtgcagagacgaacagaatgccccatgaagaagttgcacatggtgatgaatctactaatgaagatcagtccaatgtgaaaagtgacggatctaatgaagaggaagctgagaaaaaagaggcagtggattctcaaaatgcttctgaatctctgtccgatgatgcgaagggtggaacagatgatgagcattccagtggaactcttcctgatgaaacaggtaatctaccatcagggcagaatgagaactcacaaagtgatgcgacttccaccacatctgatgcttctagcgaggctgttcacattgagactgggtctgaggatgaagatgcagcaaaatcatctgggactgcatctggtgatgatgacaagggctc

SEQ ID NO: 392183 - DNA, 481 bp, Oryza sativa
ctcgtctccctcgaaagcaccaccggatccgacgaccccctcctcccctttctcccctcctcacgaaaccgcctcgccttcctcttcttttctttttcgctcgcttcgcatcgctcacatgcccctgcctgccgccgcagacggggcgccatgtcgcgtagcggggtggaggtggtcgtgagcaggggttgctccaggctcgtcctccccgggatgcagccttcctccgcctccgccgcttcctcctcctccttctcgcgcggcggacatggcggcggcggcgaccggaggccgctgcccgatggccccttcgccggattggtcatctgcgtcaccgggctatccaaagaggcgaggactcaagtgaaggaggcgactgagaggatgggaggcgagtacagcgggagcctgcatcccaagtgcacccacctagtggttcagagccttcgccggcccgcagtttgagcacgcggtcaagcat

SEQ ID NO: 392184 - DNA, 518 bp, Oryza sativa
  unsure (1)..(518): unsure at all n locations
agatgatggaagctgcattgcaaggtgctgcaggacaatcccagtccaaagctgatgaaattgcaagactgatgaatgagaatgaacaactgaaatcaacaattgatgatcttaagagcaagtcagctgaagccgaaatggatgcacttaaagatgaatatcaccagagagtagcaactcttgaaaggaaggtgtatgccttgaccaaagaacgggatacattaaggagagagcaaaataaaaaaagtgatgcagctgctcttttgaaagaaaaggatgaaattatcagtcaggtcatggcggaaggtgaagagctatcaaaaaaacaagctgctcaagaagctactatgcggaaacttagggcacaggttcgtgaacttgaagaagaaaaacaacggctgaactcaaagatccaggttgagggagacaaaggtttgagagtattaaaagagattaaggcctgcaacggagaaatttgctacagggaaacaattagcaaagaaatccaaacctganct

SEQ ID NO: 392185 - DNA, 678 bp, Oryza sativa
ggagaggacaaatttcgtgagttaggtctttgtgatatgggagaagatattgctcagagatggacagatgaggaggaaagtctcttttatagagttgtttactctaatcctccttccttgggaaagaacttttggcattttctcccacgagctttgcctggtaaaactagcatggagcttgtcagctactatttcaatgtctgcaggcttcgtaagagggctcagcgaaacagatcggagccattgcacgtggacagtgatgatgatgaggttcctgatgagccttctgtaacagaggatgaggattctgcagttgagtccccagcacatgattattacgtgaacaatcccatgtccccagagtctgaagactccttcccatggagaaggtagctgatagtttatctggggctcagagatgggaccaagccagaagcctctggggatccaacacagataatcctgggaggtgatgccgacgtccaagacgagtcatgcacatcatttggggagccataatggagcgcatggatctaatggtggttcaatgggctgagttgcacatgatgctgccaaatgctgctctagaccactacagtgaccgaggtgcgtgcatgtaagcggatgccaggactcatgagcatataaacataggttattagatgttgacatcatgac

SEQ ID NO: 392186 - DNA, 1030 bp, Oryza sativa
  unsure (1)..(1030): unsure at all n locations
gggcaaaagacctgttacaggaatccggctgtttcttgaaggaaaaaggagcaacaaactagctatccatctccagcatctctgctctcttcctcagattcttcagcttgaagatgatccttacaatgaccaaactccagaagcatatgaccgcaagtactacgaaccaattggctcatggaagcgtttctcccatgtctgcactgcaccagttgaatcagatgactcctccattgtcacgggggcacaattagaagtggttagccatggctgcgggaaaatactgttccttcggctccatttctccaaggtctgcaacgccacttccgtcaggaaccctgagtgggaaggatctccaaacctggctcagaaatcgggcctcatctcaacactcatcagcacacatttctccacagcagctcaaaagcccgcgcctcgccctgctgatgtgaacatcaactcggcagtgtaccctggtggaccccctgttccagtgcagaccccaaaacttctcaagtttgtggatccaacagagatgatgcgtggaccgcaggatctgccaggttattgggtggtctcaggtgcgaagctgcagctcgagaggggcaagatctcgctgcgggtgaagtactcgctcttgacagcaatgttgcctgacgacgatgagtttgcgttcgatgaagagttttagaaccatgaaaccgagcgaagaaaagaaacccacctcattttgtttttatcatttatgtgcagctaacagcaggaactcgaatgctcaatctaggattttcgtagcatttgtaagtgaactagctggaagtctatgttgtatacagttgcgggtttgaaacatggaagcagaaatgaacggtctctggcttggatgacgcgagagtttgttgtacttgtaacaatgtaccatcccttcgcagcatctgttccagatgactaaggatagatgatcactagaggctggggcgagccaagccgcgccgcctgnatacnnnnnnnnnnnnnnnnnnnnnnnnnn

SEQ ID NO: 392187 - DNA, 653 bp, Oryza sativa
  unsure (1)..(653): unsure at all n locations
gctcagacctctgctcctcaagttaacaaggtgactaaaccgcttgtnactgtaactgaccagagtaacgtagtcaaaagagatgcccaacctcctgcaacagccaaatctgctactgctggnggaacgacaaattcatggactaatgttcatcgatctgttagtccaaatgtgcaggcgcgagcctactggccttaaaaagtcatggcaccagctgtttagtcgctcagcatctgtgtcaccttgtcctgatgttcctgctgcagcccgtgaaatgaacgggcaaccagaaccatatggagcacaaattagcaatgctcaaatcttcctatcgcagtatccccctcttggacagtaaccctagttcaagccgctgtatgcaatttccaggttttccaccagtgaatggagcacctgccaacatgtcactctctcattttccagctggacatgtgccctactattgtgagccagaaccaacagtgtttgaagaaccagaacaatttgaggacccatgctatgatcctgatgcaattgcgttgcttgggccagtttcagagtccctagataactttcctcttgacttggataagcgggttcatctctagtgacatcaccaaggaaacacatacgaagccttcaccaatcgaatc

SEQ ID NO: 392188 - DNA, 645 bp, Oryza sativa
tcttaagatggaggaagaaaatgatgtggcaaagaacaatatggaagagtgagctaacatggctgctatctgattggactagaggctaacaaaggcttcatgttcgctagcttgatccaccacaattcttgatctggaataccaaatattgaagcacgcaacatcacatggaggggttcataacatggctcctgggatggtgtgcgtggaatggagcatgatatgcgaaggttaaagatatttttggagcttcttggccaaactatgctccttttatttccggccaattgtgtggtataccgtatacacatgtactgttatatggtttcacacatttggccgaaacacacgacggctattcagggggcattagcatgtacaaaagagatgagtttcttgttgtggtttcttcccttaactgtttaacatagctatgcgagtgcaagagggcagatgaaacattgatgttgtgatatttttgtatactcgattgttttgtaatatggttacgaggagcgttagagttttttttttaacactgcagcatgaggaggtagactcctgtaactgctgtctgataaccctgcagaaactggtgcgcacctgtaagaatggtgttccaagtttgaactcactcaggttccc

SEQ ID NO: 392189 - DNA, 659 bp, Oryza sativa
tctttcgttctggccatggcccgatcaccagcacttccactgatcgatcgatccatggatccaaccaaccaaccaaacaaccattggcaacaacaaactatcttgcagtgatgaagcgatcgacagtatgtacggggtgatgaattaacgatgatcacacaccaacgcaagcgcatgcacgtgtgtggaagattcagacgcatgcatttggattaattcttggagagatcgagcaagcttaattgggaagaccaatgagaaggttgtgtatcctgatgatgctagctccgaagtattgaggtgatcaatccattgaatttttctcttgggtttgaagaggatatcgaatcgaaggcacttgtagatgaataagcgagtgagatggagcgacgtacgtagggttagattttggagttcagtagtagtatattctggcactttttatctattttttttatttattggggtcttattttttcccctttttctttacatacataaatttgtgaactttgtcagccagtgtttgttgtgtataggtgcatggtgattcttctttcttcccctaatctgtgtggatcatgtccctgtgttgaaaaaaatgttcattaaatttcgctcaagcaatctcacaattccgttgtaccctaaaaaaacaa

SEQ ID NO: 392190 - DNA, 629 bp, Oryza sativa
ttttattagagagagaagagagaagacggggggggaaaaaaatcacaagagaggaggagaaaaaaaaatcgcagcagcaaaccctcctcctccgccatccgccgccttccctcctcccccacgatctccggcggcggcggcggcgatggcccggaagaggaagacggacgcggcgccgcggctggacgaggccgaccggacgctctactccaccttctgcggcgccgccaactccctctcccagctctacacccaggccatggcccagcagaagctctccttccaggccggcgagcgccactccctcgaaaaactccaccagtggatattgagaaagcatgaggaagagtcgaggctcacggcggctgatataatgtctcatatccagcatgagttggattatggaggtaatgatccacatgtttcccccagagtacatcagcatagtgcaaatccgtttgcaaactcaagcatccaaccctcagctggttcctatggtcaagcaacagtaggatttgcgcctagacccagcatcagtgatcagtcaaagaatacaattttttaaatgctttatcaagcccggtccgtcggagcttcagagtttcatttaacccaggttttgtaattgg

SEQ ID NO: 392191 - DNA, 673 bp, Oryza sativa
gccgttcggggaaacaagtaaacgctcgctcgctggggctcctttgaccccgtccccgcctggccgctgctgctctctcgctcttctccctccaataattcgcttgccctctggtggctcaaagcccagggaaattgatggagaagaattggggtagccccatgccacctggttcgggctagatctccggcgagacggccgctgggagcagccgatccggccccgatccgatgggtggcgaggtgccggagccgcggcggctcaaccgggcgctcagcttcgacgactgggtccccgacgaggcgctgcacctcgtgatgggccacgtcgaggacccgcgggacagggaggccggcgtcgcgggtgtgccgccgctggcaccgcatcgacgcgctcacgcgcaagcacgtcaccgtcgccttctgctacgccgcgcgccccgtgcgcctccgggagcggttcccgcggctcgagtcgctctcgctcaagggcaagccccgcgccgccatgcacgggctcatccccgacgactggggcgcctacgccgcgccatggatcgacgagctcgccgcgccgctcgagtgcctcaaggcgctccaccgtcggcgcatgacccgcaccgacgccgacatcgccgcccttgtccgcgcccgcggacacatgctgcaggagc

SEQ ID NO: 392192 - DNA, 494 bp, Oryza sativa
  unsure (1)..(494): unsure at all n locations
ccaccactagtctttntntcctctcgtcgccaagcgaagggagacagtctcgtgcgcctccggctttcctctccgacggcgacgcgccgacgtacgacgccgtggacgagcagcagcgctgtggatcgacgagcggcgatggcgaaggcgcggaagcagcagccgcagggcccgttcgccggcggggccgccgccggggaagaggtcgttcctcgggttccagtaccaccaccaccaccgcggcggctccgtggcgccggcctacggcgacgacgacgacctccccgatttggcggaggctgatgtcttggtacgcgcccgcgtcggaggggggcgcggttcatcgaggcgggcgcggccgccgaggggagggaagggcttgnaaatcggcggcggcggctgcggcggagggaagcacaaggtgggcgggctgagccggccgttcgcggacgggcggcaggtggcggcgtcggcgcccgtgcaggtgcccgcgt

SEQ ID NO: 392193 - DNA, 628 bp, Oryza sativa
  unsure (1)..(628): unsure at all n locations
cacctcgagctctcgcaatgccggccatggaggaggaggcggtggccaacgaggcgcatcacttcctcgtcgtcacgtaccccgcccagggccacatcaacccggcgcgccacctcgcgcggcgcctcgcgcgcgccgcgccgggcgcccgcgtcaccatctccaccgccgtctccgcctgccgcaagatgttcggcgacgccgcggctgcgggcgccggcggggagctcgtcgacgaggggggtgtgcggtacgcgccgtactccgacggctacgacgacggcttcgacagggcggtgcacgacagcgccagctacatgacccaggtcagggtcgtcggcgcgcgcacgctcgccgccgtcatcgagggtcccgcgccgccgggaggcccgtcacccgcgtcgtctacacgctgctgctcacctgggtcgccgacgccagccgcgaccatggcgttccctccgctgtactggatcaccggcgccgtgctcgcgcctactccactacttcgtgacggcggtcaagaatcccgcgcggcgncggacgatgccctcctccggtcccgctcgtncactcctctctccatccaaaactanctncttcaantccaatctccttcgccgaacac

SEQ ID NO: 392194 - DNA, 597 bp, Oryza sativa
  unsure (1)..(597): unsure at all n locations
naanngagattttngggggnaatctntganaaaggggagcgtcnggtcngncnnggacaattnatnattaggcccagcctggggagcccgcttcattggacaaggctacaggcaggtctgtggccgtgctgatgtgtggggagacggcgtcgttcccggggtgtcggcgcattctagaaggcgcactgaaacataggcttcgacggcgtgtaccactctcctgtaggttctgacgatgagcagaggccgtggtatggttcaccggcaatcctcaagcagtgggtacatcatctcctcagttgaacggttgatggctttgatgcagagaagctgacgatctgaaagtttgtagacagaaatgtattgcatgccgccaggtgagggttaggccaggggaaaactacacatttttcagtgaattagagggtagccaatgccattctatacacaacagtacaacacacatgcgatttttcttctcccaaagaatttgtaacagtataaatattgctcaatgtgcagaggtaattcatcacatacatgattgcaggttgtaatagctacacatacagtatgatctataacaaacttcattcc

SEQ ID NO: 392195 - DNA, 485 bp, Oryza sativa
tctcctctccagctcacacccaccccccacgcaaatctagaaccttctggatccgccgcttcctcgatccgatcgcctcccccgccgcccgcccgatcggatccccaagggtttccggtttgccgcccccgcgatttagatggtttacgatggcgccgtgaaggaccaggagagctcggctaacccggcgtcggcatcggctgctctgtcggaggcatcggcggcggcgtcggaggtaacagcggctgccgcggcgggggcgggggctggggcggccgaggagggggcggctgtgagtgggcgaccgccgaggcctccccacgacaagcggctcggcgtgcggcatcccttgaagcaccgcaggttccgcgccggggggaaggtgatggttggagcccggtgatccgccgttcgacaagaagtggcggatgaggaggccagcgaggtggaacatgaggcggcgcccgtggagagggaaccaccac

SEQ ID NO: 392196 - DNA, 894 bp, Oryza sativa
ttcgaaacgacggatttcaccaacacatccgtgtgctcaagcccttcttgctcttcccgttcattgtccagctcgattgatctccatggaaatggtcatgttattgaaaagtcgatatctagggttggctccttcaatctcaggcagatcaaaggcttatcaggtagcatgccattgccacctgaggaactaaggtgcccgatctccttgcaactcatgcatgaccctgttattatcgcatctggtcagacatatgagcgggcttgcattgagaaatggtttagcagcggcaacacaacctgcccaaagactcggaatgaattatcccagctctccatgacgcccaactattgcatcaagggtttgatagcttcatggtgcgagcagaacggggttctagttccatcggcgccgcctgattctcccaagctcaagtacctgaggatatcatccttgaatagtagcaaatgtcttgtgaccaatggcgttagcacggtcttgtttgaagacacatgcgcggaggatgatattaaggatggtggtaaagttgcttcggaggagtgcactcggcagaactccggagaggctccatcttgagatatgtgaagttgatcaggcctcaccagaaaaacatcctcatgagaactccgagaaggtagcagaggcgacatgtgagctttggctgcgttgtgctgagcaaggacgacgatgagtgtgtcgacgagcaacgtgaggtgatcgagcagattagattccttttgaaggatgacaacgagcttaggaaatacgcgggtgctaatggtattaccgagctactcatccactttgtgaagaaggcagtctgcagagatgatgttcagtgccaggtggttggaacaatggctctgttcaacc

SEQ ID NO: 392197 - DNA, 610 bp, Oryza sativa
tgctggctcgcgcaaatcgaggccttccgctcgagctcgcgtcgcgcggcctgggactcgcctcactcgccctgcccctctcccacgcgccgtccgccgccgtgaccggaggcgagcgagcgcgcgcccgccgacgacgctccccgccgccactggatccgccacccacgatcctttcagccgaggaagcaagaatttcggctggtcctatatgaatcctcggtcccttgtatactagagggcagtaggagtttggatccaagatgaggggcagaagcgatggggggcagagcaagaggcccatcttgctgctctgcgggatggtcgcgtgcctctgcctcctcttcttgtatttctctggctccaatgggcaggctgggagtgccgcattagagtacgggaccaagttctcgcgctcactcgggtggggaagtgatggggacggagacgaccggtcgtaggagtccatatttggcaccggagatgcaaatgatgatgagctcatgagctttcctgagtgtgatgaccggcattctgtgctgatcccatccttggataggagcttgatatatcacatgaggatgaaactggatttaaacctgaccgaaca

SEQ ID NO: 392198 - DNA, 822 bp, Oryza sativa
tttttattctagcatgcttctccttggctcgctggggtttgcctgttggttggaacatgtgcttcttcggcggttgtgatgctcccgatctttgttctctcttgttgatgtttcatccatctgtagatccccatctctttcatttctcttttgttcagtcccctgatcgcccttcaccctgtccgcttgggtgtccctgactgcaatgtttagcggcccttcctcctttggggcttccttcccccgaaggacgttgaactggatagcaatttgttaaagcccgattgaagacggcttgatgcgggtggcctatggcctcaacctttagtggccctccctcttttggggcttccttcccccaatagacgttgggggacattgattcaagcagcaacatgactaagtcgtatttctgacggcttgatacgggtggtcttcgatatccacagtctttcgactgccagagaactgagccggcctgcgcgtggcaatgaggccctccggcaccttcgattcttggtgtttcaagtctgcatgcgatgtggatgatgttcaattagggttctagcattagtttgatttggaatttgatcgggcgtttttgcaggtggcaaacgtcaaagcttctcagtttatctctgtgcctctgtgtgcgtggtggggaggttgtgatgcgtctgtattctcttctctatatatccccgtgtattctttcttattatcctccagggctcctgcatttacgcaggtgaagcctgtcctgtgtaagatcgttcgaagtaatatattcaggtgggcatttccccccccggtgtccagtcc

SEQ ID NO: 392199 - DNA, 520 bp, Oryza sativa
  unsure (1)..(520): unsure at all n locations
acgcgtccgcaaagcaaccaccgtaccgcaaccgcaaccgcgagagccgagagagaagcctttttccccgatcgattcccttctctccgctccgcatcgccatggcctcctcagcaccgacgccgccgccgctcctcccggtgaccaacccggcagccgcggggtcgtccccggccgccaccgccgtgggatctgacgcgccgatcgcaaccccggcgttccggctcttcctgagcaagctctccgactcggcgcggcgctcgctgtccgaccggcggccgtggacggagctggtcgaccgctcggcgttctcgcggccggactccctctccgacgccacctcccgcctccgccggaacctcgcctacttccgcgtcaactacgccgccgtggtggccttcgcgctcggggcgtccctcctcgcgcaaccttcttggtccttgttctnctcgggcccnggacgcctggtngttcctnttantttttccgngggtcccaanaaatcgttttcttttcnggt

SEQ ID NO: 392200 - DNA, 836 bp, Oryza sativa
  unsure (1)..(836): unsure at all n locations
ttcattgctaccccagctgcaataatactcatacacctcacctcgtgccgcccgttgcgacacctcccgtacgtcaatgcccgtggccgccattgatggggaagaaggccggcaccacctcctcctggctcaccgccgtcaagcgcgccttccgctccccctctaaggacgactcccccaacaaggccgcccgcctccgcgacgacaccgacgacgacaagggcaagagggagcgccgcagatggctcttcaggaagtcctcgtcgccgtctcccgcgcctccgacaccgccgccgccacagcagcagcagcagcaatcgagggcggcggccgtgacggaggagcagcggcacgccatcgcgctcgccgtggcgacggcggcgaccgcggaggcggcggtggcgacggcgcaggcggcggcggaggtggtccggctgacgcgtccgagctccagcttcgtccgcgaagcactacgccgccatcgtggtccagaccgcgttccgcgggtncctggcgcggcgcgcgctccgggcgctcaaggggctcgtgaagctgcaggcgctggtgcgcggccacaacgtgcggaagcaggccaacatgacgctccgcttgcatgcaggcgctggttgcgcgtccaggcccgcgtccgcgaccaagcggatgcgcctctcccaggactccatctccttgtccgccgcccgccgcctccgccgcgccatgcggcagcagcaagtcctcctacagcgtcgacacctccacctttttgggattccaantacacccacnaattcgcccgcttgccgaacgccgctccatctaacggtcgcgaaacggca

SEQ ID NO: 392201 - DNA, 509 bp, Oryza sativa
gtgtcaaagcatttggtctttgcaataatgctgtcatggaaaaaggaatctttcgcgacagcaaagcatctgagccctggtcaactgtaatgttgtaactgtttcgtttagctgctttgtgtaattgtggcaactaatggcatatttgcttgcctgctttcagtttgtcttccttgaaagataggagttaaaaggattagagccttgccttgcatctgccaccatccttgatggtacggtgttactccttacccggaaaagaagttttccctccctttttttccatgtcagatgacatccgatatgtaatttatcatcccctccgccttccacccttagcaagcatatgtgctgatatctttctttgcctaaggattctctctctttgtagccttacttgactttgtataagctgccataatttagtagtggaaaaagtatcaggaatgttttcgtaggctttgtcgcgagattcgactggcaagaaaactggcattctttcttgattt

SEQ ID NO: 392202 - DNA, 842 bp, Oryza sativa
gagcttgccagtatgaggatggataatgggtggccgcggttcagatccaagtacatgtccacggctgaaattgagaacattgcatggatgcagcaagctgctactcagatccatgatccgtacattgatgattactatcatcaagcctgtttagctaaaaagtcagcaggaggtcaactcaagcaccacttctgtccgaccttgattagagatccatcatcccgtgcacggagtaaagatgagccacatgcatatctccagggtgatgctcttggaaggttaccatttgcttccatccgcaggcctcgtccgctcctcgatggtgaacaaacctctgaatcaagtgatgacgttactgaaaaatctgcttcaaaaacacttgaccaagaaccaatgctggctgctaggatcacaattgaagatggcctttgcctactgcttgatgtagatgatattgatcgcttgctgcaatttagccagcagcaagatggtggcttgcaactgagaaacaggagacaggccctccttgagcagctggcagaatccctgcaactagttgatccacttacacctagtaacaatgcacctctctcaccaaatgatgatctggtgtttctccgaatagtctctcttccgaagggccgcaagctactttctcgttaccttgaacttgtgagttctggcagtgagcttgctagaattgcttgcatggcagtcttccggcatctaagatttatatttggaaatttgccatctgatagtagtgctgttgagacaacgacaaaacttgctactgctgtatcaacctgtgttgttcggttggagttgagtggactaagtgc

SEQ ID NO: 392203 - DNA, 555 bp, Oryza sativa
ttttctttcggcatctctcctgcgcgggcgagtcgtcctcctcgtcctcgtcgtcccctttctctgctcccgcgagatctcacccccgctgcggcgacgcggccatggcggggaggaactaccacggctacggcggcggcggcggcgggggcatgtccatggtggtggcgagcacgccggggcaggagctggccctcaccaactgcgcgtacgtctcctccgccgacatccgccgcttccccaacgccctcgccctcgtcggcgacgccttcgtcttcaccctgcgtgcccatgatgctgtttctgctggaagcatcgcattgaatgccattcagcgtcgccagacgaaggtttcagctggggattcaatcactgttagcagttttgcccctcccgatgatttcaaattggcattgctcacattagaactagagtataccaaggcaagaaccaaccgaaatgaggagctggatgctggtgtgcttgcccaacaacttcgaaggagatttcttgatcaggtcatgacatctgggcaaagagtaccatttgaatttt

SEQ ID NO: 392204 - DNA, 547 bp, Oryza sativa
gaggatccgggtaccatgggataaggataaggaggaggaggtgaaggagagagaaggagaaggagctggaggagaatgaggattcacctgtcgccgaggtcgatgagccgcagcccagccaggcggtggcggagctgccgcagcagtgcgctccatcaccgccgccgccgcctcccatactgcaggagcatcctcagccggtggtggcagtggtaccaaatgtggatgagcaagaggtggttgctaagccagctgtgattgccaagatagaggcggaagaccagccaggtgagggggtttgctttcaggaagtggagcgataccaagatgctgaactggaggactcaaacctgctggataatgacactccgatgctgccttgtttccttccctcgccctcggaggccattggcacagatggcagcagcaccagctgcggcacgggaagcagcgttaccaatgctatcgctccagctacgacgacgagcacgttcgctggtctgtttgcgttcgtcacaacgagcagcactccccaaagcagatccct

SEQ ID NO: 392205 - DNA, 511 bp, Oryza sativa
tcttggtcgcgtgggtcacagggcgcaagcggcggcggcgtcttggagggcgtcggcggcgcgctcggccccaaggcgcaagcggccgtgactggcggcagcggcgcacgagcgggacatcggcagcgcatggggccccatggcgcaagcgaccgtgactggcggcggcggcgcgggagcggggcctcggcggcgcacggggccacagggcggaagcggcgccatgggacgtctcctccgcctatgccgcgcgcctcccggaggtcgtcgtcggcgccaaaccgcgagtcagacccgaagctgttgctcccatcgagccggcggaggaggagggcacgaacaccgggtagccgaacgcggcgtccgccggcacgcacgttgcacaccccgtcagccccctcacgtacatgtgccacgccctccccactccccagtgccctcgccggcgccctccacatccagctcagcctgctccccctgctcatgatggctgtttggtttgggtgggttg

SEQ ID NO: 392206 - DNA, 512 bp, Oryza sativa
gactagttctcttgaactaaaaatgcatgaagaagctttgaaaagatatgagcgcttaatgggggtcttccgttgcagtgactacattcaggctcaaatagctaccgtgcagtatagtatgagagacctggatgaagctgacatgatttttgaagaactccttaggactgatcctttccgtctggattctatggacgtttactcaaatttattgtatgcaaaagaaagctcgactgctttgagtttccttgctcacagagtatttttgacagataaatatcgcccagaatcttgctgcataattgcaaattactacagtttgaaggggcagcatgaaaaatcagttctgtactttcaaacgagcgctgaagcttaatcgaaggtatctttcagcttggacccttatgggacatgagtttgttgagctaaaaaatacacctgctgcgattgatgcctacaggagagctgttgatataaatcccagagattaccgtgcttggtatggtcttggt

SEQ ID NO: 392207 - DNA, 563 bp, Oryza sativa
  unsure (1)..(563): unsure at all n locations
tcgggtcaacacacatcaatcaattaaccatcggcgagcagaagaagagcagaggctcagctagcaggcgagagagatcagcgagcaggatggctggggctgcagggtcgtcgtggtcctctctgctcctcgcagcggtggcggtggcgctcgccgtcgccgcagcgccgtcgctcgccggcgacccggactacctccaggacatctgcgtcgccgacctcaactccgaggtgaaggtgaacgggttcccgtgcaaggcgaacgcgacggcggacgacttcttctccggcgtgctcgccagccccggcgccgccgccaacaccaccaccggcgccgtggtcaccggcgccaacgtcgagaaggtcccgggcctcaacacctggggcgtctccctcgcccgcatcgactacgcccccggcggnctcaacccgtcgnacacccacccgcgcgccaccgaggtcgtcttcgtcctctacggcgagctcgacgtcggcttcgtcaccaccgncaacangctcctctcccgcaccatctnccagggcgacgtcttcgtcttcccccgc

SEQ ID NO: 392208 - DNA, 478 bp, Oryza sativa
ggagagccatagcctctctctctctctctctctctagatatctctctctttttctctctagatctctcttttttcttgtatctctataggttgttagagcggcgacggcgagaagaggaaggagcaacaaggagtagatcatcagtatagagagcagcagcaatttgggaaggttcattattacagctctgttgtttcatttctttgaggagacgaagttagcaagcagggattgctgtttctgaatttcaaggagaagataacaatagcaaatgatgatgtcatctgggttccagctcggtgtgatcgggtctcttgcgctgtcggttgcatcatcagttgccattgtcatctgcaacaaagctctcatcagtacccttggtttccctttcgctacaacattgacaagctggcatctcatgatgaccttctgcaccctccatgtggcacaacgcttgcatttctttgaaccaaaggc

SEQ ID NO: 392209 - DNA, 735 bp, Oryza sativa
ttaacttgttgatggctcaccagctatggtcaaatcaaaaagaggtcgacctcctggactaaagtcattggagaagaaggctgctggaaagaaagttctaggtctgaaaaaggttgaggagactactgattcaacagggaagttatcgaagcagtcatctaaggatgattccaagtcatctacaagaaaggcaagtggagcagggtcatcaaaaaagcaacaaaagatcagtttgaaacagaaggatgaaactgactccaaggaagatactgctaaggatctgagcctaaaggaaatggtctctccaaagtccgtgtccaaggggtcagctaagaccaagggcagccaaggccaggacaataatggctccaagaggaaaaggtcacaagaggatgaacaagagactcctcgttctaggaagaataaaggccttgatgctagccttgttggtgcaaggatccaagtatggtggcctgacgacaagaagttttacaagggcattgttgactcatttgatacagcttcaaaaaggcacaagattgcatatgatgatggagatgtagaggtgcttctccttagggatgaaaagtgggaattcgtcagtgaggaacaagacaaaacccctgatgtggcttccgagatttccccgaagccacggggtaggggcagaaaaggaagagggagctcagtgcaattgaaggaaggaaatgcagaaacacctaaaagtggtggagg

SEQ ID NO: 392210 - DNA, 1036 bp, Oryza sativa
  unsure (1)..(1036): unsure at all n locations
cggacgtgncngtgacgcgtgggngactagttctctttttggaggaattgtacttgttgcattctctcttactttcagcatgccacaccctcttttgactggtgtagcatcaggcatagccttccgtctcgcagcatggagacctttacaacttctaatgtcatcgaagatggngtctatttaccaccttattcctcctaattggaggttctctcatttaccatgtcgccacatcaaacatccttcaagctagttaaccngcaagaaatcttctgttaatgtaattacaatcatcctcaggcctctcacttagtgtcctcacactgcaatcgctccttgcttgcggttctgtcttccttcacgcatatgctgaaggtcttcaacttggtgtggctgcgcgcaaggcttatggtctagggcgctacatggttcttccagtttcccttcatggtctaccacgaggtgctgctgttgcgagctgcatatatggtgccactgatagttggcgggcagccttggcagccgctgctttgaccggctttgcagggccaagcgctgccatcagtgcaatcctcgcgaagattgactacagtggactagactactggatggtcattgcctgtggtgctttgattccaagctttggccgagtcttcaaacgctcgctaaggttggacatgcggaagagcatctgtgggcttttgataggtttcgcctttgcctctgtatgcctgatgtcgaccagattcatttgcttgcacactccctactgcaactcagctccagaagcagtcacataacctttcttttctttgctggtacagttgtagaacatgtaatatcagtgtaatgatgatacaggaatggaaaaattattaccgttcaggttgaggaattcccttgtatgaacaaatcaaagggaaataggcatggaatatataccggtttaatttttgtcttttcacctgttcgtcctgaaaccgtggattgttgccaaccttgaaagaaaaaaaaggtggtgtgcaagttctggttt

SEQ ID NO: 392211 - DNA, 710 bp, Oryza sativa
aataaaggttcttgggatagtggtgacaattggaatgccccaaagtcatctgatgaaaatcaaacttccgcttggaacagttcagaagataaaaggccatctggaggccaagagcaacaaagtggtgcttgggctagcaagatgacttctactgctggcgctgaggataaaagtgatgcctggggcaccaaggcggaaggcaattctggtagcactgggggaaagtgggagaatgcttcatctggggaagagcagcaaagcgacccttggggaagcaagatctgttctaatgaaggcaaagaacaagaaactgacccttggacaagcaaggtgacatccactgcagatgctgatgataacaataatgtctggaacactagcgcaagtgatactgcctttgggagtgagagcaagtggggcaatgctggggcagaggaaaaggcagatgcctggaaaagtaaagtggggagtgaaaatagtggaggttggaatcagaaatcttcttggggtaaactcaagcttctcaggccggagagcacgaaccagcttggagcaatccaaagaatggtgatgataacagtggatatggtaggggtggtattcaaaaccaacaaagctggtaattatgataggcaaatttaactgacgtggcttacttgaggtgccacccgttgttttttcgatgaatcgttacccgtacttatactttt

SEQ ID NO: 392212 - DNA, 928 bp, Oryza sativa
  unsure (1)..(928): unsure at all n locations
tcgggcacgagggggagtcgtgcgcggcgcacgcggcggggaacctgtgccagagcttcctgctctcctacggcgtccgggtcggcatcggcatcctcctccgcgccttcaagctcgcccgccgcagatcctactcctccctcctcgacctcaagcaactggtttcggagaaagatctaatagtgagggaggaagcttgccgggtaggattactttttggaggattcactggatcatatcatgcacttcgatgtttccttcggagatttcggaaaaaggaaacaccatttaatgcaatattagcaggttcggtggcaggcttggcgatagtagcgctagatgattcaagtaggaggcgcaccctttctctatatcttctggcaaggcttgcccagtgtgcatataattctgcaaagtctaagaacagatttcacttttggggaagccattggaggcatggagatgcattacttttttcacttgcgtctgcccaggttatgtattctttcgttatgaggcctgaaagcttacctaaatcgtaccaagacttcatccaaaagactggaccagttgcggaacctgtttacaaggctgtaagagattgctgcagaggtggtcatgtggatctcattggtctctcagcctatttagctaacaagaagaattcaaatttgataaaatttaacaaaaagtccacccattattccatgttctgtgatacatcctgacagaacaatcgtgcttggctcataatgtcagtgtctcttcatcaacgttcaagaaaaacattccctctgtaattccccattgacattggtcccaattgttggtctaaagcctttccaaaagttcctttggaatcacccagttgcaaactttgttgggcgaagccctttttggggggcnaattcngctctaangaaccttg

SEQ ID NO: 392213 - DNA, 545 bp, Oryza sativa
cctcaaaagccgagctatccttatcccaaaacccctctcgctcccatttccggtgtgactctggccacgatggccaccccctccacctccgcctccggccccgcccccgccccagcgccggcctcctccgcctttcccctcaccgccgccgcgcgtttcctccgcgtctctgccttctccagcacgcgcgctttcgccctcgctgagcggcgccgcactccgcggtgccggctatccgaggtgggaggcggcgaccgctcggtagccgctggccgctcacccggcccccgttccttccacggtctcgttctctccggcaatgcagaaggagccatgcaatctcttagaagagagctaagttctgggatgcaccctttacgcgaaaactttgtggctttagtccatgtttttgccaagaatgatcttactaccaagggcatggagattcttgcagctatggagaggcagagcatcaaaagtgaagcggatacttttcgtccagcaaaaatacaagaagcttttggcatgaggagatgcagcaaatc

SEQ ID NO: 392214 - DNA, 589 bp, Oryza sativa
cctcgcggtgtccctggcgaagtacacggcggagctgaccgcgaagctcgccgccgagaggggcgccttcaccgtcgtgctctccggcggatccctcatcaagaacatcaggaagctcgcggagccaccgtacctggattcggtggattggagcaagtggcatgtgttctgggcggacgagagggtggtgcccaaggaccatgaggatagcaactacaagctcgccttggatgggtttctctccaaggtcccaattcctactggccaagtttatgctataaatgacgccttgtcagctgagggagcagcggatgactatgaaacttgcttgaagcaacttgtcaagaatggtgtgattgcaatgtcgcaatcgactgggtttcctaggtttgatgtcatgctcctgggaatgggccctgatggccatattgcatctcttttcccaggccaccctcttgttaatgaaaacaagaagtgggtcacctacatcaaggattctccaaagccaccacctgagaagattacgtttacatttcctgtgatcaactcatctgcgtatgtcgcaatggtggtcactggagctgggaaa

SEQ ID NO: 392215 - DNA, 459 bp, Oryza sativa
  unsure (1)..(459): unsure at all n locations
gggggaacgtgatgaagagttggaagagctaagaaatgacattgttgacctaaaagagatgtacagagaacaagtggatcttcttgttagccagatctgaagcttggcgtgtttcttcgaaattcaagccgtgacaaataccgaaagttcatagccataccagtgtgaaaatattcgtttttgtacatcttgaagcacaggtctttttggacagtttgagcacccttgtttaatttagtaggttactctgttgtatactagtttggatagctttacggtttttaagcctattgtttgcaattctttccagtgaagtgtatcaaatttgtaattcgattaaaagtgtatcacagcggaatgcaaccccaataatatgagagctcgtttttgtcattttcctcnnnnnnnnnnnnnnnnnnnnnnnnnnnnnnnnnnnnnnnnnnnnnnnnnnnnnnnnnn

SEQ ID NO: 392216 - DNA, 749 bp, Oryza sativa
tgtggtttttggccgggagataactgttgttcttgctgctgagtcacggaaaaggccagaagagatgcgcagtagagccagagtcagagggtactctgaccatgaaggccgtcgttcatcccattacgggaggtctcgttcacgttcgcgttcccgctctccccgttatcgtggtcgtccacggtcaaggtcatactctcctgctccaagacgacgagatgactattccgcatccccacagagaaaagacacacatcgtgcaaaatctcctaggcgtcagccaaaagaacatgaagtagacaagaagcggagatcctattctcctgccaataaagatggggaccggcgtgatgctgataatggttatgaaaagaggtcgccgccagctgacagcgatggatcccctccgcaccggaggtcccccaggcaatcctcaggatcgcctccaggatcccgctccaggtctgccgacgggtctcctgcccgcagtgactaacagaagaacactgcgcacgctgtgctacatcctctctagcttcttgttggtcagaccggaccagtttaagtaaaaacccttttgggcttgttgtaaaacttgtaatgctagcatctgtcgtggtttggtagcggaggacttggatcgtcaccattgtgtgtgctcgcttctcagtggatggagacattttgagtcgtgtgtgatgaaaccttagacttgctgcatggcattgtattgtgttacccttatccgt

SEQ ID NO: 392217 - DNA, 507 bp, Oryza sativa
  unsure (1)..(507): unsure at all n locations
gcaccaagctagtctcaagtgttcaattagctagctctcttttgcttagccatgagtgcagcaatggctgcctttgccttcctactagtcatcgccatcgtcttccccctcgcatccgcattcccttcccctcctgtttcatggggccaacagcagctagaccctcacttctacgaccactcgtgcccacaagcacagcaaatcgtggcatctatcgtcgggaaagcgcattaccaggacccccgcatggccgcatccctcctccgtctccacttccacgactgctttgtcaagggctgcgacgcgtcgatcctactagacagcagtgcgacgatcatgagcgagaaggcggtcgaaccctaaccgggactctgcgagggggttcgaggtgatcgacgaaatcaaggcggcgttggaggccgcttgccacacaccgtctcttgcgctgacatccttgccctcgccgngcgtgactncaccgtcatgacgggaggcccccggtggata

SEQ ID NO: 392218 - DNA, 706 bp, Oryza sativa
  unsure (1)..(706): unsure at all n locations
aantcactcaaggccaggaaaggccaccatcaccagagaggatggaaatattggagtgaacatggatttagcagtttgattgttgctgctccggggcatgatgttgaaagttttgttgctgatctgcttcccctcttgtcttattcagctccatttgctatctatcaccaataccttcagcctctcgcaacatgcatgcacagcttgcaagtatcaaaaatggctctcggattacaaatttctgaaccctggcttcgtgaataccaggtccttccatcacgaactcatccacacatgcaaatgaatgcatttggtggttatattttgagtggcattaggatacacaatggcgatgcatgtaatggaagcaagtgaatgaccaagccccgtcaatgcgtgcttctatccttggaattaaaatatggtcaccattttacacggtaacctgaaacaatagacacaattttgtagtccagagaagccaacttttatgctgaagcgacttatgtgattagtagaaattggtgcgcatatagagaataactagtgcgagttctagaagaaaatgaaatgagcatgtacaccaaatccatgtagcttacataacaatgttgtgtttgtttatcaaccaaattgaaacgcttgtggactttgagatatttgttaaggtgtgctacttactatttgttaaaaaaaaaaaaaaaaa

SEQ ID NO: 392219 - DNA, 667 bp, Oryza sativa
  unsure (1)..(667): unsure at all n locations
taaagattatggcttcagctgctcctatggttaagcctgtttcactggaacttggtggaaaaagtcctatagtggtgtttgatgatgttgatgttgaaaaagctgttgagtggactctctttggttgcttttggaccaatggccagatttgcagtgcaacatcgcgtcttattcttcataaaaaaatcgctaaagaatttcaagaaaggatggttgcatgggccaaaaatattaaggtgtcagatccacttgaagagggttgcaggcttgggcccgttgttagtgaaggacagtatgagaagattaagcaatttgcatctaccgccaaaagccaaggtgctaccattctgactggtggggttagacccaagcttctggagaaaggtttctatattgaacccacaatcattactgatgtcgatacatcaatgcaaatttggagggaagaagtttttggtccagtgctctgtgtgaaagantttagcactgaagaagaagccattganttggccaacgatactcattatggtctggctggtgctgtgctttccggtgaccgcgaagcgatgccagagattaactgaggagatcgatgccggaattatctgggtgacctgctcgaancctgcttctgccaagctccatgggggcggggacaagcgcgggg

SEQ ID NO: 392220 - DNA, 437 bp, Oryza sativa
tggaaataaaaggaagagaggaggaggaggaggaatagccgagaagccaccaccgccaccggaggaggagctctatttatgccctcgcggcggcgcctcctctccccgcacccccccgcctcgccgctcgccaccgcgccccagaggctgggaacttcgaggaggagcaggatccatggagggtggaggcgcaagaaatggctcgacgaccggggcggcgcggacaggggggagtgggggtgatgctgctgctggtggtggtggtggctccgccgggaacgggaagccgctgcccccttgctgcgtcaaggccagggcggcggcgcctgaatccgaggccaagtgccacgccaccgtggtgtccggatggttcaccgagccccggtctcgcgggggataaacgagcgaagtgcactattacaataaccctatgtggc

SEQ ID NO: 392221 - DNA, 642 bp, Oryza sativa
tccagataggagtccagtccccacccgagcgaggcggcggcggaactcccggcctccggcgaacccagcagccgccacctctcgcggctccaatcacacagaccagatgatggccgcggcggccgtctaccggcgggtgctcaaggcggtgcagaagcacgtcggcgggggcgactccaagaagcacttccgcgagttcgtcgcctccgagttccgccgccccactggcacggacgccgacgccagagcgcggctgcggctcgccggggattacacctacctcctcgccagcgtccaccaccacaaggacctgctattctcgtataatatagctgtggaccgatcagaggagatgaagaagatattgaacaaatctgctgctagtgtaggccttcagcttccagatgtctatcaggcgtgaggaacttcatttttgcagaaatgtgcaatctttggtactgccttttagcgacgattttcttccagaagctttacttgcaaccagtaattcgctttcaaattccagatttcaggtaggctggaaaggttagcttgtaggctgtaagcagctgtattttttttaccaaataatgagcaatggaatcattatttaacgatttacgttaaaaaaaaaaaaaaaaa

SEQ ID NO: 392222 - DNA, 544 bp, Oryza sativa
ggatgttcctgaattttacagcactgcattgaattcagagacaacagcaattaagactgctggctttaaaacatttcctgattacctggtgttgcagatgcgcaagtttgtaatggaagcaggatgggtgccaaagaaactagatgtatacgtagatgtgccagatataattgatatctcgcacatgcgcagcaaaggcatacagcctggtgaagagctactacctgaaggagcttctggtgataacaaagctgaacctgttcatcctgttgccagtgaggacattgtatctcagctggcaagcatggggttcaattatcttcattgccagaaagctgctattagtacatcaaacacaggagttgaggaggcgatgaattggcttctctcacacatggatgatccagatatcaacgatccaatatctaaagattcacaggctgctgaacaaactgttgatgaaactagcgttcaaactcttgtttccttcggatttcaagaagatgctgctcgataggccttgactgcttttggcagaaatttt

SEQ ID NO: 392223 - DNA, 547 bp, Oryza sativa
ctcctgtccttagtcctgctcaagaaacaagagggggagaagttgaccttctatgatgggccattcaaagcatctgcaattgccgattttgtatctgcaaacaagcttccgttggtcaacaccctcacacaggaaactgctccttccatttttgacaatccaatcaagaagcagattttactatttgttgttgcaaacgaatcgtcgaaatttctgcccatctttaaggaagcatcaaaatcattcaaggggaagcttttgtttgtctttgtggagcgtgacaatgaggaagtaggtgaaccagttgccaactactttggtattactggacaagagaccacagttcttgcttacactgggaatgaagatgctaggaattttttccttgatggtgaaatatcggtagagaatattaagagatttgctgaggatttcttagaggataagctcacaccgttctacaaggctgaacctgtccctgaatctaatgaaggagatgtcaaaattgttgttggaaaaaacctagatcagattgttttggatgaat

SEQ ID NO: 392224 - DNA, 984 bp, Oryza sativa
gcgggaccggaggagcctaccgcgcgtctcgccgtcgcagctccgcaaggcttgcagccctgccggagatgcagacgacgaccgtgcccatggcggcagcggcggcggtggcgccgtccaccaccacctcctcctccgcctccttcaaggttgcggcctatgcttggtcgtcatgccggagcagctcctctccggcgacaagattggtcgccgcccccaatcaccagcgaccaccgctagttgttggagccattgccggcctggatccggttaccgcggtgcagctgccattaaccgctgggaacgtcgagtctgttctagatcaagtgcgcccttacctgacggcagatggaggggaatgttgcccttcatgaaattgccgggaatgtggtgaggctgaagcttcaaggagcttgtggatcgtgcccaagctcgctgatcacgatcaagaggggcatcgagcgccgcttgatggagaaaataccagatgttgctgctgttgaacctgttacagataaggagactgggcttgagctgaatgaagagaatgttgagaaggttctcaatgaaatcaggccataccttgctggcacgggaggtggtggcctccagtttctcatgatcaagggccccattgtgaaagttcggctcacaggccctgctgcagttgttaggactgttcggattgccgtgagtaaacagctcccacaagagcttccatccatccaaatcgtccaattattgtcatagtctgaagaatatctgtgtgccacccctctcaagcagcacatttgcaacactgtacagaaaattgatgtaaatttgtaaattggttgcatttcagaagcctcccgaagagttgcccatctttagtcagcattcagcacagggatcagatatatcatatactatctgtctagatctgtaatgaagttttgatctgttcctcttgaaagaaagatggaaaagtgtgtttcttggtgg

SEQ ID NO: 392225 - DNA, 491 bp, Oryza sativa
  unsure (1)..(491): unsure at all n locations
accgcaaagcctcttctcctcttcttctcctactcgcttactcaatcgctcgaggattcttggattggattattgggttggattttnagttgatcaatggcggcagcggcgcacggctccggcggcggcgaaggtggtggtggcgacgtcgccgagggcaggcggaggcggaggcggcggcggggacaggaaggtggtgccggttgtggtggcggcggcggccggcgacgaggcgcagagcgagatgcacgtcctggcggtggacgacagctccgtggaccgcgccgtcatcgccaagatcctccggagctccaagtacagggtgaccacggtggagtcggcgacgagggcgttcgagcttctctgcctcggcctcgttcccaacgtcaacatgatcatcaccgactactggatgcccggcatgaccggctacgagctcctcaagcgcgtcaaggaatcgtctcagctcaaggagatcccggtggtgatca

SEQ ID NO: 392226 - DNA, 537 bp, Oryza sativa
  unsure (1)..(537): unsure at all n locations
gtttttcctgtcgtggtactcgcagatgctgggggggcacggttagcgcgtactgtcgggcgcgacgtccgtgttcggcgacggcgccggcgccaagatctcggtcaaggtggccggcatccactggcactacggcacgcggtcgcacgcgccggagctcacggcggggtactacaacacgcggcaccgcgagcggctacctcccgatcgcgcgcatgctggcgcgccacggcgccgtgctcaacttcacctgcgtggagatgcgcgaccacgagcagccgcaggaggcgcagtgcatgcccgaggcgctcgtcaggcaggtggccgccgcggcgcgcgcggcgggcgtcgggctcgccggggagaacgcgctgccgcggtacgacggcacggcgcacgaccaggtggtcgccgccgccgccgaccgcgcggcgaaggaccggatggtcgccttcacctacctccggatggggcccgacctcttccacccggacaactngcgccggttcgtcgccttcntccgccgcatgtccgagt

SEQ ID NO: 392227 - DNA, 643 bp, Oryza sativa
cccacgcttccgctctattatcaagaaacaaacaagattactccagctaactagctaccttggcaatggcctccttatcctccttcctgctcgccgcagcagtggcgacactgtttgtcgttggctcatacgccaccgagcttaccttcaaggttaatgagggctctagcgcaactagcctggaactcatcaccaacgtcgccatctctgaggtggagatcaaggagaagggtgccagcgactggacggcgctgaaggaatcatcgtctaacacctggacgatcaaaagcggctcgccactcaagggccccttctccgtccgcttcctcgtcaagaatggcgggtaccgcgtcgtcgacgatgtcatccccgaaagctttacggccggctctgtctacaagagtggtatccagctctaagtaacatacacgtatgctttttttttggttgagtcgcatgagaatttttagcctctaaataattctattttaagacagattgggccgcctgcgagcgagccaaaaaatatttttctgttgtcatttcatcggtaatagtccattgacaaaatggatctgtttgtcctttgtttttaaacggactgagtacttaaattgttgttaagattgtgttttatacccac

SEQ ID NO: 392228 - DNA, 274 bp, Oryza sativa
tgattgatagagatctactcaaagatctcctaattagtgggatctagatatgctaggcgcgtacatataataatgctagttgatcgatgtcgactgatatggtataaatgaaggaccaatccatatgcttcagatgcagatgttatatatgtttctgcaatgtagcttcaagaagtattttacgcaatcttatgttatatgtttgttctgattaataacagagtttgtattttctagctaaagccatagtgaaaacttattttttatatgtttg

SEQ ID NO: 392229 - DNA, 565 bp, Oryza sativa
cggtcgcgtgggcggacgcgtgggcggacgcgtgggcgccagaagagcaacctcccagtgaactggcctgtttttggtatgcttccattcctcgtgcagaatctgcactatatccatgacaaagtcgcagatgtgctccgcgaggcggggtgcaccttcatggtcagtggcccgtggttcctcaacatgaacttcttgattacctgtgacccagccacggtcaaccattgcttcaatgccaacttcaaaaactacccgaaaggcagtgagtttgctgaaatgtttgacattctaggtgatggactccttgtggcagactctgaatcatgggagtatcagcgacgcatggcaatgtacatatttgctgcccgtacctttcggtcctttgcgatgtccaccatcgcgaggaagactggcagtgtcttgttaccctaccttgatcacatggcttagtttggctcagaggttgagctggagggtgtcttcatgaggttctcactagatgtgacatactctactgtgtttgcagctgaccttgactgcttgtcagtgtcttccccaatcc

SEQ ID NO: 392230 - DNA, 579 bp, Oryza sativa
  unsure (1)..(579): unsure at all n locations
tctactacccggtgatcgacggcggcggctacgtgctgacccaggaggtgatggacagcatggaccgctacatggccaccgccgccgactccgtcgtcgccaaggcccgcgacatctgcaccgccttccccaatgtgaaggtggagacgcgggtggagaaaggggacccgagggatgtgatctgcggggcggtggagaaggccggcgcggacatggtggtgatgggcagccatggttacggttttcctgcagaggacgctgctggggagcgtcagcaaccactgcgtccagcactgcaagtgccccgtcgtcgtcgtcaagaggcccggcaccaacgccaaggcctcttgatgcgccaactccgcggtccaggatgcaatctgtggaatgttgtgataatatgggtgtatgtatatagtggccttggtgcagagtttgtgtatgtgtagtagtacatgttttccttgtagtaacaagtaacaacattattgcactctctaatgtatatatgcaaatgctaggcttgcttcagttactgtgcaaaaaaattacannnnnnnnnnnnnnnnnnnnnnnnnn

SEQ ID NO: 392231 - DNA, 548 bp, Oryza sativa
gatgcgaggccacgccacgggtcccgaggggggaaccccccctgccacgccccccccggcaatgtcggcgcaccacccgccgcacggcatcgccgccggggacgccaggaaggcccaccacctcggcggcgaccccaagaacctgtcgtggtgcggcgtcggcgtcggcgaccaccatttcctccccaggaagctcgtcgggggcggcggcccctccgcggcgaagctcgcgctcgtgtccttcctcgctgtcatcctcgtcctcgccgtcgacctgtccctcaccggcgccggggcgaaccggcggctgcggctccaatacctgcattacatcggcgacggcggcgggggtggcggtggtggcggggttggtggcggtggcgaagaggccaagaacaacgagcttccttggctctcagtgccggacccgtccaacttcacggaggagctcatcgaccggtggctgacgcccggggggactccgtgccgcgactcccgtacggcgaacatctccatccctgttcttgacgaccccgcggcggcgggcg

SEQ ID NO: 392232 - DNA, 491 bp, Oryza sativa
tgtctccatctgtgcacggagggattcattgtccctccggccaatttcccggccggccggaacggcggaacctcgtccatgatcacttgaaacacctcccttgctcttcatggccatggagacgacgagccaagattcgcaggtgatcatgggccggtacaagctcggccggctcctcggccgtggcacgttcgccaaggtctacaaggcctataagttggccaccggcgaggccgtcgccatcaaggtgttcgacaaggaggcggtgcagcggtccggcacggtggagcaggtgaagcgcgaggtggacgtcatgcggcgtgtgcaccaccgccacgtcatccgcctccacgaggtgatggctacgcggtccaggatctacttcgtcatggagtacgcgagcggcggcgagctcttcacccgcctctcccggagcccgcggttcccggagcccgtcgcgcgccgttactttcagcagctgaacaccgccg

SEQ ID NO: 392233 - DNA, 576 bp, Oryza sativa
  unsure (1)..(576): unsure at all n locations
cgctagctcggctcagctcagctcacctcgcgcccggatcccaatgcaccaaccggccataatgcagcgggctctcgccgtcgtcgccctcctcgccgccgcagccgccatcgccgccgcccagggggagtcgccggagttgctgccgttcgcggtgggggcggcgccggaggggtgcgacgtcggggaaggggagtgggtgttcgacgaggcggcgcggccgtggtacgccgaggaggagtgcccctacatccagcccgacctcacctgccaggctcacggccgccccgacgccgcctaccagcgctggcgctggcagccgcgcgactgctccctcccaagcttcaacgcgacggggatgctggagatgctgcgggggaagcggatgctgttcgtcggggactcgctgctccgggggcagtacacgtcgctgctctgcctcctccaccgcggcgctcccggcggcggcggcgggtccagatccttcgagacggtggattcgctcagtatcttcagggccaaggactacgacgncaacatcgagttctactgggcggccatgctngccgagttcaa

SEQ ID NO: 392234 - DNA, 501 bp, Oryza sativa
agattctatgtgttctacacctgttttggcccttgggggctttgcttagccttttgggagttgagactgatgcttgtgccacaggaattggtgttgtgttgtctcaagaaggacatcctgtggcattttatagcaaggcattgggaattgtgaatcagcggctgtctatatatgaaaaagaatttttggctataatgatggcagttgatcattggagatcttatttacttcgggggccttttggtatcaagactgatcacaaggctctttgtcatttagatgatcagactttggacactgagttacagaaaaaggcgatgactaagcttattggattacagtacacgttccagcataaaaaaggagttgagaacaaatctgctgatgcactatccaaagtagggcatttttttgggattcatgtggttcaatctggttgggtttaggagattctcaactcctatgctggagattcatctgctcagcagttactttgtgagc

SEQ ID NO: 392235 - DNA, 826 bp, Oryza sativa
  unsure (1)..(826): unsure at all n locations
gttttaggcagctaatcctacggaagctctgcttgttgttgatgctatgactggacaggaagctgcagcattggtcaccaccttcaatattgagattggtatcactggtgctatattgactaaactggatggtgattcgaggggtggagcagcactaagtgttaaagaggtgtctggaaagcccatcaagtttgtcgggcgtggagaacgaatggaggaccttgagcttttttatcctgaccgtatggcacaacgtgttttgggaatgggcgatgtactttcatttgttgaaaaagcacaagaagtcatgcgtcaagaagatgcttgtgaattacagaagaagatcatgggggcggatattcgacttcaatggccggctaaagcaatcacagaatgttgccaaattgggttccatgagccgggtagttggaatgattccaggcatgaacaaggttactcctgcacaaattcgagaagccgagaaaagacttgcatttgtggagtctatgatcaatgcaatgactgccgaggaaagggaaaagccagaattactggctgaatcacgtgacaggaggataagagtggctgaagagtccggaaagagtgaacaagaggtgagccagttggttgcccagcttttccaaatgcgtgctcagatgcagaagctgatgggtgtgatgaccggacaagaagcacttncaggcatggggaatctcatggaatctcttaacgccgatgagaaggcacctcctggcactgcacggcggaagaggaggcacagcaagacgaggcagagggagctggatgcagtccctagttcttgagc

SEQ ID NO: 392236 - DNA, 623 bp, Oryza sativa
gactttctctggtgcggacattggtggattctttggcaacccagaacctgatcttttggtgcgttggtaccaagtaggagcattttatccttgcggtagaggtcatgctcatcatggcgccaagagacgcgagccatggttatttggagagcgaagaactgctctcatgagggaggcaattcatatgcgatattctttgctgccatactattacacactgttcagagaggctagtgtaactggtgttcctgtgatgcgtcctttatggttagaatttcctgatgacaaagagacatataataatggtgaggcttttatggttgggccaagccttttagcacaaggaatttatgaagagggccagaaatcagtgtcagtgtaccttcctggagaggagttatggtatgacttgagaaatggatctccatacaagggtggtgtgtcacacaagctagaagtttcagaagatagcattcccagtttccaaagggcaggcgcaattgtgccaagaaaggatagattcaggcgcagttctactcagatggtgaatgatccatataccctggtgatagcgcttaatagctaaagtgcggcataatgcgagctttatgtggatgatggga

SEQ ID NO: 392237 - DNA, 439 bp, Oryza sativa
  unsure (1)..(439): unsure at all n locations
ctcctctcgcttccttttcggcttcttggagcgagcgagcgagcgagagagagagagagagacccacctcaccttctcctcctgtcctcttcctcaccctggtcccgctcaagctgagcctttcccagtgcaagattcaatctgctgctgctgttcttgagatttgcccggctcggatttcttgcgtgcagtttctttgttgatctggttggttcagattgatttgctgcaagtgcaaacctgttcttgggggggtttgatttgatgtggtgtgttcttggctccgattcggccgcggctcccggtgaagaaatccccaagtttgatgaggctctcgcactgtgagagtactggggccctcccctgtgctacatccctgnctcccaaatccaaagangaaccggcgacgcggccanaaatcaaggataancgccgccga

SEQ ID NO: 392238 - DNA, 1256 bp, Oryza sativa
  unsure (1)..(1256): unsure at all n locations
aaaaatttaaggttttgtaaaacgggggccaaagaatggaacttaaaaggcgcccccccaaagttattatattgcatacatgtgtatgtgaactctggttccatttaaatcggccgccctttatattttttttctttttttttttttttttttttttttttttttttttttttttttntgaggcaaaaattcagtagtctgcttttcttttttggctttttttttcttctgtacaaacacatcatacaatctacatgaatgaaaatgatggttgacatactccttttacatccacttatactgaaaactgttattctatacccatatattaaacatttaagtcatcagaaagatgacattaacattaagatataaaaactttatccaaaagattcatctctagagcactaatatacaagacacagacatattgtagatgtaatctgaattccgtggttgtacttcgttgtgacagggctggacaaactggaggcttgaaattgatcaacggacagaaacggttttcatctttcccgacttgtgcttgacaaggaaagcagctagcatacttttggtacggaggggagccttttggatttgacgccctcttgggttgtcaaaagaactaaatgacgatagatgcctgacaccaggttgatccttcangccaacattatgcatagcaaaatcagagctggccaagtttgtctgcagatgcttgggcaatggagatgttgatggtnccttacctctcgatgcaggttttgtancctttgtttcttctaggacaaattcagattggcgtgctccattggttttggagtttttctctgaagccaaatgccagaaaagggtttttgctgagggataaggtctaggccttgagtcaatatcagcatcagtttgcatctcagagaaagcctgcattcttttgttcgccaaagtcggtacaatgtaatgtttgtgatgtcttgtggcggttccggtcatctgctgctgcctaatgccttctttatccgtgtaagtttggcaggtgaggacttgctggttcaagcatgctactttcagctcaagagtggaaacttctgaagcctgttgttcatacaggtctgtcagtttgtaggcaactgtgccaaggtggtcaaccgcattcaccaaagccctcacagcataatccttcaagttgtctagaaccatctgcttctgctcgctgtggaggtacgacttctcgcagtactcccacgccgagtagagct

SEQ ID NO: 392239 - DNA, 545 bp, Oryza sativa
tcgttcatctcctccgatcccttcctttcctgccatcgagctagcaaagatgagctccccggacgcggctcgcaacgtcgtcggcatcatcggcaatgtcatctccttcggcctcttcctcgcccccgtgccgacgttctggaggatctgcaagaggaaggacgtggagcagttcaaggcggacccgtacctggcgacgctgctcaactgcatgctctgggtgttctacggcatccccatcgtccacccgaacagcatcctcgtcgtcaccatcaacggcatcggcctcgtcgtcgagggcacctacctcttcatcttcttcctctactcccccaacaagaagcgcctgaggatgttggctgtgctgggcgtggagttggtgttcatgctggccggtgattctgggcgtgctgctgggcgcgcacacgcacaagaagcgttccatgatcgtcggcatcctctgcgtcttcttcggctccatcatgtacttctccccgctcaccatcatggggaaagtgataaagacgaagagcgtagagtacatg

SEQ ID NO: 392240 - DNA, 637 bp, Oryza sativa
gtccagttatacacattaccaggtatcattggagtcccgtctcgttggacatgaggactgggtgtatactgtagaatggcagcctcctacgctactaactgatgatgaagctcatcagccaatgagcatattatctgcatccatggacaagatgatgatgatatggaagccagagaaaaataccggtctttggataaattcagtgactgttggtgagttaagtcactcagcactgggattctatggtggccattggcagcctgatggcaaatccatccttgcacatggatatggtggatcgtttcatatgtggggggatgttggactgggttctgaaaactggcagcctcagatagtcccatctggtcattttgcacctgtatctgacttaacatggtcaagatctggtgaatatctgttatcagtcagccatgatcagacaacacgcatatttgctccttggagaagccaagttagcccaggggatgtgacttgttggcgtgaaattgctcgccctcaaattcatgggcacgatattaactgtgtggcattcattcagggtaccgggaaccaccggttcgttagtggcgccgatgaaaaggtctctagagtctttgaagctcctttgtcatttttt

SEQ ID NO: 392241 - DNA, 560 bp, Oryza sativa
attgaattgggccagtgctggcgagaagcgtggtgatacccctgactacaccatttttgtcggggattgggctgcagatgttacagactacctactacaagagacattcaggggccattacccttcggttaagggtgcaaaagttgtaactgacataatgacaatgcgttcacagggttctggccttgggtaccgtggtgaccctacagagcaggctcgtgcagtgactgagatgaatggaatgctgtgctcttccagaccgtcccgtattggtccagcggtaaataagaaaacaacaggggttcaggagagagtaccaaatgctcaaggagctcagtctgagaatgatcctaacaataccaccatattcgttggtggtcttgaccccaacgtcactgaagatgtcttgaaacaagttttcgccccttatggagaagtcgtccatgttaagattcctgttgggaaaagatgtggttttggtcactatgttaacaggccttatgttgagcaagcactgggagtgctacaagggaccttgattggtggcagaatgttagact

SEQ ID NO: 392242 - DNA, 322 bp, Oryza sativa
ccctcggcaacgtaacacaagagaagaagagatcgccatgtccaacgtgcccacctccctccgcgactcctccctcaccgtcttccgcctcgccatctccagctccgacccctggcccttctccctttaaccccatcaaacgcttcttcctcttccaagaagatcacaagcttcttcgtgttcttgttcttcttcggatcactcggttggtttcttggtttcttggtttcttggattgttgcgagatgcacgggaagcatcagcatcagcagcagggggggttgttggtgggtggcgccgaaggggtgcgtgacggtgaggt

SEQ ID NO: 392243 - DNA, 515 bp, Oryza sativa
  unsure (1)..(515): unsure at all n locations
tttctcctccccggccggtaggcagcaacaagctgtaagcacaagtatcgaaatggttagcggtgatgtaggagtagtagtgtactacctgctgctagtattagtggtggtgcaggggtgcaaaggcagcagcgcggtgcagggtgaaggtcggtggtacaacgagagcgaggccatcggtggtgcggcggcgtgggggaacgcgaaggcgacgtggtacgggcagccgaacggcgccggggcggcggacaacggcggggcgtgcgggttcaagaaggtgaaccagtacccgttcatggggatgacgtcgtgcgggaaccagccgctgtacaagggcggcaagggctgcggctcctgctaccgcgtcaggtgcaatcgaaaccccgcctgctccggcaacgcccagaccgtcgccatcaccgacatgaactacttccccctcttccagtaccacttcgacctcagcggcatcgcttcggccggcttggcaagccggccgngcgacgacttcgccg

SEQ ID NO: 392244 - DNA, 868 bp, Oryza sativa
cttaccacgtaccaacaatggccaccatggctccaaggctgctcatcgtcgtcgtctccgtcctcttcaccgccggcataatcgcctccgccgccgccgcgcgcgacctcaccgccgacccggccggccaggccccgccggcctacgacttcggcatcccggcaggcttcttcgtccccggcaccaacaacccgtacaacggcgatcctgcagcgtgggcagctgggtacggcagcgccgccgccggcgacgtcggcgggttcgggaatggtggggctggaggcagccgtcgatggtttgctccgacaaggggccatgcaacggcaagaagctgacctgcccgaagaagtgcttcgtctacttcagccgctccggcaatggctacgccgccggcggtggcggcggcggctgctccttcgactgctcgaccaagtgcgaagctacctgctgatcattttactacttcatttcctcacccatcgaatccaacgcctcctctggcatcagctcaatacttcatctatacacatcatcatcagctgatgataccgctccagatatctatctatctatctatctaatctacaggtttggtgcttgcttgctaatgtctactacgtacccatcttaatctgcttaattaattggtgcaaaatatatttctacctatatatgttcttaactaatcctgcatatatattctggaaaacggacatgcacatctgttttttttacttgttcaaatgctgcatgaaaggggttttcattacctctactgcagagactactacttgtgtgtgtaaccgtacctataaacttgtactccatcacgtaatgatcaatgaataaaggagcgtgtcatttttgt

SEQ ID NO: 392245 - DNA, 218 bp, Oryza sativa
tctgaagccgagccctcacagagaagaaaccctcgcttcgccgtcgccgctggccggccgccaccggcgatcaacctcgccgccgacgactccgcatccgcttccgccgcacccggtggggaatggcttcggcggtggagcggagggagcattcgcggaggtcggggcgctcgaggtcgcgctcgccggcgagggaccgtggctggccgccgcgcagg

SEQ ID NO: 392246 - DNA, 529 bp, Oryza sativa
gtgctctcatgcatatgtatggtcttctgctgctaccagcgctaccaagccaccaccaccacgtctccttactgcgaaaaccgccatggaaggaagttctgcaagccaggccaaggccttgttcaaagccactcttattggcctggccatcctatccatggtcacttgggtgccacacatgtattcctgcattaagatgttcttggttccggtcccttccgcggcttccaccctcgcgacaccgaggtgtttgttcatcttctccaacatcatcgtcatcttcctcgccagcgagttaaaactctccgagggggagaggcttcggcgagtctccgatccggaccaatcatggctccgatgcttccatcagatatagggttgaagctttcactccagctaccaagtcaaacgatgtgattgttcaccatgttgctgaagagccagctagcacggtaattgtacatgatgacagccctgcacagctagatcaatgtgaacaagtggttgctttatcaaccatgttcatgga

SEQ ID NO: 392247 - DNA, 683 bp, Oryza sativa
ttacaaaggagctcaaacgtgcccttttgacagctctgaggtgcatcgatttgaattctgagaagagaccaaggatggaccaggtggtccggatgttggactctaatgaacccattcctcaagaggaaagaagacaacgacagaaccacatctctaataattcagaaaccgagccattaagaggcaagagcagcagcggcaagagtgatgcccctgaaaatgagatgaggccacctcggtataagaatcgatcatttccccccaagtgaaaagtgaaaagcatactagagtggaagttatggagttacctgcgatgctctcaatacataatgaattggtcaattgttttgtttctcttttattatttctcttcacctgatcaatttttttgttccctgggaggctgggggagcggccattgctgttacacatatttgtatatttcttgaaacatgtacagtgctggtgtgtgatacatgtacagtagtttgtgtgtgatagatagttgaaggatgcacatgagagcatataagctattatttagaagctagtggctggtatggttgctggtgtgagaaagtgcatgaagaaaccaatgaaataactttttcatattttctgtatactctaagagtataaagaggcaaatgaaagaaaaattgactttcaaaaaaaaaaaaaaa

SEQ ID NO: 392248 - DNA, 1013 bp, Oryza sativa
  unsure (1)..(1013): unsure at all n locations
acagtgaaaaaacccaacaaaaatcgcagggggagaaaaaatggcgtnagaaatcagccccaaccgaaagaaaaggcggaattttttagccaagaaagcagcttttcttcatcttcctccccactctctcttgttcctataaggagaggagagaaggagagagaggaggtggaggaggagcaatggcggcctgggcatggccgctcgtcttcctcgtctcgtgctgctgttcttggacccagcggcgaatcttggttgctgcgaccactgacgccaatgatgttactgtcctcaatgcgctattcaccagcctcaattcgccggggcagctgcgcggttggcaggtgaatggcggtgacccatgtggcgcctcatggcagggcatcacctgctctggatcatcagtcacagcaattaaattgccgagcttggggctttcggggaatctggcctacaatatgaacaccatggagtccctagttgagcttgacatgagccaaaataatcttgggggtggccaaaatattcaatacaatcttccaaataagaagcttgagaggctcaatcttgctgggaaccagtttgctggaaatgtgccatactcaatttccacaatgcctaaacttaagtatctaaaccttaatcataaccaattacaaggaaatatgacagatgtcttttccaaccttccaagtttatcaacacttgatctctccttaaattctcttactggtgatctcccacaaagtttcacttctctgtcaagcctgaaaactttgtatctgcagaacaaccaatttactggatcaatcaatgtccttgctaatcttcccctggataatttaaatgtgggaaacaaccgttttactggttggattcctaatgagctaaagaaaataaatagtcttcaaaccgatggcaattcttggagcacaggtccggcaccaccaccaccaccattcacagcacctccaccatcacgcaaccgtaaaaaaagcccaggcagacactcc

SEQ ID NO: 392249 - DNA, 726 bp, Oryza sativa
ttcttttttccccaacgcgttctcaaccctactccatcccacttcgttgtcatctctgatgaatcttttctctcctgctgcaggctgcgcgtgcgcggaggaaaggaatctttatggagccaaaatttcgcagagataggaatggaatccttacgaagccaaaatttcgcagagaggaggatatctgcttgaggaaaaaaaggaccgggtctcccttcctgcatcagaaccgcgtgatgatgttaccgtttgatgtgacggaccttagtttgtccccgagattcaacaagatgaaggggccggtgggcaaggcgtcacttatttgcggaggaaaggaaacccatgatgccaaaattttgcagatcggagatggaggagattcagttcattgtgtgcaaaaaagacgactgatctccccctgcaaatgtgtacggaggaagcctatgattggtattacaactcgtattgatgagcactacaccatggtgtttttcgagatcccggcgagcgtggattcagcacaaggcccaatctttctttggaacagttgagtgttggccctggggacactgcggacttactgcggaaagtacttccaggcattcgtgatgcaagtaagacctttgctatccctgcgttgaagcaagtgtttgaggacagcattcgtccactacttgttttaaagggtttacttattcaccagccttttgataaattcatgaaaac

SEQ ID NO: 392250 - DNA, 484 bp, Oryza sativa
tctcaaacacaaccaatccacctccgattccttcatccgccgccaccgccgccgtcgccgccgccgggatcccgcccgcaaccgcaccgcggcggctccttcccttcctccaggtaccaaccagattgtgggatcttcctagagagcgctgttgtcctgcacgagtagaatagcagatggcgaggataaagccgaagcaattgctaattcaaagcaagacgaagaaggccccaacacggatcagttactccactatcgttacttggaacctaattgttatctttggttgcgctatccctctatgctacctacaggcattggcatcacaggccaatgctcgagactgaaatgggatctccctcgtgctgagcatgttggaaagatctgaaggattccacgaagactagtagaccaagctatgcgggtattgatactgccaaaggctcaattactatcgaaatttacaaagatgcttctgctgatg

SEQ ID NO: 392251 - DNA, 778 bp, Oryza sativa
  unsure (1)..(778): unsure at all n locations
ctcccctccccttccgcccgcatcgccgccgcgccgcgccgcgtgcgaatctccggcgaggatcgagggcgcctctggtcccgtctggtggtcggtcagccatgtcgctccgcgtgctgaacccgaacgcggaggtgctcaacaagtcggcggcgctgcacatgaacatcaacgccgccaagggcctccaggacgtgctcaagaccaaccttggccccaagggcaccatcaagatgcttgtgggtggagctggcgacatcaagctgaccaaggatgggaacactctcttgaaggaaatgcaaatccagaacccaacagctatcatgatcgcaaggaccgcggttgcacaggacgataccagcggtgatggcacaacctccactgtgcttgttattggggagcttatgaagcaatctgagcggtgcattgatgaaggcactcatccacgttttttggttgatggttttgatgttgcccagagagcaactcttgaatttctcgagaagttcaagacatcagtngtcatgggcgatgaacctgacagagagatcttgaaaatgatagcaagaactactctaaggacaaagctgtncgaaggattggctgatcagttgactgaaattgttgtgaatgcggttctatgcatccgcaaacctgatgaaccaatcgatctttttatgggttgaganaatgcacatgcgccaaaaaatttgatgttgaaacacgtttgggttaagggtttggncttggaccatggttctcggcnccctgatataaa

SEQ ID NO: 392252 - DNA, 678 bp, Oryza sativa
cctcccttttcggccgctgcttcacaccatccgcatcctccccgctcgccgccgcgccgctccaagtttctttcgtgaggagttgatcgaggagttggggttgagatgggccagatccagtactccgagaagtacttcgacgacacctacgagtacaggcacgtcgtccttccgccggaggtcgccaagctcctccccaagaatcgccttctctccgagaacgagtggcgcgcgatcggagtgcagcagagccgcgggtgggtgcactacgcgatccaccggccggagccgcacatcatgctgttccgccgcccgctcaacttccagcagcagcaggaggcagccgcggctgcagcggcgcagatgctgcccaagtgactgccccctccacgcggcgatggcggcgacccggggttgaaatgtgcgaaaccctagcccctttacatctcttaaagggggttcgcgatactgctaatttactttcgttgttagttggaaatcttagtgatgttggtggtgtccaccttgtgttcgtgagaatgcccgagtaggaactggcatgtaaacgtctgtgttatcttggatacttttcattgctaagctattatatgtgatgctggtactgttgttaaactgttacaacttactactactatatgtgacattctgattgtggtc

SEQ ID NO: 392253 - DNA, 1192 bp, Oryza sativa
cggtcgcgtggggccatttctcccccccatctcctctctgcttgcgagcttgtcaaccgcgcaaaggttcatatatacaccgatcgaaatcgatcggtgtagagccacactcttggagtcgatcgttcgctggttagctaactaagctaagctgagctgccttgctctcttcgacgatcaggttgcttggtttgacgagctgacgatcgaggagaagaggacggcgaacgtttttttgcaggatcagtactagggttcatcttggagaaccaatttgattcgatagaacgagcgagtcgaagaagatggtgctcgcgagcacgccgaaggtggtgctgggatgcgtggcgttcacgatcttctgggtgctggccgtgttcccgtcggtgccgttcatgccggtgggtcgcacggcggggtccctcctgggcgccatgctgatggtgctcttccgcgtgatgacacccgaggaggcgtacgccgccatcgacctccccatcctcggcctcctcttcggcaccatggtcgtctccatcttcctggagcgcgccgacatgttcaagtacctcggcaacatgctgtcgtggaagagccgcggcagcaaggacctcctcttccgcgtctgcgtcgtctccgccgtcgccagcgcgctcttcaccaacgacaccacctgcgtcgacctcaccgagttcatcctcaaggtggcgcgccagaacaacctcccgccgcagccgttcctcctcgcgctcgcgtcgagctccaacatcgggtcggcggcgacgcccatcggcaacccgcagaacctcgtcatcgccgtcgagagcggcatcacgttcggccagttcctcctcggcgtgttcccggcgatggtcgtcggcatcctcgccaacacctgcatcctcctctgctacttctggaggtacctctccgccgaccgcgaccagctcgagggcggcggcggcgcgcatggtcccgaggtcgtcgccgacgaggaggtcacctcgcaccggttcaccccggcgaggatgtcccacgcgtcgtccgtcaacgacagcgactgcatcagcgagcccatccgccggagcgagagcatgaaccgcgccgacgcgctccgcagccggagctacaactccgagggcgacatccaggtcgccatccgctcgctccgggcgtcgagcctgtcgcgcgagat

SEQ ID NO: 392254 - DNA, 599 bp, Oryza sativa
ttcgcgccgccgccgacgccgacgacgacgaagacgacggcgagcgagagcgcgcgcgactcccactccgacgatcttgaacttgtgtgtacgctattatcgtccgtcgtcgtcgtcgccgtcgttgtattgtgttggcttttagctatcactccccttcgtcctcggcggccggccggacgtgctgctcgatcgatcgaacgccggcgggctccgccgccgccgccgtcgtgattgagtttttgcaggatcagcactagggctcatcttggagaaccaatttgattcgatagaacgagcgagtcgaagaagatggtgctcgcgagcacgcccaaagtggtgctgggatgcgtggcgttcacgaacttctgggtgctggccgtgttccgtcggtgcccgtcatgccggtgggccgcacggcggggtccctcctgggcgccatgctgatggtgctcatcctggtgatgacaccggacgaggcctacgcctcaatccaagggctcatgattcactccctatttagcgccagggccggctccatcaacctggagtgcgccgacatgagcaatgaccttaggaacaagctgctgcggaagagt

SEQ ID NO: 392255 - DNA, 920 bp, Oryza sativa
agttgctcgctcgctcgctcgccccctgccacatccgcatcctgcaccagatgcgcccgccggcgatgctccgatggcccgccgccgcggcggcgctcgcgctcgtcttcctcctcctcatcgccgccgcgccccccgccgcggccttctacctccccggcgtcgcgcccaacgacttccagaagaaagatccacttcaagtgaaggtgaacaagctgtcatccacaaagacacaactcccctattcatattactcccttcctttctgcaagccagatacgatagttgacagtgcagaaaatcttggagaagttctacgtggtgatcgcattgagaattctccttatgtgtttgagatgagagagcccaagatgtgtcagatcgtctgcaaagcaaccattagcgataaacaagcaaaggagctaaaggaaaagatagaggatgagtaccgggtgaacatgattcttgacaacctcccgctagttgtgcctattgcaaggccagatagggatgctcctgtttttcagggtggatatcatgttggtgttaagggccaatatgctggaaccaaggatgagaagtactttattcataaccacctgccatttttagtgaagtatcacaaggatgaaaattcagatctctctagaattgttgggttcgaggtcaaaccatttagtgttaaacaccaattcgaagagaaatggaatgatgcatacactcgtttgagcacatgtgatccccatgccaacaaaatagtaataaactcagatactcctcaagaggttgaagctgggaaggatatcatattcacatatgatgttggctttgagggaagtgatatccagtggggcttctcgctgggacacctatctgcttatgacagatgatccaaatcccctgggtccccaattgtgaac

SEQ ID NO: 392256 - DNA, 555 bp, Oryza sativa
gcaaaagcccaatccctgatttctgctgaggcgatacctgtactacaaatgcttatgaagacatgtcctcccagttttcacgagagagctgatagcttgctgcagtgcttacctggttgcctgacagtgaccatcttacgtgggaataacttaaagcagacaatggggagtacaaatgcattttgctgcctgcaaataggaaatgggcccccaaggcaaactaaggtggttaacaacagcatctgcccagtatggaatgagggtttcacttggttatttgacatcccaccaaaggggcagaagctatacatcttgtgcaaaagcaaaaacacgttttggaaagtcgacactcggtcgagtcaccatccagatcgacaacgttgtcaccgagggtgtatacagtggtttcttcaagccttaaacatgatggtggcaaggatggctcgagaacactagagatagagattgtatggtctaataggccattcaatgacattatgtagcagtgctgatttgctctcaccaatgttatagttttggccttaatgtaattag

SEQ ID NO: 392257 - DNA, 774 bp, Oryza sativa
  unsure (1)..(774): unsure at all n locations
gacgttttgaagtatgttgcttcgcaatcaccaggtcagaggtcaagtcaacaaccttctcaggagccgcaacaaccaaaacaacagcaggcaccagtacagcagcagccgacgcaaaaacaagcaccaactgttttgcgcagatcagcatctattgctgctcggcaagctgcaatggcacagcagtctcaggatgccaagacggttccatcttcccccaagatcaagcgccaagcatcaacaaaagctgccacctgtggccatcaacaaagttgagccggagcctgcagctccgtcaacaccaaaatctgatgcccgaacgcaccaaagaaaaatgaggcggcgccagcttcccttgccaagtggccaactgccagcaacaaaggcccgatgttaccagcattctggaacctagtggctccacttccctggaagcccgaagaagctggacaagatgggccattgacgaggctgatgatgccgtagagggcacagaagagggtgatnctggtttccaggtgagacatgggggggggggaaganccaattgggaaggagacgattccgtggtggacttcggcggccnaaggttnaagggaggcgtactgnnttcttgnaggatccctggcagggaaattttaaccaggnatcccattctttttnggttgncatggttggggcngtcaattttcctttttaaagttttagaatngccangttgtttggggcatttngggaattggttggccaaatgnccgnctgttnccaaagttt

SEQ ID NO: 392258 - DNA, 486 bp, Oryza sativa
tgctccactccctgaagccgaagaagctgacaagatggccattgacgaggctgatgatgccgtagagggcacagaagagggtgatcctgttccaggtgagacagtagaggagagaccaatggaggagacgatccgtgtgactcgctccaagctaaggaggcgtactgcttctgaggatcctgcaggaaattaacagcaatccattctttttgttgcatgttgtgctgttcattttctttttaagttttagattgtcatgttgtttggtgcatgtgggaaatgtgttggtctaattgatcgttctgttgcccaagagtttgtcatctcgttttctgtgttgctagcatgtttgtgtgcttggaagttgtaaatagcaccgtgcatgtatgtatatatcaattggtggcatggcgaggaatgcctgtatcttgaaacattagacatttcaatcaggtcattacatgagcactctctctgttgtctgtt

SEQ ID NO: 392259 - DNA, 1072 bp, Oryza sativa
  unsure (1)..(1072): unsure at all n locations
cccaaatatcttgcagtgaaaaaggttaggaatttgagggttcttggtaatcttgaagtgaaaaaggtgggatatttgaggggctttgtggctgtattatttgggggaggtgtttgcgtcatggatgtgtctgtcccaccaaccaattatccgaaatctttatcctcgattatcaaatgccatcgtcgtcgtgcggcaataaacaattgccattcagtcgtctcgcatccgccgctctcgcactcgaaccaccaccaccgctcgctgcgtgtgagatccagcgccgccgtcgcgccgccgctgccgccgccgctggtggtgccgatgacgacgccgaagccgagcccgacgatccggaggctggacgtggcgtcgccggtgccggcggacatcgacatcgccaacgccgtctcgccgctccccatcgccgacatcgccgcggagctcggcctgcgccccgagcacttcgatctctacggcaagtacaaggccaaggtgttgctgtctgttcttgatgagttgaaagggcagcaggatgggtactactggggtggtcggcggcatcacgccgacgccgctcggggagggcaagtcgaccaccaccgttgggctgtgccaggcgctgggtgcgtttcttgataaaaaggttgtcacttgcctccgtcaaccatcacaagggcctacttttggaatcaaggggggtgctgctggaggtggctacagccaagtcatacccatggatgagttcaatcttcatcttacaggagatatccatgcaattacagctgcaaacaatcttcttgctgctgctatcgatacaaggattttccatgaggcttcacaatcagacaaagcgctgttcaatagactatgtccgccaaacaaagaaggaaagaggcgctttgctgatgtaatgctcagacgcctgataaagcttggaatctcaaagacagatcctaaatgagcttactccagatgaagttagacgctttgcaagacttgacatagaccctgaatccattacttggagacgggtcatggatgtaaatgacccgttcntgagaaaatcact

SEQ ID NO: 392260 - DNA, 710 bp, Oryza sativa
ctctatacggcctccggatcaagtcgtacgaggactccaagtcgcagctgagggcgaccaagttcctgtacgacggcatcaccatggacaacgtgagctacccgatcatcatcgaccagaagtactgccccaacaacatctgctccgcgtccggcacgtccaaggtcgccgtcaccgacatcgtcttcaagaacatcgtcggcacgtcggcgacgcccgaggccggcacgctcaactgcgccaacaacctgccgtgccagggcatccagctgcacaacgtcgacctcaagtacgccggccaagggaacaccaccctctccgtctgcaagaacgtcgccggcaagtccagcaacgtcgccaaggagctcgcctgcgtctgattttcatcttattatactactcttccgtttcatattacaaagtcatttgtttttttttaaagccaatttttttcaaagtttgaccaaagtttttttaaaaatatagtagtattttcaatatgaaaagaacatattatcagaatatatttcatattggatttaattagactaatttaatattttatatgttgctatatttttttataaatttgtttaaactaaataaaaattgactagaaaaagtcaaacaacttataatatgaaatggagatagggggagtaattgtcgtctgatatatagttgaagttaatcatcgttcccttcgtaca

SEQ ID NO: 392261 - DNA, 836 bp, Oryza sativa
cggtcttttgggcgtttgcactgacatgatcaccatttaccagggaaactggaggtcactgaaattttcaacttttcacaagatgatttgctgactgaagacatgatggttcttgatacacatggggaagtctttgtttggatgggtcagtgtgtggatgctaaagagaagcagaaggcatttgaaattggccagaaatatgcagaacatgcggcggccttcgaatctctttctcctgatgtgcctctgtacaaagtcgttgaagggaatgaaccatgcttcttcagaacttacttctcctgggataacacaagatctgtgattcatggaaattcatttcagaagaagctttcacttcttttcggaatgcgctcagagagtggatctaagagttcaggtgatggtggaccaactcagagggcatcagcattggctgctctttcatctgcattcaacccatcttcccaaaagaataagggtaatgataggcctaaaagctctgatggtggacccactcagcgcgcttcagcaatggctgccttaacatcagcgttcaatccatcagcaaaacccaaaagcccaccacaacgtgcaggtcaaggttctcagcgagcagctgctgttgctgcgctgtctaatgttttgactgctgagggttcatctcaaagcccacgcataggtaggtcttccccaatggcaggtgatgcagatacagctgaactaactccgtctgctgcattccctctgtctgaaggagcatcagaatttttcgcttgtaaagatgccccaggagatggggcattatctgagggagggcgaactgagcctgacctatc

SEQ ID NO: 392262 - DNA, 494 bp, Oryza sativa
gttgctgtcaaacattgcaaggagggaactgagagctctgccttttggtttgctcttggtggaaagcagaattacacaagcagaaatgccacacatgatgttgttagagagcctcacttgtatacattctcattgaggaatgggaaactggaggtcactgaaattttcaacttttcacaagatgatttgctgactgaagacatgatggttcttgatacacatggggaagtctttgtttggatgggtcagtgtgtggatgctaaagagaagcagaaggcatttgaaattggccagaaatatgcagaacatgcggcggccttcgaatctctttctcctgatgtgcctctgtacaaagtcgttgaagggaatgaaccatgcttcttcagaacttacttctcctgggataacacaagatctgtgattcatggaaattcatttcagaagaagctttcacttctttttggaatgcgctcagagagtggatctaagagttc

SEQ ID NO: 392263 - DNA, 769 bp, Oryza sativa
  unsure (1)..(769): unsure at all n locations
tntcccaccaccatcgccattgccaccacctctcctatatctcgccctccccctcctccctcccacgccattcgcctccttcttgctgccgccgccatccccggttcggttctctcctcttctttagatcagttaaaataaatggctgacgcagaggacattcagccccttgtctgtgacaatggaaccggaatggtcaaggctgggtttgctggagatgatgctccccgtgctgttttcccgagtattgttggccgtccgcgacatacaggcgttatggttgggatgggacaaaaagatgcttatgtcggtgatgaggcccaatccaagaggggtatcctaaccttgaaataccccattgagcatggaattgtaagcaactgggatgacatggagaaaatttggcaccacacattctacaatgagcttcgtgtagcaccagaagagcatccaattcttcttacggaggctccacttaaccctaaggccaacagggagaagatgacacaaattatgtttgagacattcagcgttccagccatgtatgtcgctattcaagccgtgctttccctctatgctagtggacgtactactggtattgtcttggattctggagatggtgtcagtcacacagtcccaatctacgaaggttatgcccttccgcatgccattctccgtcttgatcttgctggtagggatctgactgattccctcatgaagatcctgactgagaggggttactcattcaccacctctgccgagcgggaaa

SEQ ID NO: 392264 - DNA, 560 bp, Oryza sativa
  unsure (1)..(560): unsure at all n locations
tttggtgacctgagcgactnggnctcgtctcctcgtgttctcgccgccgccgcgagcggaatccccctctctccggctaaacctcgccgccgcggcgaagcaaaagcacctccctcttcgccgccgcccgccggcaatggcggggctgtcgctgcggtgcggcgactgcggcgtgctgctgcggagcgtggaggaggcgcaggcgcacgccgaggccaccaaccacgccaacttctccgagtccaccgaggccgtactcaacctcgtctgcgccgcctgcggcaagccctgccgctcccagaccgaggtggacctgcacaccaagcgcacgggccacacggagttcactgacaagaccatggaggcggccaagccaattgatctcgaggcggcgccgccgaagccggccggcgaggccatggatgtcgatgcctcggcaagcgccgagccacaagagatggtggcgccggaggttaacaaggagatgctggcggacctcgaggcgatggggttcacgacggcgcgtgccactagggcacttcaattttctggaatagcac

SEQ ID NO: 392265 - DNA, 929 bp, Oryza sativa
  unsure (1)..(929): unsure at all n locations
ggacggtnggccntngtaaaggnagatcctnttagtccatttggtgggatagttnctttcaatacgacaattgatgaggatcttccaaaanaaatccgtgaattcaggagccctacagatggacanacgcgaatttnctacganattnttgttgcacccggctatacagaaaagggtcttgagatcctcaaagggaaatcaaagacattgaggatactggaggcgaagagaagtggaaaagggatgctatcactcaggcaagtcagtggtggctggttggctcaagagtctgatgatctaacccctgaagatatcaccttcacaacagtgtccgagagagctcctcaagacagtgagctctctgatgccaaatttgcctggctttgtgtaaagcacgtaaagagtaacgccattgtgatagccaagaataactgcatgttaggcatgggaagtggccagccaaacagactggagagtctgagaattgctttcaggaaagcaggagaggaggccaaaggagctgctttggccagtgatgcattcttcccattcgcttggaacgacgccgtggaggaggcgtgccagaacggcatcggcgtgatcgcggagccgagccccagcatcagggacggcgacgccgtcgactgctgcaacaagtacggcgtctccctcctcttcacgggggtcaggcacttcaggcactgagctagctagcctcatgaaccttgatcttcctgcaaaaaaaggaaaaaaaacatgggcatgtcagatcgatcgctctttgtgtatcacaagagcatgcagatcgaccagcgtttgatcaccttgagaaaaactcttgacggcttgtactaggctgcctgccactggtgtgacagaatttgatcagcttgacattttgcaataagattcatggtgataataagatt

SEQ ID NO: 392266 - DNA, 551 bp, Oryza sativa
  unsure (1)..(551): unsure at all n locations
attgttacatccccttctcctcccccgtctcctggctccggtcggtttcccaacccgagagggcctcgccgccattgccgcctcgctcctcgtctcgcgggaacgccgccgccgccgccgccgccattagggcttagggctcaggaggctcgcggcgatgtggtggagggccgcgagggctcgccggcggatcgccggggcgcgggcggcgtccacgtcggcggcggcggcgggggagaagagctgccgcgccgtggtggtgcctcggttcggagggccggaggtgctggaggtgaggcagggggtgccggtgcccgatctgaagccgggggatgtgctcgtgcgcgcgcgggccgtctccatcaaccctctggacctgcgaatgcggtctggttatgggcgttcaatatttgagccagtcctacctctgatcattggccgggatataagtcgtgaagttgcagctacagggacttctgtgtcgtcctttactattgggcaagaagtgtttngtgctttgcatccaacagccataagagggacatacaccg

SEQ ID NO: 392267 - DNA, 675 bp, Oryza sativa
gtgtatcgcacagcccactttaggccctgatgggaagataaaggagcctgagagcaatgtgcttttggcttcaatagagaacatgcagtatgctgtgacggtggatgttctacatactgtgttctctgcttttggtactgttcaaaagattgcaatgtttgagaagaatggtggaatgcaggccttaattcaatatccagacatcacaacggcagcagttgctaaacaagctttggaagggcactgcatatatgatggaggttactgtaagcttcatctgtcatactctcgtcatactgatctcaatgtaaaggcacatgatgagagaagcagagactacactgtttcatcagatcctagtgcacaaatgcaagctgcagcgcaagccccaggtcctagcactccaggagtggcatggcaaaacaccgcacccagtgcttccttttatggcagcactgcggcagcgactcctgttggacaagtgccagcttggaatccaaacatgcaggcaggtgcttttggatcggcatcgtctgcatacccaacccaaccaatgatgccaggatcagttccacactatccaggaattggatccagttccggagcactgccagtatcgttccaggcctcacatcagatgccacagtatggtgtacctgcccgggcggccgctcg

SEQ ID NO: 392268 - DNA, 1220 bp, Oryza sativa
  unsure (1)..(1220): unsure at all n locations
gaagaaccgaagaagcagcagagcagagatcacctgcgattgcgaggggaggaggcagcgatgtggcggcggcaagtgggtgcccttcttctccggcaccgatccacgccttcctccaccctccgccaccatctccccctccccgtccccgaccagagcccacctctcgcttccaatcttctgctccgcctcttcacttctcaatctggagaggggggtgatggtgccaccaagcccttcattgctttcgtcttagggggtcccgggagtgggaaaggtacgcaatgtgtccggatcgcttctgattttgggtttgctcatttgagtgctggtgaccttctacggagtgaaatttcaactggcagtgagaaaggggaggttgatcttaaatataataaaagaagggaagattgttccatcagagattactgttggaactgattagaaaagctatggaatcgagcgatgctaaaagggttcttattgatggtttcccaaggtgtgaggaaaacaggatcgccttcgaaagaataactggaacagaacccagaccttgtgattttctttgactgccctgaggatgagatggttaaacgtttactaggccgtaaccagggacgagtggatgataacattgaaacaatcaagaagcgcctaaaggtgtttgagagtctaaatattcctgttgttgactactacacttcaagaggaaaggttcacaagataaatgcaaccggaactgaagaagaaatctttggagcagtccacaagctgttttcctccttaaggttttgagacttttgtcttccacataagccaggggcctttggctggaaggacatcttgtaggaagacccactttgtctagcatccaaaagttctctctatttctctcgtgttcttttggaagcctcacgtctttattaaaaccattgtatatatgtttcactattatgaatgccacctggtaatggctggtgctgaccttcacgttatccttgtcatgccacagcatgaagaagcatgaacaatagtatgctattgttgcacagtgctgtaacgcattttggtcacaataatcctacaaaccttttgctattaccttgggtagtcctatggtaggcgaatgtagttcatgtatgaccactatgatgatgaccgatattaggaataatgtttgtttgcttgnnnnnnnnnnnnnnnnnnnnnnnnnnnnnnnn

SEQ ID NO: 392269 - DNA, 721 bp, Oryza sativa
  unsure (1)..(721): unsure at all n locations
cgcttctccaggctcctcttcttcctgctcttctccaccaccgcgctctactcctccacctcgtcgtcctcctcctccgccgtgctccgcgccacgacgacgacgacgaccaccaccacaaccaccacgaccaccaccaacaccttcaccctctccttccaagccaacccaaaccctcccccatctaacctctccaaccacactgccctggacgcggcgggggcggccgggcacacgcagagccacgtggtggtggggcggcatgggatacggatccggccatggccgcaccctgaccccgccgaggtgatgcgggcgcaccggatcatggagcgcgtgcaggaggagcagcggaggtggtatggcgtcaaggagccgcgccatgtcctggtcgtgacgcccacctactcccgcgcgttccaggcgctccacctcaccggcctcctccactccctccgcaacgtgccctacccgctcacctggatcgtggtcgaggcaggcggcaccaccaacgccaccgcgttcctccttgcacgctccgaccttaccatcgttcacatccncttccctgaccgcatgcctcatgactgggctgaccgtcacgcaaccgaaaatcgtatgcgcctccacgcactgcgggtgatccgggaaaggaagatggatggtgtgacttgtgtctgccgatgacagcaatgttcatagcttggagctgtttgatgag

SEQ ID NO: 392270 - DNA, 240 bp, Oryza sativa
cagaatgatagagtaaactacgacaatcatataaagtgctaaagtgtttttacattattttttaatttgatttgattattacaacatgatatcaactatctctactaaatgtatgtatgtttcttactagctagtagggaaacctgacaattgtactgctccagctatagagctcctttgtatatgatactgatagcgattctttgagcagtaaaatttacaattttacatctttctcag

SEQ ID NO: 392271 - DNA, 920 bp, Oryza sativa
ggaaaattccttatcaagaagagatggcattgatttgaaaaaagagtcttatcttcgcaaatcatattgcactttcttgcaggatttagggatgaggcttaaagtgcctcaagtgacaattgctacagccatcgtgttttgtcatcgttttttccttcgtcaatctcatgcaaaaaatgatagacggacaatcgccacagtttgcatgttcttggcgggaaaagttgaagaaacacccagacccctgaaagatgtcatactcatttcctatgaaatcatccacaaaaaggatgctgctgctgttcagcgaattaagcagaaggaagtatatgaacagcagaaggagcttattttacttggggagcgtgttgtgcttgtaacacttggttttggatctgaacgtgcaccatccgtacaagcccttggttgaagcaataaagaaattcaaggttgctcaaaatgcacttggctcaagttgcctggaattttgtcaacgatggggctacgcacttcactttgccttcaatttaagccccaccatattgcggccggcgcaatcttcctggctgcgaagtttctcaaagtcaagcttccatcagatggcgagaaggtctggtggcaagagtttgatgtaaccccacggcagttggaagaggttagcaaccaaatgttggagctctatgaacaaaaccgtgtggcaccaccaccatcacaagggaatgacactgaaggtagctctgcgagtgtggtcaatcaacgtgcttctgggaaagctccgggatcttctgaagagcctcccacccatgaaaatcacctagcgcccagacagtctagcacgccaggccaccagggctatgaccaccctcattctgagaagcagaactcaagccagagggtaccctagaatgatgcaaggggat

SEQ ID NO: 392272 - DNA, 1110 bp, Oryza sativa
gcgtattagtatataatgttgtgctgccctgtgccttagttgtagcgcctgtctttgtattgctcctcataccctttcttcttagctcttcctcccattccttcttcgattcattcctgtctccaattggaggtcacaattgcagcttgcagctagctcaaatttccattttttgtttggttgtctctcggcagcaaagcagatatagagcagaggaaagctaagctaaattagttagttagattactagtctctggcagctgggtgatcttaatttgatcaaagaagaagaagaagaagcaagtttttttagctcctgagtatattataggattaactactactaggatagtactcctatatgagaagaagatgatgcgcgggaaggatcagaaatttccggcgatgaagaaggagacggcggcggtggcgaaggaggaggtgtgggaggtgcggcccggcggcatgctggtgcagaagcggagcccggagtcggagccaccgccgggcggcgcgccggtgccgacgatccgggtgaaggtgaagtacaacggggtgtaccacgagatctacatcaactcgcaggcgtccttcggcgagctgaagaagctcctgtcggagaagacgggggctccaccccgacgaccagaaggtggtgtacagggacaaggagagggactccaaggcgttcctcgacatcgccggcgtcaaggaccgctccaagatgctcctcctcgaggaccccaccgcccaggccaagcgcctcctcgaggagcgccgccattgcaaggccgagcgcgccgccaagtccgtctcccgcgtcgccctcgacgtcgacaagctcgcctccaaggtgtcggcgctggaggcgatcgtgagcaagggcgggagggtggttgacgccgacgtggtggcgctcaccgaggcgctgatgaatgagctggtcaagctcgactccatcgccgccgacggcgaggtcaaggagcagcgccgagtgcaggagaagcgggtgcagaagtacgtcgaggccctcgacgccatccgtgccaagaccaagaaagcggcggcggcgccgcccaaggcccggccgccgcacctgccgccgagaca

SEQ ID NO: 392273 - DNA, 717 bp, Oryza sativa
  unsure (1)..(717): unsure at all n locations
aaaaatgtggtttttttgtgcaaaagagtatttaagtaactccaacattagattataaatagtgaacattgtaagtcactaggtgtatatcttttgtagaaaaagggagagagaaatgagtggttccacaagatacgcacgtgagaaggtacgcncggggggagcatccgatcgtgctccccctgctggacgcccggcaatgagcattttcgatataactggcttatgggaatgtcatcattcttgtcattctcatcgtatctatagttagctccaataacttgggactgcaagagagcagacagtcctgcgagctccaataacctggtaatgaatcctgacgaacagaccaagtaccagtcaacatcgacttgttgctgttacatcctgcctaggtggtgtacattacacaagaaattcaagagagcagacagtcctgcagctcctcccttccctgctaggctgttactcctctatggtcacctgtgcttgatttcatcatctgccttgatctcagaaaccatgtctgtcttcctgggaggattgctacagtccctgtctctgctcttccgggcggcctgatccgggccatcttggggatgatacttctgctcggcaagaaacgagagcgccgcgacgacgtcgctgatcatcggcctgttgctggcatcctcctgcaagcacatggaggcgatcgcgagagcttggtaagcccct

SEQ ID NO: 392274 - DNA, 254 bp, Oryza sativa
cttttctttgggcgcggagcgcgaaggacaaagggttgggttcttttgcttatgcgcgggctatggacgaaagtagtgaagaaagagatagaggtgcgacattgactgtggctgcggcttatttggagaccaagaagtaccgtgtagttttgcttgactctcctggccataaagatttttgtaccaaatacgatatctggcgcaacgcaagctgatgcagctattcttgatgttgaagcttgcactggttcatt

SEQ ID NO: 392275 - DNA, 404 bp, Oryza sativa
gcaaaaacgagagaaaaatagccaccacgaacccttcctcccccactgtctcccactttttcacgttttccggcgagcgcggcggcttgccatggatggcgtcggcggcggcggcggcggcatcctgtcgtacgagaagctggaggggtacgcgatctgggtcggggccagcgtggcgtcggccttcttcgcgtccatggagagctgctcctgcatccacgtccacaccgtcgacgacgagggcgacgactacgaccccgaggaggtcaaggaccgccccctaatgcttttccgtccccaggcccttcccgagtactactacgaccgatccgtcttcttcgtcttcttcgccaagatgtgatctcatctgctgctcccttttctgattcgttttttgattagtt

SEQ ID NO: 392276 - DNA, 475 bp, Oryza sativa
gcacatactacaggatggaaggacacagccagcccacgcaggcccgccgccgccgccgacatggacccttcggcgccgtccggtagctccgccgacgcctcggcgtcctcctcttcttccgccgtagaggacctcgccccgggcatggcggccatgagcctccaagaccggttcgagttgctgcggggcatcggcgaggagtgtatccaggaggacgagctcatgaatctgctgcagaaaaagcccgtccccatctgctacgacggatttgagccctccggccgcatgcacattgcccagggcattgtgaagacaatcaatgttaacaagatggtcagggctggatgcaaagtaaaaatttggatagcagactgggtttgctcagctcaacaataagaggggggtgtgatctaaaaaaaatccagactgttggacggtacatgattgagatttggagagcagctggtatgaaatc

SEQ ID NO: 392277 - DNA, 282 bp, Oryza sativa
cgatctcggacctaaatgcgccggcgacggtcgagccattgctgccagaggggaacctcccgtttgatcctgccaccagccccgctccgccatacaacactcgtgtctgcttttaccaatgccaagaacattgtgctgtgtgagggcaacttgtaccagatctggaggaatgcaagctgcactgtgactttgcagctgcccggaggcggtcaccgtcgtgtatcggagaatgaaatcttggttctaaggtactacccccgtcgccagccgagctgggatgct

SEQ ID NO: 392278 - DNA, 862 bp, Oryza sativa
  unsure (1)..(862): unsure at all n locations
aaatctcgcagcttcggtattcggggagcagcgccggctcgagcccatgtntgccgaccggagagctcgatggaacaaggagatcgactggctgctgtcggtcaccgaccacatcgtcgagttcgtcccttcgcaacaggcgtccacggatggaaccagcatggaggtgatgggtacccagcagcgcagagatcttctcatcaatatcccggcattgcgaaaactcgacgccatgctccttgagtatcttgacaatttcaaagatgaacaagaattctggtacgtaaaaaaagacgcagatgagggtgaaaagggcgatgcgccaagacagggcgacaagtggtggatccctacagttcgagtccctcccgagggtctgccagatgcgtcgaaaaaatggattctgcaccagaaagaccttgtagggcaggtgctgaaggcagccatggctatcaatgctgatgttcttacagagatggagatcccgggagagtacattgaaactctgcctaagaatggaaggtctagtcttggagactcgatatacaaaattataactgatgatcatttcgatcccaatgagctcttaagttctgtagacttgtcgacagagcacaagatcgtcgatctcaaagaccgaattgaggcctccgttgtaatttggcagaggaaaatttccaataagctttcctggggccccggtgttagcttggagaagcgagagcaggttgaagagcgggcgcaaactgtcctactcatcctcaagcaccagttccctggggttcctcagtcatcacttgacatcagcaagatacaatncaacaaggatgttnggattccatctttgggngcttcttccagg

SEQ ID NO: 392279 - DNA, 471 bp, Oryza sativa
ccgccgccgccgccatggtccaccacctccggaggcatatgatttctctcctcctccggccagcgcatcctcatcccaccgccgcaatctctcccctctcctccctccgccgcctcctcctcttctccaccaccgccgcgcccgtctcccccgaacccttcgccgtcgaggactacctcgtcgccacctggggcctcaccggagcccaagcgcgcaaggcctcgaagaagctctcccacctcaggtccccctccaagcccgacgccgtcctcgcctttctctccgacctcggcctcccgccccgtaagatcgccgccgtcccccccgaatacccgcgcccactctgcccctaccttatcagctatccttctcgttccatcttttacccccccccctttctgtttccctacttcttcttcctcccccctccttccttctctccccttctcctcctcctcctattctcccctc

SEQ ID NO: 392280 - DNA, 529 bp, Oryza sativa
tctgtattataacttaatgtcaatcagactggcttctatagagtgagctatgatgaggaacttgcatctcgacttagatatgcaattgaagccaacaaactgagtgcagcagacagatatggtgtacttgatgacacatatgccctctgtatggctggcaaacagaagctagtctccttattgcatttgattgctgcgtacaaggatgaatccgagtatactgtgctcgcccgtgtcatagatgtatagatctttctacccgacaaatgtttttgttagattgattctgttctaagcatttcaattcttggcttgatagacaagtctgagcattgtcgagatggtggctgttgctgctcctgaggggttgggcaagctgaaaaagttcctgattgactttcttgagccatttgcacagagaattggttgggatgctaaaagcggtgagggtcacttggatgcattattgagaggtacacttttaactgctctggcagaacttggccatgaagctacaataaatgaagct

SEQ ID NO: 392281 - DNA, 444 bp, Oryza sativa
ttgctccatgtgaactaggcaagtctctgcaaggattcagtcagctatcaaagcttaggacgttgaaagttcatcttttttggtggtcagatgctgaggagtgtcaaaattacgtgtcagctttgctatctagcatccttcatcatctatatttgaccggtggcccactgatcatggagaagtggttccccgctagtccttgcttcttccggaagctttatatcataggctgctacatctttaaggccccaaattggactagttttcttgtgtttccctctgacttacatcttttattttcatattatggtctcgatttattatttttattttcgattctttttccattttttgtttttttctacttctatccttccttttttttcctttgtttatctcctcctctacttctttttagtttcttttattcctcctttttttatt

SEQ ID NO: 392282 - DNA, 712 bp, Oryza sativa
  unsure (1)..(712): unsure at all n locations
tgtccttgcgccgccgccgctttttcttccctcccccgcttctcctcgccggcgacgacgacttgcccctcgagctctcccctatcctgcccatctcctggcgctccctccctcccttcgcttgcatcctcacgccatcgtcggccccgccttccccttctcatctgttcccagcgatggcatggggatcaatctgctgacccaggcccttctcttctagcagggggagtggaccatgcggagctagctctgggggcactgtgatagagatcgatggtgtggctgtgtggggatcgatctgttggcccatcgcctgattttgggtaggtgcactcaagctcaacatgaagttctcaatccagtgcgttgcgctcgaggtcggcatagccgccgccgccgcctctctccctcctagctctcccttacgagaagtgagggactgagtggagaccagagacagcgcaaccactcgatccggtgggatgggagcctgacctcgactttggttcaagttggtggcgtgcggctctgcaatttgaattgcgttcgatgttctacctccagcgttgatggtaatcccaagcacttgaaggcttgaagtcgatatggcacaattttgctatggggaagaagatgtgttgttgcaatgggccaaataatcanctcctttaatgntcgatccaatcatgatcttcctcccattctctggtct

SEQ ID NO: 392283 - DNA, 473 bp, Oryza sativa
atcaccttgagtccttgacgccgcgtctagggtttcttcgggccagcttgactgccgcgtcgcaggcactcctcgtcttcctcggtcgaagaaaagcggcggcggcggcggcggcggcggaagctgcccccttccttcaccccaaggcccaacagatcgaggacgctgacattatgttgcagctacctttctcccccaaagagagttggagttcaccagtcaattcagccattgggcacgtgcggaaaattaggaggagggctggtcattttctctcaagaagctccaagaataaggctgctcacagtaagggggggacagacaaccaagtcatttgatctcagggcgacttacattcgggctctattcaagatgtctgggctactctcagcgctgaagttgcatcaaaattgtctaaagccggtgtttctctggctttgtctgatggaaacataccgatatatgcatgctca

SEQ ID NO: 392284 - DNA, 600 bp, Oryza sativa
tcggttattgttgatatgcagaataacgttgtcatagaatttgaagataggaagttggttcctctccccccaccagatcatctgagaaactacactcctggggaaacgagaggtggtgttgatcgaagtgatttgaaacctcttattatcaatcaacctgagggcccgagcttccgcattaacggatattttgtggaatggcagaagtggaacttccgtattggcttcacccctaaagagggtttggtcatctattctgttgcatatgttgatggcagccgtggacgtcggccgatagctcataggctcagctttgttgagatggttgttccttatggagatcccaatgaaccacattatcgcaagaatgcttttgatgctggagaagatggacttgggaagaatgctcattctcttaagaggggatgtgactgtttaggtttcataaagtattttgatgcacacttcacgaattttacgggtggtgtggaaacaattgagaattgtgtatgtttgcatgaggaagaccacggaattctttggaaacaccaggattggagaactgctttagcaagaagtaggaggtcaaggaggcttact

SEQ ID NO: 392285 - DNA, 497 bp, Oryza sativa
  unsure (1)..(497): unsure at all n locations
ctacgcggggaaggttaggggggtaaagcctcgggagttgctccttagccgctgctgctcctcccgtgccgccgccgtctcgcgccagtgcgtctcttcctcgcgcggcgatcatggcggagcagactgagagggcattcttgaagcagcctaaggtttttctctgtcctaagaaaaccaccaaggggaagaagcctggcaagggcgggaataggttctggaagaacattggccttgggttcaagacacccagggaagccatcgaaggaacctacattgacaagaaatgcccattcactggtactggtatcaattaggggtcgtatcatagctggaacatgtcatagtgctaagatgaacaggaccattattgttcggaggaattatctgcactttgtcaagaagtaccagaggtacgaggaagaggcactccaatatttcctgcttacatttcaccgtgctttccgtgttaaagggaaggggatcaacgngatcaa

SEQ ID NO: 392286 - DNA, 460 bp, Oryza sativa
gcgctcctttcctcctcctcctctcctccttcctgcgtcgcctccctgatcagccgcagctcgttgccggccgttgttgcgcggccatggaggcgagcgccgggctggtggccgggtcgcacaaccggaacgagctggtgctgatccgggggcacgaggagcccaagccgctgcgggcgctgagcgggcaggtgtgcgagatatgcggcgacgaggtcggtcgcaccgtcgacggcgacctcttcgtcgcctgcaacgagtgcggcttcccggtgtgccccccctgctacgagtacgagcgccgcgagggcacccagaactgcccccagtgcaagacccgctacaagcgcctcaaggggagcccgagggtgcccggggacgaggacgaggaggacattgacgacctggagcacgagttcaacatcgacgacgagaagcagaagcagctgcagcaggatca

SEQ ID NO: 392287 - DNA, 815 bp, Oryza sativa
  unsure (1)..(815): unsure at all n locations
ggtattgttcgtgctgggggagatggcgaacatcacggtgctgaacttattgagtccctgagaagaatgcctatgcaggtttcttcaaagcaagaagtggtggatgctctagttaaagaacaattttctgtggatgttgcacggtgggtggctacaaatctccgacgaagcagtccattagggtcactatcgtcttcaagcttctcatggatttttgacctaaatggcatatctgacatgtacaagtcctatgaagagactcacttatgggggattgcagagaatggaccaaggggtgttcatattaatttccttaaagctgaaagaagtttgcatagatgggctcttgatgatctccagagaattcatactgctgaggaactggctgcagatgagggtggaggagttgaaatgcacgtgcttgaagatgctggacattgggttcatgcagataaccctgatgggctatttagaattctctcatcaaccttccgcatcgaggctaccataagagggatgcagaattgaggtgcagaagccccaaaacagcttctgcnctatgcagtactactgtacgtgcgtagggtagacaatacattacatgaagagagaagacacatgaaaggcatcaacacaaacttgtattcagttttgtagaatatgaagagctgaaaaaacttcagcgagggatcaagctaactgccaacattgttgtgtgtgggtcatttgttcattcatttgattcttcgatcttgtatgtaacatgacagtcggctgcagttcttggaggaaaaacctgtaaaaaaaaaaaaaaa

SEQ ID NO: 392288 - DNA, 1117 bp, Oryza sativa
  unsure (1)..(1117): unsure at all n locations
gttcttctctggtgatcatcatcatcatcaagtcctattaaacatctggagaatggctgaagaaaagaagaccccatgcctgaatgagcggatcctgtcgtcgctctcgaagcgatccgtggctgcgcattcctggcatgatcttgagattggacctggagctcctcaggttttcaatgttgttgttgagatcacaaaggggagcaaagtgaagtatgagcttgacaagaagactggaatgatcaaggttgacagggtgctatactcatcggtggtgtacccgcacaactacggtttcataccgcgaacgctgtgcgaagatggggatccaatggatgtgctggtcctgatgcaggaaccagtgattcctggctgctaccttagagccaaggccattggcctcatgcctatgattgatcagggtgagaaagatgataagatcatcgcggtttgcgttgatgatcccgagttccgccacttcaatgatctcaaggagctctcttctcaccgacttgctgaaatccgccgcttctttgaagactacaagaagaatgaaaccaaagaggtcgccgtaaacgatttcctgccaccggcaactgctcaggaggccatcaagtactccatggatctttatgctgaatatatcctgcacagcctgaggcgctaattaattatcatcgtcagatggagcaatcagaccctgatctcatgaagaaaataacaataaaagtctcttgggtgatgctctttttgagcagccatttttgcattatatttgaaacaagggataatattatgtttctgcatttgtgcagaatatatgcaaatcaataatgttactgttattgcttgcacgcaaatatgttggtccaactagcttcaggccgaatcatcgatgcatgaccggtgataaatggtgtaattttggactacaggtgataaatattgtatgatgccctgtgtaatatatgtgattgtatttggtttctaattggcgactgctaattgtatgacgtcaattttccagaatggaatagtagtatacctgttggtttctatgaaggcagtaatgttttgggcatttnnnnnnnnnnnnnnnnnnnnnnnnnnnnnnnnn

SEQ ID NO: 392289 - DNA, 503 bp, Oryza sativa
  unsure (1)..(503): unsure at all n locations
ttggctttcccaaacgcaaagtatggataggtttgccgttcagcccccacccagagccagcggactgcacctcgcagtccggcatggctggacagatgctaccgccgattgcgcttgttgctgtggccatctgtatcaccgcggcggcggcggcgaaggtgccggcgatatacgtgttcggcgactccacggccgatgtcggcaacaacaactacctgaccggcgccgccgtgccgcgggcaaacttcccgcacaacggcattgacttccccacgtcgcggcccaccggccggttcagcaacgggtacaacggcgtcgacttcttggctcttaacatgggattcaggcgcagccccccaccgttcctcgccgtggctaacaaaaccagcaacccattgttcagggggctccaggggaacaaactttgcctctgcaggatcaggcattctcgacttcaanaggtcatccatcatcccaatgagcaagcaattgcagcaatttcg

SEQ ID NO: 392290 - DNA, 640 bp, Oryza sativa
ccggctgcgaaaccaacgacggcaccccaaacctcctccgcctccgccgccgcttccgcttaacctcctcgctctccttgacccccccgcctttcaatcgggcgcggccgttcggggttcgcgtttttatcggatcgcctcgttcgttccctcccctcccctccccttcgcgcggttctttgccgcgccgcgggggttccgttccgtcgtggagcggctggccccggagccggaggccaaggggcgtggacggtggagggtaatccgtggtgttgagggagccttggtgaggtggtggttcgggctctcgcggcggcgtctttccatgggggagaggcggtccggctacagggacagagggggcggcgagcagggaaggtattggaggccaccgcgctctcacggaaatggaaatttctcagttccattgtgggaaaagaaattttgcactgatgcttgtgcaatcccatggggtaaactctgtgaaaccaagaaattgatgtcattgtacaaaaatgtggttgactgggatgattcagctgcattagaaactttcaacgatgcaaaagctcgtttctgtgctgtataccatggccaaccttgtgatatcccgttacctgacccaaacatgtatattgac

SEQ ID NO: 392291 - DNA, 795 bp, Oryza sativa
  unsure (1)..(795): unsure at all n locations
tactcactcactctcctctactagctcgtcgggatctcttctactcgtccaggcctccaagaatctctctgttcttgctgcttgcttggtggtggtggtagctttcataatggaggcggtggtggtggcggcgctggtgcttctcatgtcgtccagtctcgtcgcttcagattggtgcgtgtgcaggtcggatcagccacaggcggcgctgcagaagaccatcgactacgcgtgcggcgcgggcgcggactgcaactccatccacgagcaggggcagtgcttcaaccccaacaccgtggtggcgcactgctcctgggccgccaacagctacttccagaggaacagggccatgggcgccacctgcgacttcaccggcaccgccaccctcaccaccagcgacccaagtgtttctggctgctccttccctgctagtgcaagtggtgctggaacatcaaccactccgaccatgggaggcacaactggaacaatgaccccaggaaccttcacacctggaactggtatgggcacaaccaccggcaccggcatgggaacagggactactaccggcaccgggctgggcgggctagggccaacaggcacaagcagcatggacaccgcggcagggaatttgcacctaagagccgggctagccacttctgcacgtgctctctcgttcgttgcgatcgcatganggttgcacctttgaagcacactcattttcgtgattgaaganccattcgtggtncaggagcatgtgattngtgaaagaaaaaatggacagaacctgatcttttt

SEQ ID NO: 392292 - DNA, 593 bp, Oryza sativa
gatagagaaatatatatgaaggttttcacagggaagttggtctttttcttggccattatcctcttcgaaggatgcttggtcagatctcaaagtgttccatatgactactcagcaaacattgagtgcgtgaaggagccggagaagcctctgtacggcggcggtatcctgaaggagaccgaggctaaggggtatgccagcggcaagaagcttctgtcggagaatagcaagagcgccgctccggtgaagggctccgccctcaaggtcgacctcaagaaggaccaccactacgccttgtccgtgtggctgcagctctccaagggggaaggcgacatcagggccgtgctggtgacccccgacggcaagttcaacaccgccggcatgatcgcggccaagtgcggctgctggaccatgctcatgggcggcgccacctcctacgacgacggcaagggcgacatcttcttcgagaccaacgtgacggcggaggtgatggcggaagggatggcgctgcagcccttcagcttcgacgaatggaagggccatcgcgcggagtccgtcaagaaggagaggatgaagaaggtgaagatcacggtggt

SEQ ID NO: 392293 - DNA, 569 bp, Oryza sativa
ccggctggacccacgcgtgcggtctgtcttttctgagcgggagccacgcgcaagggttcagagcaaacgctcctcatacgacagagagagcgtgacagcgcgagggggttcggaggcgggagcgggcgacggcggcggcggcgggcgccagcgagcggcgaagggcgcgctggagatgaaggagaaggggtcgagggcggcggtggacgagcgctacgcgcagtggaagtcgctcatcccggtgctctacgactggttcgccaaccacaacctcgtctggccgtccctctcctgccggtggggaccccagtttgagaaggctacctacaagaatcgtcagcgtctttacctttcagagcagacggatgggactgtccctaatactctggttattgcaaattgtgaagttgtcaaaccaagggttgcagctgctgaacatatatctcagtttcatgaggaagcacgatcaccttttgtaaagaagtgcaagactataattcatccaggcgaggtgaacaggattagggagctttcgcagaacagtaagatcattgccactcataccgaca

SEQ ID NO: 392294 - DNA, 623 bp, Oryza sativa
  unsure (1)..(623): unsure at all n locations
cggggatgactacgggaggcgcgacgtggacgagaagatatcccccgacgagatcctcttcgagggctgcgactacaaccactggctcatcaccatggagttccccgaccccaagcccacccgcgaggagatgatcgagacctacctncagaccctcgccaaggtcgtcggaagttatgaagaggctaagaagaggatgtacgcttttagtacaacaacatatgttggttttcaagctgtaatgactgaggagatgtcagaaaagttccgtggattgcctggagttgtattcatattacctgattcatatctttatccagagacaaaggagtatggaggagacaaatatgaaaatggtgtgatcaccccaagaccacctcctgttcattatagcaaaccttcaaggactgacaggaaccgtaactatcgtggaaattaccagaacggtcctccacagggaaattaccagaacagtcctccaccatatggctcacagcaagatggaagaggctatgcccacggcagaattatgcagatcgtccaggttacagtggacgtcttgtggntaccaaagtcaaacaacacaatnccagggcatcaaatccacttggcaaggtcaaggt

SEQ ID NO: 392295 - DNA, 820 bp, Oryza sativa
  unsure (1)..(820): unsure at all n locations
ctcacttcaccgttgcaatggcctaactgctgctcttcggcatgctccttccttcccgttccacaaggaagagaacttctggttgcttctagcagatgctgcatcgaatgaagtttggttatcccagaaggtcagcttcatggatgagactaccgctataactgcagcatcaaaagctatacaagagacccaagaagcactaggtgcaagtgcaaaggaaatagggattgcgattagagaggcagtcgacagggtgaagaaaggcagtaggttggtaatgggcaagttccaagccccggccgagggcactcacaacctgacttccttctgtttgtgcgacgcatggataggatgtgacaccaagaccagcttgaagttgaaggtcctgaagcgcacccgggcaggaacaagaggtcatgtggctgaagaaggcccagtggcagaggatggtattgaggaagaagaagaggaggaagaagaggagtacgacgactacgagagcgagtacagcgatgacgaggaggatgagaacagcaaaggaaagggtaaggtcccgaacggagtagcccaccaaaaggcaaactcccatatagattctggcagtgatgattgatatagtaccttaagttgtccaaccatagacacttaacatcgttgtttttgccctttgtgcaccctgttgaaacttgaacatatcagttgtcaacttatagagcaatcggcgatagctaccaaagttaccatttttgtttaatattgttgtgttggatgaatgtgggntttaaaaaaaagaaaaaaaaaaaaacccgggaataccgga

SEQ ID NO: 392296 - DNA, 347 bp, Oryza sativa
acgatcagattccgagggcttggggctctcctacgatcccccggctcctccatacggtatatctctcggcggcatctcgaaatcctcatccgtttctgttgttgtttccgcggcgagtttgaggggtgtgtgttcttggagaggaagaaccgctcgccggtttgattcagggtacaggaacttgctacagagtgattggtgggtggataagaagccatgctacctgctgtgaagctctctcctggtccctgtggccttcgctggcaccattctacggtccagatccagcttcggtttcatcttgtctcatgcctcaaaccatccaaatttgtggtctcttcactcag

SEQ ID NO: 392297 - DNA, 574 bp, Oryza sativa
  unsure (1)..(574): unsure at all n locations
cgcaacgacaggctaatttaattagcaccagaaatatggcttcttccaagatgacgctgctccccgtcctcctcctcctcgccgcggcctcgccggcggcgctgggcgccttcgacgtgaaccagatgctcgccgacaagtcccagtacgggtcgttcctgaagttgctgacgcagacgaaggtcgcggaggagacgaaccggctcaagtcggcgtcgctgctggtcctccaagacaaggccatgaagccgatcacgtcgctccccgccgacaagcagcggatggccatggccaaccacgtcctcctcaagtacttcgaccccatccagctgggcgagatgaaggaccgcaccgccatgctccccacgctgctgtccaacaccgacaagaagctcggcgtcgtcaactacaccaaggccagcgacgggcagatgtacctgggcgcccccggcgcggcctgcgtcgccagctcgtcaggtcgtcgccggcgcccctacggcatcttcatcatggaggtancgaggcattctgccgccgngttcgttgcancggcggccccggccggcgcgcaagg

SEQ ID NO: 392298 - DNA, 484 bp, Oryza sativa
cactatttctctttctcccacctccaccggcgacgccaccggcgccggcctcctcctcctccgcctctctacggcagcctcgccgccgcgccgcgcagcgcagcgcagagcaacatggaagcgacgggcgccgccgtatccgccttctccaccgcgtcctcgtcgagtcccgcggcgcctagacacggccgtctcctggcgagccccgcggcgtggcgcagcgcacggacgctgccaccacgggccgtcgcctcctcccgcgcgacggtcctcgtctcgaaccctcctccgccgccgctgccgccgacacccgctcctgctgcggtcgcgccctccaaggtcgaccggtccgggcggttctgtagcccccgcgccgctcgcgagctcgcgctgatgattacctacgcggcttgccttgagggcgccgacgtggtgcggctcttcgaccgcggaatcagcgcgagaagagaacctggctatgttt

SEQ ID NO: 392299 - DNA, 538 bp, Oryza sativa
gagtggaatccattgatccattgtgtagtgggagagagacttctctacgcggtcacgggttccccagcggaggagaaagatagatagagagagcaaagagcaaaaaaatctctcttttttcttcttgttgtttctgcagttacctttgtcttgccttcaatgccaccgctttactgccggatctgaggaaagctcccatccttgctgagttcttgtgctgcttcttccacaattcttccttttgttgagaattttgccttccatctgcttaatcggtgacaaaggtggtgggatcttgcttctcttcctgcaagaaaaggctcgtttttttggtttcgccgtttgctgcttgctcaggcaggaggaaggcgatgctgtccttgctgatttcaagtctcctccttccggtgggccagtgagttttgttgctacttcaccttcgcttcgttgcgctctgcggagagaaagaaagcaaaggtggtggaaaagaagcgaaaattttgcttgcttcctctgcaaatctgaggaattttctcgc

SEQ ID NO: 392300 - DNA, 421 bp, Oryza sativa
gtttccactctcactggctcgcagtcgcacacactcccacgcctccgcgctcccgaccaccgtcgccatcatcatgccaccacccttgctcctcctcctcctcctcgccgccgccgccgccgccgtcgcgcccgcgcgggccaagtcgacgctggagtcctgctcctcttccaccgcctgcccagcgctgctctcctacacgctctacgccgacctcaagctcgccgagctggccgcgctcttctccgccgacccgctcgccatcctcgccgccaactccatcgacttcgccgtcccggaccccgccgaccgcatcctccccgcggggctcccgctccgtgtgcccgtcccctgcgcctgcttcgacggtattccgagggtcaccaccgtgcgctactttgcgcgcccgggcgacacgctc

SEQ ID NO: 392301 - DNA, 470 bp, Oryza sativa
tccgctacgacaacgttggcgttgggaaccgagtggagactagctagtgaagaccagaggcagacatggcgagatcactggcgcacgcgacgctgctcctcgtcgttgccgtcgtggcggcggcggcctgctggaccacggcggccggcgagaacgaggaggtggcggagatatgcaagaagacgtcgtacccggaggtgtgcattgccacagcggggaagcaggcgtccaagcacggcgccgccctggccccgctggcggtgctcaacatgcaggtggacgcgttcgcgctgcgcacggaggcggcgcggaagcacctgacggaggcggtgaagacggcgacgccgaaggcggcgaaggcgctggacctgtgcgacagcctgtacctggacgtcgaggacaaccttcgcgcggcgcgggcgcgccatcggttcaaggacgccgtcaccatccgcgccatgatgggcatg

SEQ ID NO: 392302 - DNA, 470 bp, Oryza sativa
  unsure (1)..(470): unsure at all n locations
gcacaacttgctcgggatgttcctttctctgctatatgctggtcaacactggagccgattcgaagaaagctgcttggtatcgtcggagaagaaggtgatgcagctagtgtgctgggtgcaaactttgcagctggctttgtagcaggtagtcttgctgctggtgctacatgccctctagatgttgctaagacaaggagacaaatagagaaggatacgcaaaaggcaatgagaatgaccacaaggcaaacattagctgatatttggagctctggaggtatgaaaggcttgttcaccggtgttggtccacgtgtagcacgagctggcccatcagttggaatcgtcatttctttctacgaggttgtgaagtatgctcttcatcaaaggcacatatcatgaccaagatttntgcaaaaggtagaaagatgtctgcaattttttaagaacacggcgtgctggggtctcccaagttt

SEQ ID NO: 392303 - DNA, 417 bp, Oryza sativa
  unsure (1)..(417): unsure at all n locations
tctaccaaagaagtggagtatagagatatttgcggcacatccttttcagtgccgtcataccgatgtgctgagcaagaaactgaatgctgttcatcggaaccttcatgctctgcccagactagcatgcgccctttccattctaggcataaccgtgatgataacattgacatgaatatagaggatatgatggttatggaagcgatttggcgttccattcaggagcagggaagtatagggaatcctgtctgtggcaactttatgcctgtaactgagccatctccgcgtgaacgccagccattcgttccagctgcttctctagaaatacctcatggtggtggattttnctgtgcggttnggcaatggctgagcaccagccacccagtatggacttctcttacatggctggcagcagncatt

SEQ ID NO: 392304 - DNA, 349 bp, Oryza sativa
ggatttttgccctggcaatggttggaatatgtgctcgatttatagctctggaactgaatgtccacatgaagcagtgtgttgaatactgtaagatctttgatcgagctttctgattctattctatacttccctcttatgttaatgtgggagctttctgattttgttctaatacttgcctcttatgttagtgtgaggatatgtaaatgtgacaccttttatgcttattgcagcttcacaaaggtgtatcccatgccttccattgattaccttcattggttacacatccatctagtcatgttgatcatatgtaatgccaatatctcttgcctcttggaagttgggactcaat

SEQ ID NO: 392305 - DNA, 884 bp, Oryza sativa
gctttgatgagattcaggcaagggttgcacagctgaagaaggaactctccgagactgattcgatgtatgatacagccaaattggctgagaggattgcaaagctttctggcggtgtggctgtcatcaaggtcggggctgcaactgagactgagcttgacgaccgccaactacggatcgaggatgcgaagaatgcaactgtcgcagctattgaggagggcattgttcctggaggtggtacagcgtatgtgcatctttcaactaccgtccctgcgatcaaagaaacaatcgaagaccatgatgagcgccttggtgcagacattattcaaaaggcgttggtagctcccgcttcactgattgcccacaatgctggagtggaaggggaagtggtagttgagaagatcaaggacggcgagtgggaagtcgggtacaatgcgatgaacgacaagtatgagaacttgattgaggcgggtgttattgacccagctaaggtgacgagatgcgcgctccagaatgccgcctcggtggctggaatggtccttaccacacaggccattgttgtcgagaagccgaagcccaaggctcctgttgctgagccggcagagggaacccttaccgtctaaacagtggtgaatttcttcagggtggctttgtttagatggttcataccaactgaaatggtagaatttttgtctgggagtttttggttcagatcaaccgaaaggtctagtgtaggattggtttccatttttgagattgaaggtgcaacctgcctgatctgaactcatatgtccatcaaagaaataatttgcatcattatcgtcatcttcggtttaaactttataaagtaaatcatatggtgtttcttcaaaaaaaaaaaaaaaaaa

SEQ ID NO: 392306 - DNA, 539 bp, Oryza sativa
tcggacgcgtgggttcctctgctcctcttcgtgtgccccccccccccctctcttctctccccccggccggggaagaaattttgcccccaaaataattttctgcacggacgatcaatgaaagggcaaaatttttctgcgcctccggttgaaggaagccgtgatccatgtcggacgagactggccgcaccattccaaagttcggcgcatgggacgtcaacaacccggcctctgccgacggtttcacggtgatcttcagccaacccagggatgagaagaagggccccgtcaacgtggacgccagcaccaggtcaaactctgacatgaaagactccaagttctattagtgcaacagagaagatcaacccctaccaccgcaggacaaactccgcatcaaagaagtggttttgctgtgtgtcgcccagccccacccaaccttgaggaagcataggaataccaaatataacatgatgctgctactgccgccttgtaatgcatatagtaatgattatacacacccagttgaaaatggccggtgttat

SEQ ID NO: 392307 - DNA, 421 bp, Oryza sativa
atccaacccaatccatccatggagctgtagcctgcatgcttccacagagaagagaacacttgggaggaggaggaggatcgagctgtagatctttctctccgttgtactcttctccttggcttggcttccggaccaaactaatcacggggggctttcgcttcgttagcaacgctggcgaagcttcttccggggttctagaaccttctagaaggagtgtggggttattggggaggccagcggtggtggctgctgctggcggcggcggcggtcgtcgtcggtgccggggcgcaggagacgtgctcggacatggtgccggcggcgccgcggcgcggggagtggatgtcgctggccagcttcggcggcggcggcggcgacgggcggacgctgagcacggcggcgttccaggccgccgtggcgagca

SEQ ID NO: 392308 - DNA, 513 bp, Oryza sativa
aagaaaacaagatcattccccgatcaccaaccgacgaaacccgcacccactcctccggccaccgacgccgcagccggcggcgcagagaggggagatccacgccgccgcgatgggccgcaagcgcgcgctcctggtgggcatcaactacccaggcaccaaggctgagctcaagggctgccacaacgatgtggaccgcatgcaccgctgcctcgtcgaccgcttcggcttcgacgaggattgacatccgcgtcctcctcgaccgcgactcctccgggacgcagcccaccggcgccaacatccgccgggcgctggcgcagctcgtcggggacgcgcgccccggggacttcctcttcttccactacagcggccacggcacccgtctgcccgccgagacagggcagaacgacgacaccggctatgacgagtgcatcgttcccagcgacatgaaccttatcacagatcaagatttcagagaacttgtgcaaaaggtgcccaatggttgcttatttacca

SEQ ID NO: 392309 - DNA, 552 bp, Oryza sativa
  unsure (1)..(552): unsure at all n locations
tgctggacattggaggagatacttggccattcaacctttgggaaagtgtatctgagttcagcaaagccgcgcgttcaactcaatgggtccaaaagtggtttgctaaacaaagtttcttgtgactcccagcaacctcttcaatctgctatcacctccaggataacaaatttggtaagtcatacctctgagcaaacaaaagaattgactataatagaaagtctcttctggtatttcttcatgatttattttgtagtgtatactttgatttttagagtaacaaacacaggctaccagggttacaaatagagttcgctctcgggtcaagacgggtcagaattgcgatgatcagttcggtggtgcctgtgagagccattattctgaacatgatgccagagaagagcagacatctagtgaaggaagcaccccaagtggggatgttcttcatggggcctttggtagtgaagacaattactctgggnagtcaagcaaaacaaacagtgatgactcaggagaaggaaaactggggcttcacaaaatttttagctcaacagn

SEQ ID NO: 392310 - DNA, 460 bp, Oryza sativa
caaagctccatccgttctgaaggctttgtggccgagttctcctcccccacctcctcctcctcctcctcctctgtagccgagctgaggccaacgcgagtagtgacattctcctgcaatggggtgcaagtcgtgcgagaagcccaggccgaactaccggaagggcctgtggtcaccggaggaggaccagaagctccgcgactacattctccgccatggccacggctgctggagcgcgctccctgcgaatgccgggctccagaggaacgggaagagctgccggctgcggtggatcaactacctgcggccggggcttgaagcacggcgtgttctcgccggaggaggaggagacggtgatgagcctccacgccgcgctcggcaacaagtggtctaggatagcacggcatctacccggcagcaccgacaacgtggtgaagaactactggaattcttacctgaagaa

SEQ ID NO: 392311 - DNA, 582 bp, Oryza sativa
gcttcgtccatcccctattaaaaccacgcgaggaagttttcttccccgtcgtcacctcccgcttcgcgaaccacccacccgtccgtttctcgcctcgcctcgcctcgccctccctctcttccttcttaacaatggcggtacaggcccagtacccttccagtctcctcttccacgatagaggtgagccggagaggacgaaggagatggacctgcccaggccgcagatgttcgccggagtctcgccggaggtgtactttcccagcggaggagcgagtgggattaatcggaggaataagcgctcgagggaggccattgccatggcgccgccgccggccaaggaggagttggtcaatctgttcacgctccagccgcagcagtctacgtcgtttgtcaacatggcgcagctccacaacagggtatcggcgtcgccgtcccgcgcgccggcggcactcgtgtccactggccttcgcctggcattggatgagcagcagcagcagcagcagcaacaacaagagagcaaacgcctgaaagccttgtgctactcgtcgtcgcccatgccgttcgtctcgttctcgacgagct

SEQ ID NO: 392312 - DNA, 659 bp, Oryza sativa
gtttgcatcaccagcgtaatgagtgtgtagcgccgcctctctcagcatcctgagctcgggcgctctactattcgttcgttcgatcattcagacgtccacaacaatttctgcgacacgaccgtcgacctacgtatgcggtggcgcggcaacatcatctgtggttaagaagaagaagaagaagatcgaagaaaaggaagaggatgggcaactgctgcgtgttcctgctcgtcggggcctacaagctgtggctctgccgaagctccaccggcccgcacacccgcggaggcaggcggttgatctgcgcctccaacatgcggtgcctctccacggtctcctccgtgtcggacgcggcgcgcgccgtgatgtcgaacgagccggcgaccgtgctgggcaacagcggcagcagcggcaacggcggcgtgatggcggcggaggagatgctgcggcggtacgagatcggggaggagctgggtcggggggagttcggggtgacgcggcggtgccgggacgcggtgacgggggagcggctggcgtgcaagtcgatcagcaagcggaagctccggagcagcgtggacgtggaggacgtgcggcgggaggtggccattatgcggtcgctgtctgcgcacgccaacgtggtgaggctccgggaggctttttag

SEQ ID NO: 392313 - DNA, 499 bp, Oryza sativa
  unsure (1)..(499): unsure at all n locations
gttggtccaaaacctgcttgtgcttcgttttgccaaccgcttgttcttgcctctttggaaccgtgacaatattgataatatacagattgtattcagggaggactttgggactgacgggcgtggtggatattttgatcaatatggaatcattcgtgacatcatccagaaccatttgttacaggttttctgtttggttgcaatggaaaagcctgtctctcttaagcctgagcacattagagatgagaaagtcaaggttctgcagtccgtgaaccctataaagcatgatgaggttgtccttggacaatacgaggggtacaaggatgaccctacagtgccagatgactcaaacaccccaacttttgcatctgtcgtgcttcgggtacacaatgaaagatgggagggtgttcctttcattcttaaagctggtaaagcactaagctcnnnnaaagcagaagtccgtgtgcagttcaaagatgttcctgnnnacatctttaaatgt

SEQ ID NO: 392314 - DNA, 503 bp, Oryza sativa
  unsure (1)..(503): unsure at all n locations
ataaattccaccaaccccccctcttctcgtctctcgccttcgccaccttcgaatcgaaactaatcccccacacctccgcgtgcctccccccaatctcgagcgcacggaagccgccgccaatggcgctcccgaatcagcagacggtggactaccccagcttcaagctcgtcatcgtcggcgacggcggcacgggcaaaaccacctttgtgaagaggcatttgactggcgagttcgagaagaagtatgagcctactatcggtgtggaggtccaccccttggatttcttcactaactgcggcaagatccgcttctactgctgggatacagctggtcaggagaaatttggtggactcagggatggttactatatccatgggcagtgtgctatcataatgttccgatgttacttctcggctgacgtacaagaatggcccaacttggcaccgtgatttatgcagggtctntgaaacatcccaattgtgctctgtggtacaaggttnatg

SEQ ID NO: 392315 - DNA, 560 bp, Oryza sativa
tcggttagatagcttattggagagaaaaaagggtcgaagcgcaagcaaatcgatcagcaacacaagatgaagaagatgcggatggcaatggtgagcctggccctggtgctggtggggcttctcctcgtcgccaccactgctaacgccaagaacgcccatgccggtggcttgaagaagggcggctctgaagctgaaggccgcgtcgtctacgccgacatgagattggtcgttccctccgactccgactccgcccccgcccccgcccctgcctccgcctcttgatgggccagcacctgcgccatcccccaacaattaattcaacatcgacctagcatatatatatacgtatatatttgttattttcatgtgttgttttcgcattttatataaccatgcgcgctctagttgtacatgcagccgattgatgtgcatttgatttatgcctgctcatttttatttctttctttttatttacgttaaatgaaacactttctccatgcatacatgggttgttcttattttatttattataaggatatatatatatatgcgcattcagt

SEQ ID NO: 392316 - DNA, 594 bp, Oryza sativa
  unsure (1)..(594): unsure at all n locations
ttatgaactccttcctgctggtgatgacgcaatatctcgtggagtgaatgggatgaagctctatatggtcgcaccatttttgcagggtctaaaagcctggatagccacacatcgtcacccacagtatcagaaatcagacacgtctgctagaggtactgtgtggaaagcgaagaattcctcaactggagcggcgcctgttgagaaccccgttattactagaacaggatctgacccacaaactcttgacagccgcccaggtaaaagcttccgaaacttcaggttcgacacagcgagtatcctgcagtccatggaagcttccttcctacgtacctaggagcctgacaaagcatcaccccatgtgtgtatgcttgatgtgtatagactatgtaagccaagggcgtgtcttctgttgttaactcagctttttcttcacttttctagttgtatctgtaatcctgaatgcaacagatgcttctaccattgtgataatatccctacatttcgtgcacatgaatgttttttattttgtccnnnnnnnnnnnnnnnnnnnnnnnnnnnnnnnnnnnnnnnnnnnnnnnnnnnnnnnnnnnnnnn

SEQ ID NO: 392317 - DNA, 774 bp, Oryza sativa
tttattagtacatggccaatggcagcctcgagaaccacctcttccgacgttcatgcaacctctcatggacgacccggatgaagatcgccttggacgtggcgaggggcctcgccttcctccacggaggcgaccggccgatcatctaccgcgacttcaagacctccaacattttgcttgacacagatatgaaggcgaagctgtcggatttcgggctggcgaaggaggggccgcggggagggaagacgcacgtgtcgacgagggtgatggggacgtacggctacgcggcgccggagtacgtcgccacgggccacctcaccgcgatgagcgacgtctacggcttcggcgtcgtcctgctcgagatgctcgtcggccgccgcgcgctcgagccgccggccgccggctgcagcaagtgcaacctcgtcgactgggcccgccccatcctcatccggcccaagaagctggagaggatcgtcgaccgccggatggcgctgccggcgccggcggcggactacggcggcggcgtcgacgccgccgtcgagcgggtggcgcgcctcgcctacgactgcctcagccagaaccccaaggtcaggcccaccatgggcagggtcgtgcacgtcctcgaggccgtcctcgccgaccaccaccaccacgccggtgctgctgccgccgctgcacggccggcagccgcctccgccgccgccaccgccaccgccggccggttatatgtatagatgtacatgtttgggaattaattaatttcatcattgattacgt

SEQ ID NO: 392318 - DNA, 556 bp, Oryza sativa
cctgaaagccctcgttggctattccagcaaggaaaactttctcaggcagaaacagctattaaaaaactatatggaagagaaaaagttgctgaagttatgtatgacctaaaagctgccagccaaggttcttctgagccagatgctggctggttggatcttttcagcaaacgctattggaaagttgttagtgtgggcgcagctatgttcttgttccaacagcttgccggtataaatgctgttgtatattactctacatcggtgttccgcagtgcaggcattgcatctgaatgttgcagcgagtgcccttgttggagcagccaatgtttttggtacaatgattgcatcttctctgatggacaagcaaggaaggaagagccttctgataacaagcttttctggcatggctgcctcaatgttacttctatcattgtccttcacgtggaaggccttggcaccttattcaggccctcttgctgttgctggcactgttttgtatgtgctggcttttgctcttggagctggcccagttccagcattgctccttcctgaaatattt

SEQ ID NO: 392319 - DNA, 742 bp, Oryza sativa
ttcagagactcgtgctatccagaggagcactacttcccgacattgctggatatgcaagaccccgaaggctgcaccgggtatactctgacaagggtgaactggacggatcaagtcgagggccaccctcacacataccggcctggggaggtgtctgcaagcctgatcaaggagctgaggaaatcaaatgggacatactcgtacatgttcgcccgcaagtttgctcccgagtgccttgagccactgatggagattgcagactctgtcatcctacgtgactaatccagcaacaacaccccatttcagggtgtcggattttgtacactgaggtgaatgagggttgtgatgtgatgaacaagcacagagtgtccttctatgcccttgaactactacgtgaggaacaacatatcccctctgttttgttattcagagattttccagcaattgaatgcgctgctgggaggtgaggatggtatgactacaaattgtccctacgtgagtatcctgtatgaatgtgacaatctgttggaaagtaatagtagggtgttagttagcatgatcgtcctatgtattacatggtggcactgtaaatacatgcagtgatggtttattatttttgttccatacatgccgcggctattgttattacacttcttatgttctgcttgccatgataatgacagtttgtttcttagtcggtcttgcactttgaagtgataataataataataataataatagcaat

SEQ ID NO: 392320 - DNA, 495 bp, Oryza sativa
  unsure (1)..(495): unsure at all n locations
gttatatccaatgcatctcgtgcttctgccactcggagaaagttctacttcttgcagaaatctctgcttgtctcttctttgcttgcggctgctgcagcagatgctgttggagcagggccaaaccagcagtgttttccttcctcctgtggtgatcttggcaacatatcctaccctttccgtcttgcaagcgattcacgcccgtgcgttggtactcttcgcccatggtacaacctctcatgtagcagtggcagggctaccattcagatcaacacacggacgtactatgtcaccagcatcaactatactggtgagatcttctcggntgtggatgccaccttgcaggatgatgatacaaacggcaccagctgccctcttcctcgctctgatcaccttccttacatcgattactggcctccctatttgggggaaagttcaaccgattcttatggttttgtctatttggccactgcttcagacacttgggcatgctttgtg

SEQ ID NO: 392321 - DNA, 957 bp, Oryza sativa
  unsure (1)..(957): unsure at all n locations
atgttctccgacgatnacaaggccgatcacggcggccgcgnaggtcggaanccgagccacccaagccggaggttcnacctgtcgctgaccccacnaacaggtaagccatttgtttttcgattcttatactggattagtaatatgcttggattggctgtatggaaggaaaccttatgctggctatgtgttcgatcaaatgtttcagagccatgtactacaacgatagatcgcctcctgctgaattgaagcgtgacatgccggttggaactgatgctgccagctatcgtgtgcctgtgccagcccaagatgctgctgccgccgccgccgctgcgctggctgctgcccagcaacccccagctgggtatgtgtatgcacagatgcatgcgccgccaccgcagcagcaacccccaccaccacagcagcaacagccagtcccacagcaatatgtcactgcacaaaatcagcatttcattcacaatccagctactggcacattcatcccaatccaatcctattaccaccatccggtccctcagcaagcaccacagccgcccatgccgcagcctgtgccacagccacaacaatcacacgctttcgacccaaatactggcatgtattacattcccatgcgcacgaatgcgcctcaggcatatagcatgcctcctggtgccgctgctgtgccgcctcccacccttgttgacactacaccaaaaccaaccgtgccaattcctcagatggccgtgaagcagcctgaactgcagcaacctggtttgtaccgaactaccgcagcacctacccctgtaccagcgtctaatgctcctgcgtatgctgggatgggctaccaccatgttattcaaacacaccatcatccagcgccacagcctgcagcgactgtggcaggcaattttggatatgactatggtgatccacggggggacaggtnttntacttggaagg

SEQ ID NO: 392322 - DNA, 672 bp, Oryza sativa
  unsure (1)..(672): unsure at all n locations
cttattttagtgatgtaaagggtgttgatgaagccaaagctgaacttgaggaaatagttcactatcttcgagatcccaagcgttttactcatcttggtggaaaactgccaaaaggtgtcttgctggttggccctcctggcactgggaagaccatgttagcgagggctgttgctggggaagctggtgtccctttcttctcatgcagcggtagtgagtttgaggagatgtttgtaggtgtaggagctagaagagtcagggacctttttgctgcagctaaaaaacgttctccctgtatcatattcatggatgaaattgatgcaatcggtgggagcagaaatccaaaggatcaacagtacatgaggatgaccttgaaccagttgcttgtcgaactggatggctttaagcagaatgagggaataattgtcattgctgcgaccaactttcctcagtccctagataaagcactagtgagacctgggcgctttgaccggcatattgttgttccgaatcctgatgttgaaggccggcggcaaatcctagagtcccatatgttgaaggtcttgaagagtnatgatgtgggatttgatgatcattgccaggggaacacctggattctcaggtgcagaccttgntaacttggtaaatgtggctgctcttaaggctgccatggat

SEQ ID NO: 392323 - DNA, 615 bp, Oryza sativa
atcacactcacctaaatgttgttaggaagtgaggactgagctttcctctccttcactcgtactgtttctgatatcattgattgctatcctcctcctcctccttcctcccctaaatctctagagaaatggaggacaatctaccagtcaatgtccgggagtatcaagaactcgccaaaaaagcgttgccaaagatggcttatgattacatcaatgggggagcagaggatgagcacacactgagggagaatatcgcagcatacacaagaattatattacgacctcgcgttcttgtggatgtgagcaagatagacatgtcaacaactttattaggatacaccatgcgttcacccataattgtggctccaactggggggcacaaattagcacatccagaaggggagaaggctacagcaagagctgcagcatcatgtaacgccataatggttctttccttttcttccagttgcaagattgaggatgttgcctccagttgcaatgccattcgcttttatcagctatatgtgtataagaataggactgtttcagcaacattagtacggcgggccgagagttgtggattcaaggcacttcttttgacagttgacactcctatgc

SEQ ID NO: 392324 - DNA, 516 bp, Oryza sativa
ttgcttttctccccgagccgccgccggagagcaagaacacggaggagcgagcgggtcgtcgagggcgatggcgggaggcggcatgttcggcggcgccggcgcgttctgggcgacgcgggcgctggaggtggtgaagcggaacgactccccgggactgctctggaagcggatcaagctcaccaccacccgcaagaacaacgccaagaagcgcctcaagcgcctctggcagaatgaggcagttataagggcttgtggtgaagcagaatcgtcgtcgtcgtcaacatcaaacaccgcatcggcctctgggaaacaagagtagatcccaaagtcaatctgatgacatgcacacaggtttaaatgcaatttgaaaaggcccagtcagtgacctttgcatgacaatgctgaaagcctctccatgtttccaagctttgttacttcatcaactggaacaagtacatgcatgtacacatccaaccttttttcatcaagaggacacatacatcattgcttgctgcc

SEQ ID NO: 392325 - DNA, 659 bp, Oryza sativa
tcgcatatatctcccgtctcgtcgtcgccgcctccgctccttgcgccatctcgcggctgaacaggggaggggcgccgatctccattggcgagcagagcagggcgcgggaggggaggggatcctgaaaacacttggtttcccaaatgaagcacatattcaagataattgctatgctggtggcagtctcagctatttggattgcccttcttgaaaccgcgactgttcctcgaagttatacttggttgcttcccatctacttggtagtggcacttggatgctatggcctttttatggttggatttgggcttatgttcttcccaacttgcccgcaagaagctgtactactacagcaggatatcttggaggcaaaggaattcctatcaaagaaaggtgttgatgttggctctgaataatgtcaagatcgatgatagatgacttgaggctagtttggggacaactttgtgctcccttatatgagttgttttgggggctttatagctaggtatatgtcccttcgtaatgatcattttgctaacccaatttttcatggtgaggccctgttacatactgaatttaagccctttttcttttaggaaatattttttatggaaaatgaaatatgattgtgaagtaggaatggtctgtttccaagtgccttt

SEQ ID NO: 392326 - DNA, 635 bp, Oryza sativa
tcggtttgggctataagaaatggtgtggatccaatacctgtcaatagtgggcttggtggtgcctactatttcagaaacagcaaaggtgagaatgctgccattgtgaagccaaatgacgaggagccatttgcacccaacaatccaaaaggttttacagggaaagcccttgggcagcctggccttaaaagatcggttcgagttggtgagactggttttagagaggttgctgcctaccttctggattatgataactctgctaatgttcccccaacggttcttgttaagatctctcatcctgtatttaatgtgaatgaatgcgtcagttcagccaacatgaaggcttctaaggactatccaggggctgtaagcaagattgcatcatttcagcagttcattcctcatgattttgatgccagtgaccatgggacttcaagctttcctgtctctgctgttcataggattggtattcttgacattagaattttcaacaccgataggcatgctggaaatcttctggtcaggaagcttactggaccaggaaaatttgggaatcagactgaactgatccctattgatcatggtctctgcctccccagagtgcttggaggatccctaattttgaatggatcccattt

SEQ ID NO: 392327 - DNA, 711 bp, Oryza sativa
ttcggttgctgcgcgcttcggggccgtgcgggctcgtcgtcaccgacgcgctcgagcccgactgccccatcatctacgtcaactgcgggttcgaggaggccacgggataccgcgcggaggaggtgctcggcaggaactgccgattcctgcaatgcagaggaccctttgcgcaaaggagacatcccctaggtgatgccatggtggtttctgagattcgcaaatgcatagacaatggtaccgaattgcgtggtgatttgctaaatttcaggaaagatggctctccattgatgaacaagttacacctgacccctatatatggagatgatgagaccataactcattacatgggcattcagttcttcaccaatgctaatgttgatttgggaccattgcctggctcattgacgaaggaacctgtcagatctacaagatttactccagataactttttcccgcccatatccactggaccagggcagagcaacttctgccgggaatattctagcctgttccagttgactgatgaagtactctgccagagtatcctgtcaaggttgtcaccaagagatatagcatctgttagctctgtgtgtaggcggttgtatctcttgacaagaaatgaagatctttggagaatggtttgtcagaatgcatggggcagtgagactactcgagctcttgagactgtccctgcggcaaaaagattaggct

SEQ ID NO: 392328 - DNA, 550 bp, Oryza sativa
tcggtttggatcagtttacacttgcggagctggtgggcttgccatttatatgagaggatatgatctggttgcatccaagcgtctttcttgggctgggagagtgcgatgttggcatggttcaatcaaaccgcgcaaacttatgcactagctaagcaagatgcagggatatgcagtatggttttgtttggtctgattgagccgggccactatcacaagcttgcctggcttaattacatgtagtagtgtgaggatattggattcttccacaaggtatgagaattgtcatgttgtgtatttgtgctcctttatgcgtgttatttcacatgcctgcctattagatttaagtttctttatgttgtttcatgcaaagctttcagaaactattttgtctgacggttcaagctttacagatttaagttttgctgctggtactagctggtcaaatggcactaaaaggtttaaaaccatgtgaatatttatgaatatcaatgtagtagtaacataaatcttactcctatcaaagaaaaatccctcatcagcagcacactaa

SEQ ID NO: 392329 - DNA, 586 bp, Oryza sativa
  unsure (1)..(586): unsure at all n locations
cgcctctgctctcttcccccgttaaggcaggcgatcctgatcccctctccatccgccggcggccgacgcgggggcgcggaggcgcgcacgcacgcacggcggtgtggacggctcctctccttgccggagcccggcctccttccctgtgcggcctcctcgccccgccggcgagcctctctgctcgaatcgaaccggaggtataccccattcctgcctcgtagccctctctctccctccctccctccctcgctccggcgccgcttcatgcgccggcgagacctggatcgggaggaagactcggatcgagccggtggggcgcgatgaacaagccagggattcggtccgggcgggagcccaaagtcgttccgttaacctagggcggactttgatcttgagtccgggatcgcccgcaagggcttacgcaagcccaagaaccacgacgcccccggtttgctcacctccacgctgatgaagatccggtacttctacgaggcgcaccccgtcgcggtcgccttcatcctgctgtccttcgggctcagcgtgctgatccttctgtcggtgtacgagacccggntcaggatgatgc

SEQ ID NO: 392330 - DNA, 790 bp, Oryza sativa
cgcgtccatggccaccgccgcatccacctccgccgccgccgtcgccgccgcatcgcgcctcctcgtccgccgcgcgccgccgcgcctgctgcgccggttaccccgcgcggcgctcgccgcctctcgcccgtcgccgccgtcgtcgtcgtcgtacggtgcagcagccgtcgccctcggccggcagccgctcggccaccgcgctaggatgggacacaccgccgccgccgccgccgccgcgggccccgcgctcgggctcaccaagcccaacgccgtcgagcccccgcaggtttcatttgctgctaaagacgtcgaattctccgaatggaagggagacatcctcgcaatcgcagtgacagagaatgatctggtcaaaggatcagactccaaattcgagaatgcggtgttgaagaagctcgacggccagctcggcggcctcctgtcggaggcatctggcggaggaggatttcaccggcaaagccgggcaatacagcggtgcgtccgctctcccggggcacggcttcaagagggtgggtctgatcggccttgggcagaacgccccctccaccacaacggcttgcaagggcatcggcgaatccgtcgcgctagttgccaagtctgctcaagctagcagcgcggctcttgtttttgctttcagggggggggatcctggaagattttacgctgactgctgcggctgccattgctccacggactgtgcctgggctgcccgaggacagtagatacatgtttggattcctaattaagtgcaacattcatcaagtcgttcctt

SEQ ID NO: 392331 - DNA, 760 bp, Oryza sativa
  unsure (1)..(760): unsure at all n locations
atcacgcagcaccgcggcgggcgcgtgtcgttcacggcggaggacgcggcggacagcgcgacgtcgtcgagcttcgtcaagtccgtgaaggagatcccctacgacctcgccgtgctccagatcagcaagccgctgtcctcccctgaggcggaggcgcccgtggccccgccggcgccggtgaacctcaccgagctcctgtccaagaagtactgcaagaacttcgccggcctcctcgcctcgaacgccgacgtgtacagcaacatcaacgcgaccaaggacaacgggctcacgctcttctgccccgtggacgccgccgtcgacgccttcctgcccaagtacaagaacctgacggccaaggggaaggcggccatcctcctctaccacgccgtgccggactactactcgctccagctgctcaagtccaacagcggcaaggtcagcacgctcgccaccgccagcgtcgccaagaaggactacagctacgacgtctccaacgaccgcgacagtgtcctgctcgacaccaaggtcaactcggcctccgtcaccgccaccgtcaaggacgccgacccgctcgccgtctacgccatctccaagttcctgcagcccaaggagctcttcaaggtcaccgaggacctggcaccggcgcccgcgccggagggccccaagaagaagaccaagaagaagaagccgttcaacaacttcggcgctgccggccccttcgaaggattcttcggcggcganttggccgacggaaaccccg

SEQ ID NO: 392332 - DNA, 942 bp, Oryza sativa
ttgtgttaacatgttggttatgccaaacaaggccaaggtgaaagtcattagtgtacactgtgatgaagatagagtgagaagtgctgcacctggtgagaatgtccgagtcaaactgtcaggaattgaagaggatgacatcactgctggttttgtgctatcaagcattaaaaatcctgttagtgctatatctgaatttcgtgctcaactacagatattggagttgcttgacaatgcaatttttactgctggttacaaggcagtgctgcatatccactctgtagttgaggaatgtgagattgttgaactcatagaagaaattgtgttgtagaggaggaaagaaggggccttaaaagaaaagaagtcaaagaggaaccctctttttgtgaagaatggagctgtcgtcgtttgccgtgttcaggtcaataatttgattggtatcgagaacttctctgagtttcctcagcttgaaaaatttacgctccggactgaaggtaagacagttgctgtaggaaaagttgttactgttccacctgctgggagctcaacatttaatgtttagaccttccagagcttgaggacaaatagaaggttccttggtgagctttctttctgtggggttaatgagctttgttatggagccatgttcttgcaatcccagctttgagaagtgttaaccatccattgggcgtagtggccaagctggataacatatttttatagccgtgctaaaatgtttgtggatgtcaaactccgtcgatctgccattgcaactgatgctaacataatatttcaagactaattcattaccattttatacgaattttggttagttctttctgaagatgagtgtatataacctgctggactcacttgttttgaactctgtttagtccctcacagataagactaaatataaattttggtggtgctaagtgattcttt

SEQ ID NO: 392333 - DNA, 826 bp, Oryza sativa
ctttcactttgctccaggcaaaggattttatgagtcaaatataaatgtgcctgagctgtcggcacttgagcatggtttcaacatcacacacaaaataaataaactgtcttttgggacagaattccctggtgttgttaatccacttgatggtgctcagtggacacaaccagcatcagatgggacataccaatacttcataaaagttgttcctacaatttacactgatctaagagggcgcaagattcattccaaccaattctcagtaacagagcattttagagatgggaatattcgccccaaaccccagcctggagtatttttcttctatgatttctcacccataaaggtaatatttacagaagaaaatagttccctgctccactatctgacgaacctatgtgctatagtgggaggggttttcaccgtctccggcatcattgactcgttcatatatcacgggcagaaggcactcaagaaaaaaatggagctaggcaagtacagatgatttacctgaaacatggactggccctcatgttccccaagttcccaagttccgtggcttgtaaaggatccattgcttaagacctgaagacgttgctttgctggaaggttttgctaaggccatcagaattgacgatattgcacattagttgatcaaaaactcgtttacatgtaaaaaaagacaatatcatagcgttgggcctgggggagtgctttgatgtctcaatgagactctctttgagtggccaaaactggcgaaatgagatggatagattaaattcaataaaataaattttcttattctctttttcctatctcttctaca

SEQ ID NO: 392334 - DNA, 601 bp, Oryza sativa
tacagaagaaatttgtttcctgctccactatctgacgaacctatgtgctatagtgggaggggttttcaccgtctccggcatcattgactcgttcatatatcacgggcagaaggcactcaagaaaaaaatggagctaggcaagtacagatgatttacctgaaacatggactggccctcatgttccccaagttcccaagttccgtggcttgtaaaggatccattgcttaagacctgaagacgttgctttgctggaaggttttgctaaggccatcagaattgacgatattgcacattagttgatcaaaaactcgtttacatgtaaaaaaagccaatatcatagcgttgggcctgggggagtgctttgatgtctcagtgagactctttttgagtggccaaaactggcgaaatgagatggatagattaaatcaattttaccactgcgtgtgccatctaacactgtttgacgttttctgtatttcttttcaggaagaactagaacttacattttttttgttcttttttttttgcttcatctgagtgcattagtagagatataacccatttcttgtaacttcagggtgttcaaagagacaatttgatc

SEQ ID NO: 392335 - DNA, 949 bp, Oryza sativa
gcggccgccgtcgccgagatggcgaaaaccctcaccgtcgacacggacgacgccttcgcggggctcctcgagctcgccgcggacgacgacgcggagggcctgcgccgcgcgctggagcgcgccccgcccgccgccgcggacgaggcgggcctctggtacggccgccgcaaggtcctcgagcaccgcacgccgctgatggtcgcggccacctatggcagcctcgcggtgcttcgcctgctgctgtccctcccgtccgtcgatgtcaatcgccgctgtggctccgacggcaccaccgccctccactgtgcggcgtctggtggctcgccgtcttgtgtggaggccgtcaagctgctgcttgctgctggggctgatgctgatgccacggatgcttccggatatcgtccagctgatgtgatctctgttcctccaaagatgtttgacgccaagattgccctccaagatctttttggatgcccaaaggctgggcatggcgttctccgggtggtgacaagggccgcaaactctatgttgtcacctgtatcatcccctacagcagaagatgcacgatctccatctgctgctgtgatgatgacgacaaagtttgcagatcttccaagggttgtgacatcggaaaagaaagaatatccagtggatccgtcccttcctgatatcaagaacagcatctatgcttccgatgagttccgcatgtactcatttaagatcaggccatgctcgcgggcgtactcacatgattggactgagtgcccgtttgttcacccaggggagaacgcacggcgtcgggaccctcgcaagtatcactacagctgtgtgccatgccctgactctagaaagggagtttgccggcgtggtgacatgtgtgaatatgctcatggcgtgttcgagtgttggcttcatccagcacagtaccgtactcgcctttgcaaggatg

SEQ ID NO: 392336 - DNA, 298 bp, Oryza sativa
ggtgaggtcgccgggcgcccaccattgccgtcgcgtggcgaggcatgaagatcctagtggcggtgaagcgggtggtggactacgccgtcaaggtgcgggtgaggcccgaccggacgggcgtcgagacggcgagcgtcaagatgtccatgaacccattctgcgagatcgccgtcgaggaggcgctccgcctccgcgagtccggcgccgtcaccgaggtcgtcgccgccaccgtcggcccctcccagtccgtcgacaccctccgcaccgtgctcgccatgggcgccgaccgtgccgtcca

SEQ ID NO: 392337 - DNA, 439 bp, Oryza sativa
ttggccttctcttgctggctaatgcagggcaagagttgcacgaggatcccctccccgcacggcaggacggcgagaagccgagaacctcacagcgccggccggaaacgcgggcttggctcgccgtcggcggcggtcggcggcgagaggcgagagcgagggcggtttgccgattcccgcgccgcagttcctcgaatcccgaattatcccttctcggcttctcccagctccaccaccggatccctctactctccacgggcggagagcgcgccgcgggagattcccgacgaggggatggccggtccggccgcgagcgcggtgcctctccacgcaggctcgactccgcttccgaggcgcaacccggctgcagtccgcggcctgatgagacctccgcttctgatggtggccaaggcgcagccttgcgttcttcgccggtttactc

SEQ ID NO: 392338 - DNA, 573 bp, Oryza sativa
tttccctccaaaagcccaaaaagctcccgaaacgccaggaaagcggaaggtctcgttctcctcctctccccaaaaccaaatccccctctccgaaaatctccaaaaatccagcgaaaaccatccgatccatcgatcgatcgatcgccgcaagactgcttcgggtttttttttgctcttgctccgatcgactgcgtgcgcctcgaatcgaaatctcgagtgatatcacgcgggagttgatccagacttaaaccggattgcctgagaagttgatgggatcgcgcgaattctcggcgctgacgtgagatcgtgaaagggttggacatcaaattgctaggaggttgcggcgatttggctgcacgactgcatgaactgtttcgtgaacctgggactcaactcgaactcgaaccactacgtggcctgcctcatcatcttcctgctgcatttctccccgcagtttctgttaaatccatccaattgtaatttcgaattcgagtagtaatcgtgaaggagagaaacagaaccccaacaatggcgaacaacaggtcatatggtgaaatgttaggagaaagtccc

SEQ ID NO: 392339 - DNA, 596 bp, Oryza sativa
gaagctcgctgctcttcgtttataagcgacgccaagacaagtcgggtggtagagagagaaagtgagagtagaaagggaggacatttgtagtactattccgtagagagagagacaagaagaagaagaagaagaagagagagagagagagagagaggaggcggcccgtccggcgtcgaggtgggcggcggcggatgggggactccggcggctccgtcgtgtcgatcgacgtggagcgcatctccttcggcggcaaggaacatcatatacataccaatcatggacccgtatctgttgcggtgtatggtgaccatgacaagccggctcttgttacttatccagatattgctttaaatcatatgtcttgcttccaaggattgctcttctgccctgaagctgctttcattgttgcttcacaatttttgcatttaccatatcagccccccaggacatgaggtgggcgcagctccaatttcgccaaatgctcctataccatctgttgatgatttggctgatcaggttgcagatgttctcgatttctttgggttaggttccgtaatgtgcttaggtgtcagtgcgggtgcttacattcttactct

SEQ ID NO: 392340 - DNA, 469 bp, Oryza sativa
  unsure (1)..(469): unsure at all n locations
aaacatggtctgctgctgggcggaagatccaaattcagacgcattcaagaggcatcttgcgagggtacctgatttcttgtggctttcagaagatggcatgaaggcgcaggtatatgatggttgccaaagctgggaaacagcattaataattcaagcgttttgtgccactgatcttgtaaatgagtatgcttcaactgttcagagagcccacgaattcatgaaaaattcccaggttgtaaggaatcatcctggtgaccaaagttactggcatcgcatagatcaaagggttcttggactctttcctctgcagacaatgggtgggctgtgtctgacactacagcagaagcactgaagggctgtattgttggctggacaaagatatctaggtagcatggtttggggatcccatttgaaagagaaaggctgtatgatgctgttgattgcctcctaatcctttgtgaccaagatn

SEQ ID NO: 392341 - DNA, 739 bp, Oryza sativa
ggaaaaaaaaaatccccaaatcgaatcgatcggaatttgcttctccgttgaggcgaggcgagggcgaagggggaacgaagtggaaggagatttggattgattggttggacgccggcggcgcagatccccaattcgatctcctcctcttcgatcttcatcctaccctgcctgccagtgccagtataagattcttatgagctggtcggctgtggttttccctcaattctggtgctactaagatgggtcaggagctcaccacaaacaagcctctcacaaccctcttaccaacggatgaaatagcaaccgcctaccatttctccctcctcctctcacctgtcgtctccttttgggactgcatcttccgcaagataagatactcattcagacctgagtgggtgtagcatcctgcactgcctgtttctttttagcgctagccagtgctttgctttctggcctggatcactccagacaatgaactttgaagcttttgctttcccgtaattacaattacagtcactagtggagtttagctgaaaatagtacatagttgtcatggaaaaggccgcggccaatcaggcgggcaaagtcttgaagaaaggtaagaagaaacaagccaaggatgaattagatcgccagaagcaggctgagaagaagagacggcggctggagaaagcgcttgcaaactccgctgccattatatctgagctggtaaagaagaagcagacgaagagggaagaac

SEQ ID NO: 392342 - DNA, 912 bp, Oryza sativa
gtgcttttgggcagatttactgtcacattccgaagggtgctacacttcccaggagtggtgaatatccgagacacctctcatctatgcttatcagagtctcatctatttcctgtctttgtcatacacagatattctcatggctagaacctctccttttccacctctagctagacggaaaatcgcttccctcaagttgctgataccatgtgttctagttctttcaggggctgttattgttgttacgcagtatttccataatatctcttaccttctgcggccactgtgggacacaccacctaagccatttatccgcatcccacactactatgcccccaacatctccatgccgcagctctgtcagctccatggttggggtatcctccccacccctcgccgtgtctttggcgcccgcctcttcagtaatgaacttgatattctagaaattcgctacggtgagctccttccgtatgttgacaggtttgtcatccttgaagctaatgccacattcactggcatcccgaagtcactctctttcttggaaaatatcaatcgctttgcattcgctggctccaagattgtgtatgacatgcttcctgtcatggaaatggatcccggttctcaccgtcagcccttccatgttgaggccggccaccgtcgtgcgcttaatatgctgctgcgaagatcaggcattgctgtgggggatgtattgatcatggctgatgctgatgagatccctagccctgagacggtgcagttgctcaagtggtgtgatggaataccgcaagtcatgcatctcgagctgaagaactatatgtactcctttgaatttcctataaactacaacagctggagggccacagcacatgtgttcactgagcatacattgtaccggcacttccgtcagagcaacct

SEQ ID NO: 392343 - DNA, 634 bp, Oryza sativa
tttttgtgctattttcaacaacatctatgcattctgtgggtcgattgctggcgagcagctctattcatctgaaagtctggatgatagccaaaagctctctgctgatgcattggttaagaaggcatatgataattggatgtatgccattgaatatgatggcaaagctctcttgaactctaaaccgaaaaaaaagggtgcaccaccctgtgacaccttgagacacatcctcctctgagtcaacctgcttcatacgaacagcgcatctcatcagcgagcatgacaggaccatctccagcaggaggaagtggcactggaactgattccatagggtatgatggcgaccaagcagcttcacagccatctcaacttcaaagtacatctgccaatgtccctgtgccatacgatgacaccctttcatttttaccgcctagtatgttgatggggtctgataatcaagaaaccggaaatgatggcatgggcctggaactaggccaattgcaacaagcaatttcacagagtcagtcgattcagccagcaaatgttggctatgatgattggactcgaagtcaaaacggtcagttcgctgatgacttcaccgaagatattcgcatgaaaagccaccaaatgctcgaga

SEQ ID NO: 392344 - DNA, 563 bp, Oryza sativa
ctttttaaacaaaagaagagcttgatgccataggagagcacatgagctcaaccacacacacacacacacagagattttgactattaattttcatcgtctttggttttaagttggtgtgtgttcttccatggccggcctgagtgtccttcttgagacacacaagatcgatcaccaccccaacatgaggcctccccaaatcatcagcaaggccaccctccatagccacccagagacgatgtcctcctcctctccggcgactgcgacgacggcgacgatgagctccttcttgcagcgctgcttcctctgccgcagggagctcgccgacggcaaggacatctacatgtacagaggggacagagcgttctgcagcgtggattgccggtgcaagcagatcttcatggacgaggacgccgccgccggcggcggcaacttgcgccgcggtgcgcgccggccggcggcgggcggtcgtaccgcgcgagcaaacccgcgccggtggcttcccgtactgatcgatcgaatcattgattcagccagccgtacgcgcgcgcgcacgttgttaattt

SEQ ID NO: 392345 - DNA, 741 bp, Oryza sativa
  unsure (1)..(741): unsure at all n locations
gctcggcggtggaacagctcgctcgatcatggccgccgccgccgccgcctcaagggcgctctgggcttgccgcaccgcctcctaccttcggatctcctccttccccagggctttctccaccgtccttaaagatctaaaatatgctgatactcatgagtgggtgaaggttgagggtgattcagcaaccataggggtcacagaccatgctcaggaccatttgggtgatgttgtgtatgttgagcttccagaagttggttccacagtatcacaaggaacgaactttggtgcggttgaaagtgtgaaagcaaccagtgatatcaatgcaccagtatctggagagattattcaagtaaatgatgaactaagtgaaaaaccaggatttataaatggaagtccatatgagaagggatggatcatcaaggttaagataagtgatccaagtgagttaaactcgctgatggatgatgagaagtacaagaagttttgtgaggaagaagatggcaaacactgatcaatcccctaactgctggatttcaagaaactatgcagcaactcaccatcatgacaatgagccatctcgcctctcctaccacattatattattctggatagaggagtcccaaggaatgtaataagctgaaacatttttcttgcaaatcagacatgaaaattttgtagtgtcctgatcattccgtttgtgctccatttgaaattcnnnnnnnnnnnnnnnnnnnnnnnnnn

SEQ ID NO: 392346 - DNA, 516 bp, Oryza sativa
gttcgcaaccgcaaatccccatttggtctcacctgaaaccctagctcgctcacccatggctccgaagaagcgaaaggcggatccggcggagtccccggtagcctcgtcggaggccggcgccggcaccaaccaccaccaggagacgccctcctcggagctcaagccccgggggaccatctacttccccatcaccgacgaccccccggagccgagcgcagagggcggcgccgagggggaggacggcgccggaggggacgacgatgaggaggacatcgcgaagctgctcgagcccctgtcgcgggagcagctggtggcgctgctccgcacggccgcggagactacccccgcgacgatggcggccgtgcggcgcgcggcggaagccgaccccccgagcaggaagctcttcgtccacggcctcggctggggcgccggagccgacgacctccgctccgcgttctcccgcttcggcgagctcgaggactgccgtgtcatctccgacaagcaatctggcagatc

SEQ ID NO: 392347 - DNA, 494 bp, Oryza sativa
  unsure (1)..(494): unsure at all n locations
ttcctaccgaggtccttaggacctccaccccggtggcggccgctctagaactagtggatcccccgggctgcaggaattcggcacgagtgtcatcgtaccttacctacttagaatgctattgtgacagttcttttgtcacacgtgttcaacgacgtgatgggttaataatatcaacaacatctggaagcacagcttattcattggcagctgggggatcgatggttcatccacaggtcccagggatccttttcacgccaatctgtccccattcattatcattcaggcctttgatactacctgaatatgtgacattgcgtgtgcaactgccaatcaatagcacagggcaggcatgggcatcctccgaccgcaagggcaggaagcagctagggccacgtgatgcactcatctgcagcatttctccatggcctgtgcccactgcctgcctggtggactcaacactgaattcctttccaacaancatgaaggccccnnga

SEQ ID NO: 392348 - DNA, 737 bp, Oryza sativa
  unsure (1)..(737): unsure at all n locations
ggaaaagagggtggcgtactacaagcgcaccctacccatagccgatgggagatacagaaatgtcatggacatgaacgcaaacttgggcggatttgctgcttctttagtgaagtaccctgtgtgggtgatgaacgtcgttcccgtaaattcagaccgggacacgcttggagcaatttatgagcgaggattcattggcacgtaccaggactggtgtgaagctttctcgacgtatcccagaacctacgacctgttgcatgctgacaatttgtttagcatctatcaggacaggtgtgacataaccaacatcctcttggagatggacaggatcctgaggcccgagggcacggcgatcatccgcgacacggtcgacgtcctcaccaaggtccaggcgatagcgaagcggatgcggtgggagagccgcatcttggaccatgaggacgggcccttcaacccggagaaggtccttgtggcggtcaagacatactggactgctgatgaatcagagcagcactagcacactgcacacagcacagaacacaggctcggctacctctctgaagactgaagaagtctgaacccccgattgttttcagagctgtgatgatggcatcggagttttgccatttcggtgtaacataacagaagatatcatctggtcacttgttttcttcctcctttcgctaattctttctatatcaaaggaaangttntggnnnnnnnnnnnnnnnnnnnnnnnn

SEQ ID NO: 392349 - DNA, 1091 bp, Oryza sativa
agatagagagagctgtactaactgatgaactgctctcatgcaagccagattaccataaagattgggtcataagcactgttgttagggtttctttcatgtagggaaaggaaaggtgatttcagttgcctgactgctgccggaatctgcgaagatcctacaagcgacgccgtcggttcaggcagccggcacgccaaatgccggttccccttgccccatacccaaccccgcctgtgccattcgcacctcccaatggggcctcaaagccagctcgtctgctctgggtgccgtaatctgctcatgtatccagccggagcaacgtcggtttgctgcgcagttcgcagtaccgtgaccgctgtgcctgctcccgatatgcacatcattcactcagaaatctagctgcaatgttcacaaaaatgtaaagagagattaaaggggaacacaaccaacttcagggatcccgcaacagccacgcgcgttccgatgattctccctgcagtcaggccgctcgcgacgaagtacacactggaagttgtgtgtgtctacgccgcccgccggtggctgctgcggcccatgaaggagtgtgtgcttgatgagtacgcccaccaagcaccggatctccatcgataggtttctccagcttaggatatttgtccaaggtgcatgatcgggcttaaagtcactgcatacgtgaggtgctcgagcagtaggaatctgcatctaccatggatgatgttgctacataaacaaaacaatataattgctggagtcttcttaaggattagattattgtcgttgaaaaaccatccactatagctgctacctctactcactttggcacaccatctaaaaatgcagagaagcaggttaatttatagtgggtgagcttaatccactgtagaaagcagaatatgaatgcaacaggctgcctgctatgattgatgctcatttattcagagattatcatttagcattctggtacttgatgagaagttataggtatccttctacttttttaagtgaggcgatctaatttgaattttctcattcaatttgaggtttgtgacctgatttaagccaaaaaaaaaaaaaaa

SEQ ID NO: 392350 - DNA, 785 bp, Oryza sativa
  unsure (1)..(785): unsure at all n locations
cgctcctatctacctcacttatttcccaggaggtgttaagctcattccggtttcttccctgtagggaaaggaaaggtgatttcagttgcctgactgttgctggaatctgtgaagcatctacaagcgatgccatcggttcaggcagctggcacagcaatgccggttccccttgccccatatccaactcctgtnccatttacacctcccaatggggcccaaagccagctcgtttgctctgggtnccgtaatctgctcatgtatccagccggagcaacgtcgatttntgcgcagtctgcagtcccgtgaccgtggtgcttcactcagagcagaaatctagctgcaatgttcacgaaaataaagagagattaaaggggaatacaaatggcttcagggctccgcaacagtgcgcgtgtcgcgttgatggtgtgcctgcactcaggtcgctcgagaagaagtacacactgaagttgctctggtcatatttacattattgtgtgtaactcttccttgtttgcttttcagtctaggatagagatttacatgtcaaagagtcaagtgcacttttgaaagtgtaatgcgatgcaagtaaaaacaattttggacaagatcaaaaggatccatgtcatttgctgtcagaatagtaatgtttgttacttaatgaggtttgttacaaaccttaattacaggaatatcattgtagtagttcttaactttttacactcctatttgtagatgtacataatatttatgtaccccctaatcaaaattaaaaacttccaataaaa

SEQ ID NO: 392351 - DNA, 539 bp, Oryza sativa
  unsure (1)..(539): unsure at all n locations
cggacgtgtangtatagagagagctgtactaactgatgaactgctctcatgcaagccagattaccataaagattgggtcataagcactgttgttagggtttctttcatgtagggaaaggaaaggtgatttcagttgcctgactgctgccagaatctgcgaagcatctacaagcgacgccgtcgttcaggcagccggcacggcaatgccggttccccttgctccatacccaaccccgcctgtgccatttacacctcccaatggggctcaaagccagctcgtgtgctctgggtgccgtaatctgctcatgtatccagccggagcaacgtcggtttgctgcgcagtttgcagtaccgtgactgctgtgcctgctcctggaaccgagatggcgcagttagtttgcggaggatgccacactctcctgatgtatatacgcggtgcgacgagtgtgcaatgttcttgctgtcacactgtcaacctggctatggaagatattttcctgtggcttgaaagcacagcaatcagtccgtagcaataaaca

SEQ ID NO: 392352 - DNA, 842 bp, Oryza sativa
tgtaagcactgttgctagggcttctttcatgtagggaaaggaaaggtgatttcagttgcctgactgctgccagaatctgcgaagcatctacaagcgacgccgtcgttcaggcagccggcacggcaatgccggttccccttgctccatacccaaccccgcctgtgccatttacacctcccaatggggctcaaagccagctcgtgtgctctgggtgccgtaatctgctcatgtatccagccggagcaacgtcggtttgctgcgcagtttgcagtaccgtgactgctgtgcctgctcctggaaccgagatggcgcagttagtttgcggaggatgccacactctcctgatgtatatacgcggtgcgacgagtgtgcaatgttcttgctgtcacactgtcaacctggctatggaagcaaatcaagttgcgcatgtaaactgcgggaactgccgtatgctgctcatgtaccagtatggcgcaaggtctgtcaaatgcgcagtctgcaattttgtgacatcagttggggcctcacctggtacagaccagaagcctagcagctgaactgctgaagtgccataaatattcagaaaagagcttctcaaaccgatgctttgagtgcacatgtatagagttcttccctgaagcattttttttcttccttttttatctccctttccccccaatttccaccttccttccttggatatggagagagcctgcggaataaatgagagttttgctaaatacctagtgctcaaaattcgtcgaatcgtctgtatgaccgaacaagattgacatattatatacataaacctatgataatatctatgcattgctaaaaaacaa

SEQ ID NO: 392353 - DNA, 443 bp, Oryza sativa
  unsure (1)..(443): unsure at all n locations
ggagatagagagagctgtactaactgatgaactgctctcatgcaagccagattaccataaagattgggtcataagcactgttgttaggttatcaatgggaaatagttttcatggacgttattggccgtgaatcccaagtggtgtggctaatctctccaaactaataaaagttcatggtttctttcatgtagggaaaggaaaggtgatttcagttgcctgactgctgccagaatctgcgaagattcttacaagcgacgccgtcgttcaggcagccggcacgggaaatgccgggttccccttgctccatacccaaccccgcctgtgccatttacacctcccaatgggggctcaaagccagctcgtgtgctctgggggccgtaatctgctcatgtatccagccggggcaacgtcggtttgcttcgagnttgcagtaaccgtgactt

SEQ ID NO: 392354 - DNA, 704 bp, Oryza sativa
  unsure (1)..(704): unsure at all n locations
cgatntntaagaaagattgggagcaaaacataacaactcantatacctgtccttggaatggtngtgtntgctgcnggagctgtcaatcatgangaggttgttgatcaagtgagagaatttttaacaggattttntacngacccaattactgtagatcaacttgttgaagcaaatccagctatttttactggatctgaggtccgtgtggagcaaccagagatgcctctaacgcactttgcaattgctttcaagggttcatcatgggctaaccctagctcaattcctcttatggtgatccaaagcatattgggaacttggaataggagcattggggttgggaactgctcagggtctgctttagctcgtggtatcagcaacggtaatttagctgagagcatgattgcattcaacactaactaccgagatacaggattgtttggcatctgcactattgctcagccggattccctatatgacctatcacagttaataatgcaagaatttagaagacttgcatttgaagtgtcggaaacagaggttgctcgtgctcgtaatcagttgaaatctgctcttttacttcacattgacggatccactgctgtttctgaaaataacggccgtcagatgctaacgtatgggcgagtaatgccattcttagagctctttgctcgcattgatgctgttgaccgtgatacagcaatgga

SEQ ID NO: 392355 - DNA, 582 bp, Oryza sativa
  unsure (1)..(582): unsure at all n locations
gtcggagaatccctctcctcccgtcccgccgccgccgccgacgacgacgacgacgtccagccctcctccgtaatcccccacttgttgggcctgcaccttgtggtagccactctttaatcaatggagagcacagagcccctacaggatatcatgtgcgagtttcgtgcgggtaagatgtcccttgatggaacacgagtgatcccagacacacgcaagggtcttgttcgcataggaaggggtgaagaaggcttggttcattttcaatggcttgatcgtggacagaatctagttgaagttgatcaaattgtcttccctgaggaggctgtctttgagaaggtaacacaatcttctggaagggtttacatcttgaagttcaggcacgatagcaggaaattcttcttctggatgcaggagccaagtgctgatgacgactcacaaatatgtcgccaagttaatgcctacataaaccgaccattagatggtgaggcagtttctattgaagctgaaatgtcacatgaagacacagctgatgatgacatctcctccagagctgggaanttagctgaccagagcatgactgct

SEQ ID NO: 392356 - DNA, 670 bp, Oryza sativa
  unsure (1)..(670): unsure at all n locations
gcttttattacgtccacatatctgcagaatgcagacagcttattgcccgcatttttgtcaacaatccattgaggagaatcacgatgaaggaaataaagagccacccgtggttcttgaagaacctccccagggagctcacggagactgcgcaaccatgtactacaggagggacaactccgtgccttccttctcagaccagacctcagaagagatcatgaagattgttcaagaagcaagaaccatgccgaaatcatccaggacaggctactggagcgacgcgggttcagacgaggaggagaaggaagaggaagagaggccagaagagaacgaggaagaggaggaagatgagtacgataagagggtcaaagaggtccatgcgagcggggagctccgtatgagctcactgcgcatatgaaaaagtttgtgtgcagctattgtgtagataatccggcttactatggaactgcggtgtatgcaattttcgctgtaaatttgcttctgtttggcgtttcttcgtgtaacataacttacttgggggcgcttggacttcaattgtctgattatgttttgtaagtacctacatattaagcgtatgctatgtacttggtgagaaacttctagcaccacatgtcnnnnnnnnnnnnnnnnnnnnnnnnnnnnnnnnnnnnnn

SEQ ID NO: 392357 - DNA, 880 bp, Oryza sativa
gttctctcctctccttctataatactcggcctccggctcgcttctcgctctgtttctccgagaattaggggggaggttggagctgtgcaagatggtgattgcgcgcggccttctccgatcgaatgcctcttcttcctcctctcaggcaatcaacttattgaagtatgtaactagcactggaagtctgcaagggcactcgcaaaatttgtgtgatgcatcaaccagacatttcagttcagtaccatcgccccagtacaactcaactgaagagaatgggttcaaggggcatggcatgttggcaccattcacagctggttggcagagcaccgatgttcatccgttagtcattgaaagatctgagggttcgtatgtatatgatatcgacggaaagaagtatctagattctcttgcgggactatggtgtacagctttaggtggtagtgaacctcgattagtcaaagctgcaactgagcaattacacaagttgcccttctatcacttccttttggaaccgtacgaccaaaccatctctggatcttgcaaaggaactgcttagcatgttcactgcaagggaaatgggaaaagtgttcttcacaaatagtggttcagaagcaaatgattctcaggtaaaactggtctggtattataacaatgcactgggaaggccagacaagaagaaatttattgcacgatcaaaatcataccatggatcaacactaatatcagctagtctatccggtcttcctgcactgcatcagaagtttgatctgcctggcaccttttgttctgcacacggactgccctcacttactggcgcttccatcttcctggtgaaacagaagaagaatttggcaactagacttggccaataatttagagg

SEQ ID NO: 392358 - DNA, 389 bp, Oryza sativa
ggagagagtgtgtttattggttcttggaggagagatgtccaagatggcggaggagaaggtgctggcggcgccggccaccgtcgacggcgggatgcagtcctccggggacctgcaggcttcgtcggcggcggcggcgcgtgtgcggcccgtcgagacgctcctccgcgccgcgccgctggggctctgcgtcgccgccatggccatcatgctccgcaactcggtcaccaacgagtacggcaccgtctcctactccgacctcggcggcttcaagtacctggtgtacgcaaacgggctctgcgccgcctactcgctggcgtcggcgttctacatcgccgtgccgaggccggcgacgttgtcccgctcctgggtcgtttttcttcctcgaccag

SEQ ID NO: 392359 - DNA, 776 bp, Oryza sativa
gcttatatgaacacaagtacaagaagctatcagaaatcagaaacgctagctagcagtaggaacaaacaatgaggtcgtccccgatcatcttcctgctcctggccgccgccgccgccatcgccgctccgtggcaggttgcgcacgccgcgggcaagtgcggcaagacgccggcggagaaggtggcgctgaagctggcgccgtgcgcgaaggcggcgcaggaccccggggcccggccgccggccgcgtgctgcgcggccgtgcgcgacatcggcacgcaccagagccacgcgtgcctgtgcgccgtgctgctgtccagcaccgtgaggcgctccggcgtcaagccggaggtggccatcaccatccccaagcgctgcaactcgccaaccgccccggtcggctacaagtgcggcgcttacacgctgcccagcctgcagggctgatgacgacgtacgacggccttgtttaggctctggcgccactaaaagctacctacagatcgcttacagcatactactcctataatactgttgcttaagtgtgctagctataccctgcactgctgatgaataagtatgatcgagctagcaaagcaactctacatggttgggacgtcaacactggttaatctcgtgcgctgcaaatggtctgctagtgtaatcctgtccgcatatgctgcttgaggttgtaatgagaatggacaaagtttactatccgcccgactgatacgtataccgaacatttacgtagcaatgagcgtatgcagatacgccacacac

SEQ ID NO: 392360 - DNA, 671 bp, Oryza sativa
  unsure (1)..(671): unsure at all n locations
cccccaaaaatcccttacataaggagcgccctcgacacgttngcgcagctcaagcttcccatgtggctcaccgaggtcgatgtcgtcaaaggacccacccaggtgaagttcttggagcaggtgctgagggaagggtacgcgcacccgtcggtgaacgggatgataatgtgggcggcgtggcacgccaagggttgctacgtgatgtgcctgacggacaacagcttcaagaacctgcccgttgggaccctcgtcgacaagctgatcgccgagtggaagacgcacaagacggcggcgacgaccggcgccgacggcgccgtcgagctcgacctcccacacggcgactacaacctgacagtgagccacccgtccctgggaacgaacgccaccgtccgcgccatgacggtggacgccgcgtcgttggcgtcggagcgcctggtcaacattaaggtctaggagagtgtgacacgtacattgtcctcgtgctagcgtgctcgattttttttttgtcaaacaattttgtacttgtttttatttccttttttgcttaattagtgaataataattggatcacttggttcaaaaaaaaaaaacaaaaaaaaaaaaaaggccgcccccaaaaaaggatccaacctacggtacgcgtccatgcgccggatatctcttcaaagtgt

SEQ ID NO: 392361 - DNA, 565 bp, Oryza sativa
tcgttttgcatacgccatccatccaccgtctcaatctcggtagtaatcctcgcggcctcgccgttagttccaccaccgggcgccaccatgtgcgggatcctggccgtgctcggcgccgccgactggtcgcaggcgaagagggctcacgtcctctcctgctcccgcaggctgaagcacaggggacccgactggtccgggttgtaccagtgcgagggaaacttcctcgctcagcagcgtctcgccatcgtctccccgctctccggcgaccagccgctgtacaacgcggaccggaccatcgtcgtcgtggccaatggagagatctacaaccacaagaagatcaggaagcagttcgcctccaagcacacgttcagcaccggcagcgactgcgaggtcatcatcccgctgtatgaggagtacggcgaggacttcgtcgacatgctggacggcgtgttcgcctttgttctctacgacacccgcaccaagacgtacatggccgcccgcgacgccatcggcgtcaaccccctttacatcggcaggggcagcgacggcgccgtctggatatcgt

SEQ ID NO: 392362 - DNA, 558 bp, Oryza sativa
  unsure (1)..(558): unsure at all n locations
cacccaacctatgttagctacttcttgttgcattgaatgatccgtcatcatatcattgggatatatattccacgatggccaaggtaatcacactaatccttgtcgttattacagtgtcaaccatgctagcctcacctgtggaatgcaccaagattcctggtgcctttcctattggaatgtctccatacaactttacgacaatgatagatatcttcaaagtggccatgttagtgccaacggaggattgcacctccaatgttgagatgtgcataagtgagacatgctcctacatcagaaaagcccttgatggtgttgttgatgctgccccaccagcaaaacaggcggaaactaaggaggccacggccaagatggctgggattgctgctactatgctcgacacagccatggcttcaggagaaaagagacangttgccgcagtttccattgccttcatgcttgctgctgatgcgatggacgcatccgcacctgctgacangtttagagtaatggatgaaacattcaaagcagccgctttttctatcgcttgagcaagcaaca

SEQ ID NO: 392363 - DNA, 644 bp, Oryza sativa
ggaaaaagggtaaggaaaccagcgagcgatccagggaggccgtagcccgtagcgaccatgtcgattgctccgtcgagctcgctccgtgccctggtcgcccccatcctcccctccgtctcctcctcgccctctgctcgcccagggctccgcggagtggcggcaccggtacagcacgcgcgggcgcggcggcggaggggggcggcggtcgtggcgcgggcggcggcgctgccgtcggacgccgagtggctggagcggctgccggagaagaagaagccgctgtacacgcacagcctgccgtgcatcgaggcgtggctgcgcagcatcgggttctcccagacccgcgaggaccgcgccgactgggtcgccgagatgcccctctggcacgcccgcctcagactcgacgtcactgacctccacatcaggtacttgaagagcggccctgggaatcttgacacggacgtagagaggagattcagctatgcccttagcagagaagacatcgagaacgcaatacttggaggaccttaatctcatcaggccatcagaggctcaagaataggagttcttgcaggatcttagaatttgggcagcgcagtaggtgcatgctctttcatgagagactaagaaaagctttgccctgctgc

SEQ ID NO: 392364 - DNA, 476 bp, Oryza sativa
cttcaagctccgccgattcctctcctcctcctccgcctcctcctccggcgtcgtcggcgtcagcagcggcgccggccatgggttgcggtggctccaaggaggacgtggccaccggcaacaccaccgcccccgccgccgccggcagcagcaagctcttccggaggaagtcctccgtctccgccagccaccgctcctcctcctcgtcgtcttccaatggatgcacctccgtctccgtcaaggacgtcgcgacgaagaaggaggaggagaccgaggccgacgccgtcgaggtgacgtcggccgaggaggcggcggcggcggcggtggtggtcaagaaggacgtcaccatcgccgctgccacgctcgcggtgaccgaggcgatggcgacggcggcggatccttaggaggaggaggaggaggaggaggagctgcccgagtccaccatgggcgacgaggcgcccgcggcggtggtggaagcg

SEQ ID NO: 392365 - DNA, 567 bp, Oryza sativa
  unsure (1)..(567): unsure at all n locations
gaaagagaaaaagaaaaaggaaacctcaaattcccattcttcctcgtcttggggcacagctccgatttagggttagctcctcctcctcatcgctgattaggattcgattcgaccggatccctcgccgccttcgccatggatgatggtgatgagcccgtcccctacgtcatggatgagggtgtgctactacccttgctgtttccgccgccgctgccggccgacgacgacgccaccggcggcgtgagcccaagctgggtgtacctcgaagacagagcttacgtctcccccgatgccgtctccaactccaccaccgtcttcttcaccaccaccaccggcgtaagcatccatgtctccttctgcctcgcccgcccgccgcgcctttcctacctctgcgtccactgcccccgccccggcgacggcgagggcgcctaccggttcactgtcgatccccaagtcctcggcacgcacaccaatgtagccctcctccgggttccgcaccccaacgatgggctccaccgcggcatcaaatcctacgactacttcgtctacacggtccngccaggcccg

SEQ ID NO: 392366 - DNA, 466 bp, Oryza sativa
tcaggtaatgttggctatgagtcacccaggttcgcatcagacgatcgggccatccttatggggaaatgattgagaaggcaatcaccatggatatcccagggagcaggtgatgaatgtgattcagaggatgaccgagagtggccagccgatggatttcaacacattgctggaccggttgaacgaagcagggtccggagcaccccctcgtgcgtggtgatttcgtcctgggttgggtttggacctctctccatcccggcacggcgctcatacgtgtgcaaagagtggcactatcgtgttgtagttgaataaataagatttgaagcgatgccttctgttgactgctgcgtatttgtacgatgtacatattatacattgatcttaatcttcatgtacttcctgcacgtgtaccaccagcttctttgcaattggaccatttcagcagatctgtgctaatccagattattgc

SEQ ID NO: 392367 - DNA, 497 bp, Oryza sativa
tttctcttactcagcaacagctcgcagctcactctgtcactctactactcgtagctaagctagctcgcgccgccgccgccgccgtcgccgccgccatgagcaaggagaagcaccacaagcgggagcaccacctccggcgatgctgcggcgggatggcggcgtgcatcctggcgctggtcctcgtcgtcggcttcatcgcgctcgtcgtctacctcgcgctccgcccctccaagccgtccttctacctgcaggacctccagctccgctccgtcgacctcggcgacccctccctctccgccaccgcgcaggtcaccctcgcctcccgcaaccccaatgaccacgtcggcgtccactaccgccgcctcgacgtcttcgtcacctaccgcgacgaacccgtcacggtgcccgtctcccttcccgccgacctaccaaggccaccgcgacgtcaccatctggtcgcccgtgctctccggcgagtccgtccccgtggcgggctt

SEQ ID NO: 392368 - DNA, 739 bp, Oryza sativa
  unsure (1)..(739): unsure at all n locations
ccactaaccatgttggtcatttncttttgactcatcttctcttggagacaatgaaaaagacctctcgtgaatcaaatgtggaaggaagaatcgttaatgtttcatcagaggggcacaggtttgcatatcgggaaggcatccgctttgccaagataaatgacgagtcggagtacaactccattggagcatatgggcagtcaaagcttgcaaacattttgcatgcgaatgaacttgctaggagatttaaggatgagggtgtcaacataactgcaaattctcttcatcctggatctatcatcacgaaccttcttcgtcaccacagtatcctagatgttctccatcggacacttggtaaattggtgcttaaaaatgctcagcagggggcggccaccacttgttatgttgcattgcacccacaggtgaagggtgtgtccgggaagtacttcagtgacagcaatgtgaacgaggcgagtgagaaaggcaatgacatggagctggccaagaggctgtgggagtacagcatcgagctcatcacctgacctgacctgacctgattcatgaactgaatgagagatactatgtaatgttgaagtttgagagagtgcctgtaaagtaaattgtggtaacttaactatggcagctaccatctggtgtgcgtgcgtacgtacatcaaaccaacatgatactagtagtgagtaataagcatatgcgaatcttcctcctcaaaaaaaaaaaaaaa

SEQ ID NO: 392369 - DNA, 923 bp, Oryza sativa
  unsure (1)..(923): unsure at all n locations
gaagatgaggctcgtgatgtctccaagaacaatgatgacgggtatcagcctttggccactgaaaatgaggcttgtgatgttccactgcttgagaatgacgaggcttgcagggtgccagctaatgtngacaaggtttgcgatgtcagcaatgaggacactgagttagaaattgctagtcctagttttggtaaatatgatacttttaaaagttgcttagacctctcatcacaaatagatgacggagattcgggaaccgaaccattttctcctgaatttgagcatcagctgggttttgaatttagtctgagtaatcgttctgttgttgacatagatctggaggaagatataagtaaaactacccactgtgatcgaaatgatccattacagtatctagaggaggataataaaacagaaggtgaagatagttctgcccactgtcgcaaggtatctgatatgtccattgtaggaggttctcatggcaagaccaaggagacagcctcttctgaaaatgaggcgaataggcctgatggtttacattcaaccattggaaccagtgacaaagacaaattaggtagcattccagagaactcagcagctgaagaggaactaaataaagaagagcatcccaaattacaaaagggcttggggttcgaaatttctctttgtgggcacatgctacggccaggaatgggccaagcatcagctgaagaagttttccaacaacatcttgttcttgaggaagatttcaagttatcaggatcatcaattatgaaaaatgtaaaccttgttgtcaaatttgatagtcagtatttcttatggagtaaaatttctcatattattcttgggaaagctgtcttggtccgaactctgcacagaacatatngatgctattccgtttgacaccaagaaacacctacttcaag

SEQ ID NO: 392370 - DNA, 241 bp, Oryza sativa
  unsure (1)..(241): unsure at all n locations
gcttcttcctcctcagcctctcatccaatttttccattccgagaaatcgagcgaggaagctagagctaaaccaatcgaaggccacggccatggctgccgctccagccaccacgtcactgctgagcgcgctgctgcagcttcccctggccccgttctccgggaggangtngccgnngnngncgtcggtggtccacgtggcgcccccnnnctcgnngacggggctntnanangcgaccanggg

SEQ ID NO: 392371 - DNA, 582 bp, Oryza sativa
gcgtgctctccctagcccacgccgccgcctcctcctcctcgtcgcgcctcccgcccccgctacgccgcgccgcaaactctcctcactgcgtcgccgccgccgcgcctcccgcactcttctagcacccagatccagagccggtggggaagttggatgtgacagatcaaggccgccggatctgttgagctcagcagcggcagcagcttggcgatgatggcagcaatgtctcagacatgccctcctccccactggtgacaagcatgaggccacggccgaagcttatctttcgcacctccatcagaccttgtaattctagggaagaagctcggccaactgcgaccttctaacgcagggaaggatggaaaggagtggctcctgcttgaagagctgcagggacagatcgccaggatacagggcagcctcgaggaatgtgaaccatggcaatctgcatagcccttcatttggaagctatgtccccccaactattgagtactattttttagctccacctcccttttcattcaggtaaaatggaaatatcattgaaagttggaaaaactatgtattggcgttgaatctaca

SEQ ID NO: 392372 - DNA, 406 bp, Oryza sativa
ttttgggcatagttctcaccttggcaatggtgaagccacggttcctgaagatgccaagaagattcacaaatttgcagaggccctcaagtcatcgagaccaggttctaggtcatcaaggaaggaccactgataaacaaatagcataggaacaatctgctgcagagtgcagtaggcccatcttcctggatgtatatatttctccagttcttgatgggagattacttatagaagatgctactggaataaagcacacatgctttattctgtgtaaaatgtacaatacagtatatagtagtgtagtgtactaacctttaatcccagccctcaaactattcatttggggttggcttgtacttattcagtgtattgttcatgcattgctctatgcatacttcactccagctac

SEQ ID NO: 392373 - DNA, 499 bp, Oryza sativa
ctcaatctctcatctccagccgcgctggctcgctctctctagctcccagccgcggcttcacccaaaccctagccctattgcgcgcgggagacccgccggcgaggcgcgcgcacggagcgagccggggggcgggagggccagccgccgccgccgccgcctgcagcagcgaggatgccgtcggggtcggcgacgcagttccggtacacgcagacgccgtccaaggtgctccacctccggaacatgccgtgggagtgcaccgaggaggagctcgtcgagctctgcaagcccttcggcaggggccgtcaacaccatgtgcaacgtcggcgccaaccgcaaccaggccttcgtcgagttcgcagatcaaaaccaggcaatttcaatggtttcatattatgcttcttcttcagaacctgctcaagttcgtggcaaaactgtatatatccagtacttacacagacaagaaattaccaacaatagaggaactggtgattcctctggc

SEQ ID NO: 392374 - DNA, 884 bp, Oryza sativa
tttatatcgcgagcgccgccctttttttttttggttgtttcgcatacctaacaaaaggggaacatcactgccaagaaaacaaagtttcggtgaaagttctctttcattggctacaggccacagccgataagcatctacaggagtagattagtagtcgattgcagtggaaacgtcacatgcccgatggaagttccagctccggagatggtgtatggaattcagaaacacgcttgaacaaacgtagcagcagccaaagcagccagccattgacgcttagcacaatttgctggccattgacgcttagcacaatttgctgacaatccattggattattgctccggttctgattctgcttggcaaactgggaggtggtaagtatccaattgccagtatttctgctttcaccccattccatatttcctctgaaagacaatctttgactgggagcgggatgaactgtgtcgagtagccaagatttgccaactctaacgctacgagctggcaatacacaacgttgaagaaggcattatcgccacagaggccattgaaatacgagtagatccctgccaggcttcaatagcttaggaagatgttggtggaactctctcatatcctgagtattctccataggtgtcgaagaatataccatcataagagccgagctgcgggagcacgtcctgccaccgtccgaacacgaccttgacattcttcttctcgccccagccgagcttgagcatccgggcgtacacctccgggtgggcctcgacgatggtgtgctcctcgggctcgtacctctggatcgccgtgtccacgagccccatcccgaatcccacgttgagcaccttgccgccggagcacaccgaacgacgcgtgcgcctccatca

SEQ ID NO: 392375 - DNA, 556 bp, Oryza sativa
ccctgtttacgagaggaggagaagaagaaccgcacgacaccccaccccacctcccgatcgccaagaaccacaatccccaatccacccaataactctaattcctcccccgattcgccctcgaccaagaaccactcggatcgatcaaagccgccacctttccaccaaatccccaatcttttttttttcttcttcttttcttgcaattgatgcgcttcgccatcgggatttgaggggaggaagaagaaggggatggcgtgcagggggttcttcgagtgggtcctgaagctgctcaacttggtggtgatggtggtcgggctggccatgatggggtacggcgcctacctcctcgtggcgtggctccagctgctgccttcgccgccgccgctgccgcctgcgccggcggtggctcccggcggcggccgaggcggccagatggtgcggctcgggaggccgctgctgctcctcctcgacgtgtcgtacttgcccgatgggacggcggagaggctcttcgctgcatggtttatatacgcgtttattggtgttgttggaatactct

SEQ ID NO: 392376 - DNA, 740 bp, Oryza sativa
  unsure (1)..(740): unsure at all n locations
gtttaatgagtggctggtgtatatcagaaggacagcaaaggaaattggtaaggtttcgataagccagncatccttggctcgtcagaaaaatgagggaatacattcccaacagagggaagcagaggactgcagccgtattgggtttgacgagcatgcttatgccttggatttggatctcataggtgaggangaagtactggaattcgatcttacaccagtataccgagcggactacattcacacatgccttggtcttggggaaaaattccgagaatactactacaataacaggcttatgcaacttaatttggacctgcaaattcccacgacacaaccgtatcatggtagtctcatcagcacttccttgctcagatagctgggttctttattgttgaggaccgtgtccttcgaactgcagatgggcttctttctgatagtcaggttgagacaatgtgggggacagctatttctaaggtcacatctatctgagaggaacagttctctcgcatggatgctgccaaccacctcctactcgtaaaagactatgtcactcttctgggtgcaaccatgaagaagtatggataccaaaccacatcattgcttgaaattcttgagaagaatagggacaaattctatcaacttcttctttctgattgccggaaaaagatagatggcatcttcactaaggactcatatgagcagatgatcattaagaaggaaaatgagtaccacatgaatgt

SEQ ID NO: 392377 - DNA, 618 bp, Oryza sativa
agcatctactagggtttctctctctctcctccccccctacacagctcgccgctgccgccacaccaccgatggggaaggcgagcaagaagtccgtggccgtggccgtggccgtcgcgcccgctgctgtgccggccaaggggaagggcggcaagaagcggtaggcggaggacgagatcgagaaggcggtgagcgccaagaagcagaaggtcgcggcggcgccgccggccaaggccgtccccgcgcccaaggcggacgccaagaaggccaagaagcagccgccgcccaagaaggccgcgagcagcagcagcggcagcagctctgaggaggactcgtcggagtccgaggaggaggtctaggtccaggtgaagaagactactacgcctgtcaagcaggagtcttcttctgatgagagcagcgatgagagctctgatgatgaggatgctcagcctgcggatccggttgctaataatggtctttaagaaaggcaagccagcgagcagcgattcttgagaagtgattccgatcgatgaaatttgggattgaggacgaaacaacccctgctgcccccaattgaaaaaaaaatcttccttgttgtaccggccccaaaaaaaaaaataa

SEQ ID NO: 392378 - DNA, 766 bp, Oryza sativa
  unsure (1)..(766): unsure at all n locations
cctagcaactactagggtttctctctctctcctccccccctacacagccgccgctgcacccgccgccgccgccgccacaccaccgttggggaaggcgagcaagaagtccgtggccgtggccgtcgcgcccgnaactgtgccggccaaggggaagggcggcaagaagcgggaggcggaggacgagatcgataaggcggtgagcgccaagaagcagaaggccgcngcggcgccnncggccaaggccgtccccgcgcccaaggcggacgccaagaaggccaagaagcagccgccgcccaagaaggccgcgagcagcagcagcggcagcagctctgaggaggactcgtcggagtccgaggaggaggtcaaggtccaggtgaagaatactactaagcctgtcaagcaggagtcttcttctgatgagagcagcgatgagagctctgatgatgaggatgctaagcctgcggatccggttgctaataatggtcttaagaaaggcaagccagcgagcagcgattctgagagtgattcagacgatgaaatggatgaggacgagaaacctgctgctccagtgaaaaaaaacttctgtgactgcacaaaagaaaaaagatgtattctgacaggctctgagagtgagtcagaatgagagtgaattcggacgaaggatgttgccttacaaagttctcaaagcccccgcgctgttagcctgcccaagaaatgaatgaattcctactggatgggttcccgaattcccgaaaagttgactcct

SEQ ID NO: 392379 - DNA, 1146 bp, Oryza sativa
  unsure (1)..(1146): unsure at all n locations
ccgttttcttccctccgactccggccacctccgcggcggcggagcatcctagggtttcgcgccggctcgccgccggcgtaacggagagggagggtgtaacacgcgcaggcctgcgccgtcgtcctgctctgggaacttccgcgtgcagcgagggatggacgagtgggttcgccaggccgaggtgtgggtgggacaagccgagaggtggatccggcagcagcctcccgagcaggtttacgtcgccgtcgcggtggtcgccgtgacggttctgttgctggtcgcagtttcgtgcctgaaatcctcgaaagcaaacaccatagtgctatctggggctcagtggtaggggcaaaactattctcttctaccagcttcgggatggatcaacacatcaaggaactgtgacttcaatggaacaaaacaacgatactttcgtgcttcattctgagctggagaggagaggcaaagtaaaacctgttcatgttgttgacgttcctggtcatgcaaggctcaaacccaaacttgatgaagtcctgcctcaagcagctggaatagtttatgttgttgatgctcaagatttcttgtctaccatgcatgctgctgcagagtacttgtatgacatcctgacaaaggcaactgtagtgaagaagagggttcctgttctgatattctgcaacaagacagataaagttacagctcactcaaaagaattcatcaagaagcaattggaaaaggaattaaacaagctccgggaatcaaggaacgccatatcatctgctgacatcactgatgaagtcaagcttgggaaccctggagaagcatttaatttcagccaatgccagaacaaggtgacagttactgaaggtgctggtctgaccggtaatgtttcagcggttgagggagttcattcgtgagtatgtgaaagctttaggccttagagttgtcggacctttacagaatagagtttgtattcgttcaaaattgtcatctaagcggagactgattttcctgttggaagaaggaaccccctcaccctctcatctgcatctgcttcattccattcatgcgtgtgagaaatttcaacattttcttgaaaggaaagcatcggacattcagttgnnnnnnnnnnnnnnnnnnnnnnnnnnnnnn

SEQ ID NO: 392380 - DNA, 582 bp, Oryza sativa
gttgtatacaacaatatctgcctgagcgaattttggcctttgtgagcagctaatgtgggggcctggatgcagtgccccatctaactcaatacagcggaggcctgtaggacaggcttttcagaatgggaaggggaaggaggtgcagaacaaggcaccaaggacaatggatgcgctctttgcacaaatgaagcagcagaggatgaggaccattccacagcagcagacgaatactgcccctggccggcagattgcccagcagcggcgtaatcagcaacagcggcgaggaagaggatatggtggccgcaatggtggtaaccaatgagttcaaccacatcaaatgtccttcatgggagcattttcagttcactggtttcttgggtgggagaagaacccctggaatgctaacttggcttctttgttcccttgtattgttaggagagtcgcggacagaatcttactgaagtctgtatgcagtttttctggtttcctatttctgcttcagcttgtataatgtccgatggagtgtatgaaaatttgcctttttgtgttaaaaaaaaaaaacaccaaaaaaaaaaaaaacac

SEQ ID NO: 392381 - DNA, 769 bp, Oryza sativa
cttttatattatatgaaggacagcgaggtgactgttggaagagagacagaagacataaaagttgctgttgatttgggaaaagaagggagggcaaacaaaatatctcgtagacaggcggttatcaagatggatgaagctggttcttttcatatcaaaaacattgggaaatgttcaatttttgttaatagcaaggaagtaccaagctgcagacgcatcatcttaagttcagattcgttaattgagataaaggatatgaggttcattcttcatgtaaaccaggatgctgtaacgcaattcgtcacacgcaccccgaagccggagcactagatcctaactggttttgttcagcaaccccttatgagaagctcaatgccacattgtcactggtagctagtggagatcattgagtgagcagcgctcacagggtgggctcgttgtgctgctctactccttttcaagtaggatgtgataccaccatggaagctcatctcgctccgtgtgcctagattgtaaatgtgtcacatgtagtgtcaagtagtctctcttatgctcggttcataaagcatgaatccttcatgtccagtagctaagctagcacatttggtctgcagcctcagcctgcagcaacaaaagattctccgtagtatttattcattctatcctgtcatgtaaattgtagatggctgccgaccagtggggttggaaatgtaaaaaagtgtggtggttctatcatctatgctactacagcaagaggatgcaccttggcaag

SEQ ID NO: 392382 - DNA, 406 bp, Oryza sativa
  unsure (1)..(406): unsure at all n locations
ncgaagaggtcacctcggtcacgcaggcaggaactggacctgcagccgtcaactgtggccagaagcaacggagatcaagatgaccagcttgcagaacacaaggacaagtagcacttctgctcgctccaatcaagctccatttgctcaatgcccgccatacaataacatttctctggttgggcaggtttccagttgatcagatctagagagtataagcagcttagctagctttaaagtagctttagactcattttctgctcttatccattatctagatgtcaagaaaaaagagacaggaagcccttttcttagtttgacagatgccaagcgaaatcccctcagattaaacaatagcttacctctacatgaacagaatcaaatcaaatgaaatcttctatttgtcatg

SEQ ID NO: 392383 - DNA, 851 bp, Oryza sativa
ccgttacccgacgacgccgccgcggcccgcgtcatgtgcttggctcgccgcctgcgccgtcgacgcgccggtctccgtcgccgggcgccctgctgcttccatcgcatactctcgcctctgaccccgagtccatctccccgtcccggcgtcgcctcggcctcgactcccgtctcctcgaggagttcgccccgtcgcctgcggccgagctccatccatcccgcgagcggcggtgcggtgttcctgctgcttccgcctgcgggcgggagagggaggagcgggtgaccatggtgagcatggaggtcaccgatgagatgttcaagtgcatggaggttgggctggccttccgggactataatggaagaatcagttctatggatttccacagcacgggtactaaatacctcgtgacagcatgtgatgatgaatcaattcgcctatatgacattcaaaatgctgtgtgtttgaagacgattaatagcaacaaatatcggggtgagcttgtgtgcttcactgaaaacccaacttatgtcttgcattcttcaaaaaatggatgggatgattctctccgtctactctcactggtcaataactgttttttgagatatttcaaaggccatctagacagggttgtttctatctcattgtgctctgagaacgggaacattctctctggttcacttgatcgaacagttctcctatgggattcaagggttgaaaaagcacagggtttgctgcgtgttcaggggaggcctgcagtttcttatgatgatcagggtttggtttttgcaattgcatatggtggctacataaggatgtttgatgctcgaaattttgagaaggggtcgtactga

SEQ ID NO: 392384 - DNA, 554 bp, Oryza sativa
agcgcagtacgtgacacccgcacacgaagccatgggacgccgcgcgcgcgctctcctccacgcgccggcgccgctcctgctgctgctggcactggccgccgcggcggcggcggtcgccgtggcgtcgggcccgcccttctcctgcggcgcgccgtccagcgcggcgttctgcaacccgaggctgcccatcgagcagcgcgcggacgacctcgtgtcgaggctgacgctggaggagaagatctcgcagctcggggaccagtcgccggccgtcgaccggctcggcgtcccggcgtacaagtggtggtcggaggcgctccacggcgtctccaacgccggccgcggcatccacctcgacggcccgctccgcgccgccaccagcttcccgcaggtcatcctcaccgccgcgtcattcaacccgcacctctggtaccgtatcggccaggtgatcggcacggaggcgagggcggtgtacaacaacgggcaggcggaagggctcacgttctgggcgcccaacatcaacgtgttcagggacccgaggtggggccgcgggcagg

SEQ ID NO: 392385 - DNA, 905 bp, Oryza sativa
gtctcgccggcgcccagcttctcttccttccttccttgttgaggtctgaggtcttggatggtggccttatgacacacggcctgcactagtgtttacagctccaagtatggcttccagagaatccttcatgagtaccattttcttcttcttgcttctgttctccctcggctgcaagtgtatagcttcagagttacacttacatgcgacccagactgcggtcctcaaggttgatgcctcaccgcaacttgctcgacagatccctgacacactatttggaatattttttgaggaaatcaaccatgcaggggctggtggaatatgggctgaacttgttagtaacagaggttttgaagctggaggccctcataccccatcaaacattgatccatggtccataattggtgatgactcttccatatttgtggcgactgatcgaacgtcatgttttagtcggaatactgctgctctaaggatggaggttctctgtgataattgcccagctggtggtgttggcatttataacccagggttctggggcatgaacatagaagatggaaagatctacaatttagtgatgtatgttaaatcaccagaaactgtggagttgacagtttccttaacaagttctgatgggtcgcaaaatttggcttcaactaccataccggtttctggtgcatcgaattggacaaaactggagcagaagttggttgctcaaggaacaaatagaacctcaaggcttcaaataacaactaacaagaagggagttgtatggtttgatcaagtatcgctcatgcctgcagacacttacaagggacatggttttcgcacagaacttatatctatgatgttggacttaaaaccacgattcttgagattccctggaggttgctttgttgaaggggaat

SEQ ID NO: 392386 - DNA, 1124 bp, Oryza sativa
  unsure (1)..(1124): unsure at all n locations
cggccttcagcctcggcgagccacgcttccaccggaatcggggccgcggcggtggcggcggcgtggaggcttcgctgggtcgtggcggacgcggcggcgtctccttcctcagcgtcgccggcgggcgcggccggccgccgagcaggcccgcctcctacggcagatggagagcatagcaaaggcctataaagtcaagtttgtggtggatgttgctcagctaggggaggaagacccactttggcaaaatggttccctgtacttccaggctctgaagatcccctggtattccactacatcatcccatggacagatcattggtaattttctgaagagagtgatgatgccatatgatcaaagtctagaaattattggtatggacacagggtctttacagggacctattcatgatgggaaaataagagcttctagtaggggacaaattaaatggctagagcaatcaatagcggcaaccagcagtaactggaaaatagttgttggatatgatccattctttgtttgtgctgaggcgcacacactggaaacaacaaagttgtatgagcctcttcagcgtttttttgcaaaatatggagtgaatgcatatattagcacgggaggtcattgtggttacttccgtcaagacaattcaatgctgtatattggaaatcccagccctgatgaccttacaagctcagatggtttcctcctgcatatagtcaaccttcttgagatggagtcccttttgataaatttagaaggcaaggtggttgaaagatttgtagtaaatcatcatcgactagaagccttgtaaattgtatgccttcaaatttctagctcatgatctcagcattcctggattaaancttgccagtatatcacaaaccacacagattcgtattgaattgcatccgatttgtanttgctanctctttaggcgttcagattctgtagcaaantcagtcttttttccgtcaattgcaaataanccttttcagagtantggtttancacagttttgtctggctggnactactgtatancctggctaattatgtattgcttggtatatatacagcaattaactnattatcatcaatcnnnnnnnnnnnnnnnnnnnnnnnnnnnnn

SEQ ID NO: 392387 - DNA, 837 bp, Oryza sativa
  unsure (1)..(837): unsure at all n locations
cccgttttttgcgtgcgtgtggtttccaactttggctcgcccctccgggcgcaaacaccacaacacctcgcgcccatgcgaggacgcagccatccatccatccacccagcccccacactccttcggcgcgcgcgtccgtcctcgatcgcgcgcgcgtcgacgagctaagccggcccgggaaacccaaggcccctctcccttcctcaagcgcgccggcgggcctcgccggcgcgcgacattgagctcaacccccccgtcgtagtcgcacgtcgagcgccaccaccaccgccagcgcgtcgcatcgtacgtcctccacgcgcggcgccgtgctaggcaacctcctctgctgatcgcccgcctcctcatgagcgtgtgacctgctgtcgaatggtgcggcggcacctgctgcgcggacacagcctggacaggttcctgccgatcaggagcctcatcatgtcgtccagctcttccttctcgtcgtcgtctccgtcgccgccgccgccgtcgtcgtcgtcgtcacggggaagcagcagcggcaggtggtgcggcgtcagcgtggccgaggaggacgaggacgatgccgccgtctccgcgacgacgaccccgccactgccgccgctgcagaagcgggtgctgtcgaggagccacgggtccaaggccaagccgctgggcggctccgtcgaccacctgccgccggtggtgccgccatcgtcgaagaacgtccgtgacagtgggaccgccttcagagattgatctggtgaaggagaagtttcgccaagctgcttgcttcggcgaggacatgttcccgggcaccggcaaaggtgtcttcctnccgct

SEQ ID NO: 392388 - DNA, 1026 bp, Oryza sativa
  unsure (1)..(1026): unsure at all n locations
agcgaancgacnggtcaagccggggagggcacgcacgcacagatccctcccctctcctcgctgcccatctctctctctctcttcccctcgacgcggcgagatcaggaggaggaggaggagaggggggaagggaggaagggaggctgagatcccgaggccccccaccggagacggcgaatcctggtccggcgcctggtttgcccccggattcgggaggagtttccgttcggggtcgagggatttcgggggcgcgcgcagccatgaacgagaaggcctccgtctccaaggagctcaacgccaagcacaagaagatattggaaggcctcctgcggctgcctgagaatagagaatgtcgcagactgcaagtcaaagggtcctcgatgggcaagtgtaaatcttgggatctttatatgcatgcagtgttctggaattcatagaagcctcggggtacatatatctaaggtaagatcggctaccctggatacatggctgccagagcaagttgcatttattcaatcaatggggaatgaaaagtcaaatagctactgggaagcggacttgccccctaactatgatagggttgggatagagaacttcatccgtgcaaaatacgaggacaagagatggataccgagcgatgggttataaagaccatcgtgtggtgctagagatgagaagagctcagagtcacaaactagtgttaacaggggtggccataatcaaagatcttcatttgagcaacaccgcacttcaccagctgcagtgagcaaaattgctccagtggtttctaggacgcccacccaggcaccacattagccaaaagcacaaccatcagttcccaaggtttcaccttctcaacccgagaaatcaccttctaatgcaacaccaccaaaggttgagaagccatcagttgcaccacctcctaaggttgactatgcaactgatctcttcaacatgttatcaatggatggaacaaccgagaacgaagccgagtcatcttctaatgatgatagtgcatgggagggc

SEQ ID NO: 392389 - DNA, 522 bp, Oryza sativa
ttgttgagagtctggatagttttactctcatttatacaaatattctggaacatcaaccagattgcccgcctgaggttgttgagaagcttgtgggaatgagggaaggcattccaaggaaggaagccaaagaggttgcacaagagtgcaaggaaatatacgagaactctcttgtagacgggaaccctcaaaagtctggttttgtgtttggcaaattgaagtgcctaacagcacggaaaggcatatggagcaagcttggacagtaaatgatgctgcgactttcgagtagagtgaattcacgccctaagagaattgtttcatgttcatgtgataattcttttgttcatttgttaagcttatggtattgtcaccatgcccttgtgtgattttttgcacgggaagagcttagggtgtatattctcgttggtagtaacagatgatctaagtgcatagatctaatccttttgaaattctatttttatctattccataaagtggttggagcgagcaaaaaaaaaaaaaaaa

SEQ ID NO: 392390 - DNA, 535 bp, Oryza sativa
ttatattcccactctctcctcttcccgatcccgccaacacccaaaccctaaccctcgaagcgacgcaacccaccggcggcgatggggcagggcactcccggcgggatggggaagcagggcggcctccccggcgatcgcaagccgggcgacggcggcgccggcgacaagaaggaccgcaagttcgagccccccgccgcgccgtcccgcgtcggccggaagcagcggaagcagaaggggcccgaggcggcggcgcgcctgcccgccgtggcgccgctctccaagtgccgcctccgcttgctcaagctggagcgggtcaaggactacctcctcatggaggaggagttcgtcgtcagccaggagcggctgcgacccagcgaggacaagacggaggaggaccgaccaaggtcgatgacctccggggcacccccatgagcgttggctcgcttgaggagatcatcgatgagagccacgccatcgtctcgtcggtcggcgggccggaatactatgttggcatattatcattcgtcgacaagga

SEQ ID NO: 392391 - DNA, 405 bp, Oryza sativa
  unsure (1)..(405): unsure at all n locations
ttccgacctagccgacactacgtgctggagccagcagagagtaaaatccaacgtgattctctcggctggctgcgcctgtgtgtgcagctaagctaagcttgcttgctctctcttcttcttcgtgttgttgtttctctctctgtctcgctgtctgttgccaccattaatggctggctccgtgggtagctgagctctttgctggccgagctgagctagcctacctagctggggggagagagagagagagagagagagagcataaggatcttggaggaggtggagatggagtacggcggcgggcgggaaggaggaggagggatgaacggcaacgggacggcgtacgcgggggcgctgtcgccggcgggagngtacgcggagtcgggcggngcggagccttacgtggga

SEQ ID NO: 392392 - DNA, 427 bp, Oryza sativa
attgtcgctaaagagctagaagctgggctggaccatgtatgaggtctccaagtggaggttggcagggtgctcttgaagctccgagaaaatcttgaattatctatagcaagaagcaaccgagctcagcaaaacttccgtaacctgtcaacgaaagctggagttccccttagaactttcctgttcggcacgaagccaaagaaaccatcactcttttcatgcatgggtcctggggtgcataagcatcccagtggctcaagggctggtcgtagatgagaatggttggatcatcaactttcttttgtcaattaatacagaacagagctcagtgtacctgtcaattgatttgtggtatatgcagtttctcatagaccttaaatggaaagaaccctgcatctcttaatataaatttgggtcaccctgtccgctc

SEQ ID NO: 392393 - DNA, 1085 bp, Oryza sativa
  unsure (1)..(1085): unsure at all n locations
ttttgaactcttcatattgccctgttctgaagcagcttgaatctgtggccatgaaagagtactattttaaggcagaccgtccaaaaactctctctgctggttcttctaatctgaaatataggaaccccaaatatctttccatgctcaaccatttaagattctaccttccacaagtgtatcctaagttgaataagatccttttcttggatgatgacatagttgttcagaaggatttgacaggactctgggaggttgatctaaatgggaatgtaaatggtgctgtggaaacatgtggggagagttttcaccgttttgacaagtacctcaatttttcaaatccaaattttggctcagaacttcgatcctaatgcttgtggctgggccgtatggaatgaatatgtttgatttggaagattggaagaagaaggacattactggcatttatcacaaatggcagaacatgaatgaaaacaggctgctctggaagcttgggacactgccgccaggtctcctaacattctacaagttaacacatcccctggacaaatcatggcatgttcttggcttagggtacaacccatccatcgagcgctcagaaatagataacgccgccgtcatccactacaacgggaacatgaagccatggctggagattgcaatgtcgaagtaccgaccatactggacaaagtacatcaactacgagcacacctatgttcgtgggtgcaagatcagtcaataggcttttttttttcctggagtgatttcattctttcagtgatgaatagctagtgggacttggaaccaagcccccttgttagacttcgatatagtaggaacaacagtaattccattgcatgttcagatgttctttgttcgtgttgctacttgctataggtatcttatgtatgtagttgcctcccacattcgttttctagcccccctttccattagccctctgtggtatctgtaaccatcttttcttttcttcagaaaagaatgatgaaccctgtgattgttctcacctgataaatgaaatgtctcaaaagtttgtgtggctnnnnnnnnnnnnnnnnnnnnnnnnnnnn

SEQ ID NO: 392394 - DNA, 548 bp, Oryza sativa
  unsure (1)..(548): unsure at all n locations
ctagatctcgccgctctctctccgtctcttgcggtctcgccgtcgtcagtcgccctcttccctcccctccgacctcctgtcctctccagtctcccctttccctcccatctccccacggtagcgcgcaggacgacgcacgggcggcacgcggggaggcgcacaggcgggcgtggcgagggatgcggcacggcgcataggcgcgacggctggcaaggggacaggcgcggcgagcgggcgacacaggtgacaggcgaggtgaaacacaccgagagctacatgcccaaggtgccaaaatggagaagcatactacaggcagatgcagattcgatcagctgatgagccaatgtctacattttacaagtgttgcagagaagaatgccaatttgattgggagggaggactgactttagtaatatttcttgtttaatgtgtgtgggatatttttcctgctaaaactatgtaatcatatgaaaccttttgtaatcagctcatgccgcagcaaagagccaaagaaaacttacacatgggnnnnnnnnnnnnnnnnnnnn

SEQ ID NO: 392395 - DNA, 877 bp, Oryza sativa
  unsure (1)..(877): unsure at all n locations
ctcacccaccacctctctctctactcctcctcttctcctcctccgtctcgagcgagctctctccttccttgtctcgggtctcggcattgcatttgcattggggggcattgctattgcttcgcttgcgcttggccacccaccatttcggcgcggagaggagaccgcttcacccgccgatctgcgagaaaccctctccgcctcgcctcctccacctcccaatcttaacccaacctccccccttcctctcgcgtcgaccccttgctttgctcctccttcaaccttcttctttcttggagtttcttgagagagagagagagagagagagagagagagagagagagagaggggggagcggtcgcaggaggaggaggacggcggcgtctgctgcgaccgacggggagcggcgaggatgagcgcgtccaggttcataaagtgcgtcaccgtcggggacggcgccgtcggcaagacctgcatgctcatctcctacacctccaacaccttccccactgattatgttccgacggtgtttgacaacttcagtgccaacgtcgtggttgatggtaacaccgtcaacctcgggctatgggacacttgcaggtcaggaggattacaacagactgagaccactgagttatcgtggagctgatgttttccttctggccttctcgctaatcagcaagggccagctaatgagaatgtttcaaagaagtggatacctgagctgaagcattatgcacctggtgtgcctatcatccttgtgggaacaaagcttgatcttcgagatgacangcagttttttgtggaccatcctggtgctgttcctatcaccactgctcagggagaggaactaagaaagcaaataggcgccccatactac

SEQ ID NO: 392396 - DNA, 641 bp, Oryza sativa
cctctgttcgtcactgccttcctctccaagtccatccccttccccgatctaagatccatccgatccaggccatggcggcgaccatccagagcgtgaaggcccgccagatcttcgacagccgtggcaaccccaccgtcgaggttgatatttgctgctcggatggaacatttgcgagggctgctgtgcctagcggtgcatctactggtgtatatgaagctttggaattgagggatggtggctctgattacttgggaaagggtgtcctcaaggctgttgacaatgtgaactctattattggaccagcattgattggcaaggaccctacagaacagactgtcattgacaacttcatggttcagcaactggatggaaccaaaaacgagtggggctggtgcaagcaaaagcttggtgctaatgctatcctggctgtctcacttgctctatgcaaagccggagctattatcaagaaaattccgttgtatcaacacattgctaaccttgctggtaacaagcaacttgttttgcctgtgcctgctttcaatgtcatcaatggtggatcacatgctggccacaagctagctatgcaggagttcatgatcctccctactggtgcttcatctttcaaggagggctattaagat

SEQ ID NO: 392397 - DNA, 729 bp, Oryza sativa
gtctgtcagaggaggagatcaaggggctgaaggggatgttcaagaacatcggcggggacaatagtgggaccattacgcttgaggagctcaaaaatgggttagcaaagcagggcaccaagttttcagacaacgaaattgagcaacttatggaagcagctgatgctgatggcaatggaattatcgactatgaggagttcgtcaccgcgacggtgcacatgaacaaaatggatcgagaagagcacctttacacggcattccagtactttgacaaggataatagtgggtacatcacaaaggaagagctcgagcaagccttgaaggaacaagggttatacgacgccaacgagatcaaggatgtcatcacagatgcagactctaataatgatgggcggatagattattcagagtttgtggccatgatgaggaaaggatcaggctgtgcagaagcaacaaacccaaagaagaagaggcgagatctagttctatagcgaaacagggtagtgtgtatagtggctggtttgtgcacaatttcaaacatgatgtgcatttaccacgagtgtaatgtatacaatggaattttctttccaattgcatatttgcatttcaggttgggctcaggttcatgtttggtcttgcacattgtcctggctagttgttgggaagatggatttgttccttctttctgttcagtcatcttgtacactacatgattccatcctacctgattag

SEQ ID NO: 392398 - DNA, 414 bp, Oryza sativa
ctcgaagagaagcaaaatttggtgatttggtcgagcacggcgacgcatccacgcgagcccgcctccctctccatcccctccaccgtcgtcgagttagaccaaaccgccaagcgaagccacgacggatcgagccgccgccgccgccgccgtgcacgcccatatctagggtttcgatggagcccgcctcctcctcgtcgccggcgccggcgccggaagccgcggctgcggggaggagggtgccggaggcggcagagctgaagctgcggcggaggacgctggagacggtgctggagcagtgccagcgcgcgctcgagatgatgcgggaggctgatctgggcatcgccgtgtctgaggaggaggaggagggggagggcccccacgccgtggcggcgaatcccgaggtggggggcagcg

SEQ ID NO: 392399 - DNA, 719 bp, Oryza sativa
cttccttctgcatacaagaggctgcctcccatttctcttctctgtcggtgttctcctcaagatctgtcttaagttcttgagatctgtttcagaactaagctgagaagatggtgaagatctgctgcattggagctggctatgtcggcggcccaaccatggccgtcattgccctcaaatgcccagcaatcgaggtggtggttgttgacatttccaagcctcgcattgatgcctggaacagcgaacagctcccgatctacgagcctggcctcgatgaggtcgtgaaggagtgcagaggcaggaacctcttcttcagcactgatgtggagaagcatgtcgccgaggcgaacatcatctttgtatctgtcaacacccccaccaagacccgtggtcttggagcaggcaaggctgctgacctcacctactgggaaagtgctgctcggatgattgctgatgtctccaagtctgacaagatcgttgttgagaagtccactgtccctgtcaagaccgcagaggccattgagaagatcttgacccacaacagcaagggcatcaactaccagatcctctccaacccagaattccttgcagagggcactgcgattgaagatctcttcaagccagacagagtgctcattggtggccgggagactcctgaaggaaagaaggctgttcaggctctcaggaagtttatgcccattgggttcctgaggacaggatta

SEQ ID NO: 392400 - DNA, 763 bp, Oryza sativa
ccttcccaaaatccaccggagaagaagacgattagccggggaccacgccggagaaaaaaaaatgctgtcctccaccgccttctcggcctcccgcacggccgccgcggctgggcggcgcgggtcggcggcgggggtagtggttcgcgcggtgcggaactacgactcgatcccgaagcgggagcccctcagctcgagccgcagcgtcctcgacgagttcctcaggcaggagaagcctctcgtccagcgcaccaaagaccagatcacagattattgcacaaccctagaaggtgatgagtgctgcagctggggggatgcttactttgaactcaataaacttgagcaagagctacccaaagaggaaattgcaaggatggtgaaggactccgagggagatccgaggtacctgatcaatagcatccatcaccgttcagatctaagaaagaagatggctgagaaatctcataattcactatcatcaaactccctggggcaagctgcgaagccaaggcctttccctgtgcctgacggattgccgaaaacacaggaagagcttgctgaagaacaggaggcccctaatgccggagtcctcctatacgaggctactgagaagaatggggagatttcctgattggtatacgcctcgcccagatcatgaaaccgactgaatcaagtcaccaagcatccatataccgctccttgtgaaaattttgtattggttgccggataattatgatgcctgaagttctgtggtttgggtaatgca

SEQ ID NO: 392401 - DNA, 419 bp, Oryza sativa
  unsure (1)..(419): unsure at all n locations
cggacgctggaccaaaatccaccggagaagaagacgattagccggggaccacgccggagaaaaaaaaatgctgtcctccaccgctctccggccgctggcgcaccggccacggccacggccacggccaccgccttctcggcctcccgcacggccgccgcggctgggcggcgcgggtcggcggcgggggtagtggttcgcgcggtgcggaactacgactcgttcccgaagcgggagcccttcagctcgagccgcagcgtcctcgacgagttcctcaggcaggagaagcctctcgtccagcgcaccaaagaccagatcacaggtaaagctgctgggttgtgttgctgctttancgagagccgagttatcacctcactgcctgttttctagcaatattttgggattattttactgcgtggaat

SEQ ID NO: 392402 - DNA, 737 bp, Oryza sativa
gttggggcatcgaggagggactcggccgcatcgcgcaccggtgggctctcctctcctgctctctctctctctctcgcaccaccgctctcttccgccgctgcggctcacggctacgcagctctcttcccctcctcctcggctccgctctcttcgatcgatctagggtttggtcttctgttgggggattgttgttgctcttccgcgcgatcgatcgacgccgcgtcctgagggtttgaggggtttccgccctcccgccgcacgcccgcacccccgcgatgtccggccggagctcgccgatgtacgaggggctcgcgtcgcgtcccgacgagtgggacgtcgtcctcaaggtgaagtatggtgaaactcttaagaggttcggtgggtatgtgcaaggaccacaattcagcctgaacttatccgctctccggtccaagattgcatctgcttttaagtttggttcggatgtcgacttcattctgacttacactgatgaggatggggatattgtcatgctggatgatgatgatgatctgcatgatgctgctattcatcagaaactgaaccccctcaggattaatgttcagttaaacaacagccacactgcagcacctcaagccaaacagcaggattcagataatatacctctcaggtccaccaccactgaagacccactagctcatattaaatcagttatcgatgaggttttgaagccgatatctatgaagtccatccaggag

SEQ ID NO: 392403 - DNA, 400 bp, Oryza sativa
ctcgcatttgcagttgcagagcaagaagcagagagagaagaagaggaagcagaggaggaggagtccaagaattgaagcaggagaagaggaggtggtggtttgattcaagaagaaggagaagagcaagagcaaggatgttgcgaggagggacgagcttgctggggatcgtcaacttcgtgacgttcctgatctcgatcccgatcctggggggaggaatctggctggcgtcgagggccaactccaccgactgcatccgcttcctgcagtggccgatcatcgccatcgggctcgccgttatggtggtgtccctcatggggttcgcgggggcgtgctaccgccagacgtggctgctccgcctctacctcttcgccatgttcttcatcgtcgtcgccctcctctt

SEQ ID NO: 392404 - DNA, 259 bp, Oryza sativa
atgttcaaaaagtcccaagcaaggtgggagctaacggatacggacgaagcccgcattagtgttgcttaagatatattggttggtaatcaggaacgttggcagtggtagagaactccatagttggataaaagctttttagaggtgggtcggtaaaatgaaaagaaactcaaggccggtgaaataatgcgatcactcacatagacataagttttgtttttccccgagctcccagagataatagatactagtactgtagtac

SEQ ID NO: 392405 - DNA, 837 bp, Oryza sativa
  unsure (1)..(837): unsure at all n locations
tttgtacccaaattcagtgctgcgttttgcctttagcnagttttccaatgatgggggggcaagagcagctttaacacttggtggaaccgtgcttggttattaccctgtgagagttctgccatctaagaccgcgattttgccggtgaaccctaaatttttacctcgaacagaggacgagaaagaaatggtgtcaaggactgtgtattgtactaacatcgataagaatgttcctgaagatgctgtgaagagcttctttgaggggatgtgtggtgaagttgctcgactgaggctactgggtgattatgtgcactccacatgcatcgcgtttgttgagtttgttcaagcagactctgctattcttgctctgagttgcagtggcatggtccttggagcgcttcccgtcagggtgagcccgtcaaagacaccggtccggccccgttcgccccgtgtgacgtcgcactgaaacccggctctctcatctgaagccatcgtccagggcagcaaagcctcctctctagtctgtgtggccttagagaccgtctgtcgcgtcgcggatcagtaattgtcgtcgaagagagtttgtccttttggttattctactagtcttagcagaaggccccctacataccgcgctgatgtgttcttggatcagacagagaccaatctgtatgttctccgggagctctattttgaccccctctcatctctcctctgccccccaacttatcacccccttcccttttgttattttgttatcgatggatgctgtagcggcctttgacaggcattggaacaaataatgtctatggcttgtcctnnnnnnnnnnnnnnnnnnnn

SEQ ID NO: 392406 - DNA, 397 bp, Oryza sativa
  unsure (1)..(397): unsure at all n locations
tcagcgagttcgaatcgaaaagcgagcactcgattcgacggagagggcaccccactctccccaatccccaaccccggcggcggttgcggcggcggcacgggcggagatgctgcagttcccggcgctgatgcggcagtggccgtcgccgccgctgatcccggcgtccacgctgctccccgtccccgccaccacccaggaggacgagctcctcctcgccatggccgagtccgacctcgaggacaagctgaacgagatccgcaagaccaacagtaacctggtgatcataggcaagccaaccggcgacgtcaaggaggagtacgacgccgaggncgaggacgacgacggcgacaacgttgagggagttcgacgnagacgacttttgaccangagaccggct

SEQ ID NO: 392407 - DNA, 508 bp, Oryza sativa
aggaaacaaagcgatccttcttgcgctccggcgccgccgtctccccctcgcgcggttgcctgagccaagaacaggatcggaggccaggccccatgcatgcatgttaattagtctgtcactgatcacttcatcccattagccattagctgtttctcatccagacggacgcgccatccaacacacatcgatcgatcggaggttgattggccggccatgacgacgacggccgccggcggagcaccctgtgcgcggcgagggaggagcaggagctcctggccacccgcctgaatgtgaacggcatccggccgccgcattgcgccgcggaatctatcctcatctacctcaccgcgccggggctctccatgatgcccatgcgggtgatggcctccgacttcattggctccgtcaagctccgtgtccagacctccaagggctttgctcgtcgcatgcagaagcttgtcttctatggcctgtagctcgtctggaactacagtcgcatcatggacta

SEQ ID NO: 392408 - DNA, 460 bp, Oryza sativa
tttgacttgtccctgcagtccgcagacacgggccactgataccggccacgctgagccatcaagagttgaccgcgcctccgttcctcgaagctctgccctgtctgctcagaatcagattgatgatgagctaggcggccacatctcttcaatcttcacttgatcatcatagtagttcatcgattgcttggagtgatttcccaagtacggcagggaagcatcaagggttacataattaccgtatgagaaagaatccaagtcattgaaacgtggagcgttggatcaccatcggacggcccatgtagcccaactccttcgctgccacgcgacgccccaggcccagcccaagccaaaaccaaaccaaacaaacccctgtccgtcacctatccaaacagataaaggtcgtgcgcgcgcacggacacctctgccgcgcaaaccaaagcccttttccatggacaccacc

SEQ ID NO: 392409 - DNA, 549 bp, Oryza sativa
aaaaaaaaaagcaggagtggagaggagaatccgccgctgcgccgtcttcttctccattgaagccaagctcccccaggccttctcgttctccccctcctcctcgagctctcgctggtgcggggagcgaagtggagaggagaggccgagagggacgagagatcgagagggagagggagcaccgaagcagcgggcggcagatgcggccttcgctccgtactatctattttcttcttttgctacttccacatgtggttttttctagaccactctttccactaccaagcaagagtaatggaatagagaagagacccttacaaacttttcgaccatataacattgctcaccgtggctcaaatggggaaattcctgaggaaacagctgctgcttacctgagggctattgaagaaggtgcggattttatagaaacggacatccttgctagcaaagatggggccttgatctgctttcatgatgtaacactggatgctacaactgacggtgccagccgcatggagttttccaatagaagaagaacctacgaggtggaat

SEQ ID NO: 392410 - DNA, 835 bp, Oryza sativa
ttggttctagatcgcgagccgcccttttttttttttttttttgacaggtaaaatgttggagacatccccctagaggaataatctcaatatgagcattgttttgcatagagttaagttcatagctatctatatgctcaacaggcctacaagaagaaactaaactctcaagttaaattaggcctgttgatattttacatgtttcagttcatttagtttaaggataacatatgtagttaataatgtaactacccaaccctcatccattaggtggtattgatagacaggtgccacttggcaggtgttaagagttttctgcagacaaactgtccgctaattacttcgacgagtcttcacgaactagagataaatggttatgcttggcaaaggaggcatttgtcaaagatggataaatgtcctctttagtacagctcttctcccggcaaaattttgctggatctgcaaataaacttgaaaacgggcacctgcttaacagaatggtctcagactggatagtcatttcttcaaacacattttctttaccaaaagccttgccagaaaagtatttggccttcaaacgagctgcaaggacagcctgatatttgttgaccttctcttcatgctctcgggtttccacttcagagttctccgccggagaaacgcggggcctggactcctgcgcgttggaagcgcctgctcctgctcctgcctccttgacagggtggcgctccgacagccagtagtagaccacggccggcgctgcccgcggcggcggagcgccggcggtggggatccacggggaggacggcatttggaaggccggcgatgactaacgaga

SEQ ID NO: 392411 - DNA, 671 bp, Oryza sativa
  unsure (1)..(671): unsure at all n locations
nnngggngngagggaaataggtccttagcagggagccaggcttggaaaactctgttggtcaaaccaatggacaaaatcaaattgggatttgtatgcgaaattgaatcagtatgggcccttttcctagtcctatgggagaatcatctgttgactgcagcacccttgcatccatgcctgacattgccttccaacaatcggtggcaacaagtttgttctcaaaccagaacaatacatcctgaaggttggtgagggaactgctacccagtgcatcagtggattcacagctatggacattcctcctcctcgtggtcctctctggatcttgggagatgtctttatgggagcctaccataccgtgtttgactatggcaacctgaaggttggcttcgcagaggcggcataatgccccccatggtgatcggacgagtcggagagcccttagcttttcagctcgggtttatctcccgcaagcgtgtaggtatatattttagtgcatgctcaataaatattgctactgtgatctcaaaacctgtctgttttaatttggctaagctaaatataagtaggcagaattcagacgacagtttatcacaggaaaaaaaaaaaaaaaaaaaaactcgagggggggcccggtacccaattcgccctatagtgagtcgtattacaatttn

SEQ ID NO: 392412 - DNA, 665 bp, Oryza sativa
  unsure (1)..(665): unsure at all n locations
gganagtttgggggtaaaaattgaggaatagggtagggggatnggaggggggagagaactggaaataagggtcccttagcagggggaggcaaggttggagaaactntgtatgggggaaaaccaaattgcacaaatcaaaattcgggttttgtattggcagaacatgaatcagtangggcccgtnttcctantcctatggggaggatcatttgtggantgcagcaccctggcatccaatgccngaccttgcctttcaccattcgggggcaaacaagtttgtgctcaaaccagaacaatacatcctcgaaggttggggagggaactgctacccagtgcatcagtggattcacagctatggacattcctcctcctcgtggtcctctctggatcttgggagatgtctttatgggagcctaccataccgtgtttgactatggcaacctgaaggttggcttcgcagaggcggcataatgccccccatggtgatcggacgaatcggagagcccttagcttttcagctcgggtttatctcccgcaagcgtgtaggtatatattttagtgcatgctcaataaatattgctactgtgatctcaaaaaaaaaaaaaaaaaaactcgagggggggcccggtacccaattcgccctatagtgagtcgtatacaattcc

SEQ ID NO: 392413 - DNA, 1232 bp, Oryza sativa
cttgggcttggatttaaggaaatctcggtaggaaatgcagtgcctatctggtacaacatggtgagacaaggtcttgttgttgatcctgttttctcattctggttcaaccggcatgctgatgaagggcagggaggcgaaattgtgtttggagggattgatcctaatcactacaagggaaatcatacatatgtccctgtcactaggaagggatactggcagttcaatatgggcgatgtcctaattggagggaattccacaggtttctgtgcagctgggtgtgcagcaaatagcagattcttggaacttcactgcttactggtcccacggccatagttactcagataaatgaaaagattggtgctactggggtagtcagtcaagagtgcaaggcagttgtttctcaatatggtcaacagatcctagatcagctgcgagcagagacaaaaccagcgaaagtatgctcttcggtcggtttatgtacttttgatggtactcatggtgttagtgctggtattcggagtgtggtggatgatgaagttggaaaatcaagtggtccctttagcagtgcgatgtgcaatgcttgtgagacagctgttgtatggatgcatacccaacttgcacaaaatcaaactcaggatctcgtattgcagtacattgatcagctatgtgaccgtcttcctagtcctatgggagaatcatctgttgactgcagcagccttgcatccatgcctgacattgccttcacaatcggtggcaacaagtttgttctcaaaccagaacaatacatcctgaaggttggtgagggaactgctacccagtgcatcagtggattcacagctatggacattcctcctcctcgtggtcctctctggatcttgggagatgtctttatgggagcctaccataccgtgtttgactatggcaacctgaaggttggtttcgcagaggcggcataatgccccccatggtgatcggacgagtcggagagcccttagcttttcagctcgggtttatctcccgcaagcgtgtaggtatatattttagtgcatgctcaataaatatggctactgtgatctcaaaacctgtctgttttaatttggctaagctaaatataagtaggcagaattcagacgacagtttatcacaggaaatactccatgagttagcaataacaaaacaaactgataacgaggaaaacctatcagtaatcggtttaaaaaaaaaaaaaaaaa

SEQ ID NO: 392414 - DNA, 512 bp, Oryza sativa
gataaaactcccgtctcgtcgtctccgctccttgcgagttcgcccaccgccgccggcgcgccgatttccatctcccgagcaaagcggggggagggccaccgccgccgccgccgccgccgccgtcgtcctgctgctcccgccacatcccgagatggagtcagtgccactaactgctgaagctattgcttttaccgagaaaaagatggacatgactttagatgatattattaagatgtcaaagaaaaagaatcctggaggcaagaaacctgctagacaacctatcaagaaacgtccattccagaatgacaacactaatcaagggaatgcaaaggttcagcgatttatggaaactagatcgtccttaagacaaggggttcttgcacaaaggaggacaaatctgggtggaaatcagttcgcagctacaaagcaggctgcaaagaaggctgctacaatgcccatacgtagcaggggtgtcagatggaacaagccaagtgccccaactaactcaatac

SEQ ID NO: 392415 - DNA, 550 bp, Oryza sativa
  unsure (1)..(550): unsure at all n locations
gtcgtttctcggctgccgccgccattacgtcactactggaacttccttccaggcaacccaccacccgccaccgcacctgcccataaaacccggccacatccatcaagcagcaacagcaactaccagtttggaactaccatcccccgtgaccacctgcccgctttcccgcacaaagttcactagtagttactgctccaatatggagtagtactaatcctccgtatactcgaatcccaggatctctcccggtcggatgctcactcgtcttccccaccactcgtcgccccttgtcttcccctgccgcctctccgccgccgccgccgcccggacgctctccaccgccaccggcagcaactccaccaccgtcaagatggctcggtcggcgctcgacgaggtcaccgaacgccggcgccttcgaccggtcgccgtccaccttccggagctctatcncagggnagctccgccggttcccgccgtgcggggaggnacacctctacgntcctacgcgtgccctgggcgtnacgtgctcgctaactnaagtcaagggctc

SEQ ID NO: 392416 - DNA, 450 bp, Oryza sativa
ccttgtctcccccgattcaactcgggaccaccggccacctctagtacatcgccatggttcttccctgcgtactggccccccatctccgagctccttccctccgtgctgccgccctccccgctcttcacctcatgcgcagcttgagcagtcaacggggcggagtggcctcggcagcggcacggagtgtactccgcggcggtggtctgcttccggtcggcctctcctccttcccttccagccgccaaggcgcactgtgaattggcgggcgcctcgtcgacatcatctgcggcatcggcgccatcacagtggcttgatctgcggttgtttcttggtctccacgccaccggcaacccttctgcagtcatgggcggccgtcgatccgcaccgggcctttcggatccagtgttcggctgtgcgtaaggcgcgagctgctttccagatttcctcaag

SEQ ID NO: 392417 - DNA, 525 bp, Oryza sativa
aattcggcacgagcttcgctctctactcctctcgctctcggtcatgggtggtggtgcggcggcgagcagggtgtcgtcggccatggccgtggcggcggcggcgttggtggtgatgtgggcggggacggcggcggcggcggcggcggccgtgtacgaggtgggcgacaagaccgggtggaccatcttgggcaaccccaactacacagcctgggccgcctccaagaagttccatctcggcgacaccgtcgtgttcacggtacaacaagcaggctccacaacgtgatggcggtgagcaaggcggactacaagaactgcgacgcgagaaagccgatcgccacctggtcgacgggcaacgactcggtggtcctcaacgccacgggccaccactacttcctctgcggcttcccgaaccactgcggcatcggccagaaggtggacatccgcgtcgccgcctccggccactcctctgctgccccttccatggcgcccgccccggcctccggctccgaggcacccgtcgccccc

SEQ ID NO: 392418 - DNA, 574 bp, Oryza sativa
tatggtacgctttggcgatgtgatttaagggctggtggggtggtgcttgttggtcatttcagcagctttgtgcggtcggggtggtctcggtgccgatggcgaggaagcagcatatcgccatattcaccacggcgagcctgccatggatgactggaactgccgtcaaccccctcttccgagcggcctacctcgcgaaggccggggactgggaggttacgctggtggttccatggctttcgaagggggaccagctgctggtttatcctaacaagatgaaattcagtgtgcccggggagcaagaaggctatgtgcgacggtggctcgaggagcgaattgggctgctgccgaagtttgagataaaattctatcctggaaagttctcaacggagaaaagaagcattctacctgctggggacatcacccagactgtatctgatgataaagcagaccttgcagttcttgaagagccagagcatcttacatggtaccatcatggacgaaggtggaaaaacacattcagaaaagttataggtgttggtcataccaactatttggagtatgtcaagagagagag

SEQ ID NO: 392419 - DNA, 645 bp, Oryza sativa
  unsure (1)..(645): unsure at all n locations
ttgacgcttttgaaggtacnacccgcaggagaccctttttgggtttgccnggctgatcggttancctgtatcaactgatnttccagaagagcagcgcactgatactgggtgtggagctcacacagactatggtcttctgacattggttaatcaggatgatgacatatgcncccttgaggtcagaaaccaatcaggtgaatggatatatgccaaaccaatcccaggaaccttcgtctgcaacatcggtgacatgctgaaggtttggtcaaacggaatatatcagccaacacttcatcgagttgttaacaactcccctcgctaccgtgtatctgttgcattcttctatgagtcaaacttcgatgctgccgtagagcctgttgagttctgccgggagagaacaggtggtgttgccaagtatgaaaaggttgtgtacggagaacacttggttcagaaagtcttgacaaacttcgtcatgtaaaatttgtggaaaagaacatgcattgtactccaatgtctgatcgcaacattcgtcactaaaataaaatcatttgtaaatttgtcatagcacagtagaacagtcatattgaagaatggaatgcatccttaattgaaatcacaagcgatgtgaataatcttttcgtnnnn

SEQ ID NO: 392420 - DNA, 640 bp, Oryza sativa
  unsure (1)..(640): unsure at all n locations
gctgtatctgtcctctccacagccgacgcgccatgtggccgccgccgccgaggtcgacgcggcccccgacctccccaacggatcctccgccaccgccacaaccgacaagaagaagtcgcgggagagcgagcgccgccgccgccgccgcaagcagaagaagaacaaggccgcgtccaacgccgcagatgcggatgcggccggggacgccggggccgacgacgacgccgccgaggagaagcctgatgtcaaaccccaggtggaggtggaggtggagtacgtcccggagcaggcggacctggacgacggcctcctcgccgacttcaagagcatcttcgacaagttcaccttcaaggattcctctgccgacgccgaggatgacgagaagaaagatgaggctggcactgatgccgcaaagaaggctgcagggtctgattcggacgacgacgagcaggggacacagcaaaagaaggaagggggcttgtccaacaagcaaaagaaactacaacgaaggatgaagattgcagaactgaaacagatatgcaatagacctgatgttgtggaggtctgggatncttcttctttctatttatcattactttttctattcgcatgtccttccttatctcttcttcctcttttc

SEQ ID NO: 392421 - DNA, 477 bp, Oryza sativa
ctccttgtccccaattgagcaaaccctagccgccgccgccgatcaatctcctagctgctgcctactatggcgatgcgctacctcgccggtaagctgcgggcccccgcccccgccgccgccgctctccgtcgccctcgatccctctccgccaacgcctcccagggaggacgcagcaatgcaactacagagaatgttgcgaggaatatggatggtgatctgggttgggtacgggaagaaatagctaaacttgaaaagttaagactggaaatcgaggagacaacaaggtacaacaggctccacaagcggtgtttaattgggtctgtgtttgctgggttcggccttggaggtctcgcttgtgcctggtatactcgtagctacaggaaggccctcaaggagcattttgacaacccgatcggttggatgccgccgtattcaacatcttcgcctgagtagcctgggttggggatccagctcact

SEQ ID NO: 392422 - DNA, 529 bp, Oryza sativa
tctatctgtctcatcagatcagcgtgaagcagcggcaagaacacaaaaatggcggacgagaagctcgccaagctgcgtgaagccgtcgccggcctctcgcagatcagtgacaacgagaagtccgggttcatcagcctcgtcgcccgctacctcagtggcgaggaggagcatgtggaatgggcaaagatccacacgccgacggacgaggtggtggtgccgtacgacaccctggcggcgccgccggaggacttggaggagaccaagaagctgctcaacaagctcgccgtgctcaagctcaacggcggcctcggcaccaccatgggatgcaccggaccaaaatcggtcatcgaagtgcgcaacggattcacattcctcgacttgattgtgatccagatcgagtccctcaacaagaagtatggcagcaatgtcccactgcttctgatgaactcattcaacacccatgaagacaccttgaagattgttgagaaatacaccaattcgaacatttgagtccatactttcaatcaga

SEQ ID NO: 392423 - DNA, 691 bp, Oryza sativa
  unsure (1)..(691): unsure at all n locations
tcgagagccgagaggtttgcgcccttgcagttgcggggtgggaggggagaatggcgccgccgctgctgccggcggctgaggaagacggtggttgcgtggcgaggtggatgcggagggatgtgctgctggggctggcgctggggcagttcgtgtcgctgctcatcacctccaccggcttctcctcctccgagctcgcccgccgaggtatcaatgcaccgacatctcagtctctgttgaactacatccttctctcccttatctatggaggtatactcatctaccggagacagcccctcacgataaaatggtactactatttgatccttgggattattgacgtggaagcgaattatatagttgtgaagtcttatcagtacacatctttgacaagcgtgatgctcttggattgctggtcaatcccttgtgtcgttattcttacatggatatttttgaagaccaagtatgggctcaggaagttcatcggtgttggagtttgcgtggctggacttatattagtagtattttcagatgtccatgcctctgatcgagctagacccaaccctttgaagggagatttgctcgtaatctttgggtccatgcnttatgctgcagcaatgtacagaggngtacctggtcaagaaaagcacngaattgggttaanggcaagttgggancttttggggcccctatc

SEQ ID NO: 392424 - DNA, 467 bp, Oryza sativa
  unsure (1)..(467): unsure at all n locations
tcttgcaanagccaccccaacgccatggcttgccgcggtcgcctcccatcggttcctctccgtcgccgaggcgggcgccgccttccgctgggaccccgtcccagctcgaccccaagatgttgccattgcaaaacgaaatcttcattacatctggtggagaccgggatttgattaataggattctcagcaaaagcaaaactgaaacggttcctgagaacaaggatgatggtgagtctgctgatgataacgatgaggaagggagacgaccaggatgctgaaaatcaaggcgacgcatgatgctggtgatgaagatgcctccgaagaggaagggaatgcatgaggacgaggacggggaccctcgaagccaatgccgatggagggagtgatgacgacgatggtggagaagatgacgctgactaggatgaggacggggacgatcatgaaggtgagggctagggccaagatta

SEQ ID NO: 392425 - DNA, 1123 bp, Oryza sativa
gtgctcgctcgccggcggcggcaggcaccggagggggctcgccgcgctgtcctgcgtctgcccggtggtgtcctggatgcgtcccagggccgacggcggcagcggcggcaagtcggccggccccgtgctcgatgattcgatcatgtcgtggtatctgtccatggagagtggcaagttctggttcccggctcaggtctacaaccgtgagcatgggcatgttggattcatgatgtcttgctacgatgcagagctcacctatgatttccacagtgataccttccgtgcaaggtatccaccacacggacgacggaccgtagtcttggaggacggggtacactgggatagggtcagggcacctccagtagacactcacgcacatgatctccatgcctctgactgcttacacgaactccggccaggcgataacattgagatccaatggagaaggaacaaggaattcccctatggctggtggtatggagttgttggccacttggagtcatgtgatggaagtgagcacttttgtcggtgtcatcttagtgacactgttgttctggagttcaaccaatacacacctggttcaagatggaggcaggcgctggtgaaccggaaggaccacagggaagagggcaatgagggcgacggtttctacggtggaatcaggaagctccgcagcaaggatgagatctcaaagtggagacagttgtggccaacagacattcttgagtagcaaggacagagattattattccactgttgttattcatcaagttgccaaattgatgctctccaattgctcattctgtattctgaaacctgacgaaaacgccacccatctcctccactcaagttgtatacacaaaggattggaacatggggtgacaaaatttggtagcttgggacacaattgtgaaacttactgtaaggcacggatgcacagattgcttctgtaaacgggcgttaactgaacatgtatcaagtctacagcattgtatgtgactgctgcagcctgtgcctctgcatgttgttgtagctgtagagcagaaagatcaaatgtaaattacattgttagctccaatttaatttacggcatttcaggatgccgtctcacggttaccctatc

SEQ ID NO: 392426 - DNA, 727 bp, Oryza sativa
gtcctcctccagtggaggaatgagatgtacaattcagtaatagacgcattcaaagattttggccaaacaaatcctcaacttcatcatcttggttaccgagacaaagcttggaatgtgaacaagcttgctcacatagctcgcaaacaaggtcttcctgacgtttgtgtaactatactcgataagatgtatggtcatgctaccatggaagttcaggaagcatttgtgaagatatgtgaacaagccaaggcatacttagagatgaaaggcgaactagtcagtggtcttaacttaatcaataacaccaatttggaatttttccctgtgaagaacaaagcagaaatatttcgtctgagaggtgacttcctgctaaaaatgaatgactgcgagaatgcaaatgttgcttattcaaatgctataacactttttaagcatttgccaaaagcatggattagctgggggaattactgcgatatggttttcaaggagacaaaagatgagatttggcttgagtatgccgtaagttgtttcttccaaggcatcaaatatggagtttcaaactcaaggagccatcttgcacgaattctctaccttctgagcttcgatacacaaaatgaacctgctggaagggctttggataaatatcttgagcagttgccccattgggtttggctttcggtggatacctcagttattgctatcattacagagaagtgaagcccaacactgc

SEQ ID NO: 392427 - DNA, 518 bp, Oryza sativa
gaggagttgtcggcaatctctgttggaagacctaaatggttggaatctgtggttgattggtatgatcaagatgaggaggcaaaacagttgctggctcaactgataatcaatctagtaggggtagaacatttcaccttgactaatggagtaatcaggttctagggaaaaatctggctgggtaagtttgttgaagcacaacatgcagtacttcttgctatgcatgccagtgggctaggaggacattctagaataacagccacctataatagaattaaaaatctattctattggccgggaatgaaaaaagatgtttaccagtatgtgtcatcctgtgacatctgtcagcaagccaaacctgaacattgtaagagtcctggtaaactacagcctttaccaattccagagcaagcttggtcaaccattagcatggatcttattgaaggtttacccaagtcagaaggctttgatacaattcttgtagtggttgacaagttctcaaaatttgctaagtttatacc

SEQ ID NO: 392428 - DNA, 604 bp, Oryza sativa
cgtcgtcgcagaagccggcgccgctgccgtacctatggagccctccgaggctggcgcgggtggtgtcgtgctcaccgacgagctctgcgaccggatcgtcaaacaggtggagtactacttcagcgatgagaatcttcctacggatgagttcctgattaaattcgtgaagaagaacaagcaggggtttgttcctattggagttattgcctcattcagaagaatgaagaaactcagtcaggatctctctataattgaagctgcacttaggacatcatctaagctggtcgtgagtccagatgggaaaagggtcaggaggttacatccattgccaaataatgaattgaatgattgttaagaaaaggatagtccgtggtgggaaaatctgccttctgatttctccatggaaagcatacatgcggaatttgaaacagttgggaaaattgcgaagataaccattcatgatcaacattcagtgggagaatctgcaacaattaagaaccatgacatcatgctaagtaacaaggtgcatgctcttgttgaatatgaaacagcataggcagctgagaatgctgccatcaccttatacgatgggagcaattgtagg

SEQ ID NO: 392429 - DNA, 401 bp, Oryza sativa
gttcttgcagcagccctagccgccacacgcctgcgtgcttgccgccgccgctatctttgcgccgccaccacggccatagccgggggtcgcagccgtcgccatccatcgcaaccggtggttcctttccgttttgcttcttcccggtctgccgttgtgtggtcagggaggagaaggttcaggggcacatgaagaggaggggaatagaagaaaaggggaaagataagcaaaaattggggattttctgggattccgcaaatttacctcaaatttgtttttctcctttgtgtggagggttccaacgttggaggagttgagttggagtatcgaaggacttaagggtttgaggcggggggctctgtacttctggagatgatgctgggaggtgggcggctggctggctt

SEQ ID NO: 392430 - DNA, 720 bp, Oryza sativa
gttttattctcagaggcccatttgttgtggaaaagaagcaaaccacctaagtttcccaccagatacaattttactcgctttgcaatcacattaaatgaacttaccgctggattgaaggaaaaactgccaccaacagactctagattgcgaccagatcagcgatgcctagagaatggtgagtatgaaagagcaaatgctgagaagttgaggcttgaacagagacaacgacaggcacggaagatgcaggagagcgggtggaaacctcggtggtttgcaaaagataaagctaccgacacataccgctaccttggtggttactgggaatccagagaaaagggcagctgggaaggctgtccagatatcttcggacaagttcctaacgatttgatgataactgactaggctttgagtaggttacaggtcttctggttctctgcttttattctttctgtgggatcacttgattccagattttttagcggtttatattagagcaattaaacgggtcttggcctgtaaggagaggctgtgcttcagatatattgttttcgtacataataagtgaggttcgtccaaagtgtcgcttcgaatcagtgttttcttgtgaggattgcatgctcacaagttcagagtgctttatcataggccatctgtgtataccagacatgtaaaatgttctgaagcgcaaaagaatgaaattcaaaaaaaaaaaaaaaaaaa

SEQ ID NO: 392431 - DNA, 435 bp, Oryza sativa
gtaattcacccgccccctgttaggataaacttctcatctccccttcccgtccgccgccatgccgccggccggtagcctcaccgacgagcagctccgcttcttcgacgccaatgggtacctcgtgctggggtcgttctccagcgcggaggaggtgagggcgatgagggaccgcatggcggagctcgtcgacggcttcgacggcgctggcgacgtcttctccacaaaggatcaccggcaggtaaggaacgactttttcttcaagagtgcggagaatatctctttcttctttgaggaaaaggcatttggagatgatggatgcttgaagcaggcaaaggaactttcaatcaataaagttggggcacgcgttacatgaactttgaccctgtgttcaaaaaagttctctttttggagcgaatgtttccagcctgttctctt

SEQ ID NO: 392432 - DNA, 991 bp, Oryza sativa
  unsure (1)..(991): unsure at all n locations
agaggtacatcacaggatacagatccagactccagagccccatagagagagaaaattcagctactcctagatgagaccctgagtgagagaagaagcaaagaaacaacaacaagaagaaagagagatctccctcttccatcaacaatgccaccaccatcaatcaccaccaccaccaccaagctgttcttgctcctcctcctcctccatggaggccactgcctgaagagcttggacatggccatggagatggagatggattcagaggctcacagcaggatgctgtgggagtccagcagcagcaacggcaggaggtacatcagctacgacgccctgaggagcgacgtggtgccgtgctcgaggcagggtgtcccttactataactgcaggatcatgaccaccgccaacccttacacccggggatgcgagaccatcaccaggtgcagggatgtggatccgtgattactactgcactgcctgcttgttttgctggatgatcttgccatgagaggaattgcaggagtggctacctgagatgcaaatcttggtttttattttttttttgtttttcttttaccctctcttctgttctttcttcttctttatgttctgcatctgctgaatcattggaggtgattcatggatgatttacatgttcaaagatcttatgagtatgtatatgtaagatctggttgcaagctataatattataaggaagcttggatcaggggaggtgtgctgctttgtgcttgaaattgtcggcattgataagatttgatgccatcaattgacatggaaattgctccttttcttcgtttgtacaattgtactggtatgttaaagttggtatacgcaattgagcacgttgaatcttttcggatgctcatcgtttcttcaattttttttaatagctagtcgtgtgatgaaacctggttcgttcttgtttaataaagatattgctttgcagtgttttcnnnnnnnnnnnnnnnnnnnn

SEQ ID NO: 392433 - DNA, 610 bp, Oryza sativa
gttattgataatctcgtgtgacctaatttgcatggagaaggtaagcatgaggctggtcatggtggccttggtgttagtgggcatcgtgctggcggcgagccaggaggtcgtcgatgcattcacgtgcgtggcaacagattcccctgaacttgctgaagaaaggaaaaaacttgagaagctcacggcaatcttctctcggcctcgcggtgtttgccacgcaagcgagggttgccgcgatgaaccactactaattgatgactgatgccaccaaatgtaccagtccacacaaaatcggtgtgtgtgaggcatttcccatcttccccgacctgtgcaggaggccaaaattaggaaccggccaatatatcccttgcaccgatttattttgctgtgaaccgacccttacagatgtttgtctacgtgtcagttctcaacagaaaccagcatatatgtactttcatatgtaccggtccttgaaaaatggcactaatgatgccactactcaattgtgctcttttgtacgtaacatttttttttatctcaagtcgtatgttgacaaactttgtgtttgtttttatatctttattggcatttcttaatcggcctcatatgc

SEQ ID NO: 392434 - DNA, 956 bp, Oryza sativa
caagcttgctttctgatggagatgatcctgagtcaacgggtatcactatcctaagacgacgccaagctccaactgctagctcagctagttcatttactcaacagggtgctgcagtgcaaagggtgcggctacaatcaaaccttgatgcagcaccgtgttctagcgttgatggttcatcaagttgcatcataaatgaaggtgaaagtgaacgcaccatggagaaacctgagattgaagagaatgcaggaagtaccttggctgaaggtgggacttgccatgaggatgaccagaaggagcatgatgcttcagcagcaaatgctaaatctgttctgaggctgcggaagacagcagagggaagcgacaaggagaacaagcaggaggaagaggagggtgttcttgcttcacatgtgagagcaccagggaataagaggggattcccatcgtacatcatttggctggttctctctgtggctctggtcctgcttatctcccttgggatttatggatgggtgtaaacagctgctcccctgatggtcttcaagatgaccatgcttactggcacaggctcccaacattgccctgctgtgctgagtgacctgttgtacatattgcgtcttacgcccttgtgtttagacggcggttgctagacaccctggagtgtttgttccccttccagcgtgctgcggcagaagaaaaatccaaaaacaaaaaaaaaagaggggcgaaaacgaagaaaaaagaagaggtagtgaatgaggaaagttgttgtagatgttctgtgacttaggtgcatggtagtattccttcctgctgttattgcagatgttagtagccacataccctagttgttcagcagttgtaagtcaggttagggatatggttacttttgtctatgtaatgttctgtagcattatctgaacctgctttatcggatgcaatttcgttttcctttcagt

SEQ ID NO: 392435 - DNA, 653 bp, Oryza sativa
agcatgcagcgagaattaaggtaggaggagtagttgcttgcctccgtcctgatctccactgattcattgtgttatatatgcataagcataacgcaattaattaggaggccggtcagctcgatcatatcgcagggagtacgtagcaaattaatggcggccgtcgggctgttggtactagttggcctgcaggtggtggtcgggtcgatggcggcgcaagaagcaggtgatgccccggcgagcatcacggggccatgctcgcgtacaggagacaagaaggcgtgcgtggagttgttgtcgggcatcccggaggcccggaaggcgacgacggtgggccccctcgcggagctgtacctgcaggcaatcgccaaccacacgacggaggccaaggcgatggctaccaagctgctagccaccatgaaggggaagggcgtgccacccgtgtgcctccagcagtgcaccgccagcgtcgacaccctctccaacgccctcgccgccttcttctctgcctccgccgacgtcaacaaaaagtacagggacttggacggttttctcgtgggctttcttaaacaacccgtccatctgcatgagcgcgtgccccattcggtcgtgcgatatggaagaggtcactatctgcgacaggttccaccaacctt

SEQ ID NO: 392436 - DNA, 784 bp, Oryza sativa
tttttcggcggcggcggtggtgatgccaatggcggtggattcagtggaggagcagaagaagggctgtaccggctctcctctgttggagaagagattgataatctgagtaacttgtccgatattgatgatcttgcgagcacttttgcaaagttgaaccgaaccattagtggaacacggaatcctggtgttattggtgacagacgatccatctcaagaggaagttctctaactgttgattgggctgaagatgtagaatttcctaactgggtagatcaagacattttagaggatgaggaatttcaggaaagtaaaagatggtggtcacagtcacacactctggtgcagcaaggggatgccaaaccattgagccgaacatcttcctatcctcagcaaccactgcagcaccgggcaagtgaacctatcattccaccaaaatctccttcatttacgtcctttccaccgccaggtggtagatcaccttatacttctcaaggccttacacgccatgggagcattccatcacttgggtgctggcctgcaaatgggttctccaagcatgtcccttccaagttctccatatcatatagctggactatctcatggactaccgtatggagggagcatgtcctttggcacttcaaatctgcctgtaaacaatccaatgcaaaatgattggccaagccaagtcaatctttatgctggggagcaatttaatctactgcctaacatgttacagaaaccaaattcacttccaaatagccctatgccattacttgtatttttc

SEQ ID NO: 392437 - DNA, 987 bp, Oryza sativa
gtgatctatggcgcatccagagatccacctgaaaagcaggcgccgatgtgtactgtacattcatttcctcataatattgatcattgcctaacctgggctaggtctgagtttgagggtttccttgacaagacccccactgttggaaatgccttcctatcgaaccctgctggatatgcgactgtagcacgaactgctcgcgatgcacaggctagggatcagctcgagcgcgttactgaatgtctcgagagagagaggtgtgagacattccaagattgtattacctgggcccggctcaagctcgcggagtatttctccacccgtgtgaagcatctgacatacacttcccctgaagatgcgatgaccagctctggtgctcctttctggtctgctccaaagcgtttcccacgaccactggagttcttgacatctgatccaagccagcttaactttattttggctgctgcaattttaagggcagagacatttgggatacccatacctgactgggtcaaaaacccagcaaagatggctgaagctgttgacaaggtgattgttcctgatttccaaccaaaacagggggttaagatagttacagatgagaaggctactagtctttcgtctgcatctgttgatgatgctgctgtcattgaagagcttattgcaaagttagaagcaatttccaaaacactgcaaccaggattccagatgaaaccaatccagtttgagaaggatgatgacaccaattaccatatggacgtgatagctggttttgctaacatgcgggcaaggaactatagcattcctgaagtggacaagctgaaggcgaagttcatagctggcaggatcatccctggccattgccacctcaactgcgatggctactggtcttgtctgcttggaactgtacaaggtactcggtggtgggcacaaggttgaagactacaggaacacatttgcaaaccttgcaatccccctcttctctatggt

SEQ ID NO: 392438 - DNA, 333 bp, Oryza sativa
ctgtgtctcaaggctgaccagcttgcaaagatacagaagcgagttggtcttcctactgaggatgcacagaaaataatcaagaatatcacaacaacaaagttgtcttctgcaattgaagcctctatttcttcgaggacagattggtatacatgcaggtccgaggattgaaagaagcaaattctcaattggacatgcttgattgcagaaccacttcgagaaaacatttacaaaaaatccgttgaggagatcttttcgtcaggcacaggtgaatttgatgaagaggaagtgtatgtaaagatcccagctgactttattattaatgctgagaaggcc

SEQ ID NO: 392439 - DNA, 464 bp, Oryza sativa
tgttacgggagcatggagctcactgagagtaagtgcgatggcgggcaagaagttagcttgctggacgctcagctcgagctctactggaacaccttcgccgtcatcaagtccatggctctcaagtcggcgctagacctccgcatcgccgacgcagtccacctccacggcggcgccgccaccttggccgagatagccagcgaggtggccctccacccgtccaagatcccctgcctccgccgcctcatgcgcgcgctcaccgtctccggcgtcttcgccgccgccgtcaagcccggagacggtggtggtggtgagcccgtgtacgagctcacgccgtcgtcgcggctcctcgtcggctcctcgaacctgtccggcatcatgtccatgatcctccacccgacgctcgtcgtccccttcctcggcgtcggcgagtggctccgccgcgaccgcgagccgccggaggagga

SEQ ID NO: 392440 - DNA, 559 bp, Oryza sativa
  unsure (1)..(559): unsure at all n locations
tttccatccggcacgcactacttctacggcgactcctgcctcatcccaccagacgggacatcaacgtcatctagctcagcttcaacgtcgagcaactccaaccgcggaagcaccgacggcgagtagtaactcaactgcatcggctaataaaaaggaaagcaattcaactgcagaagcgccgacggcgactagcaactcaactgcgtcagcgacgacgagtaattccactgcgtcagcgaaggcgactaattactcgagttcaagtccaccggcaaaaggcaagtagttaatacaagtgcagcggcgacgacggcgccgacgcgatgaatcgcgttcattggggccaaccaattctgttttggaagcccgtttaattgttcattctttgtgtcaatttgggccggattaatcaatcggccggctacttagatgttgcacgtacgtgtaacagttgtattttcttcccatttcgtttgggtcttttatcagtgtacgcatcttcaaaactatagtgaattttacacatgttttccttttgaaaaaaaaaaaaaaannnnnn

SEQ ID NO: 392441 - DNA, 386 bp, Oryza sativa
tcgttcataccaacatcataagaagattagagctgcacaaggagttaaaatatcagcacagggtcttgaacatgcaattgcagggactgctctttatgtgttaaagcctgatgatgatctggacagactaaaagatgctgtgatggaagagatgactagggttagaaatcggattgataagagtggcgaaggtgtctatgtacaggcatctacccttgggtcattggaagctctcactgagttcttgaagagccctgctgtgaatattcccttctgtgatttcagtatagggccagtccacaagaaagatgttatgaaggccagtgttatgcttgagaggaagaaagaatatgctactatcttggcgttttatgtcaaagtgatgc

SEQ ID NO: 392442 - DNA, 746 bp, Oryza sativa
gctccatgccccatttgctctactgccaatgtcattttcgaaagtttactgggatcaggcggttgaattggctccccttttcaatgagcttgttgatcgtgttagtttggatggggattttttgcaggagactttggcaagaacgaaagaggtggattcattcactggaaggcttcttgatatccatgcaaagatgatgaaactaaacaagaaagaggatgttaggttgggtcttactaggtcagattacatgattgatggggccactagaccagcttcttcaagttgaactcaacaccatttcaacatcatccaacggtcttgcttgcggtgtatgtgaacttcacagaaacctgattaggcagcatgagagggagctcggtttggatccagagagtgttgttgggaacacagcaattgctcagcatgctgaagcattagctggagcatgggctgagttcaacaatcaaagttcagtagttctggtggttgttcaaccagaagaaaggtacatgtatgaccaatattggataactgtcgccttgagagaaatgtatggggtgacgacaattcgccaaacaatggctgctatagatgcagaaggagagcttccgtcctgacggtacactaacaattgatggattgccagttgctgttgggtacttcagagcaggttattcacccaaatgattacccttcagaagtcgaaatgggaagcaagactcttgtatgagtggttctttgtt

SEQ ID NO: 392443 - DNA, 641 bp, Oryza sativa
cagtttactagggcaatgattcctcaagtaatgttagaacaccaaatgctaagtctgcggagaaattgatccctggactggaaaattcagatgaggctaggcgaaaggcggtacaacgggaactgagaaagatgaagactggcaggtgaaactccctagtgttcgagttatttgaccagatgtgcagagaagcaagtttttgtatgctgcctagattgcttttaatcagatgtgcagagaagcaaagattttttttccttcttgtttgtggtcgcaaaaaagcctgattgttgtagctgctatgtttgttccctttggctgtccatccagaatttctgataagatgacacttggaagcacatcctgcagcactccagttacaggaatgggttcagttgactgtaacagtttagcatagtccgtagtggacagtagctgtgttgtttgtcgtgccctgtagtcctgtactaccttgaattaggactgctaagtgaaccgatacaagtacttgtgactgaaatctatacctctttttttctttccaccttgggaatttgtagaacaaaaccgatgtctgatgatatgctatctaggaatagcaactgttgtatttttgttcctgtttagggagatttagattc

SEQ ID NO: 392444 - DNA, 436 bp, Oryza sativa
ccctttttcctcctctctcctcttcccctctccaagggtcccggtctccttcctcctctcttcccggccgcctcgcctcgcctccgccttcccgatcgcaattcgcctcctcctcctcccacccatggcgcggcgatccgcccccctcctccgccgcatcctctcctccccggcccccgccccggcgcaccatggcggcgccggcgcgcgccgcacggtgacctacatgcccaggccaggggacgggaacccgcgcgccgtgacgctgatcccgggggacgggatcgggccgctcgtgacgggggccgtgcagcacgtgatggaggtgatgcacgcgccggtctacttcgagacctacgaggtccgcggcgacatgcccaccgtgccggccgccgtcatcgagttcattcgccgcaacaaggtgtgccttaagggc

SEQ ID NO: 392445 - DNA, 576 bp, Oryza sativa
aatccatctccctcctcctcctcctcctggattgccgccgccgcccacggtttccagcaatcgccgcggttcgcgccgccgccgccgagcggagcagcgccccgatcgatccccttcccctcccgcgagcaaccgacgccggcggaagtcccagctgcttccgccacttcgcccgaaatggatcgacctgatgaaaccgtgaaattcccaagctgtgatgcgtattttgacactatacagtccaagaagaagctgcccctctctttgcaagaatcgctcactgctgcctttgctcagattcctgtctcgtcttttcctgatgttcctaatggccgagtgattgaaattccaggagacacttccgttcttgacgctgtgagaattctctccaaacacaacattagggcagcgccagtgctaaatccggaatgtggagctccggctgattggaaagggaggtaccttggcatcattgattactcggctatcatcctctgggttctagaaaatgctgagattgccgccgttgctttatcagctgggtcagctaccgcagcaggagttggaatgggtgct

SEQ ID NO: 392446 - DNA, 461 bp, Oryza sativa
  unsure (1)..(461): unsure at all n locations
tcgttcatttttggagatatggggaaggctgaggccgatggttcaaatgagtgcaatgacttcgagcctggttcactgaacacgacctaccagctaattaaagatttgaagaatattgatatggtaatacatattggggacatctgctatgctaatggttatctgtcacaatgggatcaatttaccgcacaagttgaacccattgcatccagtgtgccttacatggttggaagcggcaaccatgaaagagattggcctggatcaggttccttctatgggaatttggattcaggtggtgaatgcggtgtaccagctcagaatatgttctacgtgccagcagagaaccgggagcaattctggtactcgatagactacggcatgttccgnttctgcatagccaacaccgagctcgactggaggccaggnaccgagcagtacaagttcatcgngcactgcttctn

SEQ ID NO: 392447 - DNA, 497 bp, Oryza sativa
tggattcagaaagggaagaagctgcagaaaagatttcggtgatggggaggtcttcaccaaatgacaagcttttacttgttaaagcattaagaaaaagagggcatgttgttgctgtgactggagatggcacaaatgatgccccagctttgcatgaggcagatacaggcctctccatgggcatccagggaactgaagctgccacggagagctctgatattatcatcttggatgacaattttgcatcggtcgtgagggttgtcagatggggtcgctcggtttatgcaaacattcagaaatttatacagtttcagttaaccgtcaacgttgcagccttgattattaccgttgttgctgctgtcagttctgggaatgttcccctgaacgctgttcagctactgcggggtaacctaatcatggatactctgggtgcttttgcactgcccacaggttccacctactgaccattattatgcatattcctccattttgtcttaatg

SEQ ID NO: 392448 - DNA, 399 bp, Oryza sativa
ttaagatataggatttgatccaacagggtgggaactcgcccttgttaccactccaagtaacacgaattcatctgctgcagatagtcaactgggtggtgggtttgacaagctcatcttggaaagcctatatgaccagggggactacaggcagagacagcaacagcagttatatggttcttcagctcccaacccgttcatgtcaaatgatcctttcggattgtcgaaccaagttgctcctccaccatcggttcaaatggctgccatgtctcagcagcatcaacagatacccactatgatgcaagcgattccctttggaccaccaatgcatccgcagcatgtgggcatgggccctgcaacaaatccattttttggattttggttttggcccatttccaatgg

SEQ ID NO: 392449 - DNA, 825 bp, Oryza sativa
ctagttctagatcgctcgcctcctctgcttcgcttccttctccagcaagcacccgaccacaacacacacgcgagctcctcgacctcgagagagagagaaaacccaaccccgaattcggcggcggaggcggaggcagcggcgatggacccctcgtcggcgggcgccggcggcaactcgctggcgtcggcgtcgtgcggcgacgcgcagaagcggcgggtgtgctacttctacgatccggaggtgggcaactactactacgggcagggtcacccgattgaagccccaccgcgtccggatgacccacgcgctgctcgcccactacggcctcctcgccccggccaagatgcaggtgctccagcccctccccgcgcgcgaccgcgaccttctgccgcttccacgccgacgactacgtccccttcctccgcgccgtcacgccggagacccagcaggaccagatccgcgccctccggcgcttcaacgtcggcgaggactgccccgtcttcgacggcctctacagcttctgccagacctacgccgggggatccgtcggcggcgccgtcaagctcaaccacggccacgacatcgccatcaactgggccggcggcctccaccacgccaagaagtccgaggcctccggcttctgctacgtcaacgacatcgtcctcgccatcctcgagctcctcaagctccaccagcgtgttctctatgtggatatcgatatccaccatggggatggtgtggagggaggcgttcttacacgacggacaggggtgatgacggtctcgttccacaagttttggggattattttccggggaaaggggga

SEQ ID NO: 392450 - DNA, 438 bp, Oryza sativa
aagaggggaaaagaaaaaaaaaagagataaaaaaaaaatctcctcctcctcgccgccgccgccgccgccgccatggacgcctccgccggaggcggggggaactcgctgccgacggtgggggccgacggggccaagcggcgggtgtgctacttctacgacgcggaggtggggaactactactacgggcaggggcacccgatgaagccccaccgcatccggatgacccacgcgctgctcgcccactacggcctcctcgaccagatgcaggtgctcaagccccacccggcgcgcgaccgcgacctctgccgcttccacgccgacgactacgtcgccttcctccgctccgtcacgccggagacccagcaggaccagatccgggcgctcaagcgcttcaacgtcggcgaggactgccccgtcttcgacggcctctacagcttc

SEQ ID NO: 392451 - DNA, 893 bp, Oryza sativa
gcgtgttcatcctcctccccaccgacccccacatccggttccccgaggttgcagcctctgcagccttgcgaggatcggatgaacccatcgtcaccagacgaattctccaactgagtactctgctcccataatcctattgatccacacagcgaggggcactgcaagaagcatgcagtgcccaatggacgcagctgcaagtggaacttcgcctgtgatgcagttccatggcattgttgatgagccaccctcccattcatctccgctgcacacggcgctggaacgttcgcagcgccattgctatggtcatgaaaccccaggagaattcccccttgctgtgagcccctccattgtgctacatgtgctctccacctgcgagctagatcctaaagatctcgctgcactggaggctacatgtacattcttcagtaaacctgcaaatttcgagccaaactttgctctatcgcttccagaggttgcggcatttgatatgtgccataaaagacccatggttaagctaatggcacagcaggaacgggagcaactgaagcagaggtgtggtggatcttggaagcttgttttcaagtatattgtggctagagaaaggaattactctcggattgtcgccgggccgggccatagtattgttgtcaccacaaagggagatgcatactcatttggggctaattgctggggccagcttggccttggggatactgaagatcggttcaagccatgccttattaggtctttgcaaagcatcaaaatcacacaggctgcagttggatcaaggcagacaatgcttgtgagtgacacaggaagtgtctatgcatttgggaagggtagctttgtgtgggaagagctttctgatgcagctgatcacattaccactccta

SEQ ID NO: 392452 - DNA, 1323 bp, Oryza sativa
  unsure (1)..(1323): unsure at all n locations
ctcaaatcctcctgctcacctcaccttatcctcagctctcagcacctcttcctccctcccccaagcttccctctaatggcgtccgccaacgccatctccaccgcctccctcctccgctctttctcctcccaggggagggtgaggagggccaagaatgggcgggcgcagcggctagtggtgcgggcggacgccaaggacatcgccttcgaccagaaatcccgggcggcgctccaggccggcgtcgagaagctcgccaacgccgttggcgtcaccctcggcccacgagggagaaacgtagtgcttgatgagtacggcagtcccaaagtggtaaatgatggagtcaccattgcccgggctattgagctatatgatccgatggaaaatgctggtgcagcattgatccgtgaggttgctagcaagaccaatgattctgctggtgatgggactacaaccgcctctgtccttgctcgtgaaatcatcaagctgggccttttgagtgtaacttctggtgcaaaccctgtatcacttaagaaaggaatagacaaaacagtgcatggtcttattgaagagctggagaagaaggctagaccagtcaagggcagtggtgatatcaaagctgttgcctctatctctgctggcaacgatgaacttattggatctatgattgctgatgctattgacaaagtgggtcctgatggtgtcctttcaattgagtcttcatcatctttcgagactactgttgatgttgaagaaggaatggagattgaccgtggatacatttcccctcaatttgtgacaaacctcgagaaatcgatcgtagagtttgagaatgctaaggtcttattactgatcagaggatcaccagcataaaggaggttcttccaatcttggagaagacaacacagttgagagctccactgtttattattgctgaggacattactggcgaagtttggcaacccttgttgttaataagctccgaggaattctcaatgttgcagcaatcaaagccccaagttttggtgagcgacgcaaggctgtccttcaggatattgccattgtgacaggcgctgaatttctagcaaaagacctgggtttgctggttgagaatgcaactgaagagcaacttgggacagcgagaaaagtcacaatacatcagactacaacaaccctcatagcggatgcagcctagcaaagatgagattcaggcaagggttgcacagctaaagaaggaactctccgaaactgattcggtatatgatacagagaattggctgagaggattcaaantttctggtggtgtggctgcatcaagttggggct

SEQ ID NO: 392453 - DNA, 480 bp, Oryza sativa
  unsure (1)..(480): unsure at all n locations
gggggtggccttggcgctggcggtggtgcaggtggagggggcggaatcggtggcggtgctggtggtggcgctggagcaggcggtggtttcggaggaggcaagggtggaggtggacagtagtacgagcatgcggtgagttcaaataatggcgcgtaccgtttgcaaggtttgaaccagccggcaagctagctagtcagtgtcattaaaaaactagcatgtattatatattcctagatagtactagttataatttgtgtttatagtctgaatgaatgaatgtatacgaatgatacgaggaataatgcggtggacaaatccgagacgatgatcgagttaattcgtaagagatggacttgtgttttgtgttgtagtactagctaagtacgtgcatgtaaagcatgcaaaccacttgtattttcataatccagatatgagatatcaaataatttatagtgttattataaaaaaaaaaaaaaanna

SEQ ID NO: 392454 - DNA, 593 bp, Oryza sativa
ggcttcggtggtggcttcggaggaggcaaaggcggaggagttggcggcggtgcgggcggaggattcggtggcggcggtggcgctggagcaggaggcggtttcggcggaggcaagggaggtggtttcggtggaggcgtcggcggcggccatggtgcaggcggaggcggcgccggtggcggcggaggatttggcggaggcgctggaggtggcatcggaggtggacagtagtacgagcatgcggtgagttcaaataatggcgcgtaccgtttgcaaggtttgaaccagccggcaagctagctagtcagtgtcattaaaaaactagcatgtattatatattcctagatagtactagttataatttgtgtttatagtctgaatgaatgaatgtatacgaatgatacgaggaataatgcggtggacaaatccgagacgatgatcgagttaattcgtaagagatggacttgtgttttgtgttgtagtactagctagtacgtgcatgtaaagcatgcaataccacttgtattttcataatccagatatgagatatcaaattatttattgcgtttttttttcatactaattattatgggctt

SEQ ID NO: 392455 - DNA, 521 bp, Oryza sativa
  unsure (1)..(521): unsure at all n locations
cttgtatatttagaagaaggtgccttgagaagaggtccttcaagaggtccatctcttggtgatcgtgatatagacccgtcatctcttgattattcaagtaagaaaaggatggattctgatggtgcaagtgggcaaggttcatttggtaggaaggatagtttcggaaaggaagagccaagaggcagccagggtgatggtacaaaaacctcagatcctcgtcctatgtttaaggtgggaggaaatgctaccccacttgctaactccatctgaaattatttcaggtgtcctttcgtctccagaaacaattgctactggcagttctcaaaatgtagaagtggatgctaaacatgtggatgggagaaaatcagagcgaagtgttgaacttgaagctgtcaaggagncacaaattgttcatgagnaaaggggggagncctcccaggctnctgaccaacctgtaaccacaatcagtgaccgtttgtacactgccaatacagtgtggaggtcccaattcggggtctgtg

SEQ ID NO: 392456 - DNA, 337 bp, Oryza sativa
cttagtgctacctcctgtcatttctaacatagtgatggtaccccaaagaaggctttggaaatgccagacactgcctatgtatttcattcattaaccccaatggacccatagatatattttattgtcttgggtcggccactcatctagatgtccattgcttccccaatgtcacttccatggttaggtccaggatcactcctttctgctcccttccctccttccccacctctcttccctctctctgtgtgtacagagagaagccttaatgctttttaatgtactattatcggacatggtgattgtaataataaagtagtactgtgacacttttaggacc

SEQ ID NO: 392457 - DNA, 513 bp, Oryza sativa
ttttaatgtaccagtgcccgtggttccccagagggaaaggtttcttttccaacgggtttgtacaaggggttatcacatgttccgctgtattgcaaggtacggctacaaagataagaaccaggagagccaaagcacatttgagcgccttctgattgaaggcctcgagaagttcatacagcgggaggcagcagagctatccctacaaagtggagacgacatcgactctgacgaggagcctccatccccatctaggacaatcgtagcgccaaatggtagcctctactcgcttgacgtccctctcctggcagactttgtgccttcggcagaagttattcctgaggccagttgctcaacgcctcagcacgatcctgtggtggattacacacagaaccttgagctggagctcgcattcatcaggcaggccaagcaatctggagccgtctatctcattgacaacctcatcgtcaaagccaggaagaattcctggttctttcagaagctgatcataaacta

SEQ ID NO: 392458 - DNA, 420 bp, Oryza sativa
  unsure (1)..(420): unsure at all n locations
cgtgattgttagatttaggtctcccccatatgcccattcccatctctctctctcgagtctcgacggcggctgctgctgcggcgtcgcctgcggtgcgatgccgtcgtctccggcgcatgctcagcgcttctactgccaccagtgcgaccgcaccgtccccatcccgccgcccacctcccccgacgccgacgtcctctgcccgttctgcggtggaggcttcgtcgaggagcttggggaggacatcaaccccaaccccaaccccaaccctagcctattccgttctattcaactatcaatgacgagaagaaatgttggatttttttccccttccttaattgtggcatggatttactattgctggttttggggtcctcttggtggtgtaggagaattttctatggggggccctttctttgtgan

SEQ ID NO: 392459 - DNA, 360 bp, Oryza sativa
agggcaatggttgctggtttgggaggacacaatctttttggtgagatcattcttgggaacctgttgaagcaaatgagaatgccacctggtgacttatctcatttgttgcgcaactgtttcctttgcttcaggtatatgctggttccttttttgcaataccgttgtttagatggtttctacttcgcaagaccaacaatgacattcaaaggaggaacatggccagagaacagcgagctcaggaacttgcattgccagaatcttctctcagaagaaagttactcagtgcacgcgacatggctcaacgtaaggtaatttctccagaggagatcgtctacactaccgaaaaggatcttttggatc

SEQ ID NO: 392460 - DNA, 508 bp, Oryza sativa
cttgttttagccggtttcacaacagcatcataaagcagctgctcggccatggcaccaccgcctgcggtgctcagctccggtgagctcggcgcgcgagggcacacacggccgcacgtcgtgttcgtcccgagcgccggcatgggccacctcctccagttcttccgcttcatcggcgcgctgtccgcccacgacgtcgacatctccgtcgtcaccgtcttcccgaccgtgtccgccgccgaggccgaccacttcgccgccctcttcagggactatcccagcgtccgccgcctcgacttcgacctgctgccgttcgacgcgtccgagttccccggcggcgacccgttcctgcttcggtgggaggccctgcgccgctccttgcaccttctggcccggtcatcgccggcgttaccccgcgcgttacggtcaccgtcaccgacgtcacgctggtgtcccacgtcaaccccatcgccaggacctgggcgtccaggccacgtgctgtacgtcttct

SEQ ID NO: 392461 - DNA, 340 bp, Oryza sativa
ttccaaaccacccccctcctcccctcacgggctcacggccgcacccactccaccaacaccatccatccaactccgcggcggcggcggcggcgatgacgacccgatccaacggcgagcaccaccacgggccgccctcgtaccagcagcggcgcccgcactacgggggcgggtacggcggcgggtcggcctcgttccgcggctgctgctgctgcatcttcctgctgctcaccttcctggccctcctcgcgctggccgtcgcgctcgtcgtggtgctggtggtgaagctcgggaagccgcagttcgacctcaaccaggtgtccgttcagtaccttctcgtcac

SEQ ID NO: 392462 - DNA, 494 bp, Oryza sativa
  unsure (1)..(494): unsure at all n locations
gtttgagttcactcctctctcgcttccatggcgctcctcgccgtccacgccatggccgcgtccccggccaccttcccctcctcccaccaccacgccgccgtctcctcctactgcgcgctccccgccgccgccgcattctcccgctcccgctctcgcgtcgccgccgccgccgccgccaccctctcggccccgctcactccagttcttgaagttatactgcggcagaggggaccagaaagccacaagggaaaaaggttcnaccnctcctncngaaatgcgaaggcgcgcnacnagaaaaaaggaactggcctgcncgggtgttcncnncncctgcgcctccnaaganngacanttcnacaanggnaaagtccccccatcganatcaacnaaaaatccnggaataggttgtctgaatttccccctgaatntggtttaccttgancttaccttttgtctantctntnccaaacactgttcttgaaattanttaccgt

SEQ ID NO: 392463 - DNA, 810 bp, Oryza sativa
ggttctcatcgtcctaccttcatacagctgaaagggttccctcatatacaagataaagcaatggaggtgctgatccggtggagcaaactgccggcggccggctccttggtgctgtacgccgtcttcttgctgtcggcggcggccacatcggaggccaacatcggcgagtacgacgagtactggcagaagcgcaagctcatggctgatgccgccgccgaggctacctacaagcgtgaccccttcgaggtcaccaacagcttcaaccgcgccgtccacagatcggaggaggagagcgggaggagggagctggcgatgaccaaaaggaagaagttcgcggggacgtgcaaggcgacgaacccgatcgaccggtgctggaggtgccgcgccgactgggtgacggacaggaagcggctggcgcggtgcgcgcaggggttcggccggaacaccaccggagggctggccgggaagttctacctggtgacggacggcaccgacgacgacgtggagaacccgcgcccggggacgctccggtggggtgtcatccaggacgagccactgtggatcatcttcgccaaggacatgatcatcaacctcaaggaggagatgatgatcaacagcgacaagacgatcgacgggcggggagcgcaggtgcggatcaccaatggcgcgcaggtgacggtgcagaactccaacaacgtgatcatccacaacatccacatccacgacatcttgcaaggcaagggcgggatgatccgcgactcgccggagcacttcggcttcgcacccagtccgacggcgacggcatcagca

SEQ ID NO: 392464 - DNA, 438 bp, Oryza sativa
  unsure (1)..(438): unsure at all n locations
tggtgctcatcgtcctaccttcacacagctgaaaggggtccctcatatacaagataagggtaggaggagggccgggagctcgacggatttcgatcaattgtggtttttttttgtggtaaccgtataagagaggagattttgtttaacgtagctagatcatatctgagttgagttttagcaatggaggtgctgatccggtggagcaagctgccggcggccggctccttggtgctgtacgccgtcttcttattgctgtcggcggcagccacatcggaggccaacatcggggagtacgatgagtactggcagaagcgcaagctcatggctgatgccgccgccgaggctacctacaagcgtgaccccttcgaggtcaccaacagcttcaaccgcgccgtccacagatcggaggaggagagcgggaggagggagcntgcgatg

SEQ ID NO: 392465 - DNA, 764 bp, Oryza sativa
  unsure (1)..(764): unsure at all n locations
ttcttcttctcggattctcctcctccgcaagcccagccctgacgttgtctcggacacccaaaggctgtgtttgatctccgcccgccacctgtcttcctcctcctgctgcgcgcgcgcctgcttcttcttcccgttgagccagagagcggttcttggtgcaggtgaggcaccaagatctccctcttcttcctcctgcgattcagcgaaatctttagagccggggatggcggctctgatgaacggctttgggagcctccaatgcaaggcgacggtgcatgtcgagaaagggcacatgcaagcatcgggcgatggccttcttctctcccgtcaacagatgcgcccaggttcatatctccagtattcctcatttcatcggcgcgaagtctgttagtgcttcccaacttcgaatgaggcacaaggtcgggtccatcagagcctctgcagcctcgtgcttgcaagatgaaacaacaaaatatttcgattttgtggtcattggcagcggtgttgctggcctaaggtatgctctggaagtgtctaagtacggctctgtcgccatcattaccaaagcagagcctcatgagagcaacacgaactacgcacataggcggtgtcagcgcggttctatgcccctcagattctgtagagagccacatgcatgacaccattgtcgcggnggcttatctgtgtgatgaagagactgtcagggtagtatgcacagaangacccgagcgtgtgaaggagctcattgccatgggagcttcatt

SEQ ID NO: 392466 - DNA, 394 bp, Oryza sativa
ctcggctccaccacgcggctcgcggctcccgctgccttcgtctggatcgcctccgcccgctccgtttgaccctttcgtcctcttcgcggatccggcgccgcggccggcgctcacgcgggaacaggtgaagtactgcaaggaggcgctcaaggtgttgaagaagaagctcaagcaaacagctgccattgacatttccaaggaattccatgctctcccggacatacagacagcattccagacgggaaaatttactgctgctcaaaatcctgctaatagggaaaaaaaccgctacagtgatgtcatgccatttgatgaaacccgggtacgtttaaagccctcagcaagtgatcacccttcaagcaatgaatacatcaatgcaagccttatagagact

SEQ ID NO: 392467 - DNA, 434 bp, Oryza sativa
tgtgaaggagtccgatcttttgcctcttctgtatcattatcgtcaggagatatgttattctcagctgcttctgccggactgacaaagtaagcggataacaaacacagggtgctaaatggcaaggctagtgtgatctatcctgcccgatttatgacatgggcacgacagattgcatggttcattgtcaagaggaatagtcgctggatcttcctgaaggtgtcacacagttcaataagtgtttatgtgcacatctaggttcgaagcctgggaactgggctagttgtatattcgattgtgctagaaggccttcacccttttcctccaaaagaaggctttcttctccttttgaaaacaaaaagaggctccaggttgtagtgttctaaaagctcccttctttacctacctcgtgtcttcaacctcttttttattttttt

SEQ ID NO: 392468 - DNA, 941 bp, Oryza sativa
  unsure (1)..(941): unsure at all n locations
gaactcggaaaaagggaaaaaagaatccgtctttgcatcccacatccctgtctttctcctctcctacccttcttcttcttccacttgaagctttttctctcttggtcttatcctcctccttgttgttgcgggaagaggcaggatccgggaggttttgtggtgcgatcttgttggggtttcaggtcagaagggagaaggggagaggtcagccatggcattgcctgtttccctcctccgcatcgcggcggttctgctcgccatcttgccattctgcgccacgcatccaagccccgggttccatgctcctcgcgagtttcacaaggcactcgtcccagatagatatggatttgtggcaagaagatcaattgctgaagctcctgttgacgtaaatgtcactacaaacagttcctttgtcttggcgcaagagcgaacatatagaaaagaccccttgaatggattcaggaaatatactggcggttggaatattagcgaagtgcactatatggcttcagttggatacacagcttttccactgttcatcattgccttggtgtggtttgtgctgttttttctggttatgcttggaatttgctgcaagcattgctgttgtccacatcgcagcttacacatactctcgggtagcatatgccctatctctgatacttctaatattgttcacttgtgctgcaattgctggatgtgtcatgctgtatgatggtccaaggaaaagttccataaaagcacaacgactaccttgaattttgttcgttagccaggccaatttttactgtcgaaaaccttattaacttatccggatagtttatcttgctgccaaaaagggtgacatagggcgatcctttttgcctaacgatngtgcaaaatcagatcaatgaaattcaaggaagttgaactcatcagctactgagcttgccactaagact

SEQ ID NO: 392469 - DNA, 489 bp, Oryza sativa
ttgctcgactgcgaccaaaaatcccccgctcgcttgggcgctccggcgatcccctcccccggcagcggaggcgaagctcactgtcgcaatcggcgcagctgagcggagcccttgcccgccatgacggagtactgggtgagccaaggaaacaaatggtgtgacttctgtaagatttacatagctaataacccgctaagcatcagaacacatgaaattggtaagcgccacaaggacaatgtcactaaaagattggcaaccatgcaaaagggagggtgctgccaaagaaaaggagcagcagcaagcagcccgggccctccagcaaatagaagctaaagctaaaaagagctaccaaaaagatttagagaacagtcaaaggaatgtgggacggtgacacttctgcggcacctggagatggatggggaattccgactctactccaggatactatttctgacacacttactggactttttttttgactcaaatttc

SEQ ID NO: 392470 - DNA, 808 bp, Oryza sativa
gtggctcttccgacgggagcatctctgtcatgaccatgcgcccggatggaggatgggactccacaacaattgagcaagcacaccctgttggggtgatggcagtctcatgggctccagcaaccgcactcggttccattgttggctcaggggaacttgtccagaagctcgtctctggtggcttcgactgtgttgtcaaggtgtgggcttttgtcaatggcagctggaagctggatagcgttctgccctccgacatgcacacggactgcgttagagatgtatcctgggcacctgttttgggcctcgcaaagtttacaatcgccagtgcctctgaagacggtaaggttgtcatctggaccaaggggaaagagggcgacaaatgggaagggaaggtgatgcatgacttcgaggctccggcatggagggtgtcctggtcactgaccggaaacatactgtccgtggcggccggctccggcgatatcacactgtggaaggaggcatcagatggtcagtgggagaaggtgaccaaggtggagccataaggaagcctcggctgtggcctgcagtttgcatctcatatcagattcagtcagatacatgtttctagtagcaatggaatccacgagtgtactgatagatactcaaattctcacttgttatcatcatcatctttggatggatgttgttcttacctgaacagagttgtgctgtgtctgtttagacctgtaatttactggtgcaatggtggtttcttagtactgtcaaatgagacatcagacatctatgagacgattataaaaaaaaaaaaaaa

SEQ ID NO: 392471 - DNA, 575 bp, Oryza sativa
atgatctccaactcaaagacaacagagcacttcagaggatctctagcttgcccgtattgcagtctctcaccattgacaactgcccaaagttgaagcatgtttcaggccttgacacactgcagcatctcaggctggcgttccctccatccacagagacattttattttgatgagctgatcatcttctggagtattgcattcccacggtggctggagctggtgatccgtaagcgcgatgggctgtgccatttcgagcttcagtgcagcctctcattgctcaggagctgcctggacggtggcaagaactggagcatcgttcagcagatccccaaggttcggatcaccagcaccgatggcaagaggtacatccggtacaacaaacgccggtgcatctatgagacgaatgctcaatctgaagatttaagccttcgtgaaagtcccagtacagtacgtttttttttttcatcttcattgtccagttcatcttgtcaaggttctcttgttcagttgtgtggtgtcattacttacagaagtgtatattttcgttgatttattggcagtggtttgggttgttac

SEQ ID NO: 392472 - DNA, 462 bp, Oryza sativa
  unsure (1)..(462): unsure at all n locations
ccatccaccacaaggcgccctccgctgagcttggcttggcaacgcggagggacggacaatactgacctctgagaaagaagacattgagggaggaataaacacaatgccattggcccgttgaggaagggtgagagccaattaattgttaacaagaattgaccatatagagaggttcaatcttgttaacagcaaattttgacgttcacccttggcagacggttttgcgaattcgagaagagaaggcgcgtgcacacacaaaaaaggaatttcaggtgaaagggcatgagcacaaagatgaaggaagggaatcctaagaccattccgctacatctctaacatgatggatggtaaggaggcggcacaagacatgcagattggattccccacggatgtgaaacacgtggcgcacatcggatggggtgggcctagtgtccccacaacataataattctncagggcacc

SEQ ID NO: 392473 - DNA, 610 bp, Oryza sativa
atcccattgacgattgtgccgaacagagttggtgtttcttggtcaccaaaaaacacctgctgtttttttggatctgatcttgcaaccttcaaggagatcgccaagaaaaatcatgcttctgcggagtcttgtttaactctgctcttccatgcatcagcctggcaggatgagatttgagttccagggtgcatctttctgatgtgttcatcctttcttgaacagttcccccttcggtagttccttgcatggtagaaaataaaatctccaagggaaaataagagcaaacacatgagagacacttgcgggagccttactaccggcggctatgaagaagctgctgaatgaagggcgacgagggaggcgtaggcgccatccttgatgttcatcaagacaaacggtgagcaacgatcacggttgtccggttgaccatcactctgtccagcgcgtcttggaccaccctttcggattcagcatccagcgcactggttgctttatccagcagaaggatcttgggatccctcacaatcgcacgagcgaccgccactccctgctttcggcctccagacaacttagctccccgctctcctactgctgggccatatcccttcca

SEQ ID NO: 392474 - DNA, 783 bp, Oryza sativa
  unsure (1)..(783): unsure at all n locations
gagctccactccactcccctccccacactcccccgcgtctccagcgccgccgccgcggtaatgtgacctcgcgcgcggcactccgggattatctaggaagagcacgagggaggaggcgccgatctgtagggctcgttgttagtcatctcgaccaagggaccggtgaagctggaaaaatgcctgatatccagttagggtgccacactataaggtcccatggaaccagtgtggcaagactccacatgtntgactggataatacttctctttcttgctgttgttgatgggctgctaaacataattgagccttttcaccgctttgttggacgtgacatgatgacagacttgagatatccactaaagggcaacacaattccattttgggccgttccacttattgcaattgtgctgccctgggttgtctttggtggaatttacttcaaaaagaaaaatgtctatgatttacaccatggcatactggggattctatattcggtacttataactgctgtgattactgatgcaattaaggatggtgttggtcgtcctcccccagatttcttttggcgttgtttccctgatggaatacctaagtttgataatgtccctacaaatgtcatatgccatggagaaaagagtgttatcaaggaaggccacaagagctttccaagtgggcattcttcatggtcttttgctggtctaggtttccttgcctggcacttggctggtaaacttaaggcttttgatcgcaaaggccacattgcaaaggtatgcataggatttt

SEQ ID NO: 392475 - DNA, 719 bp, Oryza sativa
ttctttttcctgctgcagcagctcgtctaagtcgtggcacgacagctgctgcgatatctatcgcaccaggaaggatccttccgaggaggaaaggcaaacggcgggacgcttgagccaacacacaccattgacaaaaacattaattagatcgtgatagaggaatataacaatcacagaagccatggcaagcagcggcaaggagcaccggcgaggtgttccacgcccaccgccgttgtcgctctacatcgagagggagcaaggtgaggtcatcatggctggtcaggcgctggcgacgacgaggatgctccagcaggtcgccaccagcagcagtggcaagaagaggatactgtccaagcagctgtccatgaaggagacaacccgggaggtcaagtgggagaagcggcgcaggcagatacaccggcagaggagcagcatggcccttcaggatgtttgaggaaggaagcgagtgccaacatgttcgccggcaccactgacagcgaaatgggctccagcaccgagccgggtgccccaagaggctgaccgatggagacctcgatgagctgaggggatccatggagctcggctttggattccacgaggagaatggtgggcagaacctctgtgacacgctccccgtcctcgacctctacttcgccgtcaaccggcagctctcggagcccaagatgcgtttgttcactagcttcttgccattacctaca

SEQ ID NO: 392476 - DNA, 414 bp, Oryza sativa
ggcggcctcgtcggctacgcaacacgctctggaacggctccgtcgtgctccccgccgacgcccccatgcgcaagtacatccgctactaccgcgacttcgtgctcgagctcaacaaggccctcgccgccgaccaccgcgtcgagatctgccagctccccgtcggcgacggcatcaccctctgccgccgcgtcaagtgagcccgccgccgccgcgagtgcgactccggccgatgcccaagaactagtcatttataaatttataaattataactaaattgtataattttgccctttttttttgtaatttgcaagctactggaaaacgttatttgatatatgtataaatgtcgagacaataatattatttgcattattaaattgacctgggttttgttaagcttttaaaaaaaaaaaa

SEQ ID NO: 392477 - DNA, 903 bp, Oryza sativa
caaatatcttcccataatgagataccctaggtgctcattccaccgccatcgcctccggcgaactctccaccgccccctttcctacatcccaccactattttataagccagcccttcatctcatctggagatctggttctactcatccaggaaagccccaatctttatcatagcaaggaggtcatgtcggaatcggccctcgacaaacatatagtggtgaaaattcccgatcatgttctgccagatgctttcataggagaaagtgttggtaaaggtaaagaagatggagcaaccgtagataacatggacccgtcccgcccttttctagttatcaagaagtctgatttggataaggctgatgagtgggttaaaataaaatatgcttggatggccaagtccttaacaaatgatataatcatcccagaccctacccctcaggtggtgcgggatgccttctttgatatatctccccgcttggactccgtcttgagaaaggacagtgtccggtgcttcttccgtttgttcgcggaatgtactgcggccatggcatttaagtgtaacatcacctcagaaaccttatcctgcattgtcaggcataatgccttgcgatgtgcgaaaactgtattggagggcaaggcacctcagctcagttgtatgcatgccaatccaaactgcattaacccatatggaatttttccactccatgaagctgctgaacggttctctgttgacatgatcaagttgctgttctgccatggtgcttcagccaatttacacacagtcaatgatgctggcattcccggactactcccgctccatgttgcagttggaaatacttgcttgcataaatatctggaggacaatctatctcctgtgcagtatcatgaggattatatctacaagc

SEQ ID NO: 392478 - DNA, 429 bp, Oryza sativa
ctttcttatggaggcaaacgttgtgcacgagttctacgagccgtctttaacgatggggtaccggtcacctgctcctgctgcgcacttcgcgccaaacttcgcggtgcacgcggcaaggaacagctttggtggcccttgaaggaaaaaccaaaattacacaaaatctacacattaccgtttataccgatatgattcacatagggtgccatttatattacattcttaacccttacattcatccatcagttatttgcagttttgttcaaagttgttatatcgtttccgatgctatactgtgcaaagattattactacacgccgttctaaaaaaaaaaaaaaaaaaacaaaaaaaaaaaaaaaaaagggcgcccgaacatagaggggccccgcgcacgcgcgcgtgcgcgcgacgtgatagctcttatatagt

SEQ ID NO: 392479 - DNA, 775 bp, Oryza sativa
  unsure (1)..(775): unsure at all n locations
cgaattgggaagggtttgctcgatccctttgttctttccttctctttcccctgactcctcccctccccggactccaaatcatccgctccgccatggctcccgcctgggccttgctcgatcgcttcgtcgacatgttccccctcgacggcgaccaagagagcgaagacagcgggggagaagattccataccagctggcatgtggtccgtgaagcccaacccacaagttgccgatccccctggtatatcttccttccccctgctgatctctcggaaggcgatgaaccaagtgcgccacgccatggtcgtgtgcgctagcaagaacctcgtcgtcttcctcaccggcgagtactacccaatcaactacaggcctggttgctacctgatctacgacgccatccacgactctctcactcccgtgcctcacgtcccgggacctgacagcctccttgccatcggcagcggaacatctgtcatttcctttggcggctcgggcagcacccccttcgtcctcgccgagctactcatgaccgatgtccgcaagttccccgaagaagctgcgctcttcacgtggtggtctactgccgtagtgactcccagcggatacaccgccgctgactggatgaaggagaaggttaccctcccccctgaggtgcgcacgcccacctactgcttcgtttccnacatggcattcttcgtcggagaatcgtgcctgtgctgggtcgatctactcatgggcatcctgatttgnacctttgtccctctcgagatcaaccg

SEQ ID NO: 392480 - DNA, 541 bp, Oryza sativa
aagagggcatcccgagggcattgtggaggccgatcccttcccccatggtcggcgtgctcgccggttccacccaaaccctagcaacctcacgccgccacctccctcgccgccggccgtcgccctcgtcgccgtgtgtctccgccgtcagccgccggccgccctcaaccgcgggctgctgattctgctttcgcccgcatcggccacctgaccagggagagagaggaagagaaggggggaaaggaagaggagtaaaaaggagaaggaagaagaacacaggggggaaaaaagaagaagaagaagaagagacgaaacggggaaagggaagaattcggggatttctctgtgggtttcgtcagatcctccttcgatttgtggttcttgctgccagggtcgtggtgcgaatcaagaagtggaaacctccacccatcgctcatcttcacgcggttaaggagcgagcgatcaaatcaggggataatggaggaggacagcgtcatcagcaacggcggcagggaggaggaggtggtggttgcgaacggcagtg

SEQ ID NO: 392481 - DNA, 952 bp, Oryza sativa
ccctcgcgtccgctcttgatgaggctaagttcgaaagaggaaaactggaggagctacatcgttctgttactgaggaatgtgaagaattgaaggcacagaaggctatgctgacagataaaatgtccaatatgcaggagactttggacaatggtgaagaagaaaaacgaagcagaatagctatgcaggcaaagcttgtaaggctggagagtgatctatctgcagtggaagcatcgcatgtacatgaagcagagctaaagaatgaacttaatagaatcaagagatcagatagtgagtagcagagaaagatacaatctcttgagcaggaaagtgaggaccttacaagtcagctcgagcagatggcccacatcaaagaagaggaccttggaaagcaggatattggtggttctccagttgatgaggaatctggcattcatttgaagatccaagttttggaagctaagctcgcagaggctttagaaggagaataagatgtacagagctcaacagaagagtcccatgcctgatgggcagtgtgctgctgggaatggcaatgagagtagtaacgaaagggttttgcaactagaaggagagctaagagatatgaaggagcggttactcaacatgagcttgcagtatgcagaggtagaggctcagcgggaacgattagtgatggaactgaaagctaccaaaaaaggaggagggcggtggttctaggttgtcgtagaactattgcctgccataacagagactgacatcacagatggacatcatatgaaccagagccatgtctgcaccatgacagtatgttatcatgtgagagcaaaagccaagtgctgaagcagatgtgatgtgcaccagactatgctagttggtactggagcatgagctgcaaaagactgaaggtcttggtgatagggcgaactgtgagtctgtgacttctccctggagaaaa

SEQ ID NO: 392482 - DNA, 955 bp, Oryza sativa
tgttcttgcagagttacttcttggtcagccactgtttcctggagagagtgctgttgaccagctagtagagataatcaaggttcttggtactccaacccgtgaggaaatacgatgcatgaaccccaactatactgagttcaaatttcctcagattaaggctcatccttggcacaagattttccacaagagaatgcctccagaagccatagaccttgcttcccgtcttctccaatattcaccaagtctacgctgcactgctcttgacgcatgtgcacattccttctttgatgagctacgagagcccaatgcacgcctgccaaatggtcgtccattccctcctctgttcaacttcaagcatgaactagccagcgcctctccagaactcatccacaggctcataccggatcatatcagacggcaacatggcctcaactttgcgcatgctgggagctaaagggcaccgcgacgccaccgttttgttcgtttatttttccatgagctggacattgcaatcctagatgactccattgtccctggacttggactccatcctcagattgcaccatcccatgttccatgatccatccatccgtcaagccatttccgcaaggactcagtaccagagaagaagtacaattatgtaaattatctaaccatggagaaatgcgtgctgctgctgctggtgttaagtacgtgacggggcatgctggttgagtagtaggtaaggttaaggataaatgtaggttggtggagactgagagacatgttaagcttagggaaccctgctttccttcttttttttttctcctttcattttggtttcttcccattttgtgatccttagcattgccctacagtagtgtagctgctccctgtttttgtttgctctttcatcatgtaaatgccaatcccaatcgcaatgaaccctctttccttcaaaaaaaaaaaaaaaaaa

SEQ ID NO: 392483 - DNA, 466 bp, Oryza sativa
  unsure (1)..(466): unsure at all n locations
cccgacgcattctgctttcgtctccagaggttcgtcttcttctccttcccccagctttgcgccttcgcgcancgcgtaatctcgtctgccctcgctgctggatgtcggcgatccgcgcctcttctcaccggctgcagacaagaactgtggcattaacaaggacaaagatgtcaagcatggcaggcttgggagcttctcagcatggatatcctccccgaagtcatgagccctggactaaacttgtacacagagagagattacccgagtggtttgcatacaatccaaagaccatgaggcctccaccacttagccatgataccaagtgcatgaagattttatcctgggntattaacgggcttcatgatgttgtaacgacaaaggggttttctgcacgtgacttggctcagagagagaattttgatgtgttatggcttcaagggacacatttggaggaaaaggatgttga

SEQ ID NO: 392484 - DNA, 855 bp, Oryza sativa
  unsure (1)..(855): unsure at all n locations
tgctgggtgggcgcggtggctggaggggaaggctgactacctccggcgcgatcggatgctgcggtccaacctagaatttctcaatccccgcaaccacccgctgcttcaggacccggacagccccggccttacctctctcacccgtggcgaccgcatggtgcaccggatgcttctcgccgagatagagaaggctgcttccaaaaattttgagcggcggagtctgcaatcgtctgatattaagcagggaatgggagtaaccgagaaggtgcagcagaggaggtggggatattacccgggaattgatccacatttgggcttcaatgagttcatggagaagttttttgagcatgggaagtgctccgtgaaggtgttcatggtgtggaacagcccacagtgggcgtatggcgtacggcaccagcgtgggctggagagcctactgcggcaacaccctgaagcttgtgtcgtcatgctgtcggagacactggagctggagttcttccaggaatttgtgaaggaaggatacaaagttgcattgcgttgccgaatcttgatgaacttttggagggcactctaacccatgattttgtatcatgtgggaatgaatggcggaaaacaaaatactaacccttgcattacagtgagctaagtacgcctttgctgctccttttacaaatacgggtgggatataccttgactctgatgttgttgttcttaaacctttaaaccgcattccggcaattctaattggtgttgtccaaacaagnttcctgaaaattccantttttaaatgggtnctgggaattaagcatttgaaaaaaaaaaagcccttttcttaagcggganttcccttaaann

SEQ ID NO: 392485 - DNA, 749 bp, Oryza sativa
ttctattcggtgcctctgcccggagccgaactccgacgccttatcgactcactcaccaagtgctcgacgcaattccccaccggggagcccgcccgccatgccggagagcaacggcgccgcgtgcggcgcggcggagaaggtgaagccggcggccagccccgcgtcggaggagccggccgccatcgccggtaacatctccttccacgcgcagtacagcccccacttctcgccgctcgcgttcggccccgagcaggccttctactccaccgccgagagcgtccgcgaccacctcgtccagagatggaacgagacgtacttgcatttccacaagacggatccgaagcagacgtactacctctccatggagtacctgcagggccgcgcgctcaccaacgccgtcggcaacctcggcatcaccggcgcctacgcggaggccgtgaagaagttcgggtacgagctcgaggccctcgtcgggcaggaaaaagatgcagctctgggaaatggtggcttgggtaggctcgcatcttgctttttggattcgatggcaacactaaatttgcctgcttggggatatggtctgcggtaccgatatggtctattcaaacaatgcatcaccaaggaaggccaggaagaaattgctgaagattggcttgagaagttcagcccatgggaaattgtcaggcatgacattgtatacccaatcagattttttggccacgttgagattttgccagatggatctcgtaaat

SEQ ID NO: 392486 - DNA, 477 bp, Oryza sativa
ttgtcgcgtgggcatttttcttctatcttgcatgatcacacgaagtgatctgcgtgatcgtcggagacatcgaatcaaagctctcgcccattctgcttgctgccctgatctccttcaaattctagcccaaagaatggaggaccagatggctaaccttcgcttgactgacttcgagttcttcaggatcatcctgcccggatcctccaaaacgaaactgaagctgccttacaagttcgcgagggagcttggggaccgagagctccgggaggcgaggctgcgggtcgccggcgaggggcggcgcccgtgggacgtgaaggtgttcgacgacgacgtcagcggcgacgtgtacctgggccgcggctggcaggagttcgcccgcgcccacgacctgcgtgacggccacttccttgtcttccgcttcgacggtgccgtcgcggttaaccgtaccgttcttgacgagaccatgtgccgtcgtga

SEQ ID NO: 392487 - DNA, 348 bp, Oryza sativa
  unsure (1)..(348): unsure at all n locations
ttctgtgcaatgagcacattttcttttgatcttcgcattttgtttgcaagagatggatggagcaaaagagggagggtgcattatgctctctgacgaggaaactggtacatagtaatgcgaaatgtaaggtaatatgctgaggcttattgtgcccactgatgtggtgtataaaaatgaaatgtatctttaatcttttttactgtactttgcaagatcacttcagttgctccctgaagctgcttgaaaactagctaatttatgtaactggtcattataaaaatgatcctccactttctggaaggaaacaatacctgtcagatttttcnnnnnnnnnnnnnnnnnnnnnnn

SEQ ID NO: 392488 - DNA, 540 bp, Oryza sativa
ggagccacacgcgcgcgctatgtctaaccggagaaaaccccaatctctcgccgccgccgccgtgatgtctcgccggtacgacagccgcacgacgatcttctcgccggaggggcgtctctaccaggtggagtacgcgatggaggcgatcgggaacgccgggtcggccctcggcgtcctggcggccgacggcgtggtcctcgtcggcgagaagaaggtcacctccaagctcctccagacctcgcgctccgccgagaagatgtacaagatcgactcccacctcgcctgcgccgtcgccgggatcatgtccgacgccaacatcctcctcaacacggcgcgcctccacgcccagcgctacgccctctcctaccaggagcccatccccgtcgagcagctcgtccaatccctctgcgacaccaagcaggggtacacccagttcggcggcctccgccccttcggcgtctccttcctcttcgccggctgggacaagcaccatggcttccagctctacatgagcgatccctcccgtaactacagtggctg

SEQ ID NO: 392489 - DNA, 355 bp, Oryza sativa
  unsure (1)..(355): unsure at all n locations
ctcacatctcaactgaattagtaatagtagatctctcgccgtcgccgcctccgcctccgccgccggaatccccagcaacaacccgccgccgcgatgtctcgccggtacgacagccgcacgacgatcttctcgccggaggggcggctctaccaggtggagtacgcgatggaggcgatcgggaacgcagggtcggccctgggcgtcctggcggccgacggcgtggtcctcgtcggcgagaagaaggtcacctccaagctcctccagacctcgcgctccgccgagaagatgtacaagatcgactcccaactcgcctgcgccgtcgccgggatcatgttggacgcaanatcttctcaaa

SEQ ID NO: 392490 - DNA, 398 bp, Oryza sativa
attcagttggccggcactcctaaggagaactgggggcgactttaaaagagctgggggtgacccctccaccagccgcctagagatccgcttgattcaaagccaggatgaaactcgaaggccccagattacatgcaaggctgtgaagtatagctgaaaccatatcacaaccatgggaagcatcatcaaacatcaattagtgaatagtgactggagggagagtaccagtgttaaaaacaattttggtattctgcttgtatgcacaatattcatcaacatgcctcctgggcttcacctcttggggataccctttttagttggatcataggtttcaaaaccagaaaagggtctgttttctaaaaaccaaaataattcacattgctggccttttttttttttct

SEQ ID NO: 392491 - DNA, 476 bp, Oryza sativa
gttgttttctcttccgctttttcctctctctctcgcctcgcctctgcttcctcctcccgttcgtctcccctacctacctagggtttctcgccgcctcgcatcccctcctcctcctcggctggttcgcctcctactctacgcttgctgctgcaggtacaagcgataagcagtagcttcttcatcaaaggttttgtgcaaaattatgcgatcttcatgggctgattcagttgcgaacgccgaggaatcggcgcccgcgactggtgctgctcccacccctgttgctaatcaccagaactcacgccccactcgcagcgcatacgtgcctcctcacctccgtggccaggcaccaaccacaactgcagctccagctccagctccaggaccagctgctgtccagccctcagcttctgtacagccttctggttacgcagctattggtggtggctctcgctgggctggccctgccagtggtgatg

SEQ ID NO: 392492 - DNA, 811 bp, Oryza sativa
tcgatccaggcaaaactaatattggtttgccaccctctatggacaggtattaagttgtggtgcagtcagatttgtagctaatctggggatgagcgacatttttctgaatcagattcattcattgcaatataagctttaaagggcaatataagcaatttcgtgctagctgatgatcagaggatagtagcaatgtagtttaatttcaaaacgaaaaggaatgatgcatagggaggaaaaccttttgttcaaaacaaaattatatcattagatttctcaagaccttgctgttttgtgttttgctattcattgagcattttagcttaaggcctaatttttataacccaactatgaccgactttgcaattttgcattagttttattgttgcagctatattggatttgggtaagtaatcgccattatgtcacacttttgcttggattgggtctcatgaccggtggcaaagcagcggtgaagatgcggcaattaggagaccaacaggggcgagactggtggtgggcatcgtatattattggacatgcgctttatataccacatatatatagttatacacagcaggttctgtttacacccaaatttggcacctatggacgaaatacgggaaaattgccaaagtttggaaagtgacgggtttccttactcgggaaggcaggtttcgtgtttcctttggtttctatcccgagttggatgtggagaagggcctgtaaatggcaagaccaacccctatttaagggacaaggccggtttattgtaaaacccccgaatacaatctacttaaatcgttcttatact

SEQ ID NO: 392493 - DNA, 520 bp, Oryza sativa
  unsure (1)..(520): unsure at all n locations
cgcacaaccaccgccaccaccaccctctatnncccgcacgcacccctntnccctcctctctctcgcacacccaccgccaccgccggcgtcgatctgtcgtcgattcccatctccagatcgacgccactagcgccccctcacgccgcaagaacgctgtcgcctcggctcatcgatctccgacaacgccgccgcgcgccgccgtcgatctccgccgcaagaacaacgtcgccccgcctcaccgagctcctccgacgatattccgcgtcaattaatcttcagagcaataagggacatcaatttccacctttggctgatatcgcggcgaaccgttgataccggtcaccggagagcgtctatttcanctgcactgctcctgttgtcatccacgaccacactgcatcaatgtcctcgacctctacctgtcgttgacgaccatncaggaaggtcgnccttggaagcgttctaagctgggttccgtccgtggccaacattgagggtaaattattntatatatagtttt

SEQ ID NO: 392494 - DNA, 1260 bp, Oryza sativa
  unsure (1)..(1260): unsure at all n locations
gtcctctcctccggctaccaatatcccagaaacctacccaaatgctcgcctccacctttgccacgcaccctgctgccgctgcagccgccagganctgaggtccgatccgctggcgctgccgttctgttccccaaatcgtcacggtgacgctgaggcggcggtttccaatggcgaggctttcgatcacgaacgccctcgctagccagagcctcgagagtgcccctgcggcgcctcccaagcactcgttcccgatactggtgaatagttgtactgggaaaatggggaaggctgttgctgaagcagctgtatctgctggtcttcagttagttcctgtatcattcagtgctattgaggttcctgatggaaaggttgaaatttgtgatagggaaatttatattcgtgacccatctgaaggagaaagtattctcccttcgattgctaaggattacccagatatgatagttgttgactacactgttcctgatgctgttaatgctaatgctgagctttactgtaaacttggattgccatttgttatgggcacaacaggtggaaataggcaactgttgcacaaaacagttgaggacgcaaacgtgtatgctgtgatatccccacagatggggaagcaggttgtcgcgtttcttgctgccatggaaatcatggcagagcaattccccggtgcattttcaggttacaaactagaggtcatggagtctcatcaagctacaaaattggacatttctggcacggccaaagctgttatctcttgctttcagaagttgggtgtgtcatttaacttgaacgaggttaagcaggtccgggatcctcaggaacagcttacattcggttggtgtcccagaagaacatcttcctggtcacgcatttcacaatgtaccatctcacttcaccggatgagacagtttcatttgagtttcaacacaatgtatgtggccgttcaatttacgcagagggaactgtggatgctgccctgtttctccataaaaagatacaatctggtgccaacaagaaattatatgatatgattgatgtcctaagagagggcaacatgagatgatcctctgttggtgttatacgtggttatgtaacaccgatctgtaaactcagatgcgcaccaaaattaggcgactactaagatttaccaattttctattgtaacaaattgtagtaccgtcggatagtagtttcctcaggagaaaaaaaaagtttatctcgaatgaataatgaagatgacttcgattt

SEQ ID NO: 392495 - DNA, 543 bp, Oryza sativa
tatttccactgctgttatgactgttggcattgcccttgtcagttggttgggccttccttacaccttcaccatctttaactttggtgcccagaagacagtgcaaagctggcaattattcttgtgtgtggcggttggtctttgggctggtctaatcattggatttgttaccgagtattacaccagcaacgcatatagccctgtacaagatgttgctgattcttgcagaactggagctgccactaatgtcatttttgggcttgctttgggttacaaatcagtcatcatccctatttttgctattgctttcagcattttcctcagcttcagccttgctgccatgtatggtgtttgctgtggctgctcttggaatgctgagcacaattgccacaggtcttgctatcgacgcctatggtcccatcagtgacaatgctggaggaattgctgaaatggccgccttgagccacagaattcgggagagaactgatgctctggatgctgccggaaacacaactgccgcaattggaaagggtttgccatcggctc

SEQ ID NO: 392496 - DNA, 475 bp, Oryza sativa
ttccgcgtgggcaggtggggactttttggatggtctttaacaattaccagcaccattcaaggaaaaaggagggaccttcctgcatttcctcacccgactatgggcagttctgggcggtaccttggcaatgacaggaatgcttgaccgatggatgtaccggcttattgagtctgtcacaaaatcaaagaccagaagcgtactacggtaattgcgcatcacatgataagtggaggcaaactgtgacaaccctgtgtgttgtcactggtcatacaaatcagtcagagcatatcgtctcagatacggtcaaccccagtgggttttcatgttttgatatgctctatggctcgattgcttaaaatacttatgttgttagctttgtcattaatcactcatgttagactggcacggactcataacagttttgtaatcaatgattcccacaaatcggaggtgccaacgtcgtgtgatcatggag

SEQ ID NO: 392497 - DNA, 659 bp, Oryza sativa
tctgccagcccctaccttcgttagagttccttcaaggagctaactctaatgaggctagaggttgtttcttgtaaggtgataggttggtactagtaaaatatagaatcctttgttcattcttgtccttccatcacagtcgtttctacagtttggaccgctttccagcctttgaccgatggcatcgcctgcagcgccaacagcaacggagttcactcaggaagctgctcgtcagtctctcattgagatctctcagtccctcccggagaaaccttcagcccagaacctggaggtgaagtctccgagcccccgtgcagcaaacgaagatcatgaagatggagcagagaaatccagatcaaagctgttctcaatctcctacctttctccggatgcccaaccgacgccgtgccctcccaagaatgtcctcacttaactgtgacgatgctcctactcgtgcgtgtgtggcacagtatatcagtgttatacctcacttttagctggaaagatggaaatggaatacttttgggtgcttatgtttctaaccctaagaaacattcagggggaaaaaaaagaccagatagttgtacagatgactttgtgacgaagaactatttaccaggaacaggcttgcttaatccttgcatgttattttgttgttgcat

SEQ ID NO: 392498 - DNA, 730 bp, Oryza sativa
  unsure (1)..(730): unsure at all n locations
ttccactcttctccaccccaagagaattgaagccaagcatggagaatggaggggaagaagatgacagagcaagccgatgcaagaggattaccagagaatcagatgcaaccaagaatggtgcagcgaccaagctgcaagctttgaggctcgtcgaggacctctccctcccttccgtgcaggtggtnggtgatgagcgccaacatgggctgttcgcactgccgacagcgggtcacaaaaggttgtctccaagatgaacgggttgctagattacatggtggattttgggaagaagggaggtgacagtgagaagggacgatggtgcacaccaagaagaagaggaagcaacacaagaagcagcatgaggaaaacaagaagggaatcgctgcaaactgggagaagaaatcgtcttctcagagcaatgacagcgccagcccgctggcctggttgctacgatgctacagttcttagcctctcctactatctagtgcttcctatagtctacatatagtgttacttatatactcctaatatatatagatatttctaggagctatatagctgctcgattaattgtttatttttctctttagtttcttcttgcaatttctttctttctcatgttttattttttttcattttatgaattgaatactaacgatatgatggtaggaaatgtgtatattctgcccataactgtgcattataaaatcctctatttgcaaggtaacat

SEQ ID NO: 392499 - DNA, 1466 bp, Oryza sativa
ctctggctcgcctccaccaccgagatgccggggctgaccgcgccggcgagctactccgacgagccgcctcgccaccccgccctcaagatcaactccaaggaaccatttaatgctgagcctcatcgatcagcattagtttcatcttatattaccccggtggatttcttctacaagagaaaccatggaccgataccaattgtggatgacctctcaagatacagtgtttccattactggtattgtcaacaagaatgtgcagctgtccatggctgacattaggagtctcccaaagtatgatgtaactgcaacgttacagtgtgcaggcaacaggaggactgcaatgagtaaggtacggaaagtgagaggcgttgggtgggacatatctgctcttggaaatgcaacatggggaggagcaaagctatctgatgtccttgaactagttggaatacctaaactcagctcagtcacatctttaggaggcaagcatgttgagtttgtcagtgttgacaggtgcaaagaagaaaaaggtggtccctataaggcatcaattccactaaagcaggcaacagatcctgaagctgatgtgttacttgcatacgaaatgaacggagagaccctaaaccgtgatcatggatacccacttcgtgttgttgtacctggagtaattggcgcacgctctgtaaaatggcttgacagtatcaacataattgaagaagaatgccagggtttttttgtgcaaaaagattacaagatgtttccaccctccgtagactgggacaatattaattggtcaactaggaggccacaaatggatttccctgtgcagtctgctatttgtaccctggaggatgtggatgttatcaaggaagggaaggctaggattgctggatatgcagtctcaggtggtggccgtggcattgagagagttgatatatctgtcgatggggggaaaacatgggtcgaggctcatagatatcagaaaagcaacgtgccatacatatctgatggacctcggagtgataagtgggcatgggttctattcgaggctacattagacgttcccagcaaacgctgagatagtagctaaggcggtggactcagcagcaaatgttcaacctgaaaaggtggaagacgtatggaacctgagaggaatcctcaacacatcttggcatcggatcaaaatacagaattcttcgtgcgtgggaagatccaaaatgtgaaataagtaaactgcttggaatcagaagtcaagagtttatagtgcccggaataataagttattgcagcattcgatgattctcgcagactgtgctcctgtactatagtactatgttggaatcgtgttgctggcctgggcttatatgagacgaaacacaatttttgggagtgatgttaagaagatgattaatacgtactccagtatttatgttgtcttctaatggaaaattaaaaaaaaaaaaaaaaaaa

SEQ ID NO: 392500 - DNA, 551 bp, Oryza sativa
  unsure (1)..(551): unsure at all n locations
gagagaaccaaggcgaaaacgcaacgaaaggccgtggaggaggacggcgttccgctcgccccggcgcgtctcgtctccccacgacaagaagagaggcggtgcgcttctcctcctcctctcctgtcctctcctcctctcgtcgagcggcgacccagaagagtagtatggtgcccgtggagatggaggtggacgacccccgcggctgggacttcgtcgactgggtcggccccgacgcctccgcctccatcttccgctccctcgacgaccccgccgacatcgtccgcgccgccgccgtctcccgctcctggcgccgattcgttgttgagaacgaattcagcaagagcatatgctttgcggatatgcccggagatcgccaatttcaaccagcgcggaggaggtgagcagatcgccgccgcagccgccgcacgccgagtccagccatggcgtccagcgcaaggccctcgagagggactacaggatctactcctacctcagcggcgccctcgtctccaacagcccctccatggactgcatnnctgcatgcatcggcg

SEQ ID NO: 392501 - DNA, 624 bp, Oryza sativa
  unsure (1)..(624): unsure at all n locations
ctcctctcctcttcttcttcttctttcccttctcttctccgccgccgacgaccgaataaggagagtagaggagagagagagagagacagagagatggctgcggcggcgcgtctcctcgcgcgtatctcgaggcagggcgtggcctcggccgcggcggcgaggcggcaggcggaagcggcggcgctgctcggcgcttcggcggggcggcacttggccccgccctgctcttcgatcaaggccttgcctctgctgaatcagccgaggctgtactcaacttcaacctttcaaaggtttgggttttcatcttctgctccccagcaagatgataaggcagcaaataaacagacagaggatggagttaataaaagcactcaatctgaagcttcaaatgaaaccaatagttctcctggaaccgagaatgcatctcaagcagatacagaagaccttgacctgtcaaaggaggacctgacaaagctagttctggagaaagaagaacttgttgaaatctaaggatgaagaagttaaagnatgaaggataaanttttnnncacgtatgcagagatggagaacgtcattgcgagaacaagcgtgaatcagataatgcaagagtatgcagatacaggc

SEQ ID NO: 392502 - DNA, 511 bp, Oryza sativa
  unsure (1)..(511): unsure at all n locations
ggcttatcccccctcctccccggcctcccttccgccaaggccgccggagcccgtcgccggaggcagctgcagggaaggacgccgtcgccggacacatgcggggttgggcttcccagatagcttgtctcttgctgcactaagctcttccaatttttaaaaatggcagctcccaagcccattgctcggcttatttcccatgtcattcttgatttagatggtaccctcttaaacacagactgtgttgtaagtcaagtgctgaaaccatttctagtcaaaaatggggaaaaagtcgggacagcaagaaagctcataaattagttgggaaagacaccttatgaggcagcagcttgttgttttaggaggattatgggactcccttactcaaccagaagaatttctctccaatgcttactcccatgttcaatgaggcattggtgcaacataaaagctcttcctggagctaatcggntgataaaacatttgaagagtaatggagtaccagctgctttgg

SEQ ID NO: 392503 - DNA, 585 bp, Oryza sativa
tgcgagggccgccctttttttttttttttcagcatctgaattccgaagtggagtgggactggcaagcttagatcccacaggccagaacacatctccatttgctaatacattaccacggatacgtgcttaaagttgctaagaacgtcggtactagtgttactacaactgccagaggcaccctaccattgtctccagagaaataggtaaacctacgaggctacgaagtcgagctaactcaggccaacaaaaccaatctacgaacccccttcaagatcactaaaaaccatctaagctaactcaactccactgatgagggcagtcacttcacaaaatgcgggttcagaagcttggcgacctccaggaatcccacgcgctcttggccagcaaacaggaccttcagcttctcatcacacacgatcaccttcttgtccgcaggatcctggagggttgtgctgcttgatgtaggcccagaggcgcttgagcgcctcggtgcgggggatctccgcggctcccaccaccgcctgcagcgccggagacacgagccggggcttcgtcagcccggtggccgccctcttcttctgggcc

SEQ ID NO: 392504 - DNA, 527 bp, Oryza sativa
actgactagggtagacagtactaggacgaggcaacagcgactgcgttgtcccacccacacatcttgcggttgcgcggcggagagagagattgatgatgtcttcttggttgttccggcggagtgggccctcgggcttctcgtgggcctccaccgccgaccaagtcaccgccgggctctccgccgccggcctcaccgccatcgtcaccggcgcctccagcggcatcggcgccgagacggctcgcgtcctcgccatccgcggggcacacgtcgtcatggccgtccgcaacctcgccgccgcgcagcccgtgcgcgacgccatcctcgccgacgcccctgccgcctccctcgacctcatggagctcgacctcgcctccatggactccgtccgcgccttcgcctccgacttcgccgccaagggcctccccctcaatatcctcatcaacaatgcaggggtgatggcaactcctttctctctctcaaaggatggtatcgagttgcaatttgccacttaccatgttggtcatttt

SEQ ID NO: 392505 - DNA, 1127 bp, Oryza sativa
  unsure (1)..(1127): unsure at all n locations
gtataatcaatgcagcgttctacccatgcttttctttctgtacttcctgcctaaactttgcctataaatctgcacatccatggctcgtttcttgcaacaaagccacagccttcatcatcatcagagagagaaggagagagaggaagagattgcagtgagtgagtgagtgagtgaagcagccatggcggcggcggcgagggcaacggcgcgggtcgggcttgcgctgctgctcgcggtggtgggcgtcggcgcgcaggactacgacttcttcttcctggtgctgcagtggcccgggtcgtactgcgacacgaagcagagctgctgctacccgcgctccggcaagccggcggccgacttcggcatccacggcctctggcccaaccgcgacgacggcagctacccgcagaactgcgaccctgacagcgagttcgacccctccaaggtgagcgacctgctggggagcatgcgctcggagtggccgacgctggcgtgcccgagcaacgacggcatccggttctgggcgcacgagtgggagaagcacggcacctgcgccgcggcggcgctcggcgacgagcacggctacttcgaggcggcgctccgcctccggtcgcggctgcccgtgctcgccgcgtgcgcgacggcggcgtgtcgcccgacggcggctactacacgctgtcccagatcaagggcgccatccagcgcggcgtcggcgccgagccgttcgtggagtgcaaccgcgacgagtccggcaacagccagtgtaccagctctacttctgcgtggacgccgccggcgagcgcttcgtcgactgccccgcctcccccggcggccgccctgcggcaatcggatcgagttcccggcgttctagagctctgagctctctctctctaaccagcctcttctcctagctctacggggaagactctaccttcgaagcatgtcctttgtcactgacacgtgggttcgatgaaccatgggttcacttgttcagtgataaatgtatggtgtctttgaaggtataggatctcaattcgggaaaacgtcgacgacaaagaattgatgatgatttaatccatttcagtaatccatgttattgattacggagtnnnnnnnnnnnnnnnnnnnnn

SEQ ID NO: 392506 - DNA, 574 bp, Oryza sativa
tgcttccgggattacgactgtaactggaataacccgatactgcgggagtttgccagtgatgttgcacatgcccgttggtggaaggtacatgacaagatgccaaagaaacttcagcactattgtcttttgagatcaaggcaaaaggctgggttggagtgggatcggaggcaggctgagaaagcaaacttcaccgatggacattggcggaggaacataactgatcctaggctgaaaacttgctttgagaagttctgcttctgggagagcatgttatggcactggggtgaatccaagaactcaacgaaggaaaaccctgtgccggccacacctaccgcgagcctcacaagttcatgagatgtgtagatagccctataccagatacaaacttctaagctccatacatacatagcaacagcttgtaaaggtagctatgcttaaggtttctcgacaaaactataccttgtgtttgctatcatggcttcggctccactctggctgctttgatagctcacaatttttttggttttttggccaataattcatcagtatagggtaattttctgttcatggattg

SEQ ID NO: 392507 - DNA, 479 bp, Oryza sativa
tccgctgcgaacagcttgtacatgtactatgcataaacaaggaggggataagaagagcgacagtatttttggtagctgctcccggtgagaagtgttttaacccctggtgcagcagagcagggagttgctggtagtggtgttttttttgggccggtcacatgctgttcttttgagtgccatatagagctgtccagagtccaagaggaagtgactcgatcattcccgggaagcagcttgattctgattattttttttcgaggggaaaggcctgtctttcccttataggttcatttagatttaaaagataagatttctagttcgacatttggaaggaacaagaactgttgggaatctgtggttagatgataaggggatgatcttccgttgtattcatgttgaaattatggtcttgtaacttcaggacggaggcactgaagcttttgataattttgtttttacaaaagtgatatttctttcct

SEQ ID NO: 392508 - DNA, 696 bp, Oryza sativa
agcgggaagaaatcagcatcagtctctttgatgtccactctgcactcatctcaaggaagtgaaaatagtaacatgcaaattgggcaaggacagttgaaacttcaatacaatgcagctggagcattatctctgtactccaatagtaagacccaggttgaagcaaattttgagcagaagtacaagtattacataggacaggatggaaatggaagtgatcctcaggcttctggagcatacatatttcgccctaatggcacagttcctatcaagactgatggacaggttcctctgacagttctccgtgggtccatattggacgaagtgcatcagcagattaatccatgggatatatcagatcaacagagtttacaaagggaaggactatgtggggactgaatttatagttggaccaataccagtgggtgatgggaatgggaaagaactttccactgaaggtcggtacaaacatggcaacaaacaaaacattttacactgattccaggggacgtgacttcatcaaaaggatacgggattaccggtcagagtggaagatcgaagtgcaccagcctatcgctggaaactattatcctgttaatcttggcatttatgtggaagatggaagcagagagttatctatacttgtagacaggtctgttggaggtgccagcataaaggatggacagatagagctaatgc

SEQ ID NO: 392509 - DNA, 807 bp, Oryza sativa
ttcttgtgggtattgaggaggtgaatgaatctgatagttcaccacgaacatatgaacaatccacaaagaacaatggcgcttctggaaatgctgggactgcaaagctagcacccagtggatctactgtgcctatgcgcgttttcgtcgatcgcaacagcagcgtaaagaacggtttcataagtagggccaatctttcatcacctcggccatcacaaataatctctgccaaggacagcaattcaaccactcagcaagaagtgaaggcattcctttcacagatgtctactgtaaggggcattgacagttcttggagtgatggagctcctagccccggaatcaatgcgcaaaccgatgaaagcaatgccaatggcaggaggccatccctcgagaggaactattctgtgatagaaccatcggatgcgaacctcgctgatgaagttgagggagagagctctcctgagaacctgaagcggcttcttgagctcaacaagaagtcgatgagtgctctctacaaagagcttgaggaagaacgtagcgcttcggcgatcgcggctagccaagcaatggccatgatcaataagttgcatgaggaaaaggctgcaatgcagatggaggcactgcaatacctgaggatgatggaagagcaggccgatcatgaccacgaagcgattcagaatcttcacgacttgcttacggagagggagaaagaattacttgacatggatgctgagcttgagacctttaggaggctagtccaagatgaacaattcaatggcgggaaacatgatatcggtggcatattgaatg

SEQ ID NO: 392510 - DNA, 500 bp, Oryza sativa
  unsure (1)..(500): unsure at all n locations
tttaatgagaattttgcacaagcagttgtgagaaacaacattcacagtcatctacaacatggatccggaatacttttggagcaaattactgaatatgtcaggtcaaatttggagtgtcaagggaaagagagtgaattccttcaacatactacatgtaaagtacctagggctcttggtgacattatggaaagcatcgctggtgcagtatttatagacaccgattctaatgttgacatgggttgggagattttcgagccattgctgtctccactgattacacctgataagcttgcattgccaccttaccgtgagttgctggagctatgcagccacattgcttgcttcttaaattcagaatgcaccagtgaaggagaagaagtcattatagcgatgtcactgcaactacgagatgagctgctggtagcacaagggcatgacagaaacaaaaagagggcanaggcaaaagcagcatctcgtattttgcagatcttaagcaacag

SEQ ID NO: 392511 - DNA, 415 bp, Oryza sativa
acccagccagccagcctcaaccccaagccctccaaccccaagagaggccgcgccgcgagagagagagagagatccaatccaatccggcccccgtctccccccctcctccacgccgcggcgccgctccggttgcttgctcaggggggcgggctgctgatcgaaatgggcgggcgcgtgtccaaggcggtggcctgctgctgctgccgctcgcagcaccatggagtcgtcgtcgagagctcggagaaagacggcggaggaggaccatggggagtcgtatgagctgtccggcctttcaaggaattctccttcgagcagctgaggctggccacctcaggctttgcggtggagaacatcgtgtctgagcatggtgagaaggcgcccaatgtggtgtacaaggggaagctcgacgccgcag

SEQ ID NO: 392512 - DNA, 820 bp, Oryza sativa
tcggtgtgatccaaagagcttgccgaagtatgaggcgtctcatgagttccaaactaagaaaaaacgccagcagcagaggcaagcagaggaagccgcaaagcgccagaaattgcagcatcctccaccacattcccgtttgcctccaatccagaacccaggccaaccacaccaaatcaggcctggccagcctatgcataatgcaccacctgtggcagctggcccaagtcatcactatgcaaagccgcgaggacctggaggccctaataggtacccacaaggcgggaaccaaggaggctacaatccgaaccgcggtggacagggaggaggctatggggagtggcccatatccacagcaaggacgaggtcctcccccttatcctggtggtggcatgggcggagccggtggtccgaggggtggtggtggcagtggctatggtgttggcggaccaaattatcaacagggtggaccttatggtgcatctggtccaggtcgaggcccgaactataatcaaggtggttctcgcaatcaacaacagtatggaaactggcaatagcacggcggtatcatgagcagcaaatgcccttccggtaggactctgtatgttgaaagaacctctgatgttgtatttgagatatactttttgcatggtgtattcagatccaggcatctctcggaagtatgatgtttatgactagctgtatagtatggcactgatgtgattcccaatgtttgatgtactagtattattattactgcaagaatgtggaaagacatgaaaagttgttattaggatcaaaactttgtgtaaaaaatataatt

SEQ ID NO: 392513 - DNA, 811 bp, Oryza sativa
tctgaactcttgaagccagaagtattcgaatttattgagaagcacaacttgcatgatgccattcatgacaaggttgtcaatcttatgatattggatagtaaaagaactgtaaacctattgatccagcatcgtgatacgatccccccgaatgaagttgtaggacagttgttgcatgctagtaaaagttgtgacaaaagacatttgttgcatctgtatttacatgctctgtttgagacagacatgaatgctggaaaagactatcatgacatgcaggtgggggctttatgcagagtatgagccaaggatgctaatacccttcctccgtaccagtcagcattacaggcttgacaaggcatatgaaatctttgcacaaaaagagcttgtacgggagcaagtttttgtgcttggtcgtatgggaaatgcaaaggaagctctctctacaattataaacaaattggaagatattcaggaggccgttgaatttgtgatggagcaacacgatgatgagttatgggaggaattgataagacagtgcctccaaaaacctgagatggttggaatgctgttggaacatactgttggcaatcttgatcctttgtacattgttagtttggttcctgatgggctagaaataccaaggttgcgggatcgccttgtgaaaattgtgacagactatcgaacagaaacttcattaagacatgggtgcaatgatatacttaaggctgattgcgtaaaccttttggtaaaatattatcacgaggctcggcgtggagtctacatggctagtatggacgaggaggtgacaggaact

SEQ ID NO: 392514 - DNA, 519 bp, Oryza sativa
gaatttttcctcgagaggaggcggcggcgcaacgaagacgcgacggcgggggcggcgcgcggcgcgacgcgatccggaggcgacggcgacggcacggcgctcacctccggccgccatcttctctccggctttgggaggaaggaagtctgagaggatgctggttcaaatactgagtggctgagcaaacatgtacatgatgctggttttgtaaaggagcaataaatgtggttctctgaacattgtatattgctgatgtaaccatttggcataggagagtactggtgtggcagcccatgtttattttttatagcttgaaaggtcacataaatgcaaattctaagtagaaatgtcaagtgaatcatgccatatttcacttttttttaggcttcatcaatgtgtatttgatgcatcagtagcaaatgatgcatgacgttcatgggcccatgctttattatctcctggctaattatctcaagtgaatcatgatatagtttcatctttttcttctttattgtcccc

SEQ ID NO: 392515 - DNA, 902 bp, Oryza sativa
tctaacatttggtgaaagctctgctgatccatgggtagatgagttccagaaccaattatcagcttccaaacagaattctggtgcatctcgaggggtttatgttttttcagacatgaacccatacgttggtcaccctaattcaatgcaggaaggccaggaactgttccgcaaaggcctactaagtgaagctgttcttgctttagaggctgaagttttgaagaatcctgataatgctgaaggttggagactacttggagtaacacatgctgaaaatgatgatgaccaacaggcaatcgcagcaatgatgcgtgcacaagaagctgatccaacaaacctggaagttcttcttgcacttggtgtcagtcacacgaatgagttggagcagggagaagcattaagatatcttcataggtggcttcagaatcaccccaaatatggcggtatcgcccctccacagccaactgattcaccttatggtcctgatgttattagattgtttaatgaggctgcccaaatgtcacctgaggatgctgatgtccatatagttctaggagtcttgtacaacctatcaagagaatatgataaagctatagctgctttcaagacagcgctgcagctgaaaccacaagactattctctctggaataagctaggtgcgacccaagcaaacagcatccagagtgctgatgcaatattggcctatcaacaggctctggacttaaagcccaattatgtgcgtgcatgggctaatatggggattagctatgccaaccagggattgtatgaagactctattcgatactatgtacgggcggttgctatgaatccaaagctgacaatgcctggcagtacttgcggattcttttagaacgcttacgagctgaatgaacgctgcatggatt

SEQ ID NO: 392516 - DNA, 723 bp, Oryza sativa
tatgctcagttcatgggatcaaggaacttctcaccggatgaccgcccacctgtccgtttcatggatacagatgagcttgcgtatgttgcgacccgcgcccgtgaagtccatgacttttggcatgtgctgttcggccttcctacgaacctgattggagagactgcccttaaggtcattgagtttgaacagatgttccttccaatgtgcatgctttcagtcgttgggggctctgcgaggttcaatgagaaacaaaggacactgttttttcagcatatttcccatgggcttcaaaacaggtcttaagtgcacagatcttatgtctgtgtactatgagaagcattttcatgaagatttggatgaagtgaggaggaactggggaattataccatgccctgatcccaaaaggagcagtgtttagactttttagatcggtacattttgcatgaaagatgtctgaacttggttttcactttgtctacgttagtattagctcttccctttcaagaataatagcaagagttatgctattgatacctaaaaaaactagtaattctctttaacttagcatagcaactaagcttgcaatgttgatgttccctttaacaatagtgtagatgagttaattacatttttatgtgtaatactagctgaatgccggtacttcgctatggacagaagaaaacatatcataatattgtctgaaataaataaaattatattttc

SEQ ID NO: 392517 - DNA, 395 bp, Oryza sativa
ttatgagagagagtggctaggcacttgcagcttgcataacctgatgcgcatggggatcgtggatgatgcccctttggagaacaacatgcgagatattggttgtacctgatacaatttggctgacttagttgagcgatcgcttggcgatttgggtgagttcatgattttgtactggtgtagccaaacattggaagaaggcctgacagcatagcgcatgcttgggcgctgcgttcttgtttttttagaggagctcagcagtgtgtgtgcttttacctcctgagttttacccattacttccatggttgatatatgaactcagaaactcttgtagattgtgaactggatgacatccagaattttttttttatcttggtctgtacagtatcatttactta

SEQ ID NO: 392518 - DNA, 893 bp, Oryza sativa
  unsure (1)..(893): unsure at all n locations
aaattgnggnggccntnncccccaaggatgcagacattnttagaatttgatcgctttgtggcccaaggatgcttaaataaggataatgtggataantgcaaggctgccaagattgctccagaagctcaaaagcgttattggcagccagaaaaaacagctgaagacgctgcccacagttggcaaaagcaaccctgtatttgctggacctccagcaactgcgaaaaagaccaaagctccagttccacagggtgggatgtctagcggcatagttggcgtgctgaatagatcattaggagggaaggcacctgctcctgctaccacaggcacccaaagtactgtccagaagcagcaaagcatgagctccaaagggcaacttgttagtgcccaagaatgtggcgcctggcaccgtaacaccagccaacaaccgggccaacacagcggtgaacggggctagcaaggtgaatccaccagccagccagaagccagcctaacatggtaaattccttgctataataacgccctaggacttttgtgcgcttagtttacttttgaaatgtaaatagggccacgtagataccatctattctttgcccccctttgcatttgtagctcaattcctttctgaaccaaagcactggtgaaaacattaggttagactggatacaccgtttaatcgctttgccttctctgtgatgtcttagactgatatgttccatttgttaagctggcctgagattatcatgccgccttcctgtacagcctcgcctctttctccgttggatagtttggttgattggccaaatattcagaaactatgtcattgtggcctgatcaaactgtgaagatggcacgccatgcaagttgtctctatcggctttaatttatggctttga

SEQ ID NO: 392519 - DNA, 395 bp, Oryza sativa
aaggatcttgataaattgatgtgctccactattgatcttggaagagggtttgcaggagaaggcaaaatctatttttcaattgctgttgactcaattagttctatgttaaggcgtgcttcagtgtcatcaatttcaagcttcctcagtaatcttcggagccatgatcaaatatcatcaatattttggctaatacattctgatctccatgaacccaaattttcccgagcctttgaatgtctctctaccatggttgcttcattagagccagctgtggttgattctgtttatgaggaagaaattccagggaatatttctttcctggaggaaaattattctaaagcaaagttttatttacgcctaaaacggcggaatggacgggtcaagcacctttacga

SEQ ID NO: 392520 - DNA, 384 bp, Oryza sativa
gaattgttgatattatttctgttttgcgaagacaacaagcataatggcttccctgttgttgatcgtgggcagaatggcgagtcacttgtcataggtctgatacttcgtagtcacttacttgtacttctgcaatctaaagtagatttccagaatagtcctttcccttgtggacctggtatactcaacaggcacaatacaagtgactttgttaaaccagcatcgagtaaaggaaagtcaattgatgatattcatttgacagaagatgagctagggctgtatttggatctcgccccatttctaaatccttctccttatatagtgccagaggacatgtccttagcaaaggtgtacaatctcttccgccaactaggattgcgacatata

SEQ ID NO: 392521 - DNA, 811 bp, Oryza sativa
ttcgccggcgcggtgccgaaggaggcgcgcgcgacgcacgactgcctgtaccgcgccgtcgacatctacctgaaggcgcacccggcgctggaggagatggagagggagaaggtgtgcagcgtgatggacccgctgaagctgtcgtaccagggtcgcctccacgcgtcacagaacaatcggctcccgctgcaggccgtgctgagcgcgctctactacgaccggctcaagctccgcagcggagaacgagggcggcggcgggtgggacgcgtatgggaatggcgtgatgagggtcgtcggcggcggggtcggcgaggaagcaggcgaaggaggaaggcgtcgctggcgagggagaacgaggcgctgcggtcggagctggcgcggatgcgggcgtacgtgtcggggatgcagcagcagagcaaggggtcgtcgtcgtcgagggggaagaagggctcgtggttgcggacgttgagccggctgaacccgttcaaggccggcatctggggcaaggacacgtcgggcatcgtcgacgggaagacggacgccatgaattccgtcaagtccaagaggaggaggttctccattagctaggctagcttagtgttgagatgatccatgtcatctcgtgctagctacatatatgcgttgtcaatgactgtatattgattgattggttattcgcaagaaacatgactgttcttgtgtagtctactgtaaattgtaagtttgtgtccgcaaaaacgaactaatgtttggattggattggtcaaaagtcaaaacaattcatcctttttcaaaaaaaaaaaaaaaaaaa

SEQ ID NO: 392522 - DNA, 699 bp, Oryza sativa
tcatatactattaagcaatttttgaagttattatcaggtattctcttctgccctataggctgataggtcaatgtttccagctgtcagaacaaacaaatcagttgttcttgatgtatttcaattagaaccttaatttttcattttaccatgaggatcccatgtgtttcttttccttgatttgtaccattatttccagaattgcgcaaaagaaaaaaaaaactataagaaataattgaaaagaccagaactgaatgttgtactggattggtctttatttaaacttaatccaataataaccagtttttgtacaagctggtattattttcattgggttgctaggttccctatggaattgatatgttgagcagattcgtgttcatgtatataataagtttctaaagaaaacaaagtgtttcgaagggaaaaagctgtgtatgatgaaaaaattatatcaggattgcaatcagctatatgctgatcttcactacagtgcattaacatgctaatagggtgtttttggaaatgccttccaacatgctataggccagggtgggagacctattgataatttttacacttacaagcttgtttgctttctcttcttttcctgttttatcaacagttttaatctggccaaacaacaatggaaatgcatgctaacgggatgaattactatcaatgattagggaaatcatgcac

SEQ ID NO: 392523 - DNA, 507 bp, Oryza sativa
cctcgtcttctgggtgatctacgccagggagcggcgccaccgtgcgtacagcaaacagcacaactacgctgacaagccgcatccgactggcccggacgcttgatgcatatggccgatgctgtgctgcagaagaatctccatgtccatactcttcgtgcctgtcatcatcatgtagatccccgtgccttctgattgttcgttggttacaccgatcctgtcctcttctttttttttcttttttttttgttgtagcattgatgtgaattattattgtagcttgatctttttcatcttgtttgctcttcttggtgaactgaaactttgttaaaaggtgctgtttgtgaacttgagatagatttctgactttgtgccattagagtttcagtttgtgtacctgctgctgttgatgtacagtcatcatggtccagaagaattgttgcattgtcattactcatcaaaataaaaagaatgaagattaatatgaagaaagaaaaaagaaataaacag

SEQ ID NO: 392524 - DNA, 559 bp, Oryza sativa
tgtggagcttgattcgttaatgaagattgtgacagttaaaagagatgatattgctgatacacctactgttgcaacaccattccgggaacctcggtatccggtgggtggtgaaactccaatgcatcccatctcgaacaccgcttcatccttaccagacaccaatgcgggaccctggagcaaccccaatacacgatggcatgcggactcctatgcgtcgtggctgggctcctatgagtcctccgagggataactgggaagaaggaaatcctgctacttggggaagcaggccagcttaccagccaggaactccactcagctcggccatatgaagcacccacacctggatcagggtgggcaaatacgccaggagtttagctataatgacgctcccactcccagggagagcaactacggaaatgctccaagcccatatgtgccttccactcctgtaggctaaccaatgacaccgaattctgcctcggaccttactggtacacctgggcggtcaacccgatgacatccaggcaatgttggaatggacataatgtcgcctataata

SEQ ID NO: 392525 - DNA, 801 bp, Oryza sativa
  unsure (1)..(801): unsure at all n locations
aaggggaaatccatccaatacaattatttgaatcccaacagcaataggtcactcgttaggatggatattcatgattccgtcaagcttagcaaggacaaacccttggagccaggagttataataacgatcgagcccggggtttacatcccaccggtgccaatactgaaagagaacgccccagataggtaccggggcatcggaattaggatcgaggacgaggtcctcatcaccgagtctggtcacgaggtcctgacggcgtcggtgccgaaggagatctctcacataaccacccttatgaacatgggtagtaactccatgatggatgcccatgagctgagggctgcctgcagttgagaagttcagacaatgctgtcctgatgcatcatccctcttccctccagcgatcttcgcatccaaattccaattgacattcattcttcgttaaagctgagagatgacgcgggattatgaaggctcaagtggggttatggtttttgagaaacccgaaccaccctgatcgtctcagggctggacgggtttttcgctggttttcccgagaaaaaccagctgttttcagtgtttgcaattttttttagctttgttaaggactcgaaatttgtaacatactacctcagattagtgtacaaattcagatggtgccagaaacaaaagcccgaaattagggtcccaagaagcccctgaaagaacatgtgaaaattcaggcggcagtaatcaaagtttctgaaatcagttgctttcctttttcttnnnnnnnnnnnnnnnnnnnnnnnnnnnnnnnnn

SEQ ID NO: 392526 - DNA, 848 bp, Oryza sativa
  unsure (1)..(848): unsure at all n locations
tgctcgatcttataagaacttggattcctttcgtagggcattactcaataataaagcaaaagatattgcatactacactgatgaactgcggtggatcaagtcaaaatcagaaattgggttgatgcgagaatcagcatctattgtttctcagtctcttttacaaacgatgttgctatctaggacccatagggaggaaagccaactggcagctaagatcgagtatgagtgcaaaatgaggggtgcccaaagaatggcgttccatcctgtagttggtggtggagcaaatggcagtgtaatacactactcaagaaatgacggaagggtcaaagcaggtgaactactgctcatggatgttggctgtgagtatcatggctaccttagcgacctgacttgaacatggccaccctgtggcaggttttcacctgcttaggaagaactatacagcctgatattggagacaaataaggaatgcataaagctttgtaaaccaggccgcagcattaacgagatacataatcattcggtcaagatgttgataaagggtttccaagaacttggaattttagagaaggggaaatccatccaatacaattatttgaatccaacagcaataggtcactcgttaggaatggatattcatgattccgtcaagcttagcaaggacaaacccttggagccaggagttgtgagtagatgattcattcatttctgtctagttatttaattatttttaagcttcttaatgatcgttgtatgcatgcatctgggntaaaacacccaactaacctccaccaacaattttcatangacctgtatttttnccaaatatatttcatgggtttaaataa

SEQ ID NO: 392527 - DNA, 561 bp, Oryza sativa
tttcttcggttaataatagcaaaatcccctcccacccccgccttctctctggaagcttcctcctgctcttcgccatggccggcggcgggaacctgttcgggagggtgctcagctacgtcgtcaacgagttcatcgtcgaggggctcgccaacaaccgtaccttccagagatttgctgtgaggaccaccaagtctcttgagaatctatcgtccaaagctaaagaagtgagggaggagctatcggagcaatggaggaattctcgtggcaatgatgttcatttcaggcaggaaaactggtcattttatgaggtctatgaagtcgttgctacctgcccaatcttgctataggctttcctagtgcaatgattgctatttttctatattgtcgcatggaataaaccattgtatagaatccatgtgattccaatttttgtgaacttgataagtaaaaatcagccccctttcatggcggacttccctattatcttccgagtatcctttgtaatggagaaatcctgcataagttacctcttcatgatgccggaatgataaaccccctttt

SEQ ID NO: 392528 - DNA, 1043 bp, Oryza sativa
  unsure (1)..(1043): unsure at all n locations
ggcacgaggtggagcagagggacctgttcctcgctgccgctaggatcctcaaggaccagaaaggcatgaacaaggagtacttcaactttctgaataagtaccttgccaccttcgatggatcggccgatgacgctgatcaatcggtgatgcaaaggaagaagctgttgcagcaatcattgagtttgtcaagtcatctgatctctatcagtgtgatctactcaatatgccagcagttgcacagctggaaaaagacgaaaagtatcagctggtttatgagctcttgaagatattccttactcagaggcttgattcctatttagagtttcagtcagctaattctgccttgctgaaaggttatggactggttcatgaggattgcataacaaaaatgagactgatgtccctgcttgacctcagcagccgttgtcctggggagatcccttaccatgcaatcatagatgcacttaagatcaatgatgatgaagtggagtattggattgtgaaagctatttcatgcaagatattggattgcaaagttgaccagcttaaccaggttatcattgtcagtcggcatactgagaggatatttgggatgccacagtggcagagtttacgttcaaagcttggagtttggaggggaaacattgctagtgctattaacacaatacaagcaaacaaggtgactgatgatggatcacaggggatccaaggcttgatgatccgttgatggagaggggttcctgaattgaaattatagtttcaactttgagtagatgagcaatccttttgtatgagattacctgtaatggtgaattactttgatcccatgaccttgtggctggatctggattgctatggcatgctaagcaatctcattgtttttgtagtcatagcggtgcttaaaagtcggttgttacacaagtaccaatcagtcgattactaaagagttccaacagaatggcagatctattgtggcaattttccttcataacggattgatgagttaatgtattattgtttagnnnnnnnnnnnnnnnnnnnnn

SEQ ID NO: 392529 - DNA, 533 bp, Oryza sativa
agttggttatggatcagacattagagaaaaatggaacgattgatgatctgaaaagctcttttagaaatactggaggttctggtggggcaccactcatgacttctatgccatcaaacagtggtactgcaattttttctaaaagttatctgtccaaaattagtgtgtcacgggatcttgttgagtcggagctgtacaaaaggtgcatatccttgctggcagactttggtattgcaaatactcctgaggttgttgggactggacttgtgcagaacaatggaagctttgggaagataaatagaaaacttggaacccccaatctgttgggttcacataaccttaaaaacaagagtgatatctttcagagagctttggcccttcacaagaatcagacagcaaagattgtttctcctacccactcgattctcgagactgacaggaagacatacttaccagaagataatcatgatgacacagaaatgactgaccatactgtgtcgaagaattgcttgtcgataactctgaaccacatcatg

SEQ ID NO: 392530 - DNA, 516 bp, Oryza sativa
ttgcaccccacattgaataattatttttaataattttagtttttttttttttggctttagatatattcccaatccccaacctcccaataatccgatctctcccagttctgttcggatcaaggctgtgtcgatcgcaaaaaagaaaaaaaaaacaatttccttttggggtggttcatctgttgatcacttctttgtttcccgcgttttgttggggattcgattttcgggttaagattttctacacgatggccttgaacttggctcagagcgccgcggcggcagcgtgcttcgcgaccgccggtgatgcgcggcgagctgcttcggtggtcgccatgccgtcgtcgtcgtcgtcggccacgacgagaccctgaggatgaagaggcaggcggcgtgcgagccggtggcgtgccgggcggtggccaggcacgtggcggcggcggcggcgagcaacatgaggaacggcgtgccggtgttcgtgatgatgccgctggacacggtgagcaagtgcgggagcgc

SEQ ID NO: 392531 - DNA, 811 bp, Oryza sativa
  unsure (1)..(811): unsure at all n locations
gttatttcttccagttagctgctacgattctctggggggagcttttgcagaagctggcgcctcagacatggaaagattttattgtccctttccaaactgttcagttctactagaccttagtcagcacttctctagggcaagtacatcaagtcagtcagacctcaattgtgttgagtgcccagaatgccatagagatatctgtatcaaactgtgggagtcccatggcatgtcatgatgggctgtgatgacgttaccagagcttgccctgttgatgaaagagatgcaggagacctgtctttgcatcggctagcacaaaacaataggtggaggcgttgtcagagatgccgacgaatgattgaactcacacaaggctgcttccatatgaattgctggtgcgggcacgagttctgctactcctgtggcgccgagtacaccaatggtatacagacatgccaatgtgtgttctgggacgaagagagcatcgaggcctgcctcggcagcgcattccacccaagcatccgagatatgggcatgggacacgttcgactgcatgccaaccgccatcgaagggtgctcggagcaggagagagntcagctggctctcacgcagaggttcctctcagggggtttcaacctgggtgagcctccaagccagtcgccgccccntgcgccgattcatatatcattgacaccatgaaggaccttcaccagctgccatggctcgagcggttcgtttcggtgatcagtgacagctacaatgaagattacatccagtgaaaacaacatagatagcattaaaaaaaaaaaaaaa

SEQ ID NO: 392532 - DNA, 467 bp, Oryza sativa
ggttaattggagcaggaattgaagcatttgagatccgcatccacccggtgtttcagagccgctgtttcttcgttcgacgagttgatggatcctctgatgatttcagcttccgtaagtgcgttgacagcatacttcctctcccggaggacatgaagattggcaataagtccaatggcaagaagggtggtggccacttcaagggcggtggaggtaatcggggaggaggacgaggtggtggccgaggtggcgggcgtggtttccgcggtcggggtaggagaggcaactaaaggactcaataaaaccccgaaattttttgcatgcctaataccaatccttaagattgaggcattcatggcaacatgtgcttgtttgtctgccttctcctaggcaactgatgctccactcacttgtgtactgtgaaagtgcaactatgataagatctcgccgatctgtcttcccatatcttc

SEQ ID NO: 392533 - DNA, 502 bp, Oryza sativa
cacgcacacaagaaacacaggagtgagggagaagaagataagggaagagagagcgagagagagagagagaggggggtagcaaagcaacttagctagctttgctagccatggcgaggagctctccttgcctcgccgtcgctgtgctcctccttggagtggtggtggcggcgattggagcctttgctgatgaagaagcggcgagcggttggggactagggcatggcgcccgtttcctcagcaggcgaggccgtgctgcgtatgagaagtcgtcggagccagaggcaaagcctgcgtcgcagcaggagccgaagtcggattcttactcgcaggcaaagcctgggccaaaagatgagcccaagccggagccagaggcaatgtctgcgtcgcagccggagtcgaagcccgcaacttactcggagtctaagcccgaatcaaaggcagagcctggatcaaaaccagagcccaaggcagagtccacgccacaaccagaacaaagtcagag

SEQ ID NO: 392534 - DNA, 824 bp, Oryza sativa
gcagcatctgaaggagatcgcgtcggtgatcgaggccgggtcgctgaccaaggaggttcgccggatctcccgcgccgtgcgcctcaccgtcgcgctccgccgccgcctcgccgcccgtgacgtcgccgccttcctcgccttcgcgctgccgcattcctcggaagccttcgcccgcctttcctccctcctgcccaaggaagatgggagtgaaatggatgttgatttggcagctccagcggctcaagtgtcaattaagcatggtctcccagagattgaaatatactgttacttgcttgtgctgattttccttattgataataagaaatatgatgaggctaaagcatgtgcttctgcaagcattactcgttttgaagaatcttaacagggagaacagtcgatgttttagcttctaggggttttcacctattactcttaatgtccacgaactcaccagcagccttgctgaaattcgtggaactcttctggcattgcacagaatggcaactttacatcgtgatgagcttggtcaggaaactctactcaacctgcttcttcgcaactacctgcactacaacttgtatgaccaagcagaaaagcttaggtccaaggcaccgcgttttgaagcacattctaatcagcagttctgcaggtatctgttctacttgggaaaaattaggacaattcagttggagtacactgatgcaaaggaaagcctactgcaagctgctcgaaaggcacccactacagctcgtgggttccgagttcagtgcaacacgtgggctatcatagtgagattacttttaggagaaataccagagagaact

SEQ ID NO: 392535 - DNA, 604 bp, Oryza sativa
  unsure (1)..(604): unsure at all n locations
tcggccaataacatcattcagatacaaggacaaacaaacagngatantntngtngtaatangaanttccaagccaccccccaaggggggggagaccaaatcccccacttctctctcaatctctctctctgctagggtttatccctccgcgccgccgcccccggaagacgagagagcgccatggccggcggtcccgcggcggtgtcgttcctgaccaacatcgccaaggcggcggcggggctcggcgccgcggcctccctcctgtcggcgtcgctctacaccgtcgacggcggcgagcgcgccgtcatcttcgaccggttccgcggggtgctcccggagaccgtcggcgaggggacccacttcctcgtgccgtggctccagaagcccttcgtcttcgacatccgcacgcgcccccacaacttctcctccaactccggcaccaaggaccggcagatggtcaacctcaccctccgcctcctctcccgccccgacgtcgtgcacctcccctcctgccgcacccccctcggcctcgagtacgacgacaaggtgctcccctccatcggcaacgaggtgctcaaggccgtcgtcgcgcagttcaacgccga

SEQ ID NO: 392536 - DNA, 848 bp, Oryza sativa
  unsure (1)..(848): unsure at all n locations
ggaagacagcaggtgacacctttgcggacacaccaaaactgccggccatagcccatattcccacaagaagatggcgatcccggtttacagcatcacaagggcagagatcgaggagttctggaggagaaaggagatggaagaagaggagcagcgcctcaccgccgagaaggaagctgcaagaatcaaagccaagacacttatgattgaagattatgcgatcttcgagcaaatgataagggagattcttgaggagggtatcaaaggtgacagcgcaagggcggagagagacatcaccacgaacggcgccgctgccaccaagagcactgagggaaggattggcatcaaagattggtggagaaaaagcacttatgcttatctgaatgaaccagcaatgacatccacggatgagaacggcagaaggaagcacgccatcaaatacatcccacaggagagatgcatgaacttcttctcatcgattccaagtcaacataatactactacttttgcaatcttctaaatgggcaagccaatgataagctgaggcatattggcaaattagaaaatatgcaagtggtatatgcatcagcaatgctatgggtggaataaactacattgtttttaagtgtataagtatgtccaaactgaatggtactttaaagttaatcattttgtaaccttgttgccttgcgtggtatagaaagcaggccattttaacttattattcattgtaaaaaaacaattttagttggtgcttgcaatgatatatcagaagctattgccaacacttctgtgatggtnnnnnnnnnnnnnnnnnnnnnnnnnnnnnnnnnnnnnnnnnnnnnnnnnnn

SEQ ID NO: 392537 - DNA, 585 bp, Oryza sativa
ctccactcctcgccttccactctccacacctcgcctcgcgtcgagcacctggcaatggcggctcacgcgccctcgatgcgccccacccacgccctctcctcgtgagatcgcctgctgcgctctctccccgcgcgcgcgcgcgcctccctccctgtttgttgaatccaagagcgagcccgaccgcatcttggaccctcccctccccgcggttcttggacgacgccggtgcgcgcggtggctctgctgtccccgcgccgcaccgcgccgaatccgagcagaacgcgcgcgcgtcggcggggggatctgcaatggcggccgtggcggtgcccccgctctccgcgtggctcgtcgccgcgcgctcctcgacgcaggcggaatgcggcggcgccgacgagcaccaccaccaccaccatcagcagcagcaccagtgctgcgtcggcggcgggtccagcacggtgatgttcggccggcgccgccgccgcttcctcggcggcggcgcgcggcggcgcggcgcggcgcgctctggaatggcctgggctgttgccctgcagcctgaaaggagaactgttgaaaagaaacctgatg

SEQ ID NO: 392538 - DNA, 564 bp, Oryza sativa
tcgcttatttcccggcaacagcacggagatacaaattgaacacctgtatgcacatggggaacaacacgccgagcttcatggccccggctcgcccgggtgacctgctgcagatcatcagtaagccggcgcagccgccggcgatgtcgccgatgcccctcctgacgggctcggacgtggcggagccgccgctgccgcctgcaagaacagctcaggcgccgtcgctcgcgagcaggatgcaggctcatgccgcgatcgtcgtcacattggcgatgcttctcgcttgccatcccctggtatgaccggacaacgcagcaggttcacaagccaaaatactaatccagtctgtttgttctgttctttcttttttttttctttttttttctcatgtagcgattcgtttcatcctcatgtatttttttttttgcattgatgatcgtccccgatttgcctattactgtcctcagtggtctcagtatatatgtgtggtatgaatctaaatacatacatatgtctagattcattaatatctaaatgaatgtgggcaatgctagaaagtcttatatt

SEQ ID NO: 392539 - DNA, 498 bp, Oryza sativa
aatttaaccctaagggaaattgttgctcctcccagagctccgccgccaggccccgccccatctcgatccgccgccatggccaccgcagtcgccgcctcccccgctcagtcccgcaagactgagacctacaccgacaccaagcgccgggatgacgtccgcggccttaacatagccgccgcgcgcgccgtcgccgacgccgtgcgcacctccctcggcccccgtggcatggacaagatgatctcctccggcgagcaggaggtcatcatcaccaacgacggcgccaccatcctctcccgcatgtccctcctccagcccgccgcccgcatgctcgccgagctctcccgctcccaggacgccgccgccggcgacggtaccactaccgtcgttgtcctcgccggatctctgctccgccgtgctcaatccctactctctgctggtgcccaccctaccgcggcagctgacgctctccaccggctcgccacgcgcgccgttaaggtt

SEQ ID NO: 392540 - DNA, 368 bp, Oryza sativa
attttgtttaccaaacacactgaaacacggagcagtggcggctttgctcctttggctgtcatggcttctactctccctccgctccatctacctcctcgacctcctcgcacactcacgacgctgcctcccgccgggaccccgtccgctgccgctgatcggcagcctccacctgctcggcgacctgccacaccgctcgctcgccggcctcgccaagacgtacggccctctcatgtcgctccgccttggcgctgtcaccacggtggtcgccttctcgccggaggtcgcccgcgagttcctgcagaagcacgacgccgtcttcgccacccggtcaacccccgacgccactggtgaccacgcgtggtactcct

SEQ ID NO: 392541 - DNA, 548 bp, Oryza sativa
gtggtggtggccttcccgtcgtcgtcttcgactggactccaactccacctccacctccaccacccctctctcgaagccatcgccgcctgtctctcctctccagctcgcccggtcagagtccgcgggggattcgattgattggtagctagctaggcttccgcgcgcggcgacccaacgtcggtggaggcggtgctgaaggccgggcggcgtctcgttcgtggtgcggtggagatgggccaggacctcgccgagatccaccctcgcgagctccagttcacctttgaggtgaagaagcaaagttcatgtactgtccatcttgtcaacaaatccaatgaatatgtcgcattcaaggttaaaacaacatcacctaaaaggtattgtgttcgaccaaacactggagtcatccttccaaggtcaacatgtgatttcacagttaccatgcaagcacaacgtactgctccaccagacatgcaattaaaagacaagtttttggttcagacaacagttgtcccttaggaacatcaaatgaggaccttgtcctttttatt

SEQ ID NO: 392542 - DNA, 506 bp, Oryza sativa
tgtatgccatggacgaagccctggtgggcaggcggggggccgcggtgtcccggctcggaggctcggcaatggcgccgccggtgccacggcgagaggcggctacggcggccaggtcgaccacgcgtcggcgcatgacccagcgatcctggcgttcgacgagctcgtcgccggcgccgtcgggagggtgtcggcggcggccggcaagatcggggcggaggtcgcggaggtgaccagggtgctggagaaggcgttcttggttgggaaggaccttcttgtcaggaccaagcaaactcagaagccaaccgtggattccatcgcagtattcatggggcctctgaatgaaacaatattggaggcaaattcattggcagaggggacaagatcgagccatggcaaccatctgaaagcagccgccggtagcctggccgctctggcgtggattgggtacaccggcaaaggttgcggtatgccccttcctattgctcatgtaaaagagagttggcaaa

SEQ ID NO: 392543 - DNA, 449 bp, Oryza sativa
ggaaaaaaaatgttgcaggtggaggaggcgctggcggccgtgctgtcggcggcggcggcgagcgcggcggcgcgcgccgccgaggccgtgccgctgcacgacgcgctcgggctcgtcctcgcggaggacgtccgcgcgcccgaccccctccctcccttccgcgcctccatcaaggatgggtacgccgccgtggcctccgacgggcccggggagtacccggtgattacggagtcgagggccggcgacgacgccctcggcgatggtcgtcacccccggcacgggggcgtatgtcacgaccggagggccgattccggatggtgctgacgccgtcgtgcaagtggaggacacggagcagctcgccggcgcgccggatgggtcgaagagggttaggatattggtgcggccaactcaggggcaggatatacgcaatgggggatgtgacataccaa

SEQ ID NO: 392544 - DNA, 599 bp, Oryza sativa
  unsure (1)..(599): unsure at all n locations
gctcacccacgcacgcagccgtctcggatcccttcttctctctcctctcctctcttctccggcacaccacaccccaatcctcccccgatctccccaatccgagagctccggaggagcagcgcggaggcggagatggcgctgcggcgagcgctgctcagatctgccgagatctcccccgatcgcaaggctgcacttgagtacctccattatctatcgagagcacagcctactcgttctctaacaggtgctggcctttattctgctggcaaatcattcagcactcaggctgctactacatcaagcacaccacaacctccaccaccacctccacctccggagaagactcactttggtgacctcaaagatgaggaccgcatttttaccaacctctatggtcagcatgaccctttcctgaaaggtgcaatgaagaggggtgactggcatagaaccaaggatttggtgcttaaaggggcagactggatagtgaatgaaatgaagaaatcgggacttcgagggcgtggaggtgcaggaatcccttctgggcttaaatggtccttcatgccaaggtatctgatggacgcccttcttatnnctgtgta

SEQ ID NO: 392545 - DNA, 555 bp, Oryza sativa
agaggtttctcctagcctcgcctcgccttcttgcgccgcaagaagaaaagcagcagcaaagcaagccagccatggccgccgccgctgcgtcctccgccgcctggaagaggtggatccgccccgaggtgtacccgctcttcctcgccaccggcgtcgccgtctccatctgcgtcggccagctcgtccgcaacatcaccggcaaccccgaagtcagggtgttgaaggagaagagggcggccggtgtgctggagaacttcgacgaggggaagcgctactcgcagcacggcttcaggaagttcatcgacgggaagcgccccgagatcatgcccggcatcaacagcttcttctccgacccgcccaagtactaagaccgtgttgttggctggtgggattgattgccatatgccaccgttttgccggaatttcaattcatatgcatgtttcaacatgttcgaatatttgatttgagcgtatacaaatattggtctctgatctgaataatattcatcagacaaatgcgtatgcagttttgacttttaaaaaaaaaaaaaaagg

SEQ ID NO: 392546 - DNA, 594 bp, Oryza sativa
tttccccaaactcgagcctccatctccctccgggatccagacaccgatcgaggcgttgacgacgactagctcatggggacgaggaggaggagtgcgcgagcgcgagcgcggccgccgctggccatgccgctcgccgtgcttcttctcttcgcctgttcttccggcgtcgcagccgcggccgctcagggcatcgagcggatcaaagacgatcctgttggaaagctgaaggtgtatgtctacgagctgccccccaagtacaacaagaacattgtggcgaaagattccagatgcctcagccacatgtttgccacagagatcttcatgcatcgcttcctgctgtcgagtgcgatccggacttcgaatccggacgaagccgattggttctacactccagtgtacaccacatgcgacctcacgccatggggccatcccctgaccaccaagtctccacgcatgatgagaagtgcgatcaagttcatctccaagtactggccctactggaacagtacggagggtgcggatcatttcttcgttgtgccacatgactttgcagcgtgcttctacttccaggaggcgaaggctattgagcgaggc

SEQ ID NO: 392547 - DNA, 833 bp, Oryza sativa
  unsure (1)..(833): unsure at all n locations
ggaaatgttgcctggaaagaaagagttgatggctggaaactgaagcaggacaagggagcaattcccatgaccaacgggacaagcattgccccttctgaaggtcggggagttggtgatatcgatgcatccactgattacaatatggaagatgccttactgaatgatgaaactcgccagcctctctctagaaaagttccccttccttcatccagaataaatccctacacaatggtcattgttctgcgtttggttgttctaagcattttccttcactaccggggtacgaatcctgtgcgcaatgcgtatccgctctggcttttatctgttatatgtgagatttggttcgctttgtcctggatattgcatcagttcccgaagtggtttccaatcaaccgtgatacctaccttgatcggctgtgcattgaggtatgacagagaaggtgagccatctcagttggctgctgttgacatttttgtcagtacagtcgaccccatgaaggaacctcctcttgttactgccaataccgtgctgtccattcttgctgttgattacccagtggacaaggtctcttgctatgtatctgacgatggtgctgcaatgctgacttttgatgcattggctgagacttcagagtttgctagaaagtgggttccattcgttaagnagtataacattgagccaagagctcctgagtggtacttctcccagaaaatcgattacttgaaagacaaagtccacccttcatttgttaaaggccgtcgtgccatgagggaggatatanagnattcaaagttagggtaaatggccttgttgctaaggcacagaaagtccc

SEQ ID NO: 392548 - DNA, 1022 bp, Oryza sativa
  unsure (1)..(1022): unsure at all n locations
cgtcgtttcccatctccgacaagcgcctacaacggcggaggtagccctaaccctaggtcggtggatgcgccgatggccgccgccgccgcagcctgcgtagagagccccgacgagggcgtggagatccgggaggtatgggcggggaacctggaggcggagatcgcggcgatccgcgacgaggtcgaccggtacccgtacgtcgccatggacacggagttcccgggcatcgtgtgccgccccgtcggcaacttccgcaccaccgacgagttcaactacgccaacctcgaggccaacgtcaacatgctcaagctcatccagctcggcctcaccctctccgacgagggcggcgacctcccgcggcgggggacggggggcaggcgctgcatctggcagttcaacttccgcgggttcgacccccggaccgacccgtccaacgccgactccatccagatgctccgcacctgcggcatcgacttcgatcggttcgccgctgagggggccgacccgatccgcttcgccgagctgctcatgtcgtcgggcgtcgtgctcaacgccgacgtgcagtggatcaccttccacagcgggtacgacttcggttacctgctcaggctgctcaccggccggaacctgccggacaacatgcccgccttctttgacctcatcagaatctacttcccggtgctctacgacatcaagcacctcatgaggttctgcagcaacctccacggcggcctgagcaggctcggtgagcttcttgatgtcaagcgtgtggggacctgccaccaggccggctctgactcgctgttgaccctcgggtgctacaacaagatcaaggaggtgtacttcaaaggatcgaccgagaagcatgccggtgtgttgtatgggcttgttattgaggatggggtgaacagaccaccaccaactcagcccaatgaatgaatatggttagttaaataaaacaatctgaaatgggaaaaaaaattgaaactttcgttggtgnnnnnnnnnnnnnnnnnnnnnnn

SEQ ID NO: 392549 - DNA, 619 bp, Oryza sativa
  unsure (1)..(619): unsure at all n locations
tcttcttcgaaggtgcagtgctacaagaagtgggggggttaatgtttacaccggggcccgaagcctgggcccaagcccaagcccaagccgagcccaccaaaacccaagcctggaccgaagcctaagcctcccaagcctgggccgaagccgaagcctcccaagccagggccgaagccgaagccgaagcctccaaagccagggccgaagccgaagccgaagccgccgaagcccgggccgaagccgaagccagggccgccacagccctggtggcctataccattcccgaagccgccgtgtccccccggcgccgacgggtcgtcgtcggcggtcgacgacaagaacaactgatcacacatcatacctaaattatacatatgattaatttgagatcaaagaatttacagagtaaatacagccagggcgacgtctcattgctgcaaattaactattgtatagatggcatatgcacggtaattgtcaagtgatctatctgtaaacctggcatatcagcatatgcatgcctactcctatggatgaattctatacgtactttcgttcaaaaaacaattctatatgtnnnnnnnnnnnnnnnnnnnnnnnnnnnnnnnnnnnnnnnnnn

SEQ ID NO: 392550 - DNA, 701 bp, Oryza sativa
  unsure (1)..(701): unsure at all n locations
ccggttcaccgagacccacccctgcgacgccgccgcacaactcgagcggagcagtgcaggcgaaaccctactcgaagcccgcggcgagccaccgccacctccagatccgaccacaccgcgccgccgcagcgatggtgtacttcgattcgtgggacgagttcgtcagcaagtccgtcgagctcttccgcaaccaccccgacaccacccgctacgttgtcaagtaccggcactgcgaagggaagctcgtgctcaaggtcaccgacaaccacgagtgcttgaagtttaagacagatcaagctcaggatgcaaagaagatggaaaaactgaacaccattttttttactctcatgacccatggacctgatgctgatataagtgatgtttcggggaaggaacaggcagaacaacagcaatcaaagaaaggccggggcaggaggcagtagtgtattgggtctgtcttgattttgttcaaagtaaatcataactgaagtggtggatggacattttggctctttgattgctctcgtaatgttctgaaggagatgtgagatattttgggattaattctcttgaaaagaactgagtaccttattacactgtggcctgatcagaaaaacaatcaaatcttcaacccttnnnnnnnnnnnnnnnnnnnnnnnnnnnnnnnnnnnnnnnnnnnnnnnnnnnnnnnnnnnnnnnnn

SEQ ID NO: 392551 - DNA, 614 bp, Oryza sativa
  unsure (1)..(614): unsure at all n locations
gttatcctcaatccctttgagtcaagtttttctggacctagcattatatcaggtgcagtaacaccatcaggtcatataccttattctggaaacatttctcttcgatcggatagcagcacaacaagtactcggtccttcgcatttccagtgctacagacagagtggaacagcagccctgtgaagatggcgaaagcggaccgcaggcgcttgagacgggaccgaggttggggttatagaatcctctgctgtaaattctgaatctgcatgctcccgcatatcttttctttttgagatcagctcttcgcgtcgcgcccctgagctcgtcgtggtagccgtgttaaattcattcaaaatgttgctcttttctcccctttccccaccacccctcctcttgctgcccccctccctccatgtcctgctctctcttttttttactcatctatagcaggttaatggcttgtctggattcggtagtggcttgtaatttgcattgagtgtgagaaatgaaggtatacttggtgaaaagtattgtagctgatgagcatccctggnnactgtaaaactgaaactgnactgtgttaccctgttcngntgnanacaanaaaaaaaaaaaa

SEQ ID NO: 392552 - DNA, 627 bp, Oryza sativa
gttttacacccagttcactcctcattatattacatggtattgccctgaagcttttgttgtgagcaagcagtgcaaatcacagtgtatcaatcatgggaggtattgtgcaccagacccagagcaggatttcagccagggatatgatggagggggggttgtggttcaaaatcggcatcaaatttgtgtattcaaggctgctaatgagagtgggaagccatggttgtggtgggactatgtgcatgacttctcaattaggtgccctatgaaggagaagaaatacacacctgaatgtgctgttcatgttattaagtcactcgggttggatgttgagaagataaagaagtgtggtggagatccctgaagctgatgaggaaaacccttgttctgaaggcagaacaagatgcccaaattggtcatgataaacgaggagatgtcacaatactgccaacccttgtcatcaacaacaggcaatatcgaggtaagttggacaaatctgccgtgctcaaagcagtctgcgcaggatttgaggagacaactgagcctgctatttgtttgagcgaggatgttcaaacaaatgagtgtttggaaaataacggatgttgctggcatgaagggataatatgtact

SEQ ID NO: 392553 - DNA, 550 bp, Oryza sativa
tgtttgcggccgggtgcggcggcgaccggacgagggggcgagacctcctcctggtcgtcgtcctcgtcgtgcacgtcgtcgctcggctccgtcaatgacagtgccgtcgtcgcgtgcgtcgtcaaggcagcgagcgggcgtcgtcaaggcagcggacgtcgtcgtcgtctctgcggggaacgtccccgccgccagccacttcctcaccgccatccacaaccaccctctccacgccctcgccgctgcccctcgccacgctgctcctgggccacctcctctcgcgccgtcgcgtccgcgaggccgcctccgtcgtccgctggatctgccgcccgaactccccgcagcggcccaacaacgccaccttcaccttcgtcgtcgcggcaggcgggctcgacggcgacgacggcgaccgggcgagcgtggcgtggtgacgactagcgaggcggcggcgagcgggccccgcccagatccgactagttgcggcggcccgttgcgtgccggcccgcgatttccgcttttttttttttgttcgtgcgggcggataatttga

SEQ ID NO: 392554 - DNA, 432 bp, Oryza sativa
  unsure (1)..(432): unsure at all n locations
cctcaacaaaaaaaggcccaagaggaatcctctgaagagtcttctgaagaagatagtgatgaagaggatgaaaaattggccaaaactcctaagaagaaaacgcctgctgccaccaaatcacaaaatgatgaacctaaaactcctgcgagtaaccaaagtcagggaactgagtcagcaaccctttttatgggcaacctttctttcaatttaaatcaggaccaagtgaaggaatttttccaggaagttggtgaggttatcagtgttcgtttggctacacatgaagatggctcctccaggggctttggccatgttcaatttgcttcatctgaaggagctaagaaggcgcttgaattgcatggctgtnatctggatggtcgtccagtgagacttgnttggctcatgaaagaggtgcatacacccctcacagcaggc

SEQ ID NO: 392555 - DNA, 686 bp, Oryza sativa
  unsure (1)..(686): unsure at all n locations
nagnctngcggnccacctccccattccttcccgtttcgccgacgagacgctcaccggcgcacactcgccgcctcccgccgccgctcatcggtccggtactcctcagtcgtcggaaagatgtccaacgtgactgtatgtgtgcgattcaggccactgtgccacaaagagaggaggactaatggtgacaaggtctgcttcaagagattggattcagaatcttttgttttcaaggatgagagggaagaagatgtcatattcagctttgacagggtgttttatgaagatgcagaacagtctgatgtctataacttccttgcagtgccaattgtcgcagatgccatcagtggaataaatgggactataattacttatggtcagactggagcaggaaagacatacagcatggaggggccgagcatcttgcattgcaataagcagaaaactggactagtccagagagttgtagatgagctttttcaatctctacaatcatcagaaagcatggctatgtggagtgtgaaattgtcgatgggtgggagatatatttggaaaaagtaagggatctccttgacttgtccaaggacaacctacaaatccaaagagagtaaactcaagggatctacattcctggagcacagaagtatccatccagaatagtcagatgccttggangccttcctgaagga

SEQ ID NO: 392556 - DNA, 713 bp, Oryza sativa
  unsure (1)..(713): unsure at all n locations
caaaaaaactcccataaacccctcctcttcgagaaaatccctttttgttcaaccacgacgcgaattcccaagcaacccccccacacccagctgagtagctgacgcagcaccagcagtcgcggggaaagggacacgtctcgccgccccagcttcccgcctccctcccatcccgccgccgcggacgcgtccaagccacagcaacagcaaccactccgacgaacacctcgcctgcgcgatggtggcggcggcgcttggacgggatggcggggacgaggtgggggaggtggctggggctcgtgacggcggtgtgggtgcagtgcatctccggcaacaactacaccttctccaactactcccactccatcaagacgctcatgggcctcacccagctgcagctcaacggcctctccgtcgccaaggacgtcggcaaggcgttcggcctcctcgccggcctcgcctccgaccgcgtccccacctggcttctcctcgccgtcggctccctcgagggcctcctcggctacggcgcgcagtggctcgtcgtgtcccgggccgtcgcgccgctgccctactggcagatgtgcgtcttcctctgcctcggcgggaacagcacgacgtggatgaacaccgncgtgctcgtcacctgcatccgcaacttccgccggagcagggggccggtgtccgggttgctcaagggctatgtggggctcagcacg

SEQ ID NO: 392557 - DNA, 577 bp, Oryza sativa
  unsure (1)..(577): unsure at all n locations
cccactcatctcgtcggcggcggcggcggagggatggagcacggcgagctagctgctctaccttggaatggcgactgttccagttaacccaaaacctttcttgaacaacctgacagggaagcctgtcattgtcaaacttaagtggggtatggaatacaaaggataccttgtttctgtggactcttatatgaatctgcagctggctaatacagaggagtatattgatggacaattctctggaaacctgggagagatactgattaggtgcaacaatgttctgtatctccgaggcgttccagaggatgccgagatagaggatgcagaatgagataacctggacctatgcgcagatcgatttgtgtaatatgcagctgacatgaacaatttaagtgtcatgtaaaatttgatgcacagattccttgttgacctggatcttaactatggtcatgatatggctatattaggcattgaaactgacttcatattgactagtgccattgctcaaatgtgtgagagatcatattnnnnnnnnnnnnnnnnnnnnnnnnnnnnnnnnnnnnnnnnnnnnnnnnnnnnn

SEQ ID NO: 392558 - DNA, 613 bp, Oryza sativa
ttctgactccatgcggccgaccctcacactcaagaaaaacagcgctaatggcccagaacaagaccattgcggtggccctgctccttgccacccttgtggcggtcatgggaaaggagccagagacgctagaggaggcagtgagagctgggtgcaaagaggaatgcagtgagcagaaaaagaaagcccccatcgacgagaaacaatgtgaagacttctgcttcatcaagaccaagtctatatttgaggcccataagggagtgaaggatctaaaggcggatagattcatagatttttgcaacaatgagtgtaatgcagtatataaggaggatcccgccacaagcaagaagtgtgcagaaagttgcgaagctgatgctaaggaggccgaggtattccttgataaagtcgtcgcttatattcaaacaacgaaacaagcatgattatattatgtagtacctccccatctgttccttcatcatgaccgagcgacgacattattaatggttctcacccaacggccagccctgcattacattgtcatgtttattccttttagccttttaagcttgtttagccttttgttgaagtttataacttaccgagtgattggattgcg

SEQ ID NO: 392559 - DNA, 543 bp, Oryza sativa
  unsure (1)..(543): unsure at all n locations
aaaccncctggcngaggttcnggtacnttnanntaggcctncnttgttntnngggacccccccnaggtggttttcataggggggataaacccagggtatcggatgctctgtgcaagcgggtgcgttcagacatcctcggagtcaacaactccactgatggcacgcgcatgaacacagactattttggagagaattatcagctcggtgtgtatagttggctttcttatcacttcatatcccagtgctgtattgtcctactgttgcttggtccgtccccgttggatcggagagttattttgatttcatctgtacctgttctgtaaagcttgtgatcagtagcagactagcagttaccagcatacagccggctgtcgaagggatgaaacttgggggcgcgtatacatgcgtggggccgttcttgtgcttgtacatcaagtttgagaattgttgtacaatatcttcttcatcccactgacgctggtaataccatgagtgcaatgagcctggttatgtgtcttcttcttaaaaaaaaaaaaaaaaaaa

SEQ ID NO: 392560 - DNA, 462 bp, Oryza sativa
ggactcctatagaagtggacatcgagcattgccgtggggggctccacctatgcctggcccggacatcgttcctccctcaacctttggtgcctcagccacagcaaagatcagtgttgatgcatccctggctggcggtatcattgggaagggtggaaccaacacaaagcatatatcccggatgactggggccaagctagccatccgggataacgagtccaaccccaacctcaagaatatcgagcttgagggtacatttgaccagatcaaacatgctagtgctatggtcacggagctaatcgtccgcatcagtggtaatgcccctccagccaagaacccgggcagggggtcgcatgctggggggcctggaagcaacttcaagaccaagctgtgtgagaacttcaacaaaggctcctgcacgtttggagacaggtgtcatttcgcccatggtgaaagtgagctgcg

SEQ ID NO: 392561 - DNA, 486 bp, Oryza sativa
caccggagaagaaggatctatctatagcagcaagcaagcagagaagaatatcatcagaaatcggagattaatcgatcgggcggagatcagagagatatattagattgttttgtttgatcgatcgatcgatcgggatggctgctgcttcatctgctgacatggagaggatcttcaagcggttcgacaccaacggggacggcaagatatcgctgtcggagctgacggacgcgctgcggacgctggggtcgacatccgccgacgaggtccagcgcatgatggccgagatcgacaccgacggcgacggcttcatcgacttcaacgagttcatctccttctgcaacgccaaccctggcctcatgaaggacgtcgccaaggtcttctgattcttttttctttatctctcatcgcttcccatccatcatatcatctttcctaatttatttatatctattctgcattatattcttccctttcatttctaccact

SEQ ID NO: 392562 - DNA, 536 bp, Oryza sativa
ctcgcttccccctaaatctcgccggattccgccgccgctgccgcgcccgcttcctcccgaggtgcagctctggccggggcacgcgcgcgcctccccggcggggggccgccgcagtcggtggactacggcggcggccaggcatccgacagcagcggaactgctgatgatcttcctccaccatatccaagcaataggggtattagaggcagtggacgtgtcagtggtaatggaagagctattgttcctgctggttcatacactagagcccatactgatatggcaacacaaatccatcatcttgaacaagaagcatattgctcggttcttcgtgcatttaaagcccagtctgacgccattacatgggagaaagaaggtctcataacagaacttcggaaagagcttagggtatctgatgtagaccacagggaactactaaatcgggtcaacagtgatgatattatccgtagcataagggaatggagatcagcaggagggcctcaagcatgttacccataatgctcagcctatgcatgatc

SEQ ID NO: 392563 - DNA, 804 bp, Oryza sativa
  unsure (1)..(804): unsure at all n locations
gaagcatcagaaagtgcatgccatatatctgtgatagaatctactaaagttaaaagtcaactggagttggagttatcaaagcaaaaccaattactacaaaccaaagactctgatctattggctgcaaaagacgagattagtcggctggaaagcgagttttctgcatataaggtccgcgcacatgcacttctgcaaaagaaggatgctgagctgaacacagctaaaaactcagatttgattaaagcacatgaagaagcaataagggaagctgaaaaggaaatttcagctgccttggcagaaagagataaagccatccatgaccttcaaattgctcaatccaaatatggtgaagagattgaagcaaggggatttggctctcgctggattctgacaaaaagttaaagaatgtcatggcaaaattggattctcttacggctaaattcctttccgaaaaagaatcatgggagaaaaacgtggcaagtgtagagggaaagctggagattggaaatgtgagtctgtgaaggctgagagcaatgggcatgctggagatgaacttaagaagaatttagtggagttgacagtaaaacatgagaaactaaaggaagagcatgattctttccgtgatattgctgatagaatgcttgaagagaaggaccgngaagggtggctaagctcctcagggaaaacaagggatctacataactctttagaggctaaagcgggagttagcatcaatggtaatcaaaatccaggacctgctaaacaggatgcaatggacattgaactgggtgagcagcaaattct

SEQ ID NO: 392564 - DNA, 441 bp, Oryza sativa
  unsure (1)..(441): unsure at all n locations
tctcgtactcgccgcgagagacccaccgatctgccctccgccccccaacatggcgacgccaccgccgctccgccgcgtcgccgccctcctcctcctcctcgtcgccgccgcctccacccccaccgcacgggccgatctcgtcgtcaccagggcggatcggaaggttgacctgacttcgcacatcgttcgtgtcctcacttcgctcaaggttgagaatagtggaccggaggctgtttctcaatttctactggcgtttcccattgtccaagcatagaacttagcagctataagagcatttggtactgaggaaaaggtgaaaggtccaagtatggtccttccgattgaagttgttcagccttcttgagtgcccccagaacttacattcttttcggcatctttatccaaanctttngagaaggggaagactcttcacttagatnt

SEQ ID NO: 392565 - DNA, 742 bp, Oryza sativa
  unsure (1)..(742): unsure at all n locations
ttagtaccagtactcaccacctacgcggtcgcccaccgcgccgtcgccggcgccggtcagcccctcaccgccgcctcccgttcgccaacgacgtcgtcgccgtcggccctatcccccgtcagctccgtcaaaggcacggagaaacgaacaaacgcgagagagaaaacaagaagaggaggaggagccgacgcaaccgaggccccagttccgattgatctccggttcccagatcggccagcaatggcttcatcttcggacccatggatgaaagagtacaatgaggcatctaggcttgctgatgatatcaattccatgattgccgatagagggtctcttccacaatcaggcccggaaattatacgtcacacatcagccattcgaagaaaaataactattctttgtactagactggatagcttggaagcattgttgtccaagattcctccgaagtcactcagtgacaaggagttacacatgcgccaagacacgctttccaatttgaaatctaaaacaaaacagatggcaacaagttttaacatgtcaaactttgccaacagggaggacttgcttggtcagaacaagaaggcagctgatgatatgagcagagttgctggtttggataaccaagggattgttggccttcaaaggcaaattatgaaagaacangatgaangtcttgagaagctggaagagacagtcctgagtacaaaacatatcgctttagcagtcaatgaagaactta

SEQ ID NO: 392566 - DNA, 496 bp, Oryza sativa
atatactttatgcattttggaaactatgatgtgtggtatgttacctaccaaggtcttgctccgtcgccaccaacagctcccgggatgaacaatggtcttagcaatgttaatgatccaaggttgcatccacttgctgttgatgtgggaaaccacagagaaacaaaaagcaggggcataattgttataattgttctttcaagtgtctttgcttttattttatgttctggagctgcgttggtaatttgtttcaagattagaaaccgcaaccatttaactgaagagtcacctatgccaccgaagcctgcaggtcctgggtctgcagttgttgggagcaggctaggaagcagacctatttcagcatctccatctttcagctcaagcatagtgacatataaagggacagcgaaaacatttagcttgattgagatggaaagagctacacaaagatttgacaactccagaattattggcgagggtggttttggacgtgtttatg

SEQ ID NO: 392567 - DNA, 513 bp, Oryza sativa
aaccaatcggcgccggccatctccgccctctcgaggggaggcacttcaaacatctcggtggcggatagaggcaggtcgcatcgcgtgattgggccgcctctttggtctcccctttccgtgtgtgaatgtctctgcatttctggcttctcccacagtgctctccgctctgctcgacgtcggcgtcgcgatcatcgtttccggtcctcaggtttggggctgcgttgcgcgccactcgaccggaatggcagccggatgcttccaaggttgacgctccatccagctcgccggacagcaacggctcggcggacggccggaggcggcaggatcggacggcggagggggggttggaccacccgatcgacggctggatgggctccttgtctcgcatcggtagcacggggagtggctcagttccgtcctcgcggcagccaccactttacagattgtcacttcccaggtgatggaaatgtgcaggcgccgcgcttgctgcccgctcgcttcacgatcgagctg

SEQ ID NO: 392568 - DNA, 523 bp, Oryza sativa
ggccaccgcccacagacagacccgtcagaaaacctctccctccggcgatgtacggcgacaccgagccggccgccgccgccgccgcggagcgcacggcgttccggcgagccgagaagcagtacaagctctacaagccgctgaagcccaagggcggcagggcaaggagcaagccgggaggcggcggcggcggcggaggattggaggacctgtccgcggtggtcgacttccacgcgctgctcgctgccgccgccggcggcgggggggagctgcccgccgggatcgggaggcgcgacgtcgccgggttcgacctcttctgcttcttggaccgacctggattctatttcatacctggtgctctatctattgaggaacaatgctattggatcagggaaagcttgaaaaccttcccacagcctcctaatagaactaacctgacagctttgtatggtccaatttttgacttactcactgctgccaaaagtggaaagattttagtcgaagtgggaatcccatgaccaaaaag

SEQ ID NO: 392569 - DNA, 529 bp, Oryza sativa
  unsure (1)..(529): unsure at all n locations
atancaggggccatgaacgctttggttcgagtatccgcagttctgacaaatgccccttacattcttaatcttgactgtgatcactatgttaacaatagcaaagctgttcgtgaagcgatgtgtttcatgatggacccttctgttggtagagatgtctgctatgtccaattcccacaaaggttcgatggcattgatcgcagcgatcgttatgccaataggaatgttgtgttctttgacgttaacatgaaagggcttgatggcctccaaggtccggtttatgtgggaactgcgttgttgtttctataggcaagcgctctatggttatggaccaccatcactgcctgcgcttccaaagtcttctgtctgttcatggtgctgctgctgctgtcctaagaaaaaagctgaaaaaagtgagaaagaaatgcatagagactctcgacgtgaagaccttgagtccgccattttcaatcttcgggaaattgacaactatgatgagtatgaacgctcgatgcttatctnccagatgagc

SEQ ID NO: 392570 - DNA, 553 bp, Oryza sativa
gggtactgtgtgtgtgtgtgtcagagtgagagagagatagagagagagaggcagctgatcgccacagcgtgctcctcgccgcccgcctgccatggccgacccatacggcgacggcaagggcctcaagcagcagcagcgccagaagctcaagcccgcgctcgaggtggaggacttcatcaacctcctccacggctccgatcccgtccgagtcgagctcacccgcctcgagaacgagctccagtataaggagaaggagcttggggaggcgcaggctgagatcaaggctctgcggctgtccgagcgagcgcgcgagaaggccgtcgaggatcttacggaagaattgacaaaggtggatgggaagctgaagcttacagagtctctcctcgaaagcaagaaccttgaggcaaagaagataaacgatggaaagaaagcagcacttgcagcccaatttgcagcagaggctacacttcgaagggttcatgcagcacagaaggatgatgacatgccccctattgaggccattcttgcgccattggaagctgaactgaaacta

SEQ ID NO: 392571 - DNA, 691 bp, Oryza sativa
  unsure (1)..(691): unsure at all n locations
ccccaggctagcacctaactataataccacgatacacttagcttagtgtttacctagctagctagcagctggctgcaacaaacattctgcatgcactttgaattctagagataggagagttaattagatagcttagctaccacaatgcatgcgtgcaacctgatagcttagctacgcgtagttgccaattcaaccggccgacatatatatcggcctgaggaaactagtggaggactccaaagggatcgcattgatctggctagctatctcgatcgatcgcctcatcgatcgacgacgacgtgcgtgatcgatcagtgcaatccctttggaattttcctcttgcttccgcctcctcatcttccttgatcgatcgatcctttgcctgctggacgcgcttgcctgccggcttgcttcttccatcgcccccttgatcaatccgcaagctgctccagattcaggagttaaatcgaagcccaacgctagcacacagtgatgtctgctgaaagtgcatatttggcagtgcaagaaggtcttttgacagacagggtaaaacatatagagtcccgagtcccgacaagttcagtttatgacgatgggatcaatcaaaggaatatggttcgacggcttgaatcgctgaaccactctgaaatctaggggcgtgtttctttcngccctnaattcggggccgggt

SEQ ID NO: 392572 - DNA, 694 bp, Oryza sativa
ggaataaagccaagatacaggagcgatcggctccgcggcgttcgtcgctgtaaaatccattgttcatcgtctccctcaccggcgtttgtgttcgtgagtgtgagagtgttcctgggctgagccaacatcgaagtcagcaactccatctccaaggttctctggatggccaccctcagccccacctcgctgcccaactggaacaggatgcggatctcggtgaacaccatcacgcagaaccgcgccaagtcgctgcggcggctgcttgcgtcactgcggaacacgtactacgtcgacgacgaggtggtgccgatcagcttcaacatggacagccgcgtcgacgcggcgaccgctgaacgccgtcaactcctccgacgctgaaccagtactaatagcaacaagacttgtccatcgtgatgaacctgcttgtcagcaacacagttgtaccggatgagctacagaacactgtcaagaccaaggaggttaagcagactaaggaaggaagacctgttaggcaccgagtatgtaatcctagagtgagtgggccggaatgggccatatgagcaccatgtccaggctgtcgatagttgcgtgtgagagagaaagcatcttaaaactaactctgtattcatttggatgagttgaggatgaactaggcggcgaaggcggcggcggcatcaaccctgtcgggttggtg

SEQ ID NO: 392573 - DNA, 494 bp, Oryza sativa
ggattaaagccaagatacaggagcgatcggctccgcggcgttcgtcgctgtaaaatccattgttcatcgtctccctcaccggcgtttgtgttcgtgagtgtgagagtgttcctgggctgagccaacatcgaagtcagcaactccatctccaaggttctctggatggccaccctcagccccacctcgctgcccaactggaacaggatgcggatctcggtgaacaccatcacgcagaaccgcgccaagtcgctgcggcggctgcttgcgtcactgcggaacacgtactacgtcgacgacgaggtggtgccgatcagcttcaacatggacagccgcgtcgacgcggcgaccgctgaaacgccgtcaactcctccgacgctgaaccagtactaattgtgattcactccacctgactgacattgctcaaagttgagcaacaagacttgtccatcgtgatgaacctgcttgtcagcacacagttgtaccggatgagctac

SEQ ID NO: 392574 - DNA, 489 bp, Oryza sativa
  unsure (1)..(489): unsure at all n locations
gaacaccttgtnagcatgcttcatcatcactggttggagccgaagccggcgtagctggccgcgggagctgtggctcgggccgcctctacttcttctgctgccttgcatcaacgccgggagccgctggacgtcggggagagtgcgtcgaacacctgcgtgcgctgccgacgtcgattcgcccctgcttcacccgcaccgtgccgcgcatcaccgacctatgccgttgctccaccgcacggtaaatacttgcgctcttagcaccctctactgacctagaaacatttggccccctcgatttgaggtgtgtgtgccgctgctagcctgccgacgggccgccattgcgccaccgttgagctcaccgtggacggcactagttccaaactaacctaggccatattattgcatgaattagttcactagagaccctagatggtgaatttaggctcggttagatttaattcgtcctctcccgcgccatggccgagctcg

SEQ ID NO: 392575 - DNA, 509 bp, Oryza sativa
gtttctcccaaaaaatcctcaaaatcccattgctcacccgcgttatataaccgcggccggccattgggagggacgccgcgaggggtgctcgtttcagcgcgggaggagatcagatcgggctcagatcttccagctcgccgcgccgcctccgccgccgcagcaggaagagagagggtgaggagaggaggaggctacgatgtttagcgggacgcagcagaagtgcaaggtgtgcaccaagacggtgtacccgatggaccagctctccaccgacggcgtcgtcttccaccgctcctgcttcaagtgccaacactgcaagtccaccctctcccttggcaactactcctcgattgaaggagtgccatactgcaagccccatttcgagcaactgttcaaggagaccgggagctacaacaagagcttccaatcacccgcgaaacccgcatcggagaagttgactcctgagctgacaagatcacctagcaaagccgcactcatgttttcagggacac

SEQ ID NO: 392576 - DNA, 524 bp, Oryza sativa
gtttttatggacataatgtcgcctataataggtggggaaggtgaaggtaactggctgttgccagatgttttggttaatgtgttgagggcaggcgatgatggtcctggtgtggtgagggaagttcttgcggatggatcttgtcgcgtcgcccttgggtcatcaggtaatggtgagatcgtgacggttcttccaaccgagctcgaggttattcggccaaagaagagcgacaagatcaagataatgaacggcaatttccgtggatactctggaaagctcataggtatagatggttccgacggcattgtgaagcttgatgacacatacgaagtcaagatcttagatatggtgattttggccaaactggcgagttgagatggatgtatattttgtacgagtccatcgtatagccaaatgtttgtaacagataccctttgtagtcaataaaacgttttgttatttattccattatttagttgtatccagattttgacatcgaaagaaaacctgccttaagaaaaaaacac

SEQ ID NO: 392577 - DNA, 481 bp, Oryza sativa
aatttctctcctcttcagaaatcacgttcacacggcggtgccttcatcgctctgccgctccatctccctctccgccttctcccgttcctccccgcacctccctcccgctccaccatctctccctgtccatggccttccgcatcaatctcgatgtggtgatagaggcataagcttgcaaggagggagatccaacgcagccgacggtggcgtcggatggatgcggctcggatgcgatggtgaaggtgagagtgacgagcggatgcggcgtcgatggcgggggcggccacgagcggaggcggcgttgtcggcggggacggccacgagcggacgcggcgtcgtcggcgggggcggccatgagcggacgcggcgtcatcggccgcggcggcaacgagtggacgcgggcgttggcgagatgctatagtatttctctttttctctggtcttgctcttctctgttcttcttgataccttgctagtcatg

SEQ ID NO: 392578 - DNA, 716 bp, Oryza sativa
gcgcatgcttggtggttctgctcttgcacaggctttggatcaaattggaaatgactgcccagacattgatgatgttccctacttaaagaaagcttttgaggccgttcaggaattgcttagtcagcgccttatctcagctggccatgacattagtgatgggggtcttattgtgagtgttcttgagatggcatttgctggtaattgcggtgttaagctgaacattgactcagaagattcgggccttcttcaagcactctttgccgaggagcttggccttcttcttgaagtgcacttgaaagatctcagtgttgtgaagcaaaagcttgaagcaggaggcatttccgctaatgtaattggacaagttacagcatcaccagatattgagctagttgttgatggcaggctgcatctcaaggaaaaaacttcagatctcagggatatctgggaggaaacaagcttccagcttgaggggctacaacgcctgaaatcttgtgtcagacttgagaaagaaggactaaagcacagaacatcaccatcgtggtctttgtctttcacttccaaatttacagatgaaaaactgctgactgcttcctcaaagccaaaagttgccatcattcgtgaagaaaggagcaatggcgatagggagatggctgctgcattctatgctgctggatttgaaccatgggatatcacaatgtcagacctcttagctggga

SEQ ID NO: 392579 - DNA, 429 bp, Oryza sativa
cccgaatcgacgaggcaccgaaaaaaagaaaaaaaaacacacaaaaaataaagaagggagaacgaagccgaccacccccatcggttccccttcctcctcgcagatctccgacgccggccggccaccgccatgaactcctactccggcgaccgctcctcctcctcctcctcctcccgccccaccaccacctccttcgactcctaccagttcgacttcggcgtcaactcgtcccgctcctctgcgtcccgccccctcagaccggggcccggggccaccgcggggcgcgcctgccgccggcggtgtaggcgtccgcggcagcgcgtggacgcaccagccggctaagacgacggcggggacccacctagccgcgcccgcctcctcggcggtgggggctggatccggacccacgttcatggtcggcgacatctt

SEQ ID NO: 392580 - DNA, 515 bp, Oryza sativa
  unsure (1)..(515): unsure at all n locations
ggttgattcaatcaatgatattgtaaggtatcgggttggtgggagtgtgttaggtgatccacacttgtcttcgattagttcttatcagctgtatgtggaggtagtttgcgaagagctcgagtggcttccattttacagtggtgatgtgccagctgcaacaattgaaggtagagaggatgtgcataaaggagaaataatatcaagagtgctaaatgtgtgctcttattggatgactagttttataaagtacagctcatggcttgagaacccttcaaatgtaaaggcagccagatttctgtccaaggggcattccatgttgagtgattgcatgaatgaactggacttaacaaagtatgatatgccaaaagaccaaacctttccagaagccaaagaacacttggttgctaggacagagctagcctcttttgacaagtcacttgaaagtgttgaggaagctttggttaagttagaagatttgctccaagaattgcatctctccagntccaactctggta

SEQ ID NO: 392581 - DNA, 603 bp, Oryza sativa
ctctcttccccacctcttcgttcctccgcctccgcctccgccatggaggtgttctactacctcgtcttcggcggcctcgccgccgtcgtggccgggctggagctcggcaagtccgccaaggaccgcgtcgccacctccccggccttcaacgccttcaagaacaactacgtcctcgtctactcgctcatgatgtctggggattggctgcaggggccgtacgtgtactacctctacagccagtacggcttcgacaagggtgacattggccgcctcttcatcgccggcttcggctcctcgatgctcttcggcaccatcgtcggatccctcgccgataagcaggggaggaagagggcgtgcattacctactgcatcagctacatcctgagctgcatcacgaagcactcgcctgagtacaagatcctgatgatcggccgcgtgctcggaggcatcgccacctcgctgctcttctcggcgttcgagtcgtggctcgtcgcggagcacaacaagagaggatttgacccacagtggttgtcgataacattctccaggctatattttttggaaaaggcctagttgcgatcatcgctgggctatttgcaaatc

SEQ ID NO: 392582 - DNA, 693 bp, Oryza sativa
  unsure (1)..(693): unsure at all n locations
cggacgtgtctcncncnggncgaggcagcagccgtncaatcatgtncgccgccggttggtgtccagtatacacgctcacaacaaccaccgtctgaaacatggaaatccgagacacctccatctcataagaggtccgaggccatagcttcctccctcaactatattggtggcacaataaaaagtgcacttgaagaaggccggacgattgtagaaaataaaacagccgacattattcatgaaacacgcaaattgaacataggaagaaaaggagctggctcaactacacaaggagaagctccacaaagatttactcaaaggaatcttccacaaaatccacttgactacggaactcaattgaaggcatctcgcgacgtaaggtggccaatatgtgtcactagatatgttgcttagtgctacattttgcatcttggaatccacgtggtttccaaatttaatctggtggcatttttgataaacatcatttttacctgatagctgttcaagttttttttttgtgttgagcgtgatatctgtgtgattatattctttgcaaagtatttttcattaaacatagcctttcagtgcttatttcatcctgccctttattttttctctggttgacgaacagtggcatcagtttagtaatcttttgtctctcatcggcctttctgttggagtggattagtgacccat

SEQ ID NO: 392583 - DNA, 456 bp, Oryza sativa
ctcatctgaccgcagtttagctccctcttagacagaggccagagggagaaagagagagagagagaggagaaggctgagactgaacattcaagatggccggaggtgtcatcgtggcgaacgacggtgatggctccgccgtggaccacggcggacggctgacgttctcggtggtcatcacctgcctcgtggcggcctccggcggcctcatcttcggctacgacgtcggcatctcaggcggcgtctcgacgatggagccgttcctgcggcggttcttccccggcgtggtgaggaggatggcggaggcgaggcccgggaacgagtactgcgtctacgacagccaggcgctgacggcgttcacgtcgtcgctgtacgtcgccgggctggtggcgtcgctcgtggccagccgcgtcaccagggcgatggggcggcaggccgtcatggtcatgggcggcgcgc

SEQ ID NO: 392584 - DNA, 513 bp, Oryza sativa
ctccagggcaataccaagatgaggagcagaaaatagctaaacaatgcaaagaagaagaagaagaagaagaagagaatgcattagagaagtatcaagatgaagagcacaagtcactcaaggcacaacaccaatgccaagacacggagcggaaggccccggggcaatgcaaaactgcgaagacgaagctgatcacgccgccttgtgccaacgatgtgccccggttctcccttcaggatctgatacaagagaagcagctcctcatcggagaagccaaggccaccagcaagctcggaaacggcaagaaagccattgctgatcgtaaactccctccacctccggctgcctccagcgcgacgttggctatggtgataaagcgacctgatgggggaaagaagtcgatgggagtgatccgccggtgcgtgcaggccctgaaccagatggtcaaggccaaacatggcttcaagaagaacaagccttctttctaataagtgagtacatgcatctggtccagag

SEQ ID NO: 392585 - DNA, 496 bp, Oryza sativa
tcgaatatccttcggatttggtggacacaattcagttgtagtatttgcaccatttaagccttaacttgctgcatgttacacaaatcttggccagaatagtaaatgtctcttcaggaagttctgagttattctgcatgtcttttctttgggtgaagcaactgttgatttgacagccggcaacgttacaatgaactggatctgagattaattccattttaggcactcccatcttccattgaaattgagagctctgtataacgttgttttgcataatttgcaattgatttctacctactttctgtataatggaaaatgtgggaatttctagaattgtcatgtagaagcaaaagttagatctcctgttccatagaaatgcttgagccaaggaattgcttgtctgtaatttgtatctggtctagaaaaatgttctcttcaattttttttcttgtccagtatgccaatgtccgtctagtggaataaaatgtattcagttttg

SEQ ID NO: 392586 - DNA, 603 bp, Oryza sativa
gatggaatacaagacaagaaaagaaaaaaaacactcgagtgtgcattgtgggttgcgtctccgctccttgcgcctgcgctgcgctgcggcgatctccatctccatctctctctctctctcgagcagagcagagcacgccgtcatcctcgtcctgctgctgcttccggcaggagctcagctcggatccgtaggacaaacccaagcttggtcgtcggtgtgtttccggagaatgtgaccgcgccgcgccgcgccttctcttatcacaaatggcggctacaccagggagcagcaggccagcgaatgttgctgctgctgctgcgacggaggccagattccactcccacccaccacagcaggataggcgcagtggatgggctggctgtttgtctggcttgccatgttccggatcacagaagggtgggaagcgtatagttcctgcagcacgtgtacctgatgggaatgcgtcaactagtcgtggaaatgcacaccaatctggtgccaattccaaccaaagtgcggctctgaatttatctcttcttgctccaccgtctttctcggggtccttctctaattctgcaattccctcgactgcccaatcaccta

SEQ ID NO: 392587 - DNA, 462 bp, Oryza sativa
  unsure (1)..(462): unsure at all n locations
tctactactgaaggattcaagcaaaaatatcagaatatgcgccttccatgtttttaaggtttttgttgccaatccgaacaagcctcgcagtatcatcgaggctttgatcgaaaatcgcagagaactgctgaagctactccaaaatcttcctacaagtaaaggcgaagatgaacttgatgaggagaggaatctaatcattcaggggattcagaagctggcctgctcatcagcatagacacttgaattaatggaatagctggtttagggaaactgcctttactgaaaatacatcgacagggtgtgcctataagaattgcgtctttttggagtttgaaatgaaatagttgcaaatagatgcacaatacaaaatgagtgcaacgaattttgttctttagggacagtactaatgttgatatgtcttttttctctgctatgtgtttgcgtactgcatattcnnnnnnn

SEQ ID NO: 392588 - DNA, 1035 bp, Oryza sativa
tcgcttccttcagtgagatcacttcaaattgataaacctgtcccagtccctccaagattaccccaagttgataaagctgcttcactttcttcagaattgccacaaacttctaccacttctaattctgaagctcaagaagagactgctgccataagggttgcatctccctcagtttctgaagttactgtcacagcatcaagaccttcgagtgcccctgtgttccctgccccaagatcaactgtaccagctacacaagtacaagtttccacattgctttcgcgctcaatgagtgaagcaactcgaagatcaggaaatgatccttccccttctgcaccagcttacattccacaaacctaccgtaacgctatcatcggtaagcatgggcggggtacaacctcaggaactactgcatatcagtcaacctctctgggccaaggtactgccctttcacagccattgtcgacatatgcaccaactatgtcagtgacgatgcctcctgctggaaggaatgatcagttttctggtaggcatggattggagtctgggttgggaaagccagaagcacgtgatagctggcaaccatggaatgctaacaggcatgttgacaaacatctctggagggatgactcgacataccaacaaacaaccaacggtcatgcatatccgcaaccttggaaggatgttaattttcttcaagcaaggggcacagaaacagaaatacccagcaggtttggaggaccgcaactacctaggcagttccaagctgagactcatgcggattatctcttgcaacaaccacaggggccagtggcagaagaatttccgcaccttgacatcataaacgatttgcttgaggaggaacagagcaatggcagtatgccagagtccattggtcatgattaccatacatttggtctgccgttgccgtttttgttaagaggcaatttggcagatcaggaaatggcttctgctagcagtcctgggcggtttaatttgactgagccatattacgacgagggatactcaagggcctat

SEQ ID NO: 392589 - DNA, 394 bp, Oryza sativa
gaccgaccgtacttctggttccccgtccacctcctccccaccgcgcgatccatggcgttcgccggcatccgctccggcgtcctcagatcggtggcgggtgtggacggtctcgccgccgccgccgcggcgcgccccactcctctcctcccgcgcgtccacctcgccggcgacggcacggggcggatggcgaccaccatcgggttctgcccccgtctcagagccgcgccgccgtcctgcaagaaggcggaggcggacccggcgccgtctctccaggatgcggtggtggcggtggatgctgtgctgcgtgcccctccacctccccaagagcatggcggcaagatggcggcgattctggagtttctgaagaaacactcgctcaatctactgatcttgc

SEQ ID NO: 392590 - DNA, 456 bp, Oryza sativa
cctcgcttccgcccacgcgtccggggaagcagagtagccgtgagcgagcgagagacgcagagaagcgagcagggcggtggccatggccatggctcgctgttccttgctaccgatcttggccgccgtcctcttggcggcgtcgctgtcgctgccaccgcgcgctgccgcgtacgccgccatggtggacagcctcctccccgcgtcagcgacggctctctccttcgaggaaggctacacccagctgttcggcgactccaacctcatgctccacggcgacgggaagagagtgcacatctccctcgacgagcggacaggcgccgggttcgcctcgcagggcgcgtaccaccacgggttcttcagcgccagcatcaagcttcccgccgaccacactgccggcgtcgtcgtcgctttctacatgtcgaacggggacgtgttcgagaggacgcacgacgagct

SEQ ID NO: 392591 - DNA, 1190 bp, Oryza sativa
ctcatcctctccattgaccagacggcggcgcaggcgcaggcgctcacctccctcctcctccgcggcatccccaatcgaccagctggctcccctgcctcctccgcgattttgatcctaatcacccatgtctgctgaagtcagcgaggaatatccttatttcctctcctgctacttctggttcatatattgcataaaattccgagatttcacttgatacaagtggatcacctggagttttgtgctaatacttcctatcatgtgaatcagttgtagttagcataattggcaagactcaagttttctctcatctgggttcagaaacatttgtcggttgagtgctcgatctaaactctgcttgagtcttgccgaagattgtttctcaacaatcacgtcttctgttctctctgaggcttggaccaatctcccttttggtctgatcaacctcctgatctcccttaagtgaaccgtcctgctgtgttcacgcaatacaatcttctgaagtcctctcttgttccttctgtgctcaaacatcaaaagcagctctctcctaagttctcttgattgtttgtgctcctaaattctgttgtttgagcactcaaacatttcccttactggtcaatcttagatcacttgttgattattggtattggcattatttggtgaagcatttctgcttgtaccttaaacaaaggtctctgttgtcttattggtgctgaaggcaagatatacactgcagtgatggctcaaacttgcttgccacctggctttcgttttcatccaacagatgttgaacttgtttcatactatttgaaaaggaagattatgggaaagaagcctcttattcaagctatatcagatgttgaactgtataaatttgctccctgggatcttcctgctcaatcctgtctccagagcagagatcttgaatggttcttcttttgcccacgagacaagaaatatcctaatgggtctaggacaaatcgttccacaccaaatggttactggaaaacaagtgggaaagatagaacgattgagcttaactctcgcattgctgggtcaaagaaaacactgatttttcatgaaggcaaagcacctaaaggcaacaggactgattgggtgatgtacgaatacaaaatggaagacaatcaattggtctctgctggcttctcaaggatgattttgtcctctgc

SEQ ID NO: 392592 - DNA, 504 bp, Oryza sativa
ttggtatatagacactggcttgctcgttgcaatagagatcagcaactccgccgtcgaaaatggctgaattttcttggctcacggcgctcggcttcatgttcctcaccttcaactccggcatggcgatctaccgctccaacggcgacaccggctccatcctcttcgtcggcgtctcctacctggaccttgtcgcgctattcgcctgcctccggatctatgagggcctggaccagcactcgcctcgtcgcggcggggtcaaggctgccgtctgggccctcacgacgctcctcaccgtcatgttcagctataaagtcgccgaaatcatgccgcttgtcgtcaagatcgtcgtgtgggcgatggcaacggccacgacatgcggcggcttctatgccttcttcatccacgaagagaagcagccgcagtacatggccgtgccggcctcggcgggcaagacgcccgccgatcgccacgatggctccacctaatagggatagcaggttgggc

SEQ ID NO: 392593 - DNA, 956 bp, Oryza sativa
atctcgcatcgcctcttccttctcttcttccccttcttctccccttctcatccaacctcgcttcccaaccctggatccaaatcccaacctatcccaaagccgaaaccgaggagaggaaaaaggttacgcgcaattattactagctatagctaggtaggtttgggggaggcgagatcatgaagcgcgagtaccaagaagccggcgggagcagcggcggcgggagcagcgccgatatggggtcgtgcaaggacaaggtgatggcgggggcggccgggggaggaggaggacgtcgacgagctgctggcggcgctcgggtacaaggtgcggtcgtccgacatggccgacgtcgcgcagaagctggagcagctggagatggccatggggatgggcggcgtgagcgcccccggcgccgcggatgacgggttcgtgtcgcacctggccacggacaccgtgcactacaacccctcggacctctcctcctgggtcgagagcatgctttccgagctcaacgcgccgctgccccctatcccgccagcgccgccggctgcccgccatgcttccacctcgtccactgtcaccggcggcggtggtagcggcttctttgaactcccagccgctgccgactcgtccgagtagcacctacgccctcaggccgatctccttaccggtggtggcgacggctgacccgtcggctgctgactcggcgagggacaccaagcggatgcgcactggcggcggcagcacgtcgtcgtcctcatcgtcgtcttcctctctgggcggtggggcctcgcggggctctgtggtggaggctgctccgccggcgacgcaaggggccgcggcggcgaatgcgcccgccgtgccggttgtggtggttgacacgcaggaggctgggatccggctggtgccacgcgttgctggcgtgcgcggaggccgtgcagcaggagaacttcgcggcc

SEQ ID NO: 392594 - DNA, 572 bp, Oryza sativa
  unsure (1)..(572): unsure at all n locations
agaatacaattcttgcatcagngacagacggcatnagcaaaccgttcatgagagctcggagcttgttgaagagtgagagcataagcgcttccaagtgtattggtgaaaaaccaaagcaagacagagatcaggaggattcccttacagagaacatggacgaaacagctgatgaggtctcggaaaaggttgctcaactgaaaacctgatgattcccgtcaaggtcacagaatcgatcggagttagtacaacagcatgtgtatagatgcccttccccagaagacgagaatcccagatcaggacggtcttaaccatgataaagagtctacaactaataataccacaagttgttttggtaacctctgttgtactgtaaatttttcccccttcagttttgtgttttgacagcaaacaactgtctaactgactggttagttcctcgtcttttcctcgatgggacaatcaccgatcctgtaaaatttactttcttttgatgacagaatcatacactgtttctatgaaatattctaaaattccgcagtcaatacaaagagacaatacatcccagtttttac

SEQ ID NO: 392595 - DNA, 608 bp, Oryza sativa
attccataaccccctgccttctctcgccgattccgccaccgtcgacgtgccgcgcctcgccgtcggccgcccttcgatctcctcgtcctcctcggaatggatctcgacatggacgactacatcgacccctacgaggaggccgaggcggaggccgccgcggaagccgccgggctgacgtccgcggcagcggcggaggactcctccgacgagggcgactccgaggacgactccgaggccgagagcgactacgaggagaggtcctacggcctcctccgctccggcaaccaccgcgtgcgcaacccggacggcaccttccgctgccccttctgccccggcaagaagaagcaggactacaagctcaaggacctcctccagcatgccgacggcatcggcgcctccagcaagcgccgccgccacggccgcgagcgcgccttccatcgcgccttcgcccgattcgtccgcaccgacccttccttcgcccaagacctcgccgccatcaacgggatcgccaccactgctgatgctagctctaattctagtgccaccggtgccaaggagaaggcggatgccaatggcggcacagacggatccgcttcggtggcggcggc

SEQ ID NO: 392596 - DNA, 852 bp, Oryza sativa
  unsure (1)..(852): unsure at all n locations
caaatanattctgagacaatgcagcacggnggaagaaggagcaagagaataactggagccttatttaggttcgccatccgaggaaagctaccagagtagagaacttgaaaaggcttctcagcaagttgcgaagcacctctatgattcaaaggttcaaccaactacattaatcccgaaacaagtcgggaatatgtacacagcgtctctatatgctgctttggcatcagtgatgcataacaaaaatgaaactctggcaggccaaaggattgtcatgttctcatacggcagtggcttgacatcaacaatgttctctttcaagatcaatgaaggccagcatccattcatcctatcaaacattgcaggcatactggatgtctccaagaaactggagtccaggcatgtggttgcgcccgagaagttcgtggcggcgctgaagctgatggagcaccggtaccgcgccaaggatttcacgacgagccaggacacgagccttgctcgctccaggcacctactacctcacccacgtcgactccatgtacaggaggttctacgccgtcaaaggtcaagccgtcaccgaagtgtccaatggccattgaaaaaattgtgttgtgatgtgtggttcattcaacctgaagctgcaataagccaacggcatagagggttcagggcgtgggtgtaccaagttttctgatgaaagcttgtaaagggtgctaggttagagctgttggattagttggttcgctattcgctagtaaggcttacttggtgaaatggtatcatncattcgttaatgttcttcagtggaacacacggtagcgagctgtaagaattcttaataaaaaaaaaaaaaaa

SEQ ID NO: 392597 - DNA, 501 bp, Oryza sativa
cagcaaagcaagctgaacaagctgtccctcccgggaaaaacacacaggagctgaggtgcaagatgtctgcttgattgcctcctgcttcacttcactgcttctcttccttctccctctcctctctgcaatcttcttgtatttttctccctagctctcctgcatcagcatcagttcttgcctgtggctaaggatcttttgatcttcaaagggagagaaaaggatcttgcctgagcttcagtttcttgtgctgcctcctcctctgtgtttgtgtgatccaatttccaacttggaggagttcttggtttcctggcattgtgctttcttggacccagagcttgacaagattgggtcaatagtttgccaatctagagagagagagagaatacttggtttcttggcaagggggacaccagggcatagatctttgtagttaatagttgctcttgccctctggactgaggagtaaatagttgtgtgccagtggtctcttgcttcatcttg

SEQ ID NO: 392598 - DNA, 907 bp, Oryza sativa
ttcttagatgacgatgagacatatacaatgaaggttgtacacatgcgaccaacaaaaggcacttcaagtgcatcatccgtatcatcagcaactgcagaaagtccagctaaggaagagaatgaaagctcattggaaagtagtgctatatctgagggcattaccgatgaagcgaatacagatactacattaaagggagatgaagatgttgaggataaagaacaagatgttggtaacgccaaggatagtagtgttgaagggtttgaaatagcgttctgaatttcttcaagtcttggattcctgaattcaaagttcaagtaataaatgttggatgtgtctgaggaagctgaattagtttcaaattcgtcagaagaattagtgcaagatgatgtgaagagcacctcagagaactcattggaagattctaccactgaggagcttcagcaggatgatgttccagatggagattcagactcagctgaagatagtaaaagtccagaaatgaagctcttcattagtggagtggttcataacaaggaggatgctggagcaaaatcatatgttcgagttccagctgaaatcaataatttggaaaaggattccttcgaactttacattcctggaaaaggttctgatcgagatctggctgatacaaaggctgcaaaacagaaagttgctgatatggctgccaaattggcatcagaacttatgccttctgatgttgcgaaggcattatggggaacgaccaagagttcttcgaagataaataaagaagtacaagagctcttaaagcttaccctcagcaaggctcgagtcaagctgactgagaatacaattttcaataggatcattactgacagtaacggctcagatccattagtggtctctatgtggagcatttagccatatg

SEQ ID NO: 392599 - DNA, 742 bp, Oryza sativa
cttttcagtaattccttcgactgcccaatcacctaattgcttcctgtcaatatctgcaaactcttcgggtgggccaacatctaatatgtttgctgttgggccatatgctaacgagcctcagcttgtctcaccacctgtcttctcaacttacacgaccgagccttccactgcaccactgacccctccacctgaactagctcatgcaactactccctcctctccagatgttccatatgcgcggtttcttttgtcatctatggatctgaaaactgctggcaaagatcacaacatgccgtacttatctacagcatattctggaggttcagggctccaggcatcttatccgctttacccagaaagcccttctagcagcctcatatcgcctgcttcagcaactccaaggactggtctttcatcacctatccctgagcaagaggtgcctacttgcacattggaagacatctaggtccgcctgtgacacaccatattccagggcttcaccaatacctgagcaagaggtccctacggcacagtggaagacgtctaggtctgcctgtgacacaccatattccaggaattcaccgtccaatatttttgggcttgattcagctgcttctagaaactacatgttagataataacttctttcggccagctgcatctgcccagttctacctggatcaggctcagcagtcatttccatataataatggaggaggattagcgtctcagggcaaacaaga

SEQ ID NO: 392600 - DNA, 442 bp, Oryza sativa
aggaaatcagctcatcgatcgaaagatcaacaagctctcttgagaattgagatcaccctctttccatctagaacacaaaccagacaaccaaaaaacagcaagacacaatacacaatgtcgctgatccgccgcagcaacgtgttcgaccccttctccctcgacctctgggaccccttcgacggcttccccttcggctccggcagcagaagcagcggcagaatcttcccgtccttcccccgcggcacctcctccgagaccgcggccttcgccggcgcgcgcatcgactggaaggagacgccggaggaacggtgtttcaaggcggacgtgccggggctgaagaaggaggaggtcaaggtggaggttgaggacggcacgctccagaattcagcggcgagcgcagaaaggagcaggaggagaagacggacaaattggcaccggttga

SEQ ID NO: 392601 - DNA, 563 bp, Oryza sativa
gaacgacacttccgcacagccctagggtttctgttcagcgaccccccgaatcgaatcaagagggaggtgccatggcgtcgcggccgtcgctgaagccgaagcccaaggtcaagggcgcgaggaagggatccccggcggccgacgaggagcagtccacggctgcggcggcggtgcggttcgtcaaggagtggaccacgtggaccatgaagaagaccaaggtggcggcgcactacggcttcatcccgctcatcatcgtcgtcggcatgagatccgagccgaggccctccctcgcccagctcctcagcccggtctgatctgacgatcgccttcaagccctagatgcgatcgatctgccccccttttactaccgctttagtagtgactttagtaatagttctttcttagatcgtgccttctgagcagttgatgctgctgtgcggatttagaggtttttgctatatgaatctaataatgttatatgggtggatgcttctttggattaaactcttgctattattgtgcgggtcatggatctgctattaatacttcggtatggtatgggg

SEQ ID NO: 392602 - DNA, 542 bp, Oryza sativa
tagagtggtttcagatcagagtagagtttgccacagtggtcgcccacgcgaccagcaggggtgtatagtcattgtcaggccatttatgacactgatctgcagatgctgctcagcccattatgcgaaacccagtttaagcttcctgcactgaccggtcgctctgttccaccaacatccttaatcagtaaactaataataaggatcaaggtcattatcagaactcacaaaacgtctacgtcgcacatactagatcctcacctgaagcttaacaactcgaaagctcgagcaaatgatcagaaaaggaatctggaggcgggcagagccagagcatggaaggaagccgatggtttttactcgcccgtggcccgccggattgaatgcgtggattcactcatgccagtatgccacggtcgagtctgtccgtccggccggctggctggctccattatttacggttgtttggtgagatttcaagccttgtccccgccgcattgagcgagatcggccggctggcgcgtgagacatcagagctggtgctggct

SEQ ID NO: 392603 - DNA, 574 bp, Oryza sativa
cttcgatctcttgggatataactagcttagctatagctctagctaaataggttcgtacgtataggatatttgatccattgatcgatggccgtcgacatggagctcgacggcggtggcgacggcaagggcaaagccccgccgcagataagcctgtcggggctattccttgcgtgcatggtcgccggtggcgtgcagtacggctgggcgctgcagctctctctcctcaccccgtacgttcagacattgggaattcctcatgcactcacttcagttatgtggctctgtggccctattgctggcttaattgttcagccatgcgtcggcctgtacagtgacaagtgcacatccagccttggaagacgtagaccgttcatcctcactggatgcataatcatctgcatatctgtgatcgtcatcgggttctcctcggacatcggctacgctctcggcgacacgactgaggactgcaaggcttacaggggttcctcgttaccatgcagcggcggcattcatcctcggattctggctgctcgacttctccaccacaccgtgcagggtccagctcgcgctctga

SEQ ID NO: 392604 - DNA, 659 bp, Oryza sativa
tgctgctctagtattcagaagctgttgtctttccaaatatctggtggaaacttccgcagaagttgaactgttcttgcagaactggagggagagctttctgcaccagctcatatcactgaccagcagctttctcgagaaagaagggaaaactgattggattggtggtataggaaaccataaggatgtgttcatatcagtttatgcaaatctgcttggcctatatgcacttgctcagtcacaatctttggaacagctgaagggcagacccacagaatatttgaagaacttttcagaccttgatggggttatcacaccattcctaaaaaatcctttgatctctaacctttattcgttggtaaaagaatcccacgagacgttcaattccccaaagaagcaatgggatcaagtagggagttcagcaactgaaagttttgatccttattttcttatcagatgatattttgtcgtgcccaagtaatttgttgccattgtaattctattatagacgaaatacatttttttcctgatacaaatgtaccagacaggttccttatttgatgcccacaggttccttatttgatggcctggggcctagattttagctagtaaatttttgcagccaccgttgtaaagtttccctcaaatatgaacttcagttt

SEQ ID NO: 392605 - DNA, 508 bp, Oryza sativa
  unsure (1)..(508): unsure at all n locations
ctgtaaccatacatacttattaatacgactagtgaaatctagacatggacgatgagaatggccttgagcttagcttgggtctctctttgggtgggacatcaaggaaagtctaaggctagagatgctcctctagaacctaaagcagagcctcaagtggaagagagcagtagcaaaggtgtttcacaaactcctgaggctccttttgtgcattactatcaaacaaatgcagagaaccaagaacacagtagcaagcagagacacagccctgctgcaccaccgtttgggaacttttggggacagccagggagttcttctgttcctgtggcagatggatccaatgaacagaagccagtctctagtaaacggaaattactttctgagggagataagttttcagaagaaacctaatacagctgctgagcaacctgatgcatttagtaaggactctgacggtggtgtaaaaacgntcctatttcaattagcncggttatggtcaccaggtgaaccg

SEQ ID NO: 392606 - DNA, 471 bp, Oryza sativa
  unsure (1)..(471): unsure at all n locations
gttctccctctcctcctcccacctcagccgccgcttacctttggcgccgcctgctaatctgccggcgtgagcaccggcggagatgtgttactgctacccaacctataacgcagctctcccgcgcagtgcctctgtctctagctagggttttcctcttgggggagacgacctactatggtaaggtggggagctgaagccggcgacctgctgctgtccggaggaagctggagctcgtcgccgtcggatggacgccgatgaggccgcggggagcagcaggaggatggatctgaacctctaccttggcctcccacgcgccccgcgcccgcgccgctccgacctcggcttcgacctcgccctcagcaccccgatgccctcctccccgtcctccttcgcagnctccgtcgacgcgccgtcgacaccggccgaagctgttgatnccccgtacttcccctctgacgccgacctttcccc

SEQ ID NO: 392607 - DNA, 966 bp, Oryza sativa
  unsure (1)..(966): unsure at all n locations
ctgctcgtccaacaacaacatcgtggtgaacgtgttcaaccagctggacgagccgctgctcttcacctggaacgggatgcagcaccgcaagaactcgtggcaggacggcctcgccgggacgcagtgccccatcgcgccgggcaccaactacacgtacaagtggcagcccaaggaccagatcggcagcttcttctacttcccgtcgctggggatgcaccgcgccgccggcggctacggcgggatcagcgtcgtcagccgcctgctcatcccggtcccgttcgacccgccggccgacgaccacatggtgctcatcggcgactggtacaccaaggaccacgccgccatggccaagatgctcgacgccggcaagagcttcggccgcccgcacggggtggtcatcaacggcaagtccggcaaggccgccgccgacccgcccatgttcaccgtcgaggccggcaagacgtaccggctccgcgtctgcaacgtcggcatcaaggcgtcgctcaacttccgcatccagggccacgacatgaagctggtggagatggagggctcccacacggtgcaggacatgtacgactccctcgacgtccacgtcggccactgcctctccgtcctcgtcgacgccgaccagaagcccggcgactactacgcggtggcgtccacgcggttcatccacgaggccaagtcggtgtcagccgtcatccgctacgccggctcgagcacgccgccgtcgccggccgtgccggagccgccggcgggatgggcgtggtcgatcaaccagtggaggtcgttccggtggaacctgacggcgagcgccgcccgccccaacccgcagngttccttaccacttacggccagattcaacatcacgcgcaccatcaggctcatggtctcccggggccacattcgacggcaagcttcaagttacggctttcaatgggcgtcttcccacgttcgacgccg

SEQ ID NO: 392608 - DNA, 765 bp, Oryza sativa
agctcaccaacgcatggtgaatcaacttctgatcagcaagatgatggaaacaaatctgttcagaaccataaggataactgttcttgttctcatccagaggatgggaaaacgagtgatgcaaatcttaaggatgaagtctcactgttgcatacgagattgcaggcacttgaagctgatcaggagtttcttaagcatgtgttaaactccctaaggtgtagccctgatggactgcagtgtgtacaggcgatagccagccatttactagagttgagaagaattgcaactcagagataattttcccccctgatttcacaccttctggtcatgagctcttctcatgtagtgctacagaccttcatggtgcttcttgttagagcagcattgaagaggtctagaaatcgatgtcggtgaaagatcatctgaaatgaggaaaaggagcatgcactgaccaaaaaaaaaacttccaattcccttgtactaaatacttcaaagtttttcattgaaccaggactggaccaccctggttgctggtaattcgtggtcacgtgcccttcaggtaaattactttgaaacaagacaaaaaggcaatctacctctaatatcgactgtgattgctgttaggagcaagttgtgtaactgtaagatgtaactgatgcttgcggttcttgcaaaagaggaggtttaactagtagaatatatacagtgttcatatcaaattaatcaatgtctccttgcttcagaaatgcaaggttttctgcctcatcc

SEQ ID NO: 392609 - DNA, 605 bp, Oryza sativa
  unsure (1)..(605): unsure at all n locations
gccagctagcaccaccatggttttncctccctctcgaacagctccacagcgaggatttctggtgcttggtgaacagtgtgtccccttgttggcgacgttggatctggaagcgaggggtcagaggaggagcatgctgcccatctccaccggatctggctggactcccctctccggtgacctctctccccaggcggcacgcgttcagatcagcccctcagcagacgtgaggcgcgagccgtctggcggacgggctccatggaggcggcgtcctggcctcctgggggtcggcggagtggcctcggcgacggcgtatcttgtgccgctggcactcacctctccctcgccatcttcctccgccaccactgcccctcctcatcggacgacgagcttgatggtggcggcgcaagagcaagccagggtcatgtcgttccttacaccccttgcctttgccccccactctcgccagatggcgagctagatggtgccggcgcccctgctctcctttcctggccggccatgaggtngggtggcagattggcagagggggcgacatcctcgacgacggctgccacatcagcggtggagcggatctagagtggccacgg

SEQ ID NO: 392610 - DNA, 369 bp, Oryza sativa
  unsure (1)..(369): unsure at all n locations
cagcgaggtgatggtttccttttccattcctttgatctggagtggatgggctgagaacgcatatgtttattttctctttttacttttctttttctaggatttctggtgcttggtgaacagtgtgtccccttgttggcgacgttggatctggaagtgaggggtcagaggaggagcatgctgcccatctccaccggatctggctggactcccctctccggtgacctctctccccaggcggcagcgttcagatcagcccctcagcagacgtgaggcgcgagccatcggcggagggctccatggaggcggcgtcctggcctcctgggggtcggcggagtggcctcggcgacggcgtatnttgtgccgctggca

SEQ ID NO: 392611 - DNA, 555 bp, Oryza sativa
ctttaccttcctcttcttctcttctccttcgttgggcgtgggcgtcgcgagaggcgagatggcggcggcgacgttggcggcggcgagcatgggggtggtgacggaggtgctggggagcgacgtcgtcgacgaggtcgaccagcccatcatcgactacatcgccaacgtcctcgccgacgaggacttcgacttcggcgcccccgacggccacggcatcttcgacgcgctcggcgacctcctcatcgacgctcggtgcgtcgccgacgaggagcactgcctcgaggtctgcagtaagatttgtgaaaaatttggaaagcatggcctggtaaaacctaaacaagctatgcgaagccttgtcactcctttacgtatgaacgagggaatggacgataagggttgcccccaaaaagcaagctgatgtatttgatggacccttgctttcatcacgtgacaaagccaagattggacgggagaaagagaaaggatgagagacaaagagaggctcaataccaaacgcatgttgctgaaatgaggcacttagggctggaatgcctc

SEQ ID NO: 392612 - DNA, 685 bp, Oryza sativa
  unsure (1)..(685): unsure at all n locations
gtccttcgagagagagaacaataattggatgcatggcaggcattgctgaagaagggggccaagtacataatcgtacaggggctacctctaaccggttgcctgccactgaccatgacgctggcccgcccggaggaccgcgacaacatcagctgcgccgccaccgtcaaccagcagagccacgcccacaaccgccgcctccaggccagcctccgccggctccggcggcagcacccggccgccgtcatcgcctacgccgactactacgccgcccacctcgccgtcatggcggccccggcgaggtacggcttcacggagccctttcaagactttgcttgcggcgccggcggcggcgcctacaacttcgagatcttctccacctgcggctcgccggaggtgaccaccgcctgcgcgcagccggccaagtacgtcaactgggacggcgtccacatgacgggaggccatgtacagggtccgtcgcccgggcatgtttttccagggacggcaggttactgccacccgccgttcagcaccttgctcggccaggcggnacaaagggcaattaagcaagtgatcatatcttttctgccattaagcaatattgatcagtgttgttgtctctttagtagctaggtgatcattgatcagcattgccattgaagtattgaactgaaaaaaaaaaaaaaaa

SEQ ID NO: 392613 - DNA, 886 bp, Oryza sativa
atctatagctcgaaaggcgtcgttcttctcgcgatcgtcatccttgttctgtcaaatgtggcatcaaatgttccaacagttctactgctgggcacaagagtggcagcatcagccgcagcgatctcccctgcatcggagaagaaagcctggctgatcctggcctgggtgagcacggtggccggcaacctgaccctcctcggctcagccgcgaacctgatcgtctgcgagcaggcgaggcgcgcgcagttcttcgggtacaacctcaccttctggagccacctccgcttcggcgtgccgtcgacgatcatcgtcaccgccatcggccttctcatcgtcatgagctactgatgaacaagcctcaaatggagaagaagaagtaagtaagtagcagcaatcgaaatcacgtagcagcagtacaagattgaaggttttactactactactactatttcagctggtttcttccacaaaggtaaagaagaatggaaggaagcagctgtggatatgatggatgcagatggggactgaactgaaatactaggttcagctgagaaaaaacaatgtgatactttgtaatgtgttttttgttgttatagctgggttttgtgttctgtccctgtaatcttttaatccatgcatgcatgcgcggagcaaaattaagcgcgaggttgtgtccctaattaatcatgctgaaaagcaaaaaaataagtgggggcatgattattgtttgtacatgatgataattaatgacccagtcgatggaacttggaattagtcggcgtactttgtaccctgttgtaaggtcaagcaaggcctttgatagcaatggatatatggtgatgttattctcttcaaaaaaaaaaaacaaaaaaaaaaagggcgccgc

SEQ ID NO: 392614 - DNA, 645 bp, Oryza sativa
cccaccgtccgcggacgcgtgccctcgaagcagcgcaacgaaggcgacgagctcacttggttgcagttgcagtagtagctcttgctgtgcagtgcagtgcagtgagcgtttgaggagaggtagcagtagtagctgtagttcagcttgtggcagctcccatggccagctacgcggcgcagctcaaggacatgttcttcggcctcgtcgagcgcgtcaccggctacggacgcggcgaggacaaggacgtcgctgcaggtgtagatgagcccagcaagttggcatctgaagaggttgcagtaagcagcgaagaggttgtgattgtacagcgcaatgagatcagatcaagaggcgtagatccctccgtgtcaggcgggaaacagccagggatcaatgcggccggtatctagaggggatgatttgatgaactgaacaactgtgtccccttgagttctcaagtactactagtagtttatatgattgtgagcgtgctgtgttactactattgtttgcttgtgtatctcaacctcactgagttcctctctgttccagtgtgtttctctgatgtacttgtcatcatgcatggttcatgattaccagtagtaatttgatgaacctcttcttcatgctaaaaaaaaaaaaaaaaaa

SEQ ID NO: 392615 - DNA, 473 bp, Oryza sativa
tcggtccgtggaccatggccgccgcttcccctccgcaacggcgcagaatcgtttctgcagctgctggagctccgcgaggcgatctcgggagagatcgctcccgtgccctcggcactccgccactcccgtctcctcgcgatttcgcccgcccgctgcccgcgccaatctccatcccgcgagcagctgcggcggcggcggcggcggcgacctgtctcccttccgccgcatcctcgccgaacaacacggtgaactagtaatctagcatcacccatgcccttaagcagcaatatttctactcagaaaacccactatgaagttctttctgtgaatgaaggtgctacatatgatgaggtccgagctggatacagggctgctatcctaaacgcgcatcctgacaagtctcaggcaaaactggatttacttgtgtcatcttgtgagcatggggaattcttcagcgtgcagaaagcttggga

SEQ ID NO: 392616 - DNA, 452 bp, Oryza sativa
aatgacaccctagacagcatgaaggtagtccacagtaaaattgacaaactttcaatatcaaacataccttatgggtcaaacaggtttgttactcacttggttatggcttatgctgtcacgttttggacctgctatgtactgttccgagagtatgagataattacaacgatgagattgcggtttcttgcttcagagaaacggcgaccagaccagtttacagttcttgtgcggaatatacctccagatcctgatgaatcaattagtgagctcgtggagcatttcttccttgttaatcatcctgatcattatctaagacaccaggtggtttacaatgcaaataaacttgctgatctggttgagaagaagaagaaacttgcaaaattggcttgattactaccagctcaagtatgaaagaaattcatcaaaaaggcccaccactaagactggctttt

SEQ ID NO: 392617 - DNA, 1271 bp, Oryza sativa
  unsure (1)..(1271): unsure at all n locations
aattcctagtgtcgaggtgaatgatggcgtgtcaaatatgatcttcggcctagctgccaaacatttgattggcctcgacatcaccaattcaggagaattgaaaaagaactttcaggaaatatttcaagtgatggtttccatcccattcccaatatattttccagggacctcgttttaccgatgcatgcagggtaggagaaatgtatggaccacactaacaaatgtaatgaaaaagaggctaagtgcacctggaaacaaattcggcgaccttgtcgatctgatagttgaagagctacggagtgaaaatccaacaattgatgaaagttttgctatagacactctatctgggctcttgtttgctagctttgcaccgctatcgtgcaccttgactacaacttttaaagttcctcaacgacaatcctgaagtttttgacaagctcaaggaggagcacgaaatgatactggagaaacgagagggtgcgaattctgggttcacatgggaggaatacaagtccttgaaattcagtactcaggttgtgaatgaaattaatcgaatcactacggttatacctggtggtttcaggaaagcactaacagacgtgcaagtaaacggatatacaattccgtctgggtggctagtcatgattagccccatgggagtgcatctaaacccaaaattgttcgaggatccactcaaatttgatccatggagatggacggaggagaagagaatctcgatgcaaaggaatttcatgccatttggaggaggaatcaggatgtgtcctgcggcagagtttaacaagctttttatcacactctttctccacatcgtggtgaccgagtatagatggaaggatatcgacggagggaatgtaaagcgtatctccgaggttttggtcgctcaagagtatcatattcaactagttcctcagacgtaacatacctatgggaatattcatctataaaaaacccaagtgtcaatggatccctacggagctattcggtacatgtacttcaatattttcatcatatggtcctcttatgtgtgtgtgtgtgcaagtttgaatttccatatattgttccatacttccattaaagtctcatatgattttcctcgaatttgatgaactagccgccaaaccgtgcattgtatcacttttcatatattgttataatatcattaatgtattggttatctnnnnnnnnnnnnnnnnnnnnnnnnnnnnnnnnnnnnnnnnnnnnnnnnnnnnnnnnnnnnnnnnnnnnnnnnn

SEQ ID NO: 392618 - DNA, 530 bp, Oryza sativa
  unsure (1)..(530): unsure at all n locations
tctcctcctcatcttcttgcgntgctctgcttctttcctccagatactgttcctcctgcagaagcagaagcagaaggagaaggagaattgaaagcaagaaattaagtgagaggagaagaagaggaggtaggatatggagaaatacgagccagttcgggagatcggggcgggcaacttcggggtagcgaagctgattgcggaacaaggagacgcgggagctggtggcgatgaagttcatcgagagagggaacaggatcgacgagaacgtgttccgggagatcgtgaatcatcgttcgctgcgtcacccgaacataataaggttcaaggaggtggttggtgacggggaggcatctggcgatcgtgatggagtacgcggcgggaggggagctgttcgagaggatatgcgaggcggggaggttccacgaggacgaggcgcgctacttcttccagcagctggtgtgcggngtgagctactgccacgccatgcagatctgccaccgcgacctcaagctggagaatacgctgctgga

SEQ ID NO: 392619 - DNA, 438 bp, Oryza sativa
tggacgcgtgggccgcgtcgtgccttttgactcctcccacctcaaaaccgcgggccgcatcccgcgccgccgccgcccaccggcggcaaccacccgccaccgcgagcgaacacccctatataaaccgccacgccacgccacggccaccaactccgaacacgacatggcgccctctctcctcaccaccccgtcccaggccctggccctcgcccccggcgccgccgccagccgcgtcggcggcggcggcggcgggtcggcgcgggtgagcttcccgtccggctcgcgtccagcgccgaggcgcgctggggatgcgggtgcgggcgtccgtggtcgatcgagatggagacgcccgagagcgagccgccgtcgacgttcctgcgggaggacgggtccggagcggggtccgggtcggtgcgggagcggttcgaggccatgatc

SEQ ID NO: 392620 - DNA, 509 bp, Oryza sativa
catttattcatctccatcgacaaagctagctaagcccagtcatggccgcctctcccgcaatgccgtcactcctcctcctcctcctcctagccgttctcgtctcggcggccgatgcctacgactccgccgccagcgccaacaccaacgccggcgccatccccgaccccaacatcttgaacatggaggccatgtgccccaagacgacggacgtgaaggcgtgccagcaactggtgaagaacatgccgtccaacatcgtcgcggggaagaaggacgccaggagcatcgcccgggggtgcatcgccaccgcctggttcgtggcgagggacggcgccaaggactgcaccgccgccgtggacgagtgcaaggacaaggtcgaccagtgcctcgacagctgccgccacgccttcgccgccgtgaacgacgccctggagccccagggcaccggcgacgacgccgtcaaggtccccgaggacgagaagctcctcgccatccacgccagcctcacgcag

SEQ ID NO: 392621 - DNA, 742 bp, Oryza sativa
ctcttacaaacgccaaaaatcgccgagaagaatccgaagaaaacctcacggcggcggcggcgaccggcgaccagaatcggcgaacgggcacgggccgagcagatctaggcgagggagggagcgatggggtcgagcgagatgacggcgacggaggtggcggcgctgctggatctgaagccgcacccggagggcggctactacaccgagacgttccgcgacggctccgtctccgtcaccaccgcgcagctcccgccgcagtacaaggtcgaccgcgctatcagcactgctatctacttcctgcttccatcagggagtgtttctcacctccatcgcattccctgtgctgaaacatggcacttctacaagggagagcctctcacggtctttgagctacacgatgatggacacattgacctcactgttcatcggtccacacctggaggctggccagcgtccccagtataccgtgccaccaaatgtgtggttcggttctttccctaccctggatgttgaatcattcgcatctgatggcagcgttcttgtcaagtctcgaaagagggatcctgagcttcattactccctagttggctgcacttgtgcccctggcttccagtatgaggatttcgaaatggccaattttgatgatgtgaaatccattgctcctaaaggcagaaccgttcctcaagtaccttattccttccaccaagtaatcatgttttgagctcaacatactgtattttag

SEQ ID NO: 392622 - DNA, 443 bp, Oryza sativa
cagaaagaacagggaaaaaggaaggggtttatcgcgacgaggagccgaggagggggaggcgcgccgcgccgtcccattccagaacatcctctcgtgggaggggtggaatcgtcttgatcatcgccggggcgagatccgtctcgacgtccggcgggaaatggacgattccccgctagataatctgtttgatggaaatggattggattcatcggcaggcgcggacagctctagctccacgggatcaccgccgagctccacgtcgtcgtcccctccgtcgtcgcagtcacctcctccggggtcatcgccgcctcctgccagcccgccaccgttcacaacgtcgggccccaccgaccaatttctcgggctcagaacgtcgccaactttccccgtcgaattggggcaacggggaaataacggggggggggggtcccacaaaattgatg

SEQ ID NO: 392623 - DNA, 474 bp, Oryza sativa
gacaaatcctcgtcctcatcgagtcaaaacaacccatgaaaccctaaaaccccaatccccccagcccaatccgccattgcctccccgatgcaagcgtccgcgcgcctctacaccgccgccgcatccaagcgggtgattgcgggcgtctctagcacgatctcgcgctcgtgccaccggacttgccgatggaagtcacatgccgcgccgctgtccgctcaggaggcgcccaaagggccaaagaggatgaccaagcaggagaggcgggttaaaatagagaaatttgctgaggagcatcaggcatcgaatgatggtaaattccccacgatgacgactgctcgtcaacatgttggagggaggtcactacacggtgagggagatagttcaggaacttgagtacaaccagagaatgctacaactggacccgtctaaggcaggtgagctgcccgaaacagtgaacattctgagcattaaagc

SEQ ID NO: 392624 - DNA, 551 bp, Oryza sativa
catatacctaaactctgaagaaatggcatggttgggttgccagttctagttttacagtggcaatgaagcttgctcctaatagagagaaatttatggaggtcattagtggaacgggtgacataaaagctgatatcgagaaattctgcacgaccttttatccttttctcaaagagaatcatgattttcgggccagtgtgggacttgatgatctgaaggcttcttaatgcattcctatgcaacaattacccccagaataaacctgtcttacctgtctaatgaaatttagtgctgccgagggtatgctgttttccccctatctttggaaaactatagggcaataatgaatgtcgtgagctcagaacgattgggcaagcccatgggcagctatacccaatgtatgtgttgctttatgcaaaaaggtcaaactgttgaaaagcattcccgtgctagaggaagttaacatgttatggacttatatgccctgagaattgttcatctggggtatccatcaaatttggtatttgctgaggccttacccccccttgccctgg

SEQ ID NO: 392625 - DNA, 869 bp, Oryza sativa
  unsure (1)..(869): unsure at all n locations
cggtcgctcggtcggacgcgtgggcggacagtacgtggaggccgctcacttcgtcgtgccggagggcgcccgcgccgtggagctggtggggggcaaggagtcggcgctggtgcaggaggtgcgcaccgtgcccgggtggacgtaccgcctgtcgttcgccgtgggcgacgcgcgcgacgggtgcgcgggctccatggtcgccgaggcgtacgcggcgagggcctccatcaaggtgccgtacgagtccaagggcaccggcgggtacaagcgcgccgtcctcgagttcgccgccatcgccaaccgcacccgcgtcgtgttccagagcacgttctaccacaccatgaccgacggctcgctctgcgggccggtcatcgacgacgcctccctcgtcggcctccgcaagaagacggccggccggcggctgctcctgtaagacgaacggccgcgtggcatcgaacgccgtcgcattccctccattctatgaatatatgaatacaaggcgcggttaaacttgggggcagttggcacgaccaaagttgggtgctaaaatgggtagtattgctaggctcgtttttttggttttggtgtgtactctggtatatgtacgcgtgtgcgcgcgtttgcatggttatactttggagctgcgctcgtttggtgttttgttgtnaagaggagaggtgatacgtggtgcaaggtctgtcacaaggggtttggttgatcaacttaaccggagtgcccaacctaaacgcaccatcagacattatgaatgggaagcattactagtgctcacttttttataaagccaattgngtattttnaaatcctgtcctaaaaagccagatcctttttgaaagttgagcatacatttg

SEQ ID NO: 392626 - DNA, 646 bp, Oryza sativa
atcattctctcaaaactgttcgtctgtacggtgagaagtgtggattggatttgaagtttgctctgctggttaatgcagttcaagctacagttgatgttgagattatacattcacctccttgtggccttaatttgaagttatatgccaaaactagtggcttcagcgatgtgatccgtctcttccaaggtgctgcacaatctggtcatagaattagttctgttgtggcggtggtgcgacgtagtcaccttgatctttgtatcgaagggtctccagcaggtattggtcttggtgagaagctgccccgtgtaagatgggagcacagatttggtgctggttttcatggaattgaagatgaagcggtgaagcttggtgattttagcacaatttctgtgaaagtcacctggaaagctgtcggcaagcgtccggcgccgaagggatagtggagcttctatgcaaagtaaaaactggaagatgttatgtgtggcaacttttgtgagctatttccatgtattaatatagagtttaactcttggcatgctaaactttggtctgccctaatgtcttgggcaatcttgctagagcaatgataaacttttgtaaacatttgcgtgatgctaattgaattcttatttcggtgctaaacaaa

SEQ ID NO: 392627 - DNA, 675 bp, Oryza sativa
ggagcgcgcaccccggcgacatcagagctcgtcgacgccggggactctgcgcggcggctagggagttcgcccgccggagcaagggctgggcgggacaaagagaagaaatctgcagcgaacccatggcgattctgcccctctcgatttcccactctcttacctccgccttgtccgccacctcctccggcatcggcaggccagttgcccgctctcctccacccgcgggtcccctcccgtcccaccgtcatctgcctcgccgcgccgcccaaggtacccgtccccatcgcctcaccggcttcactaggggacgacccttccaaatgggacccggccgagtgcgacgcccttctccgcggcggcgagcaggtcgcctccgtgctccaggagatgctcaagctgatggaagacatggagatggatggctcgtttgaatcattggctgtggagttgatcgctcaaggagtcattgggataagagttgatgagatggaatctggctttctaatggcacttgattacatgatacagcttgctgagaaggatagtgacaatgagcgtaaatctctccttgaggtagtcaagcagacagtgctggatcatctcacaaaaaaatgccctccacatgttcaagtggttggacttctttgccagactgaaaagaggatagcagacatg

SEQ ID NO: 392628 - DNA, 542 bp, Oryza sativa
tcttcctttcctcaggtcggggcgctggctgagaccgagcggcggctgctcgttgcgatcggggcagcaccccgcttctcccgtccaatccggcggtggctcggtgacgagaggaggggcggcgagagctcggctcctccctcgcctcttctcccctccaatcccggtggcagcggcggcggcggctccgcgacaaggaagggcggcgggagcttggttcctccctcccctcttctccccttcaatcccggcggcggctcggcgacaagtgcgggacaagggcggcggctcggcaacggcggctcagcggcgacgacgacgacagcgacatgggaggggccttggcgactttgacgacgaccgtgacgacggagggcctcgtcgacatcgacggcgcgcggtggacggcgacgagcggatccggcaccaccttctccatccaccgcgccacctccatctccgcccccagccacctcgtcgcccttccccgcctcgctcccccagccagggaagggacggtggcccgcggatctgccgcctcc

SEQ ID NO: 392629 - DNA, 596 bp, Oryza sativa
  unsure (1)..(596): unsure at all n locations
agaatcgaaggcgtattccggtgttttaatgaaagaagcagcaaaaacacaagagataagtgcatatgatattgaatgatagtattgaacttgttgaagtctgaagaaggaagaattgatggtatacaatggtgtatgaatggaagaagcagcaaaaacacaagataagtgcatatgatatgttgtacagtaagttttgagatgaaagctgagggtgctattatccaactcattatgttcatatagtcatatgatctgcctcagtgataggtatttgtggtacatatgcaaatgacaactccagatttatatcatacagctgaaactgcaccaccaattttctttcaacgtttagccattcgtcagctctgctttgaggtactagctgaagcattaccattcaatctgaaagtaccataatntgcatgggttttttttctgcatcctactgaagattccagccaacctagaagcattccctgtgtacaaagagcagcctgcctaatcttattggtgtcaataatatacttgagttcaaagttccctgtttgaggaggcaaattcagtaccatttgttcaagaaatctccacgtctt

SEQ ID NO: 392630 - DNA, 619 bp, Oryza sativa
ccgaactcgcaacctaaacacctccctcttcgattcacttcatcttcctcttctcttctcgtctcttgtagtagtatatatttataaagcccccaaacaaaagagaagacaactgaattagttcgatcgatgcaggcaggcaggccttctagttctacaaagatgcctctaatggatcggtttcctttcctatcgatggcttgattgatacaaagccggttttttcactcctcgggcgtgcgtttcttgacaccggccggattgatctatcatccatccatcgagtcgagtcgagatcgatcttgatctcgatctccatcgatggaggaagcccagatgggagacgttgccaccatccgagccggtctggcgatcctccaatggtggggcttcaacgtcacccgcctctttttgtacacatgggtctttcagagattgggagatcaagactcctcttactggctcgcgtgtccccatttatatgcgctttgattggggcgtacatatcaaatcaaattttcaagaggggaacccctctgtttggcgtcccccccagggatcggtcgacatgaattttcccaaggccatttgctttcctaataaacatcgtcctggaaaa

SEQ ID NO: 392631 - DNA, 442 bp, Oryza sativa
aatggatcgttttcctttcctatcgatggcttgattgatacaaagccgggtttttcactcctcgggcgtgcgtttcttgacaccggccggattgatctatcatccatccatcgagtcgagtcgagatcgatcttgatcttcgatctcgatcgatggaggaagccaagatgggagacgttgccaccatccgagccgttctggcgatcctccaatggtggggcttcaacgtcaccgtcatcatcatgaacaaatggatcttccagaaattggagttcaagttccctcttactgtctcgtgtgtccactttatatgctcttcgattggagcttacatcgcaatcaaaattctcaagatgaaaccactgattgaagttgccccagaggatccgtggagaagagggggcccaatgcatttgtgttctgcataaacaatggactggga

SEQ ID NO: 392632 - DNA, 311 bp, Oryza sativa
ttgctactcatcatggattagttgagttgagcaccgccaccaccaccacaccacgacagacgggccaatccacccaaccggctccacttccctccccaccgcgccaaattcccaccccctcctccgccgccgccgccgccgcacgtgcgcctccacctcctctccattgccgccgccgcggcacggtcaaccacccccacccttcggcggagtcgcggaggaatgcggggggggcaatagaaaattcgctcgctagcagttggcatggcggattagtttaatcttgaagtccttggtggtggtggagagga

SEQ ID NO: 392633 - DNA, 504 bp, Oryza sativa
gagttctacgtgacaggagagagttatgctggccactatgttcctcaattagcacaagctataaagaggcaccatgaagccactggagacaaatcgatcaatctaaagggctatatggcaggaaatgctctgttcgatgatttccacgatcaccttggcatatttcaattcatgtggaccaatggcttgatttctgatcaaacatacaggctactgaatgttttctgtgactacgagtcctttgtgcatacatcttcacagtgcaataagattcttgacattgctagtgacgaagctgggaaaatatcgattcgtatagcatcttcacacctactggccaggcttctttggcctcctcagggaccaaggcatcgaaaggaaaagggtacattctgttggggaaatgggagaccggtatgatccatgcactgaaaagcattcacctgtatacttcaatctggctgaggggcaaaaggcacttccatgttagtccgatcatcacca

SEQ ID NO: 392634 - DNA, 526 bp, Oryza sativa
gcttttacatgagcaaacttagtgcagcgatcttgcacgacagaaacttgtgatctgcagccccaactggatctatcatccacaatacagactgtccaacttgaaggaatacgctctgaagacatgaatcagataggtgttcagtccaactctgcactaagttctgaacagctcacccagcctcttccagtggcaccattagtgtttaattatcaaagatttagtgacgaacctctcaaaaatgagctggaaagattaaaacataccagcaatgttcttagtaaagttcatgaacaaaagagaaaacaactcctagtggagtataaccaagaaatggagaagctaaaacagaaatatgactcattacttcaaaaggaagattctttttacgctcagagagaggcagaactcgatactatctccaggaaagtctttataaaccaatcactggctgagaatcttcgaggaaatttctaccattatctgcagctcaaggggatccacgagacccacaattgggcagctg

SEQ ID NO: 392635 - DNA, 1180 bp, Oryza sativa
  unsure (1)..(1180): unsure at all n locations
cctttgcagttctcactgcacaggtataaagaaaaggccacgcctttgcctcgtcagttatctcttcgtttcttcttcttcctccttcgacgagagcaagcaagaagccatggcggactacaaccgctacggctacggcggctacggctccaccccgtcagcgccacccgcctcctcctacggctacaccaccacgccctccgccccaccggcctcctcctcctcgtcctacggctacggacatggcggcggcggttacccgtcctccacctacccaccgccgccgccgtcgtcgtcgcaggcgtatcccatggggatggggggcttcctggtgttcccgccggggacgcacccggacgtggagcgcgccttcagggccgtggaccgcgacggcagcggctccatcgacgagcgggagctgcaggacgcgctctcctccgcctaccaccgcttcagcatccgcaccgtccgcctcctcctcttcctcttcaacaaacctgcctcccattccccctctcgcatgggtccagcagagttcgtgtcactgtggaattgccttgggcaatggcggggcattttcgacagatacgatagggacgggagtggaaaaattgagaaagatgagttgagagaagctctacgcagtcttggatatgcggctccacctcctgtccttgagcttcttatcgcgaactacaacaatcgagtctccagccgtggcccgttggactttgacaactttgtggagtgtggaatgattgttaagggtttaactgaaaaattcaaagagaaggatacacgctacagcggctcggcaactctttcatatgacgggttcttgtcaatggtcattcccttcattgtcccttgacttcttcgggtgtctcaagacccaaagagctttgaatttgtacagcttttcagctatgtttctgcttcctagttggatttgtttgtgcaaataggccttggtgattttattgactctgtgccgtactgtgtacttagtaccattttgttttccctatagcctatatcgactgttacctgtgattgcgtctcggttctgacatgctttgatcttagttatcctcaaatgtaattgccttttgatgctaacagataatatgggagagtaaactcagcatctatgttcagtcnnnnnnnnnnnnnnnnnnnn

SEQ ID NO: 392636 - DNA, 516 bp, Oryza sativa
tcgtttagcagcggcagaacgccgtcatgctgacggagggcgccggggccgcgatacgggtgcccgagtccaaggggaaggagaagatcgcggcggtcgtcagggagatgaatggtaggggaagggaggggcgcggcggtgcgtgctaaggtagctgagctacagaagatggcgacggatggcctccgagaacggtggcgccgccacgtcagcgctcgatgaggtggtggacaagtggacaggaggggagaagtaggtggcatcttgacaaaatacacttggccatatatatgcacctccttgatggctgtacggtgtgtctactcctcttgtctcttttttatcatcgtgcactggattttcttgttaggtagtacgtgtggttcgcatgtacgtgaggagattagatttataatttgagtcccattaataaaaggggaccatgtgtttataaaaatgccttatggctaaaaaaaaaagaaaaaaaaagggccgcccgttttaaagatccaagtt

SEQ ID NO: 392637 - DNA, 533 bp, Oryza sativa
attctctgcaaaagcagtgatctcagtgccataagataccaaccttcctaagctttggaagacatggtctatcctcttcttttgcttgagccacacaaatccagtttcctcaacatagccacactccattatgtccttcaagggaagaaggccatttgggaggcctgcttccttgagcaagagccttgtgcattgttgacagatctcatcatcatagtagacctccgccttggccttgatttcatcagcaataacaagagccatcttctatgtatctcttctttttttcagctctgaggcagtttttggaggcttggctttgtatggtattatggctggcgttgttcatagtgaaacttggctacctttatataggaaatgccttgtcaaattgtgccttaacatgcataggattttccatcttgccattgtcaattaaggatggacaatatatcatgctcatataaaagctgtaggggcctctggctgagagtacttttgcaatgatgcaaaaatatcatcccataaactgt

SEQ ID NO: 392638 - DNA, 887 bp, Oryza sativa
  unsure (1)..(887): unsure at all n locations
tggctgctccaaccccgaccgctccctcatcctcgccttccgcaccatcgccaacatggccgacaggttaggtcttgtggctacaatcaaggaccgagccaatgaaatatataagaaggtggaagatctcaagtctatcaggggaagaaatcaagatgccatattagctgccctgtttgtatattgcttgtagacaagaggatcggcctagaactgtaaaaagaaatatgttcggtcgctaatggagcaacaaagaaagagataggccgagcaaaggaatttatcgtgaagcaactggaagttgaaatgggtcaatctatggagatgggaaccatccatgctggagatttcctgaggcgtttctgttcaactcttgggatgaacaatcaagctgttaaagcagcccaggaagcagttcagcgttcagaggaacttgatataaggaggagtcctatttccattgcggctgctgtcatttacatgataacccaactctcagatgataagaagcctctgaaagacatatccttggctactggtgtggcagaaggtaccatcagaaattcatacaaggatctgtatccctatgcttcaaggctcatcccaaacacctatgccaaggaggaagacctgaagaatctgtgcacaccataggaaatttttttcttttcttttttgtcacataacatggaaattagatttgccagagaggagtaatgttgtccttggatgtgagttttactggcccatgtatcactgcacctaattttatgtgcatggacctgttagaacaaagttatctcgaatcgaagctaagttatatgcaaagcttatttaggaatggcaaaaaaaaaaaaaaannnnnnnnnnnnnnnnnnnnnnnnnnn

SEQ ID NO: 392639 - DNA, 1102 bp, Oryza sativa
  unsure (1)..(1102): unsure at all n locations
ggaaaagccaggtcacagccccttgtttggctatgattattggtatcaacctcgtcacaagacaatgatcagttcatcatggggagcacctgcagctttcaggactggttttgatcttcagcatgtgcaggatggtctctatggaagacatctgcacgtgtatgactggcctggtggtgagctcaagcagacactagatttaggcagtacaggtcttcttccacttgaggtgaggtttttacatgatccatcaaaggatactgggtatgtgggctgtgctctgacaagcaacatggtcagatttttcaagactgcagatggatcatggagccatgaggttgctatatctataaaaccattgaaagtgcgcaactggattctgcctgaaatgccaggactgataactgattttgttatctctctggatgatcgctatctctacttggtcaactggcttcatggtgatatcaggcagtacaacatcgaggaccctgcgaagcctgtgttggctggacaagtatgggcaggaggccttcttcaaaagggcagtgaggttgtgtatgtaactgaggatgacaaagaagagcagtacagtgtgccccaggtcaagggtcatcgacttagaggtgggccacagatgattcagctgagcctggatgggaagaggatatatgtgaccaactctcttttcagccgatgggacgagcagttctatggccaagatcttgtcaagaagggctcccacatgttgcagatcgacgtcgacactgagaaaggaggactatcgatcaaccctaacttctttgtagattttggtgctgagccagagggtccctccttggcccatgagatgagatatcctggtggagattgcccctctgatatatggatataaagatcttgaaggatttgcatacactcaggtgttgattcatcctgtgtattccctgtaactaagactgtatgcttgctgtggtctatatgtaatttcgatggtaacaagtccccataatacctagaacattcactccatggctcatttggtaacattagcttaataaagagatgtatccaatggtgcnnnnnnnnnnnnnnnnnnnnn

SEQ ID NO: 392640 - DNA, 727 bp, Oryza sativa
gtttgcatcaacacaaaaccctagacttgcacagatcgagacgagagaggctagcagcaacattcttcgacaatggctagccttgcaatcttcgccgctgtagccttcgttctcctcgccgcctcggtgtcgtcgtcgtcggcggctttgtacaccgtcggcgatgcgagggggtgggcagtgccgcccacaggctcagagtcgtacaaccattggggtctaaagaatcgcttccgcgtaggcgacgtcgtggagttcaagtacgtgaacgaatcggtggtggtggtgaaccacgagggctacaggaactgcagctcgctgagcccggtgatccggttcacggacggcgacacccagtacctgctcgaccgcccggggctcgtcttcttcatcagcggcgtgcaggagcgctgcgagcgcggcctgcggatgaggctgcgcgtcaggcccgccgctccggggccggcgcaggcgccggcgccggggccaacgagggcggcgctgacgctgcgtcgtccacccatcggcgctcccaggccggccgccgtcaccgccgcgttcaccccgacatcgccgtccgcttcgcgcccgagcgccagaaccagcccgagtcccagccctgggccggcacaggcgccgagcggtgcatctggccgcgcgctcacgggcttctccatggcagcagcgcttctcgtcgtgtgtgtcgtctccgtgttcatcttggttt

SEQ ID NO: 392641 - DNA, 703 bp, Oryza sativa
  unsure (1)..(703): unsure at all n locations
caacagcccncccccaccagggggggtccttttaatgcctcgtgccgttcctcccccgcctccacctncatntccaccaaatccaggtgctcctccaagctaccagccccatgcaccaaatccgcaagcaggctatacaaactatcagggtggtgggcctggttaccaaggtagagcccctggctatcaaggtggcaaccaggaataccgaggtccacccccacccccaccctctgcttaccagggcaacaaccctggataccagggaggagggccaggttaccatggtggcaacccacctccttatcaagccggcaacccacctccttatcaagccggcaaccctgtctttgctggtggtgcaccaggctaccaaggccaaggaggcaaccctagttaccagcaaggcagcgataactacaatgccggtgcgccggcctataagagggatgagccagggaggaattaccagtagaacaacactgctagaacaaatgatatgtagagtctagtacgagcataacgctatttgctgtctgttttggagtctatcgcatgtatactcttaccctgctttgcaaactcagtttcttttgtgtcgactaattacttcgatgtgtctgaaactggcgattgtttgaggcacttctagcattataaatgtttagtcaactagtgttttttgtccaaaaaaaaaaaaaaa

SEQ ID NO: 392642 - DNA, 749 bp, Oryza sativa
  unsure (1)..(749): unsure at all n locations
ttcataagtagtccctgttttagatagngcaactcagcatcttttggatgaaaatatccagttactaagccagattgccgaaaatatcgaaattttcaagacggtggagaatatggatctctttctgcggacgaataataatatcagaacagttcttaaaagaatgagtgagacgcctggtatcatgggtcagatgcctcccttgccagtacctgtaaatgaaggcagcctgaatacacttctccaaatggacagaatggttggtgcctatggtataccatgaaactcccatatggacgcgggactgatgtaaaagatcctgtttggaaagggggagagatgtattgcatagcatcctatcggggaagttgacagagaggagcctttgcctgatttgtactaatggcatgaagacaaccaaaggatgctagagcttagactacccaaggtgccacgggataagtaatgttttttgaggattttctttctctttttcctttgaattgttttagctgccgtgtgtctatccttgattattggggaagaacatgccatcagtcaggcgggtatgcgggtactttcttggttgctgcaagaaagtggagtacatgctgccgctgcactttattcaatagaaagggaatgtctgtaaatattgggtcaggtgtggtggtggttggtattctaagaccgctgttaatgtaaaagaacgtctgttctctcggtacagctgattcttcatccaaggg

SEQ ID NO: 392643 - DNA, 891 bp, Oryza sativa
tcgtttcactcccccatctctgtaccaaactggaggttagaattcagagatccaataaccaaaagcaagaacaccatgagagccccatccttcttcttcctctccctcctcctcctcctcctcctcatccacatctccatccattgcaatgctgcagattcccagctaggttcagagaaggtcaccaacctcctcttctacctgcacgacaccctcagtgggaaggatccaactgctgtcccagttgctcgtgctgagaacgctgtacccaagcctgataatccggtacccttcagcacgatctatgtggtcgatgatctgctgacagaggggcctcagagagaatccaaggtggttgggaatgcgcaggggatgtacatttcgacagccaagaaagggctcacgcttgttcttgggatcgatttcgagctcactgatggcccctacaaaggcagctcgttcgtcgtgtactcgcggaacccggtcatgcaggggaatggcagggagctcgccattgttggtggccgtggtttgttcaggatggctcgaggtttcgccttgcttcagactgtttatctggacaacgtgaacggcgatgcgatcatagagtataatgtgactctcttgcaccattgagttgtttttttttttttggaataagagttgagttgttttagttattatgcccgtgctttccgttgtttggagcacaataagtgtgatctgtggttgggtttgtcaggttatgttttccatttcttttcttttgtttgtctactctccaggtgatggatatgtcatggaaattcgtagaaatgtttgcctggttgaatctccattttggatgtgtggaactgtgaataaacattatgtttgctgttttcattaacc

SEQ ID NO: 392644 - DNA, 632 bp, Oryza sativa
  unsure (1)..(632): unsure at all n locations
ccccccatggttccccagatngcccgccggctaccgttnttgattggtcaattcaggtttncctctgctagcagtagccccaacaaagctgctgtgtgctttcaccaccaccgccgcgctagagaaanctcttttttcaagtagtntatgggaaggcggaacaagcatcagcccgttctntcacaacatgatctggttagagaaanccgttgagagcttgatcccttggagcgcaggaagaagattggcaccacacaacataagncatttgtggatggttnctgcatttgcaatgtctggctnccttttcggtgctggggtcgctacccttatcaaagggaacaacagacgaactcctgaagcggcaggaactaaggaagatacaacagacgaacactaggagtcggcaggatctaaggaagaagcttggacgactagaagagtaatagtactcaattccaaatggactggaaatgattctgtaatcaaatgcctctaacaagctgtggtaaccttggaccgtctatgatttaaatcgttgttgattgggacctcccttttatatcatgtaacttagctgctgttgcgagttctctgaaatgcttgtcacttttttttnnnnnnnnnnnnnn

SEQ ID NO: 392645 - DNA, 706 bp, Oryza sativa
ggaattcacggctacgaatcataatgggagtagcctactgcctggagcacatgagccagctagatcctcctcctcttctcccaacaaatttgagctcatcatccatctacctcaccgaggacaacgcagccaagatcgccgacatcgaattctggaaggatgacatcaacaagcaggacgaccaagaaagcgtggtgtacaagttcgggatactggttctggaggtgatctccgggcggcggcctttctcccaggacgaccggctcctggcgcggggggcggcctgctacctggacggcaagaggccactcaccgccatggctgaccggacgctggtgaggtcgtcgtctgccgcgccggagaaagatgtggcggcgctgtgcgacgtggtgcggcagtgcgtgaggaggccggagggggggaagagagcgataagcatgggcgaggtggcgaggctggtgaggggcatcgccgggttgtcgccggagcaggcggcgccgagggagaagcccctgtggtgggcggagcttgagatcgcctcctccgaaaccgcctgaaattcagttgaggccccaaaattagttagtttcagagtacatatgcgtttgaaagcctgaaactgaaattcagtgcgttctctcttctttctggtatcatataccctccgtcccataaaaaactaacctagtccacatcataatacaac

SEQ ID NO: 392646 - DNA, 586 bp, Oryza sativa
cccaccaccgtcacgtcgcccctctgctctctgcactgctgcggcgaggagctagctcgagccggccggaagccatggccacggcggagcagcggcagatcgagcacgtccacctccccgtgcgggggctcaccctccacgtcgcgcaagccggcaaaggggagctcgggacggtggtgttcctgcacgggttcccggagatatggtactcgtggcgccaccagatgctcgccgtcgccgccgcagggtaccgcgccgtcgcgccggactggcgtgggtacgggctctccgaccagccgccggagccggaggcggcggtgtacgacgacctcatcgaggatctcctcgccatcctcgacgccctcgccgtgcccaaggcattccttgttggaaaggattttggggcaatgccagcttacgactttgctctccgtcacccaaaccgcacatgtggtgtgatgtgtctgggcatccccttaggcactgctggtttggcctttgacacattgccagaaggattctacattttacgttgggcgcaaccaggaagagcagaagctgactttggcagtatgatgtaaagaga

SEQ ID NO: 392647 - DNA, 1069 bp, Oryza sativa
tcgttcaggttctgaatggaagtccttgaaggtccaatgggatgaagtcacaaatgttaatggccctgagagggtttccccttgggaaattgaaacatgtgatggcactgcacctgccatcaatgtacccctgcagtcagcaacgaaaaacaagcggcctagggagccaagtgaaactattgaccttcaatcactggaaccagctcaagagttttggctatctggaatgccacaacagcatgagaagacaggtattggttccagtgaacctaattgtatctctggacatcaagttgtttggccaggcgagcatccaggatatggtgccgtgagttagttcagtttgtcagaatccgctagtacttgaaagttggttgaaggatttcaactcttcaaacaagggtgtctcccctaccttgtcagagatttctcagaaaatttttcaggttaccagcaatgaagcaagaattgctacatggcctgcacgttctgcttaccaagctgaggagcccacttccaagttgtcttcgaacaccgctgcctgtggttaccgtactgaagaagttgctccaaatgcgtccaaggttgttgaaggaaaaaaggaacctgccatgtttcgtctgtttggtgtggatttgatgaaatgtaccagcatatctactaccactgatgacaagtcaagtgtgggagcaggagaagcttcagccaaaggtactggttctcacgaagactctggtcagctgtcagcattctcaaaagtgacataagagcatattgctgcggatgaaagcccccaagagatccaaagccatcagaattacaccgctagaactcgcataaaggttcaaatgcatggaaatgctgtgggcagagctgtggatctagctaatctagacggatatgagcaactgatgaatgagctggaagagatgttcaatataaaggacctcaaacaaaaatggaaggtggctttcactgatgatgagggtgacacaatggaagttggagatgatccttggctggaaatttgccagatggtcagaaagattgtgctctatcccattgaaga

SEQ ID NO: 392648 - DNA, 724 bp, Oryza sativa
caagataagatgctctagattaaaattactcttttgtgctgtttttggttgtatcattgtttgatttatttggggatcaagatggggttttttttttttttttgaaggaatcggactcgactcctatgagggacgatggacgaaaaatcgcgggtgaaaaggacgtgacgaccggaaaaatacgaatatttatatatatgtgtgtgttggaggaataccacgaggaccttcggccgggcctaccaaaaccaaggacaagcaagggcgcaggccggaggtaagcggcgaaggtcgaagagacaacataggcgaaagccacacggcgaaagttgtggcatggagtatacaaccttcgctgaagatggaccttgccggagggacatacggtcgaaggccgcgaggcgaaagccttgccacgaagggcatgggtttcgccgagtgtcgaacctcaccgggagaaggcccagcgggccatcgcgccttccggaggctccgccaaggactaggccaagccacttgacccattaggagcccgtgcaagcaaaagacactatatgcccgtaatgatgtccctatcataacggcaaccatgaaaattcccctgtaaagcctaaaccttaagggaggagtctgtaatagggctataagtacgtagccccctaaggccatgtaacaaagggatctgaaaaaaattctactaaacaatacaattgtctttacttcc

SEQ ID NO: 392649 - DNA, 476 bp, Oryza sativa
ttagatgatgaacaagaagaggaggagagatgaagaagcatgatatggaaggaggaggaggaggaataagcaaggtggtgagggagcacaaggccaggctctacatcatccgccgctgcgtcgtcatgctcctctgctggcatgactgatccaatccaatccaatccatcaaccaacccatatgcaggcaatgccgacgctcattcttagcgtagtccctgaaattcttcattcaggtcgtcgtttatcatttttgttctcttacttcttgttgtaattctctatcttcttcttcttctgatcttcaagcccgcttatatccattagctcattaccaagcttgtatatatgtctatttagtcttctaaccaatgatattatagcaagctagatatatagcttaatatttaaaaaaaaaaaaaacaaaaaactaaaggacaagccaatgcaaaaagaaccaaatccatgaaaacgag

SEQ ID NO: 392650 - DNA, 652 bp, Oryza sativa
  unsure (1)..(652): unsure at all n locations
ggtaggaaggancttttcgtggtgtagtagtagtagctggtgctttatatgtatcgggtaagccccgcagtaccccatttgtagatggtgcttgtcctggtatcagttgcccgctcttcgttttcgacaagttttgggtgtgctttgttgaggttttaagttattgtatgatatgccccgtagtagtgaaaggtgctgaggccaagctgccgcgcccggtgcgcttgcttgtcgcgctcttcctccctcctaagccttgtaaatagctttgcttccccccctttcttcactcagttctaatatgttgcgaactgcggtaatcggtgtacccctcaagaaggcaaggcaatttgaccctaaaatgttgccattttaacatccaaaaaaaaaaaaaaaaaaaaaaaaaaaaaaaaaaaaaaaaaaaaaaaaaaaaaaaaaaaaaaaaaaaaaaaaaaaaaaaaaaaaaaaaaaaaaaaaaaaaaaaaaaaaaaaaaaaaaaaaaaaaaaaaaaaaaaaaaaaaaaggggggggccctttttagggacccaagtttctccccccgggggggggaggtaaaaatttttttaagggggacccaaaaaaaaaaacacggggcccggttttaacaccggggggcgggaaaaaccccggg

SEQ ID NO: 392651 - DNA, 469 bp, Oryza sativa
  unsure (1)..(469): unsure at all n locations
gctgaaagctgcgcgagatgatgcgctgggccagggcgcgtggtgaggcctgcgccgccaaggacggccgcggctgcgagggctgcggcggcgcgcggttcgtcccgtgctgggagtgcggcggcagctgcaaggtggtcgccgccggcgccaccgccgccgccgccgacgtcgagcggtgcgccaagtgcaacgagaacggcctcatgctgtgccccatctgccactgattgtgctccaccgccgcgaatccttctagcgtttaatccgcgcccatgtatatttatccataatatactcgtataattgtgagtttaaactacactctattagtggtttataaatgagaattgaaatggtatatagtgcttgtaatagtattgtatagcagtgtattttttgtaaatcttttttgattaattattggaacaaatgctaatngtttcgtnttaaaaaaaaaaaaaaaaaa

SEQ ID NO: 392652 - DNA, 556 bp, Oryza sativa
acgatgcgtcgcttcccctttccccccctcctccgccgggcgctttcatcccccacccactccactgtccccgctctccccccattgccgccgccgcctgcgacggccgcgagctcatcccgggacgacgtctctagctagcagcgaccgttctttctctcctcgggctctcggtgctgagatacggcaaatcaagagagcaaaattttggtggtacatgtggcgattctatgtcgacaaggcgtcatcttgcagtatttaccactgcaagcctcccatggatgacaggaacggccatcaacccgttgttccgggcggcctatctcgcacaggatggcgatagggaggccaccttggtaatcccctggctttctctgagggaccaagacttggcttacccgaataacattgtgtgcggctcgcctttggagcatgccgcctatgctcgccgctggattgaggagaggatcagtttcagaccttccttcagcatcaaattctaccctgcgaagttctctaaagaactgagaagtattctacctgttggagatatcac

SEQ ID NO: 392653 - DNA, 613 bp, Oryza sativa
  unsure (1)..(613): unsure at all n locations
gaggtgcctgaagacgcaaccaagggtagggatgttttgaatgtataacccccaccggacgagcttttggctgtatcagatttagggaagactgctacaacatcactccctgataatttggtgatgcatacttctatgggtgatattcacttgagattatatccagaagagtgtccaaaaactgtggagaatttcactacccattgccggaatggttattatgataatctcatatttcatcgtgtgattaaaggctttatgattcagactggagaccctttgggggatggcactggtgggcaatcaatctggggaagggagttcgaagatgaatttcacaaaagcttgagacatgataggccttttactctttcaatggccaatgctggaccaaataccaatgggtcccaattctttatcacaactgtggcaactccatggctagacaacaaacacacagtgtttggtagagttgtgaaagggatggatgttgttcagcaaatcgagaaggtcaagacccgacaagaatgacaaaccatatcaggatgtgaagatctttgaacgttacagtttccaaagacataagctcaaacaattgggttttgccatttnt

SEQ ID NO: 392654 - DNA, 515 bp, Oryza sativa
catcctcctcctcagcagcagactacccagaactgaaaggccttaatcttaatagaggagtagatatagcctgctaatgtgctcatcagatgctaaataatgccaatgcacctgtgatgtacagctagctggaaacaagtgatggtatttattgacgcagcgaacaaggcctgaagactgaatgaagttgctttcagtttcaggctttcagcaacttgggctggtatagatgctctctctgtatctgatgttccattgcgtgataggcagcaggagaagaggatagccgaaaggcttttgatgcggcaatgtgtactgccgcaaagcaacgtgcatttggttgcagagccgaactcttggcacctgtggtcacttgcttgataaggtgtatcaacactgttgctattatataatttcaagtctgcgttttctatattgttatagatattgctgctgttgtattccttgaatctgttatgtacttctgtgggagattgtaaccctcgttggtttcc

SEQ ID NO: 392655 - DNA, 685 bp, Oryza sativa
  unsure (1)..(685): unsure at all n locations
tttgattccacgcgcccgatcagtggactagnggagtgacgagagcncgtcggttttgcttggctaaaatcgccgatagaaacttgaggaatcgagcagctcgccgcgcagccatgggtacgcgacgcgaagggctcctcctcctcctcctcctcgccgccgtactgctccagcccctcctcgcggcggcggcggcggagggcgtggtccgcatcgcgctgaagaagcggcaggtcgacgagaccggccgcgtcgggggccacctcgccggggaggatgcccagcggctcctcgcgcggcgccacggcttcctcaccaacgacgccgccagggccgcctcgaggaaggcgagggctgaggccgagggcgacatcgtggcgctgaagaactacctcaacgcgcagtactacggcgagatcgccatcggcacgccgccgcagatgttcaccgtcatcttcgacaccgggagctccaacctctgggtgccttcctccaagtgccacctctcgattgcttgctacttccactcgaggtacaaggctggtcagtcgagcacgtataagaagaatggaaaacctgcttcaattcattatggaacgggtgcaatttctggctattttagtcaaggacagtntgaaagtttggtgatgtagctgttaaaaatcaggattttattgaagctacg

SEQ ID NO: 392656 - DNA, 786 bp, Oryza sativa
attcttttggctgggggagattctggtgatgtatatgaacagagaggagcaggctttgatccagtcaatgggaggagtagagctattcggctgcaatccaatgatgaactgatgatgtctggggaagggggaagatatatggatggtgaaattaaggagatagaagctggtggtggaagatacaggagagggacaagtgaggacttcatgctctatggccaggaaaggtccatggataggaggagtgctttggatcctcttgcagaggcccggtacaggaatcctaatcaggtggacaagaatggatatgccgcggctgatgagtcctttataattcctcttagatctggttcacaagataatgttgggccggaataccgagccacgattgacattgatgttgagcttcctacaaacactaagaaaacttcagatgggaaggctggaactcaactcttctatgagccggatgaattgatgccagagcgtggatctgaagatgcttcatttggatatgatccggcaatggattacgaaagcaacatgatggtcagagccgtcaaggttgaagacagtaatgacgaggatgtctcacatagtaatgatggcgatgtaaagaaaccagcgaaggagaagataaggggtacaaaggatggttcggataaaagaaggagggatgcaatactcaggaggctctctgctccaagcaccccactcaatgatgcacagaaacgtgcacagaacatgcgagcatataaagctgatctccagaaactgaagaaagag

SEQ ID NO: 392657 - DNA, 856 bp, Oryza sativa
ttggaactgcttgtacgggaaaatcaacaattggtactcaactagctggaaggctgaatttaccaaatgttttgcagacagacatggtgtatgagttgctacggacatcaacagatgcccctcttacttcggtgcccgtgtgggctcgggattttgattctcctgaagagcttatcacagagttctgcagagaatgcagagttgttcgcaaaggtttggctggtgatttgaagaaggccatgaaagatgggaagccaattatcatcgagggaattcatttggatccaagtatttatttgatggacgaggaaaagagagatgataattccaaaatggagaagaaggtagctgatcctgaaaattcaccagcaactgtaaagagcaagacagaatagcaacaagaaaacgaactacatgagaagagaatggatgacagtcaggagtgcatgtctgaggagggtagaataagtgaagggctatcttgtgctaaaagccacgtaattagctcttctgatcctgcatgttctaaagagaaaaatcccagagctgaaggtgaaggacatatggatttggacctacagaaaaacaacgccaccaagaaggacaaacctgctgctaaaccaataatagtcccaattgtgttgaggatgtctgattttgatcacaaggcattgttagaggaatggatagccaccagggcttccagggataattgtcttcctcaggatcatcgaaagcttataaacaaccttaagcttattcaggactatctttgttcttttgaatcacagggattgaccgttgttgacatttcagcgaactcattccctcagacactagattggcttcacagcta

SEQ ID NO: 392658 - DNA, 478 bp, Oryza sativa
aacctccgcccctcgccaggaatgtcaccgccaacgacaaggactaggcaccgcgggaggatctccggcccgaatctcgccgtgcgccccaactctaggccagcggcagatctggtcccgctggatccggcctccgtagtccacagcctcgccgcggacggcatctcctcgccggagtcgctctcgctgctccctcaccagccgccaccctgcagcgcttccccccaacatcgacagcaacaaagctccctgaagttcaacatctgtgttttcccttttctgctaaggtcagtgaacttatcccaaaaccacagccgaagacaagattgaatcataaggtcgcttggatatatggggacatttcaaactagatgtgtttaacgtatatgaattatagttgcatgtagcatgctgaatagaacttgaatagatcggtgaatgaaaaatgtggatgggatatatataacttggattatgt

SEQ ID NO: 392659 - DNA, 675 bp, Oryza sativa
cggttggttggtgaaacattagatgcatttttccaagtgggcattccaatgcatccagtgcttcttcctgacctgatgtttggacttgacagaagcctacagctttttgtgcctaaagcaaaatctggctcccgaacagggaagtcttttatgccccaactacctccgttgacacgatgcgaggtaggatcgaatatattgttcaagaaaaaggaaaagccacagaatccacagtaccgaggatcacaaaatggaacaaccaatggcgctgatcccttagcccttcctcaactctgtgtacgcttgaatacgcttcaattcgtgcgaggtgaactcgagaacttagagaagaagataaaaacaggcttgcggaatgtcgagtcagctcaggcagatgttaccgatggattggacatcaaatttgagctttgtcagacagcctgtcaagagggcattcagcagttatgtgagacaactgcatataaggtgacattctatgatttggggcacgttctctgggatatcctttatattggtgacattgcatcaagtaggatcgagatattgttgagagaactcgaccctatactagagaccatatctggtatggtgcataacaaagtgcggaaccgtgctataaccgcattggatgaaagccacttttgatgggttctt

SEQ ID NO: 392660 - DNA, 535 bp, Oryza sativa
ggacccctcgtgatggacacccgcctccccctcctcctcctcctcgccggcgtcgtcgccgccgcggcgccactgctcgccaccgcccagctctccgccgacttctactcctccacctgccccaacgtcgagaaggtcgtctccaccgtcatcgagcgcaagttcaaggaggaccctaccacctccgccctcctcctccgcctcctcttccacgactgcttcgccaatggatgcgacgcgtcgatcttgatcgacccgctgtcgaaccagagcgcggagaaggaggcggggccgaacatctcggtgaagggctacgacatcatcgacgagatcaagacggagctggagaaggagtgcccgcaggtggtgtcgtgcgcggacatcgtggcgctcagcacgcgcgacagcgtgcgcctcgccgggggccccaactacgacgtgcccaccggccggcgcgactcgctcgtctccaaccgcgaggaaggcgactcgctccccgcccggacatcgccgtcccgagctcatggcgcagtct

SEQ ID NO: 392661 - DNA, 649 bp, Oryza sativa
tactaggacagagaggaatatctgtgttattatcggcatgagctgctgctgattgctcggcgcattcactgccatttcaacgccacaaaccacagactgacaagctcatcctgttcccatctcaactgcgggcactcaccaatggcgccgccgcttctcctcgtctcgctcctgctcatcggcttggtcagcgccagagccatcacaccctcagctgaagcggcggcggtgttcccgaaggaagccctgccgaccaactccggctacctccccatcacgacaaccaacgcctcgctcttcttcgcctactacgaggccacgcacccgctcacgccgccggcctgcacgccgctcctcctctggctccagggcggccccggctgctccggcctcgccggcaatttcttcgagctcggcccctacttcgtcaaccgcgacgcgctctccctctcgcccaaccccttctcgtggaatcgccggtttggtctcctcttcatcgacaacccgctcggcacgggcttcagcgccgcgccgtcccccgccgccatccccaccaaccagtccgtcgtcgccgcgcacctcttcgccgcgctgcagtcgttcttcgcgctccagccgggctcccgctcccgccccttcttcctcaccg

SEQ ID NO: 392662 - DNA, 589 bp, Oryza sativa
tccccccggctgctgctgctgcagctgagcctccgttcttggaagcgagagagagggagggaggagggaggcaattggtgaggcttttggaggaggaaagggaagcttcgggccccagcatcctcctcctcctcttgctcactcaccacgctctcctctcaccaaactctctcttatctccttccaagatcccaaccccttttcttctttttttttgtttgttcttgttaggatcattttcttgatctttcaagctcagctccagcactccccccgttcgtttccagctgcagcagagatcttggttagttggatttttagcttccgtgttttttgagcgagttcttggttaattgctccaatccgagaaaaatcactaagtgtgctgtgcttgcctgcctccccccttgtattctgggcttcgattcgagcgaattcgaagccccggcccaaatgtatggattgtcccacccctcctttgtgtaaaaagcgggttccatcgcgtgacccgcacggctcggccgatcgaaaagcagcttgaagaagaaaaagtgagagctcttgattcgattctggtcgtagcaacagc

SEQ ID NO: 392663 - DNA, 689 bp, Oryza sativa
  unsure (1)..(689): unsure at all n locations
gtcagaagacggaggtgctcctctcgactcgagtttggagattattccccccgcagaggccgtcgcttggcgcttgctcgcggagatggcgatgaccgtcgaagtgctcgctggacttgcatttatgttctcaacaagtattcttttgcaaatactggcttgtgctctgtacaataattggtggcctatgttagcagctcttatgtatgtccttgtaccgatgccatgcctattcttcggtggtggatctacccagttcttgactagcagagatggtggagggtggttcaatgctgcaaaattcctgactggtgcatctgccatgggaagcattgcaatcccagcaattctgaggcacgctggcctaattgagactggagccatgttcatcgagttcacgtccttcttcatccttgtatgcacagtgatgtgcttccatagagctacgctggatgaagattggtaaaggctcgaggcacatggacacaagaaggtaaatctgtttcatggtttgcttctcancacgttcaanaaaaattccttantggacactaacatggacatgttttcaaagaaacaaatntttganttggcgtgactgtctgtataaatgctcaaagatttgctgatctaacgacaatgccaatgttctatgtgcactttcatgttgaataccctcncatgatctt

SEQ ID NO: 392664 - DNA, 665 bp, Oryza sativa
gctcctgccctgccgtaccgaatcgcatttcgggccgacccaccctttttttctcgtggaggacgctactatccggttgttgtgtgccatgggagccactattctgaatcgggacgcccgataccaccgattgaacagagagacacgcccgctgcgatgagcatcggcccgtatccaccacattcccttctaccgccagttggacgaggacacgaaggcgaggctctacagcttgttgacccaggtggacgggcaacacatggctgccgtgctgaccacattaatggacgccatcagagccctcgaaaacgaagcaagggaccattactctcgaccgcgccgagagcatgagcagttcggagttcgtgcagatgcctggtaatcgacgggtgctacatccttggcaagttcgtgctgcctcactcctgctgccccagcacttcagacgacggggcgcagaacgggagtgcgatgcagaacatggaattggtgcgcgacgtgttctaccgcctggataaccagatacccttctgtgtcctcgacgagatccacaaggtgctccatggtaagatcatccgctcgtgcacggcggtcgccgacgtgttggtaacccacgtcggtgatctgctcgagaacctgagctactccagggtgcacgcactcga

SEQ ID NO: 392665 - DNA, 613 bp, Oryza sativa
  unsure (1)..(613): unsure at all n locations
gacataaacaaacgaagatgctgctcgtctagttccctgatttggagattcatcaaatggntcatctcagtattagaaatcctttgtctcttctgctctcactgctgttgtcacttttgttgttcattcccttgtctgtagcagacttaacctctgaaaagcaagcccttctagactttgcctctgcagtgtatcgcggcaacaggctcaactggagtcaaagcacatcattgtgttcttggcatggcgtaaaatgctcaggagatcagtcacacatatttgaattaagggtaccaggtgctggtctcattggggcaattcctccaaacactcttggaaagcttgactctctccaagttctgagcttacggtctaatcgtttagctggaagccttccatctgatgtgactacgcttccttccttacgatccatataccttcagcacaataacttttcaggagatttgccttccttnttgaatcctaacctcagtgtagtggacctctcctacaattcctttaccggtgaaattcctataagcttacaaaacctttctcagttatcagtcctgaatttacaagaaaattctctctctggatcccatcctgatct

SEQ ID NO: 392666 - DNA, 611 bp, Oryza sativa
  unsure (1)..(611): unsure at all n locations
cgcgcacctcaacaaacggaataacatttcgaggcccaggagtgaatgaatcaactgctgctagggagcttggggctattccagctgatgcatcttcccatccaaacactagcactgtttcagaaagcaatactgatacagctccggtaaatttggatggcaaccatactggatcagatcaagctaattcgacctctttgaaaggtcaacaagagcagcaagcaaattcaacggatgtgttgaacaaccagataaaactcttcattgacctcacatcagctgctgagttgaattatcgaccaaatgggaccctggcttcggcttcaactgatgctgaaaatgccacttctgtagatagaggccatgatggtaataccggaaccaataaggctgaggaaggagatacaggcaaagacttagatttatcgacaaaaatcatgaacaaggccattagtgaagatgaagttgttcttgaatgataaggagatctctcaggttagcttctggtgtaacctgtaagtctgtagggaccttaagaggagggngganggaaactaagtacttncctcttttcctccagtagganctttnggagganttgccaattacaa

SEQ ID NO: 392667 - DNA, 487 bp, Oryza sativa
aaaaaatatctcctcctcctcctctccgactaaaagcgtcgccgccgccgcgtcgtctccttcctcgcgccttcctctctctctctctcctcgcttccccgcgccgccgccgccgccgcctgagctcggcggcagcaggggcacgataggtggtgtggtgctttgctccggcgcagcgtgctgctgatcgcgcgcgcgatgcccgcgtggtggccacggaagtcgaggtcgaaggcgaagggcgtggggaagccccccggggcaggggcggcctccgcggcgtcgtccccgcgcaagtcgctcgacctcgttgacctctccgcctccccctcggtgaccccccgggcgagggagaaggcgcgcagcctcgactcgccgtcggccgccgcgccgcggcatgggggcgggcggtgtggtggggggttcgggaaggtcgggtacaagctccccggcccgtgggtgacgcggggccgggggggcaggggca

SEQ ID NO: 392668 - DNA, 811 bp, Oryza sativa
  unsure (1)..(811): unsure at all n locations
tgttcaaaccagcaaccacccgccgccgccgccatgtcgggagggatcgcacgcggccgcctcgcggaggagcgcaaggcctggcggaagaaccaccctcacgggttcgtggcgaagccggagacgatggccgacgggtcggcgaacctcatgatctggcactgcaccatccccggcaagcaggggaccgattgggaaggtgggtactaccctcttacccttcacttcagtgaggactatcctagcaaaccacccaagtgcaagttcccacagggctttttccacccaaatgtctatccttcaggaacagtgtgcctctcaattcttaatgaggatagtggctggagacctgctatcactgtaaagcagatccttgttggaatacaggacttgcttgatcagccaaatcctgctgatcctgcacagactgacggttatcacatttttatacaggacaaaccagaatataagaggcgtgttcgtgttcaggccaagcagtaccctgctttgctttgaggacattggcctaataaagttactacccgattcatcatgcacatccgcatagtagtttgcaaaatctcagattattgcaccagaaaatatcggattttatgggatataacctaaaatggaatgtttgaagaactgtccaatatcattgtggactttttgtgctgtcattaccatttgtgctgtgtgaagaacagaaatagctttgtcaactgttgaaaccgcttgagtgatggatgctaatttggataacaaatgaactaaatccctggtnnnnnnnnnnnnnnnnnnnnnnnnn

SEQ ID NO: 392669 - DNA, 559 bp, Oryza sativa
tcacccctttcatgcaggtaggtccatccattgcccgcatccatgggggcactggcattggattaagcatcagcaagtgcttggttggtctcatgaagggagaaatcggttttgcaagtaagccccatgttggttctactttcaccttcaccgcggtgcttatgagggcacactgcagtggaaatgacatcaaatcatcagaatttaaagggatcaatgcattggttgttgatcataggccagtccgtgcaaaggttaccaagtatcacttgcaaagacttggagttaagaccgaactgacagctgagctaaatcagttcatttctaaattaaactctggatcactgactgcaaagctagtgctaatagacaaggaaacctggcttaaggaatcccattgcacgcctcttctggttaacaaattgaggaataatgacaagccagactctcctaagttatttcttttggggagctctgcaagttctcccaagggcggttcagatacatccagggaacataacttgaatgtaataatgaaagccgttcgtgcaagcatgct

SEQ ID NO: 392670 - DNA, 382 bp, Oryza sativa
  unsure (1)..(382): unsure at all n locations
ttgaccctttaancgaaaatgccccaagtataaccccagtaaatgggatcctcagcaaaggctgctatggaacacccctacttcgacagcctcgacaagtcccagttctagtttgtaccatgtgattgacgaagtccatgttctgttgtgtcatttgattataaacgtgttgctgttagcagcaaggaaattcgttttgcctacttagcaccctactttgtgatccaacaaggaaatccgtttgccatctaggcaacttgaatgcagtttgaatgtaaaatgggtttgtttctatgctgtatggcatatgtattatggacaagaaggttgcaatatatttgcctgtttctttgnnnnnnnnnnnnnnnnnnnnnnnnnnnnn

SEQ ID NO: 392671 - DNA, 537 bp, Oryza sativa
gtcttattcctcgccaccacacccacccacccaccaatggcgtcctcccgcctcctcctcctcgccgcgctgctcgccacggcggcggtgctggcggcgtcgcagaagccgaaggccgccacgccgacgaaggccacgccggcgtcgcccggccccgcggcggcggcggccgacggccccgcgccgacgaacgtgacggcagtgctggagaagtccggcaagtacaccaccttcctccggctcctccacgagagccgggtggacacccagatcaacagccagctgatggacagctacaacgggctgaccatgttcgcgcccacggacgccgcgttcgcggcgctcaagccgggcacgctcaactcgctgtcgtcgcaggaccagatccagctgatgctctactgcgtgctcccgcggttctacagcctcgccatgctcaccacccttggcggccccgtgaacacgcaagcgttcggcgccgacggcccgtacaagaacaagatcaagccgtcgaacaacaacgtcaacatctccacc

SEQ ID NO: 392672 - DNA, 617 bp, Oryza sativa
  unsure (1)..(617): unsure at all n locations
acgttttcgtcttcatcgcgctcgcctccgagggcaccgacgtccgcgccctcttcgagctcaccctcctcgaccagagcggcaaggccaagcacaaggtgcactcccacttcgaccgctccctcgagtccggcccctacaccctcaagtatcgcggctccatgtggggttataaaaggttctttcggcggactgctcttgagacatcggattttcttaaagacgattgcttaaagataaattgcactgtgggtgttgcggcatctactatggattactcaaagccacattcgatacatgttccagaatctgacataggctaccattttgggacactgttggacaatcaggagggtgtggatgttatatgtaatgtggcaggagaaaagtttcatgcccatcagttggtcttggctgcccgatcttcctttttcagatctgaactttttgagcatgaatcagatgaagagaagaatgaagttgatactagcaatgaaatcaaagagattgtcattgatgacatggagccaaaagtnttcaaggctgtgcttcattttatggtccaggggccaaccttgttggtgatgatgagttgtctgcatcaagcctcgggcctt

SEQ ID NO: 392673 - DNA, 1140 bp, Oryza sativa
  unsure (1)..(1140): unsure at all n locations
ccccgcccaaaccccacaagcgaatcctagggtttctcgcctcgccgccgcatcgccgccgggaagtctccgccgccgccgcgatgttggagctgaggcttgtgcaggggagcctgctgaagaaggtgctggaggcgatccgggagctggtgacggacgccaacttcgactgctcggggacggggttctcgctgcaggccatggattccagccacgtcgccctcgtcgcgctgctcctccgctccgaggggttcgagcactaccgctgcgaccgcaacctctccatggggatgaacctcaacaacatggccaagatgctccgctgcgcgggcaacgacgacatcatcaccatcaaggccgacgatggctccgacaccgtcaccttcatgttcgagtcgcccaaccaagataagattgcggatcttcgagatgaagctgatggacatcgacagcgagcacctcggcatccctgactccgagtaccaggccatcgtccgcatgccgtcctctgagttttccaggatctgcaaggatctgagcagcatcggagacactggtatcatctcggcgaccaaggagggcgttaagttctcgaccgctggagatattggaactgccaacattgtctgcaggcagaacacgactgttgaccagccagaagatgctacaatcatagagatgcaggaaccggggtcactaacctttgccctgaggtacatgaactccttcaccaaggcaagcccgctctctgaacaagttacaatcagcctttcatctgagctgccagtggtggttgagtataagattgcagagatgggctacattagattttatctggcgccaaagattgaagaagatgaggaaatgaagtcgtgattgtcgcataaggatatgacaaaataccccctagtcttcagaccatcatcctttgcttaacaattgtttgtaagcaaaatgatgttatgcttatcatcgcttacgacggaatgctttttacctttgtatctgtgacttctgtaaatccttggatttacagtgatgaatgttaggtttagtagatttgtgagtttatgactgcattgctgtagcatgattgtgctgctgtttgtttgttcnnnnnnnnnnnnnnnnnnnnnnnnn

SEQ ID NO: 392674 - DNA, 712 bp, Oryza sativa
cctgtactcgatcccaagcgttggcgcaagtatggcaactaccggctgagcttcatggagcgtcactgcccaccggcggtggagcgcaaggagtgcctggtgccgccgccgcaggggtacaaggcgcccatccggtggcccaagagcaaggaccagtgctggtacaggaacgtcccctacgactggatcaacagccagaagtccaaccagcactggctccgcaaggaaggcgacaagttcatcttccccggcggcggcaccatgttccccaacggcgtcggagcctacgcagacctcatggcggagctcatcccgggcatgacggacggcacggtgcgcacggcgctggacacgggatgcggcgtagccagctggggaggcgacctgctggggcgcgggcggggcatcctgacgctgtcgctggcgcccagggacaaccacgaggcgcaggtgcagttcgcgctggagcggggcatcccggccatcctggggatcatctccacgcagcgcctgcccttcccgtccgcggcattcgacatggcgcactgctccaggtgcctcatcccgtggacagagttcggcggcctctacctgctggaggtgcaccgcgtgctccgccccgggggcttctgggcgctctccggcccgcccgtcaactacgagaaccgctggcacggctggaacaccaccgtcgtcgcgcagaaggccgacc

SEQ ID NO: 392675 - DNA, 758 bp, Oryza sativa
ggtgaagctaagcttcttacagaagactgggaaggagcggctcaggatctaaaagaggctgcccagaaatctccccaggacatgggaatccgagaagcactaatgagagctgaaaagcagcttaagttaagcaaaagaaaagattggtataagatccttggcatttcaaagacggcatcagctgcagagattaagcgtgcctacaagaagttggcactgcagtggcatccagataaaaatgtagataagcgagaagaagcagaaaacatgtttcgagaaattgctgcagcttatgaggttcttggggacgaagataaacgtgtaagatacgaccgaggagaggatcttgatgagatgaatatgggaggaggaggaggtggtggtttcaatccttttgggggaggtggccagcaatacacattccattacgatggtggattccatggaggaggaggattccccgggggcggctttcctggaggctttcagttcaactttggatagaaagtttactgcctgtggagttggtgtttgtatgtttgtttgtttgttttaggaacgctgataagcttaacaacaggtattgattgtaggcagtcaagccgatcgatcgagatgagcatcgtatacaagtgttgttttaagcaccatcaaattttcctcaagttgtatccttccttgggattttctgacgcatatgatccaattgaaataaacttagccttactgtggagctagctgtttcactttcactaaaa

SEQ ID NO: 392676 - DNA, 700 bp, Oryza sativa
gttttattcaatattttatcaggggaggttgcactccatcaaagtgttctaaagcgcctatcagaggaagctggaaaaaatgcaatgaatgaacagattgagatggaaatgaaggtggccaatgatgaggttaagcctaataagcagaaaatagcatctctagaaaggcggatttctaattcaatgtcaaatagtcgaggcatgcatgataatttagaactctcactgccttacattgaaatacctgagcaactcaatgagaaagctgtttcaacttgaggcaagtgagtgccaagagtttctgttgtcagaaagaaccacatttcagcaccaacacaggcattgtccaagaaacaggatctcaagctcacaaaggaaagcccttgcccagtgatgtatctgatgaatttctgaaaaaggcgtcacaggcagagattgatgaactgaagcagagggtatctgaactcactgaagccaaatctcaactagattcttgtaaccataagcttctagaggaaagtacatatgccaagggcctcgcctcagtgaccagtgttgagctgaaggcactatcagtaaaagtcaccaaactgatgaagcagaacgagaggcttagcagcgagttggcatcaggaagaaaccaaagaagaagaagccatggtcccaggggagctaggagggaaagccacacgaaacgata

SEQ ID NO: 392677 - DNA, 462 bp, Oryza sativa
agccctttctctctctctcattcttgtgtttcttctcgatcgatctctcgatttctctctgtgcaccagcatcagctatggtgtccgacgccagcaagaagaaggcggcgcagaagaaggccgccgccgctgccaagaggggtgacaaggccaaggccgccattactctctccgagcgcacctgcaccgccgtcctcacctcccatcccctctcccgcgacatccacatcgagtccctctccctcacattccacggccatgacctgcttcttgacaccgacctggagctcaactacggcaggcgatatggtttgcttggcttaaacggctgtggaaagtcctgtctcctcaaagctataggatgccgggggcttcctatccttgcacacatggacatctatcatctgacccatgagatcgaggcttccgtcatgtttgagctactagctgtcatcagctgtg

SEQ ID NO: 392678 - DNA, 488 bp, Oryza sativa
aagccatcttcgatcgcagaaacccgcggtgcgtagcgatggcccggccacgcctcctcctcctccctctcctcgccgtcgccgcggcggtgctctcgtcgccgctcggccgcgcgctcgccaagacggccaagaagagcaacgacatcgtcaatggcccactgctcacctccaagatcaacgccaagcgcacgctgatcgtcggccccgaggacgagttcaagaccgtgcagtccgccatcgacgccgtgcccgtcggcaacaccgagtgggtcatcgtccacctccgctccggcatctacagggagaaagttatgatcccggaaaccaagccgttcatcttcgtgaggggcaacggcaagggccggaccttcaatcaaccacgagtccgcttcctcccacaacgccgagtctgccgccttcaccgtgcacgcggacaacgtcatcgtcttcggcctcagcatcaggaacagcgcgcgcgccgggct

SEQ ID NO: 392679 - DNA, 486 bp, Oryza sativa
atcgtggcctccgacgcctccctcccacacgctgccgtgtggccgtacgtgcagccggctgcaccaccagctaccggcggcgggcgccggccggcggcgaggggatggcgtgcgaccagcaggcggagctccggcgggtgttcgagctgttcgaccgtgacggcgacggccggatcacccgggaggagctgacggagtcgctcgagaggctcgggatgcccgtgcacagggaggagctcgccgccaccatcgcccgcatcgacgccaacggcgacgggtgcgtcgacatggatgagttcacccagctgtacgagaccgtcatgcgcgtcgacggcggcggcggcggcgcctgcgacgtggatgaggcgagcatgcgcgaggcgttcgacgtgttgggccggaacggcgacgggttcatcaccgtggacgagctgggcgccgtgctggcgtcgctggggatcaagcagggccggacggcggaggact

SEQ ID NO: 392680 - DNA, 622 bp, Oryza sativa
  unsure (1)..(622): unsure at all n locations
gacgggcggacgantcggagaccttctgctcgatctctgcctgcttctcccttctcgcgctctctctgcagcttgccgagagagagagagagacttcctcctccttctagtaaagggaggagcaggtacacgggggttgagatctgaggagggaggagaggaggttcgtgatgatggagagccaggcgctgcaggaccccgtcgccgagccccatggagctgagcctgccgccgccggagctcctcccgccgtggttcccggcaaggagttcacccgcacctgcaagggcctcgtcgtcgtcctcgtcggcggatatgtgctgctccagctcctcccctcctccctcgactacctcgccatcatccccgccaagactattccatttgtatggactgtcttcacagctggctacatcgaacaagttcttccaggggctatcggcagttcccttggtcttctcttctgtgggaaggatatcggaaccagtgtggggccgccaagaattctttgaagtttatcatcttggtcaactccatctgcggtgtccctgcattctgctttgctgttgcactctactatgtcactggaaaggaaagcttccttgttacaccactttctggt

SEQ ID NO: 392681 - DNA, 867 bp, Oryza sativa
  unsure (1)..(867): unsure at all n locations
atgccctccccgtctcantgacggtggtccccaccgccccacgctccccccccgtgggccccgttcgtnggcnaccgaccgctagctccggcnaccccctccnngccgacgagatccggccgtntccggtttttttggagccgctcgtcgtggctggggtggcgccggggggaatggagggggccggcgcccccgcgggcggtgctgcccggaatctcgccggcgggcgtcctcggtgagatgtgatctgtgatctgtccaacctttgtgtactcgggctcattccacagttaacaaaaaagatggaagatttacaagattgtgactgcaaaagccttgttgctgttcctggttctgtgggttctgcacctctttcaggctgtttaatcagcaggataattcctgggcagaagtacacattagcctactttcttttggtcaggaatgagtacttctctagggattcaaggaagccttcagatgggaagaaccaacttcttgactgctgtgatgattcagaattagatttggatgtgctgtatgctgatttggatagtcaaagacctggagcttaagttgcagaaacctgttgtcaagactcaatcaaaaggtgactcatgtgccagtggatcaaatgattgcttctttcctggccttcacgacgacctggctcaggactgccttgcttgggcgagcagatcagactacccatcgctatcttgtttgaataagaagatcaatttgttaatcaacagcgggtctctgtgcagactgagaagaaaatatggcattgttgaacactgggtgtatctagcgcgtagcttgactgcctgagaagcatttgatccttcagcatgcgatggatga

SEQ ID NO: 392682 - DNA, 550 bp, Oryza sativa
  unsure (1)..(550): unsure at all n locations
ttgggattctgtggttgatgaaatcaggtatgttccaanccctttggcntacccccgagaaaggaagcgaaggatgaacggaggagacggttggctgcccttctgcatataccgcgatggtttcaatcctgaaatatatccagctctatggtctgactactacaacaagaacagaagggaaccagagaatactcagctcgctccatgggttgccaaatatttttccaagtactactgaccccctacaccgatccaagtcccttgggttcgcgacagattggatagagttgagccgctcaggacagtgtcaaagcagctgctgcattttcctggaagaaaaggagattgacgttttacctgtacatgtcttttgccttcttttcttgtttccactcttactatatgacttttgggcagggcaactaagctcgccctcctgtgatgtatgttggaaaaataatgtgtaaagattctttaaagcccttgctgcaaagatagtgacatgctggaaacattagctagttctgttcnnnnnnnnnnnnnnnnnnnn

SEQ ID NO: 392683 - DNA, 720 bp, Oryza sativa
  unsure (1)..(720): unsure at all n locations
tggcggccgccacgncngttcaagcaggagccgcccttcgcgccgtggtgccagcccgtcgccgccgtagatccccgaggtcaccagtggtcgctccccttcgccgcgcgcgccgtcgccgtcgcctcctccaggccgcagcagcagcagcagcagccaccgccgccggagaggaagggtggcggtggattcatggacgccggctccagatccagtggcggcgcgggcttcgacgacgacgacggccatgccgcgcgccgcgaggtctcctcctcgctgaaagagctcacggtcagggtggaagggaaaggtgggagctgcagcggcagcgctggcacggatcagatgccgaacacgccgcgctcgaagcactccgccaccgagcagcgcaggcgcagcaaaatcaacgacagatttcaacttcttagagacttattgcctcataatgatcaaaagagagacaaagcatcatttctcttagaggttattgaatacatacggtttttacaagagaaagtacaaaagtatgaggtttcatacccggagtggaaccaagaaaatgcaaaggttgtgccatggacaaacatctatttccgttcttcctggaaaaatgcgcagaacaaaaggccaagttcctgcagatcatttcaccttgacccttccaagaacttcttgaaaaatgggtccccctatatgttcccttttacagggaactctgat

SEQ ID NO: 392684 - DNA, 613 bp, Oryza sativa
  unsure (1)..(613): unsure at all n locations
ccctacgaagncaaggacggtgactggatgctggttggtgatgttcccatgggagttgttccaccgactcttgccggaggctcagaatcatgaaaggctcagatgcaattggacttgccccaagagcaggggaaaagtccaagaacaggaactagaatggttattgcccacagttgaaagcaaaacggagatattaattaactgcagggcagttcctcaaaaccataatttaatagttttacaggatcaccatatgatctgtattacatggtttgctattctgcaagtaaaaaaaaaaactcttttaagactctgttatgttaggtttgcaacatctcctagagatgtacgctctattcggttgcacgtgtctttgtatgtgtagtatttccatccatgtaaatggttggtatgcagtgcgctaccgctattattgagcactcctacctatcctgcaagtgttgtcctgaaacgtatgttcccgtcacgtaagtgtttaaatgtttttaagaggttcctgaagatgtattatttatatgacttcatttggagcacacttatgctagtttgtttttgcaccacacctcaatcatacatccctatttcgttgaaa

SEQ ID NO: 392685 - DNA, 332 bp, Oryza sativa
gcaggtttttggttcacgtggaggaggaagcggtcgcggaggttcaggcggtggaggaagcggcggcggcggacgaggaggaagcggcggccgcggcggaggaggaagatgcccgatcgacacgctgaagctgggggtgtgcgcgaacgtgctgaatgggctgataaacgtgcagctggggacgccgccgcggcagccgtgttgcagcctcatccagggcctcgccgaccttgaggccgccgtgtgcctctgcaccgccctccgcgccaacatccttggcatcaacctcaacctccccatcaacctcagcctcctcgtcaactactgcggcc

SEQ ID NO: 392686 - DNA, 500 bp, Oryza sativa
  unsure (1)..(500): unsure at all n locations
cccacggtnccgcccacggtccngaaagaactcaccctgcacagaagagtttcctctcactccaaacaatccatatggcaaaacaaagcttgttgttgaagatatttgccgtgatatctaccgtacagatcctgaatggaagattattctacttaggtacttcaatccagttggggctcatcctagcggataccttggggaagatccatgtggcattcccaacaatcttatgccttatgttcagcaagttgctgttggcaggaggccagctctgacaatactaggaaatgattatgcaaccagagatggtaccggggtccgagattacatccatgtggttgaccttgctgatggacatattgcggcattgcagaaactctttgagagctccagcatagggtgtgaagcatacaaccttggaactggtaaaggtacctctgtgctggagatagtcaaggcatttgagacggcttctgggaagaaaattcctttgattattg

SEQ ID NO: 392687 - DNA, 814 bp, Oryza sativa
  unsure (1)..(814): unsure at all n locations
ttctgatcaagtaataccttggattatgactatacattncacgaccccgtacaatgggagtgatgctttggtttcagacccagatagtattcaaacaagtttggatgaaccccgcaatttgtgttgggaggattctgaggatcggattgacccttgttgccctttcagcaaaagaaccaattcttttctatgacgaggttatcctgtatgaagatgagttagccgataatggcatttcattcctcactgtgcgagtgagggtgatgccaactggttggttcctgctcttgcgtttttggcttagggttgatggtgtacttatgagattgagggatacccgggtgtattgctcttttggtagtgacgaagcaaaacccattgtactgcgtgaatgctgctggagggaagcaacatttgctagtctgtctgcgaagggatacccttccgactctgcagcatatggagacccgaatcttattgctcataagcttccagttgtgatgcagaagatccaaaagctgaaattacccaattaacccgacaacccatctcgtgtacatcagcgttttttttttccattgactgttggacggtgttctctttctgcttatcatgtgctgtggtctgtggatgcacgttcctgtagctggcaatagtataaaaattcttgtggtaaaggctatttgtctactggggcttatcagcttttaactctcattctcgccatgcttgaataagacgcttcaacggggctttgcatgtttctgatacagancgagtttacagagttcagactaaaaaaaaaaaaaaaaaa

SEQ ID NO: 392688 - DNA, 517 bp, Oryza sativa
ctctggtttgattgctggatcacgtgccttgcatggtgatgttgctcaagctcagcgtgaagttattcttgctgggttcaggagtggcaagtttttagttttggttgctacaaacgtggctgcacgagggctggacattaatgatgtgcagcttatcattcagtgtgaacctccacgtgatgttgaagcctacatacaccggtcaggtcggactgggagagcaggcaatactggtgttgctgtcatgctttttgaacccagatataagttcaatgtgaacagaatagaaagggagtctggggtcaaatttgaacatatctctgcaccacagccaactgatgtggcacaatctgctggtactgaagcagcagaagccatttccagtgtttcagacagtgtcattcctgtttttcgggagcaagctgagcaactattgaactcttctcggatgtctgcagttgatctactagccaaagcacttgcgaaggcagttggctacacggacataaagagagat

SEQ ID NO: 392689 - DNA, 1285 bp, Oryza sativa
  unsure (1)..(1285): unsure at all n locations
gcggcgttcttcgcgatggcgccggcggagaagcagcgcgccgggccggcgagcccgctcgggtacggctgccggagcatcgggttcaacggcgacgtcggcgagctggagtacctgctcctccacgccaaccccgccgccgtcgcgcaccgggccaggaccatcgacgccatggacccctctcgcttcagtgctattgtgaatgagtacattgaagccatgaagaagctcgcatgtgagatcctggactctgttaggagaggggctaggtctcaaggaccccagatacttcagcaagcttaccacaaacgctgacagtgactgcctcctgaggatcaaccactaccctccatcatgcaacattcacaaacttgaccatgatgaccaatgcaatatcaagagccttgttagcaccaaggctagcaatggtgggaatctgatggcaggtgggcgcattgggttcggcgagcactctgacccgcagatccttagcttgctccgagcaaacgatgtggaagggctacaggtgtttgtgccggaccacgagggcaaggagatgtgggttcaggtgccatcggacccatcggccattttcgtcaatgttggtgatgtcctccaggctctgacaaatgggaggctgataagtatccggcacagggtaattgcaaccgcctgcaggccaaggctgtccacaatatacttcgcatcaccacccctgcatgcacgaatctcggcactcccagagacaatcacagccagcagcccacgccgataccgatcattcacctgggctgagtacaagacgacaatgtactcactccgcctgagccacagccgcctagaactcttcaaaattgacgatgatgacagcgacaatgccagtgagggaaaagcataggaattgctggttaaattgcagacgatgcctatggaccagtggggattaggaagctgaaactgtccccaaaattttggctctctggcagtctggctactatcgtcagatatctcactattatgatggtgtagtgcctaagttgacgggtgtgtaatatcgttagcagtctacagaagctatggttgtacggaagtaatgtactgtcgccttttcagctaactatccatgttctctcttatatgtaatgagttagttgacggatgtgtaatattgctagcattgtatataagctatggttgtatggaagtatgtaatatagccctttcagctataaaaaaaccacccaaaaataaaaaaataaagaanaggaaaaaaaanaanaagttt

SEQ ID NO: 392690 - DNA, 583 bp, Oryza sativa
ccccccctgaccgcccgcctactgctcgtccacccacccggttctttcttaagccccgcggattcggcaccacgggagggtaggaggtctcggatgataggaccgccattctgcagacgaatacgcattcctttcttctatattttgcttctagtcagagcgcaaacttttacggcacatacagacatattctatagtcgatggcaacatatcgagagcgcataacagtttggagattttagagaaacaccttaaggcaaccggtggaaaagtgatgacctcgtttcccaccagaacctaatggatatcttcatattggtcatgccaaggctatgtttattgattttggactggcgaaagagagaaatggtcattgttaccttagggttgatgacacacatccagaagccgcaaagaaagagtgtattgaccacattctggaaatcgtacactggatgggatgggagccctactaaagttacatatacaagtgattatttccaggctttatatgagcatgcagttgagttaatacgaaaagggctagcctatgtggatcaccagaccgcagaaggaatcaagg

SEQ ID NO: 392691 - DNA, 538 bp, Oryza sativa
cgtacgcgtgggaaaaatcgcctcagattttctggttcgaaatcctctaccccctcccatggcgtccctcttcagggctcgccgccggcgatcgccggaggacgacggcgagggggaggacggatccgcgtccgggcgggtcacccgccgccgcctgtcgccggaggagggcgcgctgtcgctggccgaggcgtcggcgtcggtggccgcggcgggggcgggggcggagagtagccccgggtggctctccagcatcgtgtccggagcgaggagggtgatctcctcggtgttgttctcctctcccgaggaggccgcctcaggggaggaggaggaggacgaccacgaggaagatgaaacagaagacaatcttggagcaatcagtttcatacaatgagtcaaagcttgccattgaggcattggttatgacacgagacattctcaacggctgaatgtgataaaatggttacgctcatacaagcacgagttacagatgctgtacttcctgaagcacctgtgtttggaacgcccaaagaaattt

SEQ ID NO: 392692 - DNA, 716 bp, Oryza sativa
  unsure (1)..(716): unsure at all n locations
tatttttcatttttcaccacanatttttcaccattccaagcaccacaaaaaccttgttcctcctcctcatctctctccatttctccccatntcttgattgagcttgttgagattccccatgcacattcctccctccatttccaccaccaccccaaatcttgttgggtgatctatctatctatcatcttcttgtaggagtactagtggagtttgttgatcttcacccccaccaccattaatgggctgcaaagcttcactagaggaggaggactagtagtataccatcttcttcttcttctagcttgatctggtgctccattggtggtgttggtgcatcttgatctgggattctggggagaggttgagtgaatctttgggcctccatggggacggcggcggtggcggcggcggagaggccgaagcagcggcggagcagccacctgtggaagaaggcgctgctccacttctccctctgcttcgtcatgggcttcttcaccggcttcgcgccctcgtcgtcgtcgtcgtggcgggccgggagcggtggcggtggcggtgtccagccgcgccaccagctcgcggcgtcccacgtcgcggtgaaccagcaggtgagcctggtgccggatgcggcggcggcggaggcggccggggtcgggaacggcgcggtggtggacgtgggcgacgaccaggggggcgagggggccaggcggatgctgata

SEQ ID NO: 392693 - DNA, 584 bp, Oryza sativa
gattgaacaagggccgccaagttgcagttagctagctgttgcgcgcgcgctcccccggacgtggcccggccgggagggagaagtcgccatgaagcagcctcccgctgctgctttctctctctcgcctcgttaaaatctctcttccaccccgaaccccatccagttcagttccctctcgatcgcttcccgtgctctcgctctctcgcttgctagatcagagattcccctctgcggcggttgtgaggtttccgcttcggctcgctagctagctctgctgtttctgtgagagccgggagcaccaaccgcgcgtggggtgggtgcccggaggtttgatgcgcgtggccgccggtttctccccgtcgtttgatgggcaacgcatgcggcggttcccttagatccaagtacctgagcttcaagcagaccgcgtcgcagcgccacgacaccgacgacaacaacaacgccgccgcggccgactcgccgaagaagccctcccgccctccagcagccgccaagacggacgaccacccagtctccgcgttcggcgccggccgtcgtcatgaggcgcggacaggcgcccgtcgacc

SEQ ID NO: 392694 - DNA, 227 bp, Oryza sativa
ttttttcttgatggagaactaggacgatgcttgcaccttacatggagaaccctgagaatttcacaagtggcctccaaatggcgcatgatggataagtcgtagtcgtctcttatgaggaatccatacaaccaagattttgggttcagaactaaatattatgattttgttagtactcagagctgatgttggaaacaagtggtgtcgcctcccctttttaaaaaaaacaa

SEQ ID NO: 392695 - DNA, 768 bp, Oryza sativa
tgttcggctttgacttgcgcgatggcgcccgagtgccctcgatcgagtcgctcaaggctatgaatcccaccgagtcatccgtggaggtggtcctcatagatagggtggtcgactatgatctgaggcaactgataagcaccgcgattgacgtttctcggagccgcgctgactcaagggaaatcaccactcgccttgctggcattgtgtcctcaaagatggggggttccgtagcgtctaccgaagaacatgaactgtgtccccggtggagagactctgccgggttcctgaagattagttcaggttctgttgtgcttccaattgggaagttatcaatcggtctttgccggcaccgatcgttgctgtttaagaccttagcagacactatcagtctcccatgtcgagttgtgaggggatgcaagtactgcaaatctgctggtgctgcttcatgcctggtgcactttggtaatgacagggaatatctgattgatttgatagggaacccaggcttcttatctgaacctgactccctcttaaatgggctctcatccatttcagtttcttcaccattgcgcccaccaaaatacaattcagctgatattgttaataacttcaagtcattggcgaagcaatatttccttgattgccaatcgctaaatatgatgttcaatgatccagcagcagggacgggctgttgactcagatgaggccatgggatcaaatattggtccaaacttatcaccctgcacaaacagtgattttcaagctaac

SEQ ID NO: 392696 - DNA, 752 bp, Oryza sativa
ttttgacttggatagtgaaagaaggaatggtacgggagataactcaagggtggatgtcctgagagatgacaaattagacagcggaagggacagaaactggagcgacagaacacgggagcctgaaggatctaaggactatgtgaggaatcgtcagtggcaagattctaaggaggcaaatgattctgaatggaagaatgcacatgaaagactagatggtgggagtttccatgggcgagctggttaccggcgagattctaggggtagatctgaaagtattagaggttcttcaacctatggaggtcggtatgacagttctgattcaatagagatccgaccaaataacaatcttgattttggacgagagggctctgtttctggaagaagatatgatgtgggagctcatcgggatgcaacacctggaacgaatggtgataaatccgccaatcctgaagcagatcaaagtggtagtaccagcacgatttctcaatttcctcaacatggtcctaaaggtgatagatcctcaagaggaagaggtagaccaaatagcagggattctcaaagagttggaggcacattaccaattatgccccctccttttggtcctcttggtctgccaccaggaccaatgcaacatattgggccaaatattccccactctccaggccctcttctacctggtgtttttgtgccgccattccctgggcctcttgtgtggcctggggcacgaggtgttgatgtgaatatgctttctg

SEQ ID NO: 392697 - DNA, 482 bp, Oryza sativa
aaactgttgcactccactgcgctatagatagctacgtgctgcattcgcgcgcgtgtgcatgcatggcagcaattggtaacatgaatttgttcgacttgttcttcgtcttgcagcttctcctgtcaggagtatgcgtgctcgtcatctgctaccgatatcagcggcttaaatccatgaaaaaatgtagcctaggggttgtccagtggccgatcgtcggcgtgctcccggccatcgtcgccaacatgcaccgcctcctcgacggcgtgaccttcctgctggccacgtcgcagctcaacttccagtgccgcttctggctcgccggcttccggttcttcgtcacctgcgacccggacaacgtgcgccacatcttcacgtccaacttcgacaactaccccaagggcgacgtgttcgccgacatgttcgacgtcctcggcggcggcatcttcaacaccgacggcgagcggtggcggcggcagcggaac

SEQ ID NO: 392698 - DNA, 473 bp, Oryza sativa
  unsure (1)..(473): unsure at all n locations
cccangcgtncgcccangcgtccgcttcanctcatcgccattgccatccaaagcaaagaagagagccaccctgcagacacagtacgcacacgcagagagagagagagagagagagagagcaagggatgaggcttctcggagctcatcgtgctgctctgctggtgctcgcgtgcgtcgtcgtcgtcgtcatccatggcctaggagaggcggaggccttgggaggagggggcggcttcgtgagggcgcaggggacacggttcgtgctcgacggcaacccgtactacgccaacgggttcaacgcctactggctcatttgcttggccgccgacccgtcgcagagggccaaggtcaccgccgccctcggcgaggccgccggtcacggcctcaccgtccagggcgttgtggcgttcagcgacggcggcggcggcaacccctgccaattgtcccccggcaactacaacgagaacaccttc

SEQ ID NO: 392699 - DNA, 459 bp, Oryza sativa
tgacatatgtgctttagccgctgattaggttaggtctctgcttctctcatccatccatccatccatccatccatcccctgctgtgcaccgtgactccaccaccaccatcaacaagatgaaaaacaaactcttcttccttttcttgccttgccttgcttgctttgcagtaatcaggggaactgctctctcgtgcgtgtgatttctagtcagtcagtgtggacatctctaaattcatttgtgatttccttcctcatttcgttgcatcggtgtgctatgctgctccaagaaacaagacaaagaaaagaaggcgtgcttgcttgcttgcttgtctgctgcacgagtcatagttggcgtcaatcacatgtacagctgcaaatgctgtgccaagaaatgaacaaaagaaatttacctgacccaaaagaaggccatgtaagtcgtctcacttgatcctctgattct

SEQ ID NO: 392700 - DNA, 1110 bp, Oryza sativa
  unsure (1)..(1110): unsure at all n locations
ggacctagtgcctgccaatgttcttccagacaacttcctctctgctatcaaaactgcagattatagctctgcaacaacgaaaattaatgtggctgttgacaggctgccacagttttcctgttgcaaagactttaatcctgaaggcggtccagaacacatgggcaccatacacattggatctgaaagcatggaggaaatcgatctagcgtacagggaagctgcaaatggcgtctcatccacaagacctgttatagaaatgacgattccttctgtgttggataagaccatctccccaccaggccagcatgttattaacctttttgttcagtacacaccatacaaactttcagaaggcagctggcaggattctaatgttagaaaatcctttgctgaaagatgcttttccttggattgatgaatatccaccgggttttagctcatcagtggtaggctatgatatgctgactccacctgatcttgaaaagggagtttgccctaacaggtggtaccttctttcatggcgcaatgggcttggattcacttttcctcatgaggcctgccaagggatggtcagattacagaactccagtgaagggattgtacctctgtggcagtggtgcacacccaggaggtggggtaatgggcgctccgggccgtaacgctgcctccgttgttttggaagatctcaggacaaaatagatggtgacccgaggaaacatggaaacggtgattgacaccaggctgggtctcgttcaagcactgcactgcaaaagcaaccgaattccatcagaatgaaaagcacctcatcagacatcaggtataaacacctgtgccatgtgagctcacatattaaggaaatggacaaacatttcttgaggagaggcacattttctgaattaattggccgactttctagtttagagaggggaacattctttgccacctgaccctatttcccagtatgaagatattttgcatttgttctcttctatttgcagcctgtctgaaatatattattcatcggattatctacttgattgtaggataaattaaatatttttttaacaattatcaaatatcttggnnnnnnnnnnnnnnnnnnnnnnnnnn

SEQ ID NO: 392701 - DNA, 770 bp, Oryza sativa
  unsure (1)..(770): unsure at all n locations
tcgggagattttggtcttagcaagattatcaaagcccagcatgccaatgatgtgtacaagatgactggggagactggaagctaccggtacatggctcctgaagtattcaaacaccggaaatatgacaagaaagttgatgtcttctcgtttgctatgatactttacgagatgcttgaaggggatccacctttctctaactatgaaccttatgaagccgcaaagtatgtgggagaagggcatcgcccaccctttcgttcgaagggatttactaacgagttaaaggagttaattgagctatgctggtccggggatatccatctgaggccatctttcctagagatcctcaagaggctcgagaagatcaaggagtactttactgcgcacgatcaccattggcatttgttctcccagtaatagcttcatgtctgtctattcatcgcgatcgattgctactgcgcgtggtgttacgagtgaggaattcatgggagacctgacattttatcatgtacaaaatttagagggccccaaggaagggtcaaaatgggtactgttctgctaaagcagatatcttgtttttctttttcttgaacaattattattgttgttaggttccctgctctttttatgtttcttgagaatcagtacagtggatacaggaagtaaatgtgccatgtaatctgtttaaaagcacttcttttacggggattaaaaaaaagctagttctttgtgaactttgtnnnnnnnnnnnnnnnnnnnnnnnnnnnnnnnnn

SEQ ID NO: 392702 - DNA, 464 bp, Oryza sativa
  unsure (1)..(464): unsure at all n locations
tcgcgcttccattgcaaccccaccccgccgcacgccgccgcatcgatcggaaccaaaccctaaccctaaaccctagcccccccacctcgccttccaccccccacgctcccatggcggggcgcggaggctacgcgtagccacatcgatcgaacaccctgtatggattgaggtgggtttcccgaggcatgggtacaaaccctagcctgcacgagctggcggcgggggcggcgccgcggggacgcgtggtgcgtatcctcgtgcgcgacgccgacgccaccgactcgtcctccagcgaggacgaggcggttgcggtggcgcagcctcggccgcggcggaggggtaaggtgggtggtggttgtggtngttgtgggggcgtgaaggccgcgttgatggaaggcgggngcgggggaagncgaagccgaccgngcggttccgggcgttcggcaacggccttgggggaggtt

SEQ ID NO: 392703 - DNA, 892 bp, Oryza sativa
ggtgcactccgcgtcccaaatcccaaaccggagctagggttgctgctgctgccactcgcgagcagcagcgccccctcacgctgagccgcctccggctccctcgccgccgatcctgcgcgtgcggcggcggcgggtggccggtttgaaggaggagaggaggcttttggtcgtcactccttgcgcaggatgggtgggagatatctgcattctccacctgctgttaatttaatctgtgaggaatcaacttttgtgcgctcaacaagttgctgtctccactcttgtctgtgtttgagatgcaaaacatcgaatttgaagccatgtcgaacactggtgttcaatatgccatcaaggcgcttcaatagaagagtggctgcgctgccagatgtcgatgatttcttttgggagaaggatccaactccaatcctggacacgatcgatgcacccatccatttgaaaaatctatctagtaaggagttaaagcaactagctggtgaagttcgatcggagatatctttcataatgtcgaggaaatgccaaccatgtaacactggacattctgttgtggagctcgctattgctatacattatgtcttcaatgccccaatggataagatattatgggatgctggtcagcatacatatgcacacaagattctcacaggaaggcgctcacttctttcatactattaagcaaagaaaggggctttcaggtttcacatcccgtttcgagagcgaatatgatccctttggtgcaggacatggatgcaatagtctctccgcaggccttgggatggcagtcgcaagggatctaggtgggaggaaaaaccgaatagtaacagttataagtaactggacaactatggctggtcaggtgtatgaggcaatgggtcat

SEQ ID NO: 392704 - DNA, 600 bp, Oryza sativa
  unsure (1)..(600): unsure at all n locations
cttgtgctgctgctgaggaggtgaaggaggagagcgggagatctctcaggagcgaggcattgacattccgctatggaggctccttcgtcgtccccgtcatcgccaagtctgaaagatcatctctcttcgccaactggccctttgcatctcaaagtatgggaggtcatatgcattgtcttgggggctttcatggtggtcatcttctttgtaaccgtgtggctcacgatccggagtcggaagagggttagacgggcttcggcaaatatcccaatcacccaaatccctgccatttccaaggaaatcaaggaagtgagggtggagcaagtcccaacaagcgattttgcagcacatgatggagtcctgatgacaatccaagacaagtctagtgagaaggagtcagacaaggtcatggtccatttgggtgtaagcaaatcgaagcgtggcgatgagagccactcaggatcattccgttacatggacaaggatttaggattccagtcagctgatgaaggaggctcaggaacatttcggcataattcagctcatgcaataactgctccttcacctttggttggcctncagagttctcttacctaggct

SEQ ID NO: 392705 - DNA, 431 bp, Oryza sativa
tgatttattatttttagctatgcaaattgctcgtcatcttcagctgcaagaccctatttttctcttagataacagtgagatagtgaatgctgtgcagaacgaggactacatacaaaaccccggacattggtctctgagaccaattctttccagaattaaaaattttctgcaggatcaacaagttcgaatcatttggatctctagagagctcaacaaagttgcagatggccttgcaaagtcagcaagacaagctcagactaacagctgcttagcttttgattgctctaatatttctcacatttcttccagagatgtttgtcctactaaaagagctctttccttcactcctaatggagcagttaatgtaactcatgctttgtgtttctaaaacgctttcttttaataaagtgcatgagttctcataaaacaaa

SEQ ID NO: 392706 - DNA, 495 bp, Oryza sativa
  unsure (1)..(495): unsure at all n locations
acggacgtgttacgacnngncagncctcctctttatgccaaacgaggaagaacccaagaacgaagaagaagaagacgcgaagctcggggcgcggccattctccgatccccagctcgccttccaagccgccgcattcccccgccgttgatgcgggtggaggccgggggcctcccggagcttgggtcgggggcgagggaccccgccggcgcgcggcggcagcggcggcggcgtcagcagcggaggccggcgatgccgttgccgggggcggcggcgcacagccccgtcgtccgcggtgcaggggctcttcgaggcgtgccgcgaggtcttcggtgctccgccggcgcggtgccctcgtccgccggggtcgagaggatcaagtccgttcttgatannatttaagcgganatgtcaagctaactcgaaacatgtcatatttccgggggntaattcaatggaattctaaaataactaattanactttatgagtgtaggttt

SEQ ID NO: 392707 - DNA, 646 bp, Oryza sativa
  unsure (1)..(646): unsure at all n locations
gtcatcaggttattcctaccgagctcgagaggcgcaacaaaagccatctgtgctttttcgccgccgtcgccgacggctctctccgtctgaaaacacccaaaaacccaaccaaaccctagatccgccgcctccccgctcctccgtctccgactccggcgacgcccgcgcggccacgatgccgaacctcgagtgccggatgtacgagccgcggttcccggaggtggacgcggcggtgatgatccaggtgaagcacatcgccgacatgggcgcctacgtctccctcctcgagtacaacaacatcgagggcatgatcctcttctccgagctctcccgccgccgcatccgctccatctcctccctcatcaaggtcggccgccaggagcccgccatcgtgctccgcgtcgaccgcgacaagggctacatcgacctctccaagcgcagggtctccgaggaggaggcgcacgcctgcgaggacaggtacaacaagtccaagctcgtccactcgatcatgcgccacgtcgccgagaccctcgggatcgacctcgagccgctcttaccagcgnatcggatggccgctgtaccgcaagtacggccatgccttcggaggcctttaaagctcatcgtcgccgaccccgatgccatcctt

SEQ ID NO: 392708 - DNA, 460 bp, Oryza sativa
  unsure (1)..(460): unsure at all n locations
attcagttcatccaatccacgatcacttcctagcaattaagatcatggtgcagcgcacttcatccgattcggcggcgtcggctgaggccatggtcatggacctgagtcccaagcgtcccgccaagtcctacggcggcgaaggcggctcgtactttgattggtccccctccgagctgcccatgctccgcgccgcctccatcggcgccgccaaactctcgcttgccgccggaggcctcgccctccccttctactccgattcggctaaggtggcctacgtcctccagggcaagggcacctgcgccgttctcctccccgagaaccccttccgagaagatcctacccatcaaagagggcgacgcgctcgcccttccattccgcgttgtcacctggtggcacaacctgcacgccgncaccaccgaactcgtcgtcctcttcctcggngacacatccaagggccaca

SEQ ID NO: 392709 - DNA, 532 bp, Oryza sativa
  unsure (1)..(532): unsure at all n locations
gggaacctccnngggnatttcgggttggggncggganccttttcctgcaggggnggattnaggngccnttccggggaccatccncagaagttntcctggatcaaacaaagttttggctttcaatttcgggagcagcaaaattttggagctttcatcagggggaagtcaagaacgcacctcagactgtccttgccatgtggtgcccatatatagttgggataatttttcgctagtttttccgcaaattcgggaaatttcaaaaaaaatgtgtcaccactacgcaagggcggttggttcgggtattgactccctttcaatgttcgcctctcggatgctgctactttatgaatttagggttcttctggagtacaaaaaaacccccttaatttgatctgtaatttctgttgttcagacttcccagtacctagctagctagtaggagttgcagaatagagatctgtgtccctgtcttatacttttaggtctcttcagggtttgatcagcgctgtttcaatccaaaattgtgtgtgct

SEQ ID NO: 392710 - DNA, 684 bp, Oryza sativa
cgaacatcttcatgctgaaaataatactgaaccttttgttgagaagacacaagatgttggcaccaacgaagcaattggtgcccttgatatgaccagtgctgatgtagagtcagacatgacctcttctgatatcaagatagatgctactgaagccagcaaagttcaacaacatgacacagtagcaacaactgtggatgccatcccaacagatgctgatcctatggatactgatgttgcaactgagaaggcggttcttaatgatttgggtgacactacttcagtgtatgatgaagagcgcaaagattctgagctcacgaatgaggacgagaagcccatcgcaccaaaaccaaatgatcaggtacctgaggttagcccagatttagggtctccaattaagtgtgagtcaatttctagcgatgatatatcaactaacaaaaagaataatataaaggataatttgaatgctaataattttgatttagaactagaggctaagccagagatggtaaaaccattttctggcattacttccataggtggagatttgcagccattggatgatgacaaagatctgggtaaaaaccagtcatctttggaatacatagattccacagctaatgtggatgaaggcggctctccagagaaactaaatttagacaggagttcaggtgatgagtcaatgga

SEQ ID NO: 392711 - DNA, 603 bp, Oryza sativa
  unsure (1)..(603): unsure at all n locations
ggttcattcattgatttgatttttgcacggcatttgaggaagaatgtgcccgctgagggtgatcctcatcttcctctccgctactatcgccggattcttcctcatccggggcctcaacgccgatcccgacctcctccacgacgatgccgatgccgacgcctccgaatcccccagggaaagggcccccgtgcccctccattccaaggttgggtcggctttgaaaacaggattctggacgatggtggacatggcaagtgggaaatacctttggcgcactcttgtttcaccaccgacaaaatgcgaatctgagaaggccccagtgaatggagttcctgatatttatatcattcttagttgatttgggaacacagacgtaacccctattgtggttagattctgttcgtgaagtgtagtacgatggcaactgtaacatgaggattacatctttgaagtaaatgtacaaaatagttcacgtttgagccttttcgtgtaacctaaaacaatgagtggagaattgtattaatacatgagatttggactgaagtttctgaatacaatagttggacactantctttattttcctgttgaaaaaaaaaaaaaaa

SEQ ID NO: 392712 - DNA, 291 bp, Oryza sativa
  unsure (1)..(291): unsure at all n locations
tccagtgatggagttctgatatttatatcatacttagttgatttggggaccccagatgtaaccccctattgtggttagattctgttgttgaagtgtaggacgatggcaactgtaacatgaggattacatcttgaagtaaatgtacaaaatagttcacgtttgagccctttcgtgtaacctaaaacaatgagtggagaattgggggcaatgctgggagtatagacttattaatacatgagatttgggctgaagtttctgaatnnnnnnnnnnnnnnnnnnnnnnnnnnnnnn

SEQ ID NO: 392713 - DNA, 601 bp, Oryza sativa
atctccctccctcctcccgtttcgtgctcttgccccaccatctctctcctcgcttcctagggtttcacgctctccgatcccgcggcggcggcggcgagaagcttccactcgcctcggcggcggcgccggccagaaagatggctggtggttttcgagtactgcatcttgtcaggccctttctggctttcctgccagaagtacagagtgctgataggaaaataccattcagagaaaaagtgatctataccgttatctctctcttcattttcctggtgtgcagtcagctcccactctatggaattcattcaactactggagcagatcctttctactggatgcgtgttattcttgcatcaaaccgtggcactgttatggagctgggtattaccccaattgtgacatctggaatggtaatgcaacttctagtgggatcaaagattattgaagttgacaacagtgtgagagaggaccgtgcccttttctgaatggcgcacaaaagctgctgggtatcttgattgctattggggaagctgtggcatatgtgctgtctggaatgtatggtagttgagccaacttggaactggcaatgccattctcatca

SEQ ID NO: 392714 - DNA, 507 bp, Oryza sativa
ttttcttctcctctcttcgtctctctctctctctcgtcgcgttggatttgacgagctcgtcaccaccggctgcggcggcgaggcaggcatccgcactcctcggcgtcgggccgtcgtcgttgtccgctacctggaaaagatggctggtggctttagggtattgcatcttgtcaggccttttctggctttcctgcctgaagtacagagtgctgataggaaaataccatttagagaaaaagtgatctacactgttatttccctattcattttcctggtatgcagccagctaccactgtatggcatccattcaactactggagctgatcctttctactggatgcgtgttatccttgcatcaaaccgtggtactgttatggagctgggtatcactccaattgtgacatctggcatggtaatgcaacttctagtgggatcaaagatcattgaagttgacaacagtgtgagagaggatcgtgctctgctgaatggcgcacagaagttacttgg

SEQ ID NO: 392715 - DNA, 1189 bp, Oryza sativa
ggttcattttgctcctgctttgtctatccgagctcccttaattattggagggtgaagacatgaaggcagtagttcattgccttcacagagcttaaacttagaccttaatcttaatcaggctgatcagtttgattctgaggatgttgatatgattcagagtaatggacaaccagggataaacgcttttcctctcaacaggggcctttccattcctgagcatgttctgcgccatacaaattcttccagtgctacaagaaatccttcacaggttgcaagcttttgtgatggaatgacaggccaagaagttaacctgtttggtgggcatcgttcatcttgcaagagaaagaatattgatgggagtctcgcagagtcttctgccaatggtagctcacgtaataatcagcgaagtaatattatactggaaccttctccatccagtcatgaaagcacttctggtttaactgcacctgcccctacaaaccatgttttttcatactctcctgtggaacagctaaaccagaataccaatatgtctgcaaatgctatgttgtctgatcattattcactatatggtgatcatgagcgtgagagatttctgaggaatacccggatgagaacaagccctaatgagtatgatcaatcatcgtccaatctcttgcctgaaggaagtctcaggtgttctgtttatcagcctactcagcaacagtctttgtttattccagtacaacctagagcatcgagctcttcaacaagttctcttagtcggccttatgtgcctggctgtcactcaattctcacaaaatttgcaccgtggctccatcaagtggcaattttggttcgagaatagggattttgcctagttctgctgatacaacaaaccagttatcttcacaagatcccaacaggagctcggtgagaggcaattttcctgagccccctctgttagggtcttctctgtttccttctgactcgggcagaattgctatctatgccgggaggcagaagcaaccaacaaaattccagctccacaattcgaactgctggaaatataggagctcaacagattgctgggttaaatgcatcccagcctacttcaagctcaaggggttctggttgatattgttaggagatccttgcaggctgctagcgttcctaagtccagaggttcaagcattacatcacagcagca

SEQ ID NO: 392716 - DNA, 808 bp, Oryza sativa
gtttaaaagaaggggagaaaataaaaagctcaccggcggcttctctcctctcgccgggcgaccgcccgatgctgcgcggattacctcaggcccggaggctcctcaggaggatggggttggagaacgaagacccctacttatggaagcagatgggcaagggcatgctctgcacctacgcgctcttcggcgccgcctggctctggaacgagacctctcccctcggctggtggacgctcaagccgcgccccaaggaagaaagagaaatggcccacctttacgagcgcaggatgtttccatacccaggggaatgaagaggcaggtgaggagctcataaaaagtggaggggctctaggcaccacaattggacccaaaggttctgctgattccaacatggactctgataacatgcagaaacaattgcagtcaaaaaagtttgaccaagaagcacagaagctctggtttcggatgaggaatgaggtcgtacaagaactccaagagaagggatccgatgttgaatgaaattttacttctacataaccagaaatggagtaaagctgaagtatgtgcaaattgtttcagcttgttagccgtctaggaaattaggagcttagaatgcacgcaaaatgttaaaacacctactttgcaatctggagatttttttttttaatttgagaaagcaatctggagaatctagagagtttactattcaacttcaatttggtcttgttgggtcattgcattccatcagttacagattttgtaccttaaagatatggtatcagttaccagtaaaaaaaaaaaaaaaaaa

SEQ ID NO: 392717 - DNA, 306 bp, Oryza sativa
ggtataacgaaagcagcaaaagtcacacgcacactctctctgctactactactcttctactgctccactctgctctgctctccgctcccattccctgcggattctatctctctcttctccaattcgcgcgggctcgggcgccgcattggcgcgatctccggattgtgagggggtttgttgccgaattgttgggggaattgcgggtgctggttgggccgatctcgtcgctggagctggaggggttccaggatcggtgcggctctgcgtgggcattggggaccgtcgtgaccgagactcgccttctgg

SEQ ID NO: 392718 - DNA, 289 bp, Oryza sativa
gattggtccccccgccgccgccgtcgtcgttccagctatagctttccccgccggcggtggcgatcgatcgatcctctcctcgtcggttgattagggtcaagaattcttccctctcccagcttggttgaatttcttggtttgatcaaggggaggaattaattgagaggtgaattagttcgccggagtttggttctctctctctctcctcttctctgagctgagagggggaggagagaatcaagtgacgagttatagtatggcgaggagcggcggcggcaatggtggggga

SEQ ID NO: 392719 - DNA, 717 bp, Oryza sativa
gatgttttcatgatattgatcccggtattcctacaacgccagggcctcagagtgcaacagagcttgatccgaagatcccacaaactccacgtccaaaccttaaggaggccggtgaaaaacggacatcgataaagatagtagtcgatgaagatgcgaaaccgacaaggagtgcgggagatgcagagaacttgacagaagatgtagccaaggtgatggagaaaaacgcaggtgagccaggtagatcactgacaagcatactgagtagaaagatttccaggaagaaaccagaggacaagctgtctgatatcccagagcagactgaagctcaagcatctgagttggtgaaagaagggcctgttccagttgagggtaaacctattgatggtcatccgacaactgaaaatggccatggagatggtgcttcaggagaagcagctgaaacgcaaactagtgctcagacttcacaatgattacaagatcaccccctgctgttgttgctggtagttgtaggtttgctttgttgtgcttgtagaacaaaattactttagagattgtgttacttgtaaaatacaacaaaacatgatcatgttgtaaagttacctgctcaggtttatacacgtccatgtaaatcaaagttcatactgtaataacttgtaagtatgtaaacatgactaccccagaggtttgagggtaccattttttcatgtcttcggtggc

SEQ ID NO: 392720 - DNA, 717 bp, Oryza sativa
tcgccgtctacaagttcggctacggcctcagctactcgaagtactctcaccacttcgtcgcaaacggcacgaagctgccgtctttgagcagcatcgatggcctgaaggcgatggcgacagcagctgcaggcacggtgagctatgacgtcgaagagattggccccgagacgtgtgacaagctcaagttcccggcgctcgtcagggtgcagaaccatggccccatggacggcaggcaccccgtgctgctcttcctgcgctggccgaacggcgcggcggacggcggcaggccggcgagccagctgatcggcttccagagcctgcacctcaagtcgatgcagactgtccatgtggagttcgaggtgagcccatgcaagcacttcagcagagcgacggaggacggcaagaaggtgattgatcatgggtcgcatttcatgatggttggcgatgatgagttcgagatgagcttcacgccttgatcgagctgggtccagttcattgagttggggttgggtactgatcgagctattccaagccagcgcatggttgcatttcatttgcttgcttgggaaatctgctgcttcgttcagggggctgaggatttaagttgctcagcaagtgtaaccatctatcttcttttctcaaaaagaaaaaaaaagaatctaacttatgtgaacaagagaatgattatttaagaaagattgaggcaccgttgacgtc

SEQ ID NO: 392721 - DNA, 574 bp, Oryza sativa
agataagctaactttggaaggtgagtcataccacaagagctgcttcaagtgctctcatggaggctgcatcctgaccacctcctcctacgcggcgctcaacggggtgttgtactgcaagatacacttcgggcagctgttcatggagaaagggagctacaatcacatgaagaagaagagcgagtcccaggaggtgttgccggaagtggtgcccgaagagcaaccggcgccgccgccgccagacgaaaatagagaggacaactaggactacgaaacgagccaaacacatacggtgatacacggatctctggagtttctgtttactaattttgcaacggttgtttattccctcctctttttttgctcgtgatcctccctgtgtgcgagtagtctgtcaagctgtaagtgtacgccttcgtttcataggaggctcatgaaaatggcaggttgacaacaatggcatgcgactgactgccagcctcctgtgaaaaatctgtaatttctgtaactactacgaattgatcatacttcctagcaaccttatccttctaacatcatgttctttagctaccctgct

SEQ ID NO: 392722 - DNA, 826 bp, Oryza sativa
  unsure (1)..(826): unsure at all n locations
tcgggtcaagcacgaggaagtagcatttattgaagagattgccaggacagcgccaatcaagtacttacaccggtatttagtgctcaagggagtcgcgtctcaagactatgaggacttcaagagagtgctgacatcgctatggctcgacttgtatggaagaggtggcagttctagcagctcttctgcatttgagcatgtgttcgttggtgagatcaagggacgaccaggacagggagagaatgaggtctcaggattccataattggattcagttttacctggaagaagccaatgggaatgtggattaccaaggttacatattcccaaggaggcgtggggaatcgcctgattcagagacacagctattgactattcagtttgagtggcacggtgttctgaaatcggtatccagcactctgattggtgtcagccctgagtttgaggttgcactctacacgctctgcttctttatgggaggggaagattaaccgcgttggagattggccccgtacggngtaaacatccaagtgctaccgaatgggaaacagcaaaattgggtcagcatttccaattgcagataactgaattcgttccatgcctgctcctgcgtgtatgtgattccttcagctttcagtttcacgaagttattagtgtgctgttcgatttggtcgtttacacaaaagaaccacattgttcaatttgttgtcacaatgtctctactgaaaattgtattatttggattaaccatgctgtacaagttgtagtcacaaagtcctgtaatttgtttttctcaaaacccgtaacaaaaaaatatcatctcagcacnn

SEQ ID NO: 392723 - DNA, 897 bp, Oryza sativa
ctctggcagcgtgaggcgagatgggtggcgcgcgggggccgacgggagaggagcggcgtggcggccggcggaggccgcgtccccgtggccccctccgccgctccccccgttgtcctcgcttcttccccccgggccgacgccgctgccgccctcaccaccgtcgcgtccgccatcgccgattccttccgtgacctgttcctcctgtcccgccactgggcatggcggagcgggacgtgttcgcgtacacggccatgatctcggggctgtcggaccacagccgatgcgtgaaggccatcgaactgttcgagcggatgcaggaggaacggggagggcagggctcatcggccaggcaagggagatcttcgggagcatggcggcgaagtacggcatggagcccggcgtggagaactatggcagcctggtggatgtgctggcggggatggtggagaaggcgcaggatgccgatgaggcccgactagtgcgtgctgggggcgctgctgaatgcgtgaatggcgcgcggcgacactgagcccgggaaggaggtggcggcgatgatggcggagctggggctggccgaccacagcggggtgcaggtgcagctgtcgaacctgtatgtggggcgggggaagttgggggaggtggcgggtgttccacctccatgatccatcggccagcgacatggcgacctcagcgtggtgacggcgtccaagtactccaaggttcctcaacccgtaggagttaggacacgccccatcgcgccaccgccgacctccctctcgtcgtcttcagcaacgtgcactggggccgcttccaggaggccgtcctcgagctcaggcatgtcgtcgccgaggcatggccgcatgggcggcgctgtggagggacgacgccacgaggttc

SEQ ID NO: 392724 - DNA, 500 bp, Oryza sativa
gcgagaagcactagagccgggacctcgccgccgtcaccttctccccgcacactctgtcggctcccggatccacaccgccccccgccgtcgtccaaaatgaagttcatttctgcctatctccttgccactcttgctggtaaccctaacccatctgcggaggatcttacaactattctggagtcagttggagctgaagttgaccatggcaagatggagttactcttgtctcaactggctggtaaggatatcactgagattattgcttccggtcgggagaagtttgcttctgttccatgtggcggaggtggcgtagctgttgcagcagctgctccggctgctggtggtggagctgctcctcaatctgaggctaagaaagaagagaaggtggaggagaaagaagaatctgatgatgacatgggcttcaggtttgtttgactaggaccattccttggattatacccattttgggtaacttgggaaacgggaacctaaacacgctt

SEQ ID NO: 392725 - DNA, 439 bp, Oryza sativa
atcgcatccgcctccaaaccctagacgcggcggccatggcgcggcgatccgcccctctcctccggcgcctcctctcccccactccctccccctccccctccccgccccattctctcgccgccgccgccgtctcccgccgcaccgtcacctacatgccgcggccgggggacggcgccccgcgcgccgtcacgctcatcccgggcgacggcatcgggcccctcgtcaccggcgccgtgcggcaggtgatggaggccatgcacgcgccggtctacttcgagtcctacgaggtccgcggcgacatgccgacggttccccccgaggtcatcgactccatccgccgcaacaaggtctgcctcatgggcggcctcgccaccccagtcggcggagggtgtctccttcctcaacgtgcagctccgcatggagcttgacctttacggcc

SEQ ID NO: 392726 - DNA, 742 bp, Oryza sativa
  unsure (1)..(742): unsure at all n locations
cggncaaaaaacgggatacttcttaggctggtcaatactcttcatagcttgaatgaagcaacaaggtttgcttccatctccgggtctggtgcttcagtaacacagaatggctccacccccaggcgaaggtctggtcaattagatccgccaatgctagaaatttccaaaacgaggctggatcatcaccattcatctggttcactgcaatctttacaagcagatgcagataggcatcatatcataatggatccttcagcagcgcctagattcaccgatatggcggctgctggtcacatggagagaaatgataatgatcccattaggccacaacggcttagtgtttctgcaggaaggacatcaacagatagatcaccaaagcatatagagctagtatcaaatggggcatagtagtggtcaaaatgatcaaattcgtcccctactgagcctgttggagaaagaaccaccctctcggcatgtatctggacaacttgattatgttcgccacttatctggtctagaaaggcatgaaagtattttgccattactgcatgcttcaacagagaggaaaactaacggcgaacttgacttgttaatggcagaatttgctgaggtctctagacagggaagagaaaatggtaaccttgattccaacataaaaacttcaaatagggttccaagcatgaaatatgcaccatcatcaggttcaaacaacttttaatgagggagcattaacatctggagc

SEQ ID NO: 392727 - DNA, 685 bp, Oryza sativa
  unsure (1)..(685): unsure at all n locations
agacggatctccaatctaaaattacaaaggaggtgaaagaaaattcaatcctccaggcaagtcttggaaggaggaaagaagaattgcatgaacgccgcttagcacttgaaaaagaagtggaaaatttgcgggatcagctacagaaggagagaaaattgagggcctcattggagtctgggctgatgaatttgcgtagaggacaggtgtccttcccatcaacaattganagcaagactaaggctgatcttgaggaagttgctacttgctgaagctgatattttgaacttgaagcaaaaggtttctgatctccgtggacaactcaacaacatggtccagatgagctccacctcattatgtgactcttgcaacaaacgactcctaagtacagacaagcttttccgaagatgaacagaatacttcaccatccaatgttgggcccaattctatgtctgacatggcatcggctacagacatggcagatattgagcaatcaaggaagcaaaccacacaacattcatcttcttccatagacaagccaactctccacaagcatcaaaagagtattgcatccaatgaacaatcaagtaccatcagccaaagggctcaaaggatcttatcttctaagggtgggattatgaaaggatggccaagatggatcattttacatcaaagtggaaccttgcac

SEQ ID NO: 392728 - DNA, 517 bp, Oryza sativa
ttccgccagcgagcaaaaaaaaaaaaagaagaggaaaaaatccaccgatctggactcgactcgacggtcgacgccaccccccaccggccggccccgtctcgccgtcgccgccgtcgtctccgccacccaaaaccctagccctgcagcctcccctccgcagctcgccccctctcctcgccatggccaccaacggcagctccccgagggcgagggagactgagagcagcctggagaaggtgaagcggcagctctcgtcggggtccgggcggtacctgctgcaggggccactgctgaagcgatctgagacgttgaggaaatggaatgagagatgggtaattttagaccctacttcaggaaagatggaatacaaaattcggagaaatgaaactgccattaaaggaaccattatatttgatgcttcaagcactattaccttgtcccctgtaaatttccaagggatgccaaagtatgatggctgctgtttctacattggaacttctcaaaaaaggattacttt

SEQ ID NO: 392729 - DNA, 830 bp, Oryza sativa
tcgtaaatatttcttcctataacagggcaagagcagatcgatcgtttccttttgatttctgaggagaagaggatcgatcgtttcgttcgatcgtttggttttgaattttgaggagaagagaagagaagaggatcggaagagatggccggcggcggcgtggaggacacgtacggcgaggacagggccaccgaggatcagctcatcaccccatggtccttctccgtcgccagcgggtacacgctgctgagagacccgcggcacaacaagggtttggccttctcggaggcggagcgcgacgcgcacttacctccgcggcctcctcccgccatccatcgtctcgcaggagctccaggagaagaagctcatgcacaacctccgcaactacaccgtccccctccagcgctacatcgccatgatggacctccaggagaggaatgagaggctgttctacaagctcctgatcgacaacgtggaggagctgctgccggtggtgtacacgccgacggtcggggaggcctgccagaagtacggcagcatctacaggcggccacagggcctgtacatcagcctcaaggacaaggggaagatccttgaggtgctcaagaactggccggagaggagcatccaggtgatcgtcgtcaccgacggcgagcgcattcttggccttggagatcttggttgtcagggaatgggtattcctgtcggcaaactgtctctgtacactgcccttggaggagttcgcccatcagcttgcctttcaatcacattgatgttgggaccaacaatgagtcactgctcaacgacgaattctacaatggactcaagcaacg

SEQ ID NO: 392730 - DNA, 623 bp, Oryza sativa
  unsure (1)..(623): unsure at all n locations
gacgaaactgacgatgatgagaatatatattttgatacacgagatttcctgtcatcaagttcttttaaaagcagtggatctgatttccaaagatcagaagctggttcggatgatgaggatgattatccaatggatggtattgatacctctatgaaatccgttggaattagttacccatatgtcagaaggcgtaagaagctgccagatccagtcgagaaagagaagggtgtaagcttgtggtcaatgatcaaggacaatataggaaaggatctaaccaaagtttgtctgcctgtttatttcaatgaaccactctcatctttacagaaatgctttgaagatcttgagtattcctaccttattgatcgcgcttatgaatgggggaaaaggggcaatagtctgatgaggatccctagtgtagcagcatttgctgtttctggctatgcatctacggatggaggaagctgtaagcccttcaatccacttcttggggagacctatgaagcagattatccagacaaaggcctccgttttttctcagaaaaggttagtcaccatcctatggtggttgcatgccattgtgagggaaccgngtggcgtttttgggcagatagcaacctaaaaag

SEQ ID NO: 392731 - DNA, 873 bp, Oryza sativa
cttttccccgttcccacttcgccggagcaccaccgcggccacggcgcgcgacgcgagcacccgccccgccgccgccggcggctgaccaacttcctgctcgccgcctcccaatcatctcgagattttaactgaactcctctcttgaacttcacgagtttttgttcaacaaagaacaatggaaggccagtcccagttgaatccagatgccagtcctttcataccttcctcactaagtcttttcacatacaatgattctaagagacaagcagagtcatcctcgatgaacgatccttctgctagagcttgccgtccttccatgtgcgaggaaaatgatatggatccacttgctttgacaaatctgtccttttaatgttcccgaatatctctgaggaattcattgatgagttactccaggcaaatgaatttgacatatgtctcacggttgatatgcttcatgagctgaattcacaaaatatgcttcatggtgatgccataatgggcttcccaacattcccagatgtgaagaaatttcacggcaacctaggcctacctgatggtgatttgtctgaaagcaacagcagtcttgatcaatctcttcagaagggtatgtcactgacgacttctggtgcgaaatctgcctcggcaatgattccagataacatttctcttcatgataaactgggtgtacagaaagacgataagccagcaattgcttctaccacaaattaatctgcaatgcatcctgctgtagattctgtattcttttactgctagtttgggtgcctgactgaaagtagtgcaaagtgcagacagtgcaaaactgcaaacaatgattgtcttcttaatccatgtttgaaggactacttggttttc

SEQ ID NO: 392732 - DNA, 450 bp, Oryza sativa
gcttgcagcagcaagaagcggcgccgcctcctgacataccacgcccgccggcggcgaggaagaccaggcggaagcggaggtccacgagcgactgcccggtgccttcttcttcttcttcggcgagacccagctgcgattccaccatggcgcctgcttccgacgccaatgcgtcgcaagatcaaaactgcaactctgcaacgtgaagtgcagcactgatcgaatttccgggtgtgctactgctacttgcgcagagagtgctgtacatcgttgtctgttcagtgctctctgctttgcgccaactgtacatgtaaatgggtttggagtttggagtgcaaattaatcggcgatcgtacggagaaattggaatgtgatcgccgtttgtgtgttcgattgtgactaaccagagaagttaatttgatgttcaaggatagggatttcgatgagtaggcc

SEQ ID NO: 392733 - DNA, 453 bp, Oryza sativa
tcttgatcgcgaccttttttttttttttttttttcataatcattttgcttcttaatctgtgggattaatcttgtacatttcttttctgcgagacacaaatgcgcaaaccaaaagaaagaagaacccaaaaaaaaaaaatctgatggattttacaatggcgctacgccgatcttggccaaaccgaatcacccgatcgcccccacacaccgagctcgctggccccacaccgtgcacgacaccggcaaacacaccactcgagcgctcggccacccgcttgctcgccggcgccgcggcggcagcagcagaagcgaccgaagcgcacaccgattcggcgttcgcgcgctcttggtggtaatgatgtgtatggcggactgggtggcggcccgtgcaatcggccgacgtcccccgtgttcccctgcccttttgacccaaaaatttcgatggttttgcgtc

SEQ ID NO: 392734 - DNA, 551 bp, Oryza sativa
gttggttggcgctaatcgctctcgttccccatttcgctttggaggcggcgacggcgagaggcgagaggagatggcggcggcgcgggggcagaaggcggtggcggcgctgccgaatctggtgaaatcgctgcgcaggagcccgtctccaacgccccgaggctccggcacctcccgtccctcaggaggaccttctctctctacgatcagatcaacctcatcgatagcgtccccgaagaccagctccgattccaatcatatgatgacaccggattcaatattaacaaagtaaagtatgaaggaagcttgttgatagtagaaaacaagataatgacatgggcacccaaatcatttgcagagataacagctgaaagtttatcaatcttcaaagtagtgcaccctatcccagagattctgattcttggttgtggtagacacatccaaccaatcagtcctgagctccgcaaattcattcggtcaactgggatgaagctggaagcagttgattcgaggaatgcggcttcaacatataacattctgaatgaagaggggag

SEQ ID NO: 392735 - DNA, 508 bp, Oryza sativa
  unsure (1)..(508): unsure at all n locations
ctgtcagttctactggatgcggctgctccttgttactaacgaggtccaggtctatccacgccgtcctgacctggtattgccggagggcgcgaccgttcttcctttcagtgacgatgtttgggtggcagtcagcctacctactctcaaccattaaggcagaagaaaactacgccttaggaacgttgcggcagacaagaactggagccggtgcatttgtgaagttgtagcttctgccaagtttaatttacctcaggcgtagtgctagctggcaaacggaacatgtccatgctgcaggaaccatgttattagctacgatgtttagacggatgaactcttgtatcgtatctacctaattagttgcccaactatcttagcagcaacgtgaattgaacttctattatagttcccaaccttaattaaccgtgttatatgttttttttatataaaaaaacaacttaactttgttggactnnnnnnnnnnnnnnnnnnnnnnnnnnnnnnnnnnnnn

SEQ ID NO: 392736 - DNA, 302 bp, Oryza sativa
cgtttcatttttgatgatgagcctcaggcggaccggtcgctgtgagctcagcatcggcattgcgtcgtgcgactcttcagcccagagtgtgaaccacagaatatttgcagcttatgacaaacttggacacaagactggattgtattatagaaatattaggtcttgatcatcatctaaagaattagagctaggtagcaaacctctgtatcgtttgctgattcagtctaggagatatattgcatgtctttctctggaagaaagtcatgcatgagggaacttggccttaagaccttgcctccctc

SEQ ID NO: 392737 - DNA, 839 bp, Oryza sativa
ttccgaattccgaatccctcctcacttgctccctgcactgcagtgcaccaagcagcagcagcttccatgcttggcgattcgatgccatgtaggaagacgaagatgatgaagctagcgtagcctagtgatggctcaacccgccatggaagggacggtgcagggtggaggaggaggaggaggaggagcacaagaacctcgcggacagtacggcggaggcggcaagaacggcggcgacgcctccccgcgcaagcatgccgctgccgctgccgctgccgccttgccgcgacaccggcgatccaagagtgcttcttccgaatcggagcctggagccatgcaagcacgcggcggtgcacgatcagcgctgcaccccagcagcacaggcgacgccgagctctcatcaccaaccggacgcgacgacgaggaaatcccacgccgccgccgccgccgccgccgagggctcctccatccaccatgtactgacgagagatcgcagcagggcgagcgcgtcgccgaaccatcgcgtctcgctggagaatgatatcaggcagctgcagcttaacctgcatcaggagaggtcgactccggatcatgcttgaccgggcgattggccgcgcatccagcactctgtctcctggccacatgcatttcccagctcagacaaggaactgattgcagagattgaattgcttgaagaggaaatcgcaaaccgtgagcgcatgttcttaccctctacagagcatctttcgatcatctgcgttggagcatcctagggcagagttctggtctttctttccagcgcatccagagtatcagctctagacaagacgcatcgagcatat

SEQ ID NO: 392738 - DNA, 618 bp, Oryza sativa
tcttgataaatcggcgagccctcacgatgagaattcagttccgggcaaagctagaactcgcggaagaatgcgaaagcttgaactcacgaatagtgccaaagctagaggtgacaaagagaaaacttcaggaaggctaccaagaatttgataacgcaaagaagcagagaactatacaaatggtggatccacaaaatttgccgaaacaagcgaaccggaattggcagcctaatggcaggccgaggaataacagcaacttcaacaacaaccggaattggtcaagatgaggcaccaattccatcatccagcaccaagggatcatagactcccctcctcccaattccatccaaatttttcctctttttccggctaaagttagtccagccaagtacataaacagcaataaggctttccttcaaaacttgcttccagtgccacacacacacaccacaaacacttacttggagagctgtgttgctggtttgcactctcttttaaccttttgatcacgatggctggtttttttttcctagtggtttgtcaaaaaaacttgtaaagatagtgctactgccaatccgagatgagtttctgcaaaaccgatccaaaaaaagagaagcaaaa

SEQ ID NO: 392739 - DNA, 614 bp, Oryza sativa
gaatctctccataggtgctggatttttcaaacggccccacagaggttgacgctgatgatggaagctcatcggtaacgaattgacaaccgacacctattagggggcgggaaattttttaaaaaagtcggctcaatgagtcggctaatgctgattgctcccaatcctattgcccccaattcacaaaatacatgaatcaccaaatcatccgaatgcaatcccaaatcgaaatcaagaatccccccaaaatcaacatcccaaatcaaaccattgcctgggggtggttactaaatcaacatcccaaatcacaaaaatccccacaaaatattcacaaatcaaacccccgccatgccggagagaactgtcattggttccatgttggggaggaggacaaaccgccgtcgctgccggcacaccgaggaggggggagtagcaactatcgccatctcggggaggggagcatcgccaccaccgcttaggatttgaggagaggggagaggaggcgagataggagttgaataaaaagatagggtgaaaaaaggggcgtgcggacggagaaaaggaaaggaaaagagagggtgaaaaaagaggcttgcgcccggagaaaagggaaggac

SEQ ID NO: 392740 - DNA, 645 bp, Oryza sativa
gagctttccatagtaaagtatgagcctctatgggtcaaaggaggaaaccactgtaatttggaactgtacccagagtacattaagcatctaaagaagtttgttgggggccattgaaaaatcgccacccctatatgatgaatctccagagagctcaggtccatcagataatactcaaccaaaccctgaaggcacagaggaatctaggaaaagcacagactgcagggagaaaacaaggccaagcatagatcacagacaatgcacagatcgccgggtcatatcaaggggcagcacagataggagggataaaaacagaaagagtggggcccacccccggcctagtgtcggtcagcctggtcggcccaaggaaaagcgttgcccgctttggtggggtgatgaagtccgtcagatatatcgacggtttcagagtaccaccggcatctgggacctgaagaaaattttatatcccaaaagggttagcgttggggtccccggtatgtagcccatttgtataccttaattcattcgggtgattggtttggtcgttggaggcgtgtctcactacaatgggggggacttgtattgtttttcttgatttttttccaatatgaaataattatttgtccataagcatcttctttttctttt

SEQ ID NO: 392741 - DNA, 813 bp, Oryza sativa
atcatttcacaaacatactgtacgtattgctgcatttactatatctgactttgaaaatgttcaagtggcatttggttctgtgatcaatgtactttgtcctcaatgaattttcctttgtcatgagcacctgacttgtctttctgttgaataccggcacagcgcgtattgacaattcaccgattcaggctgtgttatgaagacggagcaccggattatacaagtagtcaggcactgttattctgtgaagctgactttcactgatccatccaccgacgcatcatcagaattgataaggaggagcatctgttctgttctgtagtttaacaggcccacccagatctgattcatttgattacctttcgttttcagatgaaaccatctggcacctgcgatccaaagaggccttgaaagctggtccatgtttatcttcagaaaccagaataacaagtccatggcttattgacatatcaatcgtttggtcagttagaagttattattgaaaaaagagaggaaaagttagtagttcatcatacgtacatggttgggtgataggcaatttggcatgtgaagagttatttggcagaggcagccaaagttgaagcagtatcctgtaaccaagttggtatacgcgtacgcctacgactacgagagcgatactgtcgtgtcacgtgtggcagccaagacacggtcatggactcatggtcaccatcactatcaacccacttgaacattcagatcaagcagctagtgagtatttttttttttggtaaatcaaggtcggctcattcattcaaataaagattcagagtttcc

SEQ ID NO: 392742 - DNA, 503 bp, Oryza sativa
  unsure (1)..(503): unsure at all n locations
aacttccaatttntctctccacatctctctgtgtttcttttatttctcctctgctcgcggcgatggcggcggcgaacggcggcgacagcaaggggttcgaggtgccgaagctggagatcaagttcaccaagctcttcatcaatggccgcttcgtcgacgccgtctccggcaagacattcgaaacccgtgacccgcgcaccggcgaggtcatcgccaagatcgccgaaggagacaaggccgacatcgacctcgccgtgaaggccgccagggaggccttcgaccatggcccctggccaagaatgtccggctttgcgaggggaaggatcctgcacaagttcgcggacctggtggagcagcacgtggaggagctggcggcgctggacccgggtggacgccggcaagctgttcgcgatggggaagctcgtcgacatccccggcggcgcgaacctgctccggtactacgccggctcggcggacaaggtgcacggcgagacgctcaagat

SEQ ID NO: 392743 - DNA, 239 bp, Oryza sativa
caccttctcgctggaacgggcgcgcgacttcttgccagagccctgacaccatggctggggatcttgatgatgctgatggtagataggagagctcttctgtttttgattcgctttttttctccttcttcttcttgtggtgagattcatttctttcattgttttttgataaaaaggaggagacgagtaagatcgtgtcatagacaagtgtccaaaggttaatttacacttgcacactttgt

SEQ ID NO: 392744 - DNA, 611 bp, Oryza sativa
ctcctcttcttgcaggcgccacgccgcctttccatcccgggcgccactgcaccgccgtctgcacatccctggagccccgccaccgtatcctctccaaccccatcccctcatcctcctgcacccctgccacagcctcctcctccccatccccactgtcgtttcctcgccatccccatcgatgtcttctcttccccatcttcagtggcactaccatgacctcctcctatccatctccgacagaagctgcagatctggtgtccttccatcttctttgctccctattcctcgcaatggggaaggtcaacacctctgcctcctttcgtgctggtgactccaatgcttctacctgtctccatccctaattcgccactaggaggcacggtgaagcaaagacaaaagggagacgccgaggggaatatggcggcagattgggaggggagatggtcatatggagatggaggcggcaagggcctcttcgtcacgtatagcaacttgtgcctccactccgcttccacttacggcctccgcctgaccgtgagtacattttatagaacttgtctagcctcatgttcaactttggtggataaccatattttgttcatctgaggtgc

SEQ ID NO: 392745 - DNA, 615 bp, Oryza sativa
ccttttcccaccaaaaaccctagcctccccctcctcttccagattcatcgccgccgcgccgccccgagcccagagtagccggcgacgatgccgcccaaggcgtccaagaaggacgccgcccccgccgagcgccccatcctcggccgcttctcctcccacctcaagatcgggatcgttgggttaccaaatgttggcaaatccactttctttaacatagtaacaaagctgtctatcccagctgagaacttccctttctgtaccatcgacccaaatgaggcacgggtatatgttccagatgagagatttgattggctttgtcaactttacaagccaaagagtgaggtgtctgcatatctagaaatcaatgacatagccgggcttgttagaggagcccatgctggggagggtttgggcaatgccttcctatcccatatacgcgctgttgatggaatttttcatgtattgagagcatttgaaggcaaagaagttactcatattgatgattcagtggatcctgttagagatttggaaactattggtgaagagctgagactcatggacattgagtttgtgcagaacataattgatgaccttgagaaatcaatgagagaagca

SEQ ID NO: 392746 - DNA, 880 bp, Oryza sativa
gtactggacggaggtgatcgacatcgccaagcaaggggatggatcgatcttggtgaagacgtcgagcggggaggagttccacggcgccaagtgcatcatcacagtgggcgcgtgggcgagcaagcttgtcaagtcggtcgccggcgtcgacctgccagtgcagccgctgcacacgctcatctgctactggaaggcccgccccggccgcgagcatgagctcacgccggagtccggcttcccgacattcgccagctacggtgacacctgcatctactccacgccgtccatggagttcccaggcctgatcaaggtgtgcgcgcacggcggtgcgccgtgcgacccggataggcgggactggtgcgctggcggcgacgccctggcggacccggtggcgtcgtggatcgacgagctcatgcccggccacgtcgacaccgtcggtgggccggtcatccggcagtcgtgcatgtactccatgacccctgatgaggatttcatcatcgacttcgttggtggggagtttgaaaaggatgtggttgtcggcgccgggttctccggccatggcttcaagatgggacctgcagtcgggaggatcctcgccgagatggccatggacggcgaggccaagacggcggcggaggccggagtggagcttgggtatttcaggattggacgtttcgagggtaacccggagggaaatcgtgctgaaaataaggtgaaaatttgagtcctcgcgtaggcatggccacctgtaagagctagatctgtaaggtgatgtcggtgtgcgattgtgagatgtttgctagtactgtaatatgtcaaacattgcatttctgaacttatactccctccgtttcgaaatgtttgacaccattgacttttt

SEQ ID NO: 392747 - DNA, 521 bp, Oryza sativa
gaacatggtcacccaaagctgtgccttcgcagagtctcagaactcagtgctgcgcactcagatgatggagctggatagcaggctatcagcgctccgtgagataatcttctacatgaacaatggaaaccaatcaccttctaatcctacaatagcagcgactacattacccatccaccactacaatgactgcagcaactactggccattacgattattatgatgttttcactgcaaatgcatggggctcagggatgcaaatgatgcagcagcccatagatcagtttctgtaccagtgctagctagcttctagccaggaagtcgatagagatagtggaccaaattaagaaacagggcattgagatattgggcgtggtgaatgttgtagctaggtccatattaattatattgtgtcaccagtggttgtttatcttttgctttgatttgtgatcggttgtgggggcaggaaaaaaatggtgttgtacctttctgctgttggtggtaagaggccaaatggctattgg

SEQ ID NO: 392748 - DNA, 430 bp, Oryza sativa
aaatcgcaattccccaatccatattcccttcccttcctttcctcctcctccatctccaccctcccgccgccgccgccgccgccgtcgccgcggcacactccccgggaccagcagaggccgccgccaacgccgcgggggcaggtaaaaaggcgcgcgagacgcccgcctctgcccgctgacctagatcggtagggtttactcgggcgcccgggtcgttcgtgtatgggggcgtgggcggtgggggattaggctttcggggtcggggggtcgggaaggtgtctgatcggatgatgggtggctctgttctccttctggggtgcggggttagagctagggctgtcgcggcgattttattttattttattttagttgaatttgaccggaatttccacgatttggatgggtttgtattggttggattgtggtagag

SEQ ID NO: 392749 - DNA, 697 bp, Oryza sativa
  unsure (1)..(697): unsure at all n locations
ctgtcagtggccgctcctcttcgccatcatctccgaggggttcggcctcaagtactactccaggctctacaacttcggctccgtggcgagccccgtcggcgcctacgtcctcaacgtccgcgtcgccggctacctctacgacgtcgaggcggccaggcagcacggcggctcgctcgccggcggcgacaagacctgcctcggcgtgcagtgcttcaggaaggccttcctcatcatcaccgccgccaccgtcgccggcgcgctcatctccctcgtgctcgtctggaggacaaggaacttctaacaagggggaccatctacgccaagttccgcgagaacaccgccaccgacgaaggctaccaccaacggtaactccgccgatacagcggcggaaaaaaggtcaaccttagtcaatgacgaggacagtaaaaaggggtagtaatgtagtttactgatataaagattactacaccaaaagacaagagcttgttacttcttattagcagaaaagtcaaaaaatggtaggcttgctgctaatataagtttccagatatctgtaaaaaattttggggctaaaaagaaagaatctactactagtggagtaaacaagattaggcagcagctctgtgcttgtacccattacaagcaacagtaagctgcaagctngngtnnnnnnnnnnnnnnnnnnnnnnnnnnnnnn

SEQ ID NO: 392750 - DNA, 744 bp, Oryza sativa
  unsure (1)..(744): unsure at all n locations
atctgcattcgaaggcgaaggcgaaggattcgggctcagctcctccgcctccgccgatctctcgccggagatgtgtcagccctaggagaggagaagctttctttttttggaaaatcgagtcaacaaaaggtcttgccaattaacacagtgaaggataattctggcttgagtgtttgtaaatggagagaataagcaccaatcagctctacaattctggaattccggtgactgtgccatcgcctctgcctgctataccagctaccctggatgaaaacattcccaggattccagatgggcagaatgttccgcgggggagagaattgagaagcacacctatgccacctcatcagaatcagagtactgttgctcctcttcatgggcattttcagtccaggaccgggtctgttgggcctctgcgttcgtcccaggcgatcaggctctcttcagtttcaagcaatgagcagtatacaaatgcccatccttacaattctcaaccggcgagtagtgggaggtcttcaacgctcaattatggatcacaatatggaggctttgaaccttacttggctgattttgcaagagatgctgggccgacctggcgtcctgatccagctgatggcttgcttggatatacagatgatgtccctgctgggaacaatntgactgaaaacagttctatctgcagtggggatgaacttgccagcacagtgaatgatggcatgatttatgaattatgactggaagata

SEQ ID NO: 392751 - DNA, 430 bp, Oryza sativa
agcacgcctcttcttcttcttctccatcttctcacccaccatagccaccttcttccttcctgcaactcggctttctggtccggaggcggctgctcccgctccttcgccggcagaggatggcggtgctcgcggcgccggtggtcgccgccgtgctgctgctcacctgggcggcgtacggcgaggcccaatacgtgctgtacaaggacgccaccaagccggtggaggcgcgcgtcaccgacctcctggcgcggatgacgctcgcggagaagatcggccagatgacgcagatcgagcggcaggtcgcgtcgccgcaggtcctcaaggactacttcatcgggagcttgcttagcggcggcgggagcgtgccgaggaagcaagccaccgccgcggagtgggtgagcatggtgagcgacttccagaaaggggtcgt

SEQ ID NO: 392752 - DNA, 504 bp, Oryza sativa
gctgagtttgagaggaaggttggaggcaaggaagagagacagaggagaaggaagagcaggaggggagggaaaaggaaaaccctttctctctctctctctcagcctctctctccctctctcttcttctccttccttgcaccaccgtcctactcaccgtcgcatcatccactgatccggccggcgatatcacctccatccatccatcacattacggtcggcgtcggcggcggcgacgacgaaggcgggtgagatctcaccggagaagtgcaggcgggcaggatgcaaggaggagggccactcagccccgacgagcaccgggccacctcgccgccggggataatgcaccaccagccggcgatgacgatcgtcgtcgccgtggaccgtgaccggaacagccagctcgccgtgaagtgggtcgtcgaccaccttcttaccggcgcctccaccatcatcctccttcacatcggcgtccacccccctgccgccaaccatggatttgccatg

SEQ ID NO: 392753 - DNA, 459 bp, Oryza sativa
gttcggtcggagcacgcaaaaatctcgctcacctcgtgaagagctgagatcaaggggggagagatcggaggcggccgtagcgtggcggagatggatcctgctagcgtcaccgccagccccagcggcgacccgatggcggagtgccctccggcggcggctgccgctgaagggcagcgacgccatggactgcggcggcggcgggcggagcaacgcgagggtggccggagtgctccgcgggttcctcgccgtgcagcagcgccgcgccgaggcgtactccacgctccgaaaggggtttttctgaatacatggctaattggaggtgaattagcttttcaacaactatgcgcgagtgttaccgcggagttcaatgattgctcgaaacaagttctcgaaatggtagccctcctatcaacgccagaaatttgtcgtggcgatcttgcccacttacttgaggatgtg

SEQ ID NO: 392754 - DNA, 839 bp, Oryza sativa
  unsure (1)..(839): unsure at all n locations
ctacgccttctcccgccccatccttgtcctcctcggcgagtccccggagatcgccagcgccgccgccgtcttcgtctacggcctcgtcccgcagatcttcgcctacgccgccaacttccccatccagaagttcatgcaggcgcagagcatcatggcacccagcgcctacatctccgccgccacgctcgccttccacctcgtcctcagctacctcgtcgtctaccagttcggtcttggccttcttggcgcctcgctaatgctcagcatcagctggtgggtcatcgtcgtcgcgcagttcatctacatcgtcaccagccgccggtgcaggctcacttggaccggcttctccatgctggccttctccggcttgcccgacttcttcaagctgtccctcgcctccgccgtcatgctctgcctcgagacctggtacttccagatcctcgtcctcatcgccggcctcctcaaggaccctgagatggcacttgcctcgctctctgtctgcatgacaatttctggatgggtgttcatgatctcagtcggattcaacgcagcagccagcgtgaggggtgagcaatgagctcggtgctgggaaccccaagtcggcggcattctcggtggtggtggtgacggtgctgtcgttctttctgtcggtggtaatctcgcttgtcatcctgctgtgccgggactacatcagctacatcttcaccgacggcgaggacgtngcgacggcggtgtccaagctcacnccgctgctggcgctcaccctcatcctcaacggcatccagcccgtnctgtcaggtgtggccgttggctgcggatggcaagcgttcgttggccta

SEQ ID NO: 392755 - DNA, 640 bp, Oryza sativa
ctcccttcctccacttcacccatctctcccgacctccacctccatatctatccacttctcactctctcacactctcactagctaggagcactccactccaatttactactagtatctctctctctccaactaccgccattgccttcttggcaagctcggttttcttgcggagatgaaggggctcagtgggccgaagctgctggtggtccacccgtcgtcgaacaagccgctgggtggcgccgcgtcaccggcgatgccggtccttggctcccgccgccggatgtgggtggtgctgttcttggccgggttcgcctgcgtgtcgctcggcacgatgctgtgcgccgcgcgcgaccacccgccgccgcccgtcgccgcgaggaggctggcggcggcggaggcgcaggcggcgacgctcgcagtgtcggcgcggggtgacggtgcgggtggaggtgggggtgggttgccggggtacgtgttcgacgcgctggtgcagtacgcgtcggcgggggggaactcgacggcgagcatgccgggcggcgacgtgcgcgccatcgcggcggtggtgaagcggcgggcgccgtgcaacttcctggtgttcgggctcggcggggagacgccgctgtggcgggcgctcaaccac

SEQ ID NO: 392756 - DNA, 475 bp, Oryza sativa
tatgcaattgtgcaaaccatgctatacatgggatcttgacatgatgtgcacgtgtgctctgatgctcaatctgagtgtgggtaagtttcagagaacctctcaaagttaataactgggttgagattttatcgagttaagagtttcctttgtgttttggagtcttttcctcttctttacccttctcatggaggtgcaggagcatacgccgtgtgctgctactgcagacttgtccactgctatatggaaccactgctggagttgcagaacgttggtgccatgccatgcagggcatttgttagtgtattgctgtagactagatacattttcgatgtaggcggtaacatggcaaacagtattgtgctgctttcagtatatttcttttttttggccaaatttgtttatgcatgtaaaagcaattctctcaacattgtatttgaacagtttggtcgaattagccgatcattcttatgcaccc

SEQ ID NO: 392757 - DNA, 799 bp, Oryza sativa
gggtgagccatgggcgacgacggtggtggtgatggcggcgcctcctccgcgggattctcctacttcgccgtcttccacaactaccccctcgtcgccgccttgctgggcttcgccgtcgcgcagtccatcaagttcttcgtcacccggtataaggagaacagatgggatcctaagcagcttatcggttctggtggcatgccatcgtcacattctgccacagttacagcactagctgtagcgattggcttccaagatggttttggctgtgccctatttgcgacagcagcaatattcgcaagtgtggttatgtacgatgcttctggtatcagattacatgctggaaagcaagcagcggtgttgaatcaaatagtctgcgaacttccttctgaacatcccttgtctgaaacaagaccattgcgtgaactcttaggccatactccaacccaggttgttgctggagctttgcttgggtctatgctagcaacagcagggcaaatgttccttgtagtatcaggttctgtatgatgctgtgtttcaagctgcatgggaattgctagcatttgtaggggtcttgagaagaagaagaagaggcttctccagtgtcctgtcacttaggtattggtaagatttgtaacaatgagatgttgtggtgctgttgtagttttgacggcacgtgatacatgcatgtgcaggtggtgtacttctcagcattgttgttcggcatatttgttcgataacttcattattctggtgaaatctaaaatgtgagtatgtcacccatggttgttgatcaaacaaa

SEQ ID NO: 392758 - DNA, 446 bp, Oryza sativa
ctttgttcctttcattttttctcctcttactctctctcttctcaaaaagtcacgagagatgccgagggcgaggcgtcgtcgccgtcgccggcagccacacggcgacatcggcggtggggcaaggtggtgcatgcataggtaggaggtgctgaacctcgccggcggccacaagatggcgatgaggcaaggcggcgcgagttagggaggaagcactggacctcgtcgatggggggcgtggtagggaggaggcgatggacctcgtcggcgtccacgggacaggcaacgcaggattagggaggagtcgcggtggcttgcagccggtcgccggaattgctatactccggccgccgccgtctctagcccgggatccgcgccggccctcctccgccgccccgtcactcgcctttgccagcgtttaaggcggccccctaaaaggatccaacctc

SEQ ID NO: 392759 - DNA, 483 bp, Oryza sativa
aggtcaaggggagcagggtaagacggcgatgagaagaggtcggaggaggagcagcctcgccggcgggagatggcgcggcggagcaacgacgtgatcgaggaggcgcggagcaagctcctggagaagcggcagtgcagcagggtgaaggcgctcgtcggcgccttcgagaccgtcatggacgccaagcccgccggcgacggcgccgccgccaagccgcagcactaccaccctcgccgttgattaaggaggaggaggccttaattgaaggagattaataaccactaatgcttgcttgcttcgtaaattcgccttttggatttatttatttactgctccgacttttcgtcacacactatactactgcatcacggagtaaatatatgattattctgtgatgatttaattaaggagggagatgatagaggaggatgatgtactcattttgtttcagaaaaatttctgcactgaaaaaaaaaaaaaaaa

SEQ ID NO: 392760 - DNA, 501 bp, Oryza sativa
gcatcattcaaaaagctgtgctgttaattcatttctgagcagacatgaatcatcatcaactgtagatttcaagttactgtcttggcctgctcgaagatcattccatccaaatctgccacttgaagacgaggaaacaaaaacatatgaaagtgcaagtgctctgtccttggccacatttgcctcccttctaatcgagtttgttgcccgactacagaacgttgttaatgcatttcaagagttgagtgataaggctaacttcaaagagcctgtgcaggagcctgttgcagttagtactagtgatggcggctttctccataaaatatgcaaattcgtcggaatcaagagttaacatcgcaaatgaccctactagtttcatctgaaaccttgttattcttttttttttttcaatacagttttgtttaagaattacgaaccacgaaatgtgtataaattctacacttgtgtatatgcaatgagaatattgcgagctttaaaaaaaca

SEQ ID NO: 392761 - DNA, 590 bp, Oryza sativa
gtcccagctgctcggctcctccctcgcctgcctcctcctcgccgccctcaccggcggcgaggaggccgtcccggtgcacgcgccggcgcccggcgtcggcgcggcgcgcgccgtggccatggaggccgtgctcaccttctccctcctcttcgccgtctacgccaccgtcgtcgaccggcgccgcgccgtcggcgcgctcggcccgctcctcgtcggcctcgtcgtcggcgccaacatcctcgccggcgggccctactccggcgcctccatgaacccggcccgctccttcggcccggccctcgccgccggcgaatgggccgaccactggatctattgggttgggcctcttataggtgggcctttggctgggctggtttatgagggcctcttcatgggcccgcccggccatgagccgcttcctaggaatgacggcgacttctaagttaattaggccttaataataactttgatctcgagctagtaaaaataatgaatgtatgagaagtgattggtttttaggtgcatgtaatttctactcgtttggattattgaataagaattttaggttaaataaaaaaaaaaaaaaaaaa

SEQ ID NO: 392762 - DNA, 636 bp, Oryza sativa
gccggcaaaggagtggaagccaaaatcaacaaagaagtcttccaacattgatactgataataacaatggaacagatgtaataacaacttcagctagcaacactgaaaattctaatgtgttggatgagaatgctttgtgtgaaaaaacctctcaagcttgcatacatgaggtggagcatgttattatcccagaacatctccgtgtaccagagtatgagcagacaggattaaggtctggcagtttttcccctggatctggtgcagaccaagtatcaagctcagaaagtccatcggaatctgaagaacaagaacatgtacaagaaccagttcaacttgttgttgaagatgactcattgcgtgctggacatgatgaggtagatgtgggaagcaagatcttcacaactcaatctttccacattgacagccgagatatccttgccaccatctgaggatagcgtagaaatgaatggcgaagaggttgagaacgatgatggtcttgggttggttcagagtgatactccacttgcacctgttgatggccaaaatatgcagagtgcctcaaatctgactgcgttttcaacatatggtcatgaagaccctaatatgcatccaagtaatgaggcacagttatacagac

SEQ ID NO: 392763 - DNA, 625 bp, Oryza sativa
  unsure (1)..(625): unsure at all n locations
cttcacggcggcaggaggcgccgccgcggcnggaggccgnaacgcgcacggcggggtgctgtcccgcccgtnccagccgatcnccaaccgcacgcagaagctcgcctcgcacatccgcgccacacccctggaggaatgggaaggtagaatgaacgtggggatgtcaaattcagtgacgactgcgataagggacagcataagggagacggcaattgggaaaacatggaacacagagaaggctgatcgtgctacagtagaacaggctattgatccaagaacacgcatggttctgttcaagatgttaaaccggggggtttttaataccataaatgggtgcatttctacagggaaagaggcaaatgtctatcatgcatcaaaggctgatggccaggagttagcgatcaaagtctataaaacatctgtccttgtttttaaggatagagaccgatatgtccatggagattaccgctttagacatggttactgcaagcataatcctcggaaaatggtgaagacctgggctgaaaaggaaatgagatatcttttacgagttggagcagctggaatccgatgcccaaaaccattgctcctgaggcttcatgtactggtgatggaattataggaa

SEQ ID NO: 392764 - DNA, 868 bp, Oryza sativa
  unsure (1)..(868): unsure at all n locations
gtggatgttctccgtgaccacagtgaggatgtacgcactgtgttccttctagcatcagtaaatctgatatttactggtggtaatgactctgtgatccgaatgtgggacttggaggaagggcttttgattgataagtcccgcccactttgttgcaccatccgggccattgcagctgacactaggcttttggtcactgcaggaaccaatgcctttattcattgttggagggctgttgaaggtaattcttaccctttccacatctctgggaatggcactgaccagagtcctgagtttcgcctttgggggcatgaaggacctgtgacttgtcttgccttggattcattgaggattttcagtggtagctgggatatgactgtccgtgtttgggacagatccgaaatgaaatgtgttcaaaagttcatgcatgcagattgggtttggagcgtggcacctcatggaaatactgctgccagtacaggctggtagggatgcctatgtatgggatatcaggagtggtgagttggaaaatgttatttccaatgcccattatggtaatgcattttctttagctcgaacacacctagctgatgtgctgtttaccggaggagaggatggggcaattcgcctgttcaatgtttctgaggtctctgatgatgaagatattaagccagctgctacttgggttccacataccggccctgttcattccctcgcttttgagtatccatggcttgtctcagcctctagtgatggcagggttgcactgattgatttgaggaagcttctgaccccaagaaagtcatcaaacaaccattcagggttaagactttgatccaagtccatgnacctccacagagaatgcttcatg

SEQ ID NO: 392765 - DNA, 525 bp, Oryza sativa
tcgttcgactcaagtgaagagtccgccgcctttccctcctcgccgccgctcggatggggatggcccccgccggtcgcctcctcctcatctcctgcctcctctgtgtgcccaattcatttggatttgcatttgctgtggaggaggaggaggacggcagcgggctgatgccacagctctcacccaccggctctcccaaccccttggttcccttcctcgcgcccgcccctctcgcgccattcttcaacaccacccctcctaacttgtcaggcaagtgctcattgaattttactgctgtcggtgacctcatcaccaccactgctgtcgactgctttgcgtccttcgccccgttcctcgccaatgtcatctgctgcccccagctccaggccatgctcaccatcctcattgggcagtccagcaagcagactggctcccttgctttggatcccaccgtcgctacctactgcctctccgatgttcagcagctattgttgagccagggcgctagtgatgagcttcacaacattt

SEQ ID NO: 392766 - DNA, 588 bp, Oryza sativa
  unsure (1)..(588): unsure at all n locations
caaattttagtgacacaaccctcgtgaagcatgtgcttggctcaagccagctcgtgagggtaagaggaaggtgcactggggataaccgaagaattgtgcaattcaggatggaaagggggttggagaactggacggtcgactgcacctgtggagccaaggacgatgatggcgagaggatgcttgcatgtgatgtttgtggagtttggcaacacaccaggtgttcagggattagtgattttgatgatgtccctgagaagttcatctgcaggaagtgtgctagtccacgcagaggaaagggtcgtggtggtggaggtggcaatggtggtagcagaatggatgtgagcgctgcagggaggtgcaaggatgagataggatcatctgttggcggtgcaggcaaatttgggcgcatggcaactgttggatgactgtacataatgtgtgaaatgtaaatactgaggggagagtggggagtagcacctgaggcctgtgtgaaccttcatggaatcttgtctttctgaccagtgatatgatgttaatctatcctccttggaagcaaaaaccaaannnnnnnnnnnnnnnnnnnnnnnn

SEQ ID NO: 392767 - DNA, 1018 bp, Oryza sativa
  unsure (1)..(1018): unsure at all n locations
gcgacggttcgnatcttgctggacaacgccgggagcgagaagacggcggggccgaacctatcggtggggggatacgaggtgatcgacgccatcaagacgcagctggagcaggcgtgccccggggtggtgtcgtgcgcggacatcgtggcgcttgncgcgcgcnacgccgtgtcgtaccagttcaaggcgtcgctgtggcaggtggagaccgggaggcgcgacgggcccgtgtctctggcgtccaacaccggcgcgctgccgtcgccgttcgccgggttcagcacgctcctccagagcttcgccaaccgcgggctcaacctgaccgacctcgtcgcgctctccggcgcgcacaccatcggcaaggccagctgctccagcgtcacgccgcggctgtaccaggggaacaccacctccctcgacccgctgctcgactccgcctacgccaaggcgttcatgtcgtcgtgccccaacccgtcgccgtcgtcgtccaccatcgacctcgacgtcgccacgccgctcaagttccgacagcggttactacgccaacctgcagaagaagcagggcgcgctggcgtccgacgccgcgctcacccagaacgccgccgcggcgcagatggtggcagacctcaccaacccgatcaagttctacgccgcgttctccatgtccatgaagaagatgggacgcatcgacgtgctcaccggcagcaaagggaatatcaggaagcagtgccgctccgcctcctgaatcctgacgatcaccatacaaacatattttcttcttggtttcttgaatttttttttcttcttctcctctctcgtttcatcggcgctgatcaaaatatattgtgcgccatgatgattaattaaggtcccaagatctgtattaatttgttaagtgctcgattcgatcgttcaaggtgtgacattttgttcatcttggccttcgtcgcgcgatctaatcgaagaatgaaagaatgcagctcgttctttccactgctgcttcaaaaaaaaaaaaaaa

SEQ ID NO: 392768 - DNA, 964 bp, Oryza sativa
gagcagcactgggtcttacattccaatggagctcgcctgttgctttcattacatgcttcgtgactttatttgctttggtcattgctataaccaaagatctcccagatgttgaaggggatcggaagtatcaaatatcaactttggcgacaaagctcggtgtcagaaacattgcatttcttggctctggtttattgatagcaaattatgttgctgctattgctgtagcttttctcatgcctcaggctttcaggcgcactgtaatggtgcctgtgcatgctgcccttgccgttggtataattttccagacatgggttctggagcaagcaaaatatactaaggatgctatttcacagtactaccggttcatttggaatctcttctatgctgaatacatcttcttcccgttgatatagagaccaagcaatctgatatggtctgcatgttgagtgcggcaaaaactagaagcccatatgaacagtgggagtaggggaacgaacatgccatccatgggaagactctgataactctctctcgcccgggctgtaaagggtaagcactgttgggcatatatatgaaaggaaggtgataaagcagggatgctaaattgctactgggatcctcaaaggcttatagtggtcaccagtggaatgtgccttaataatttggttacccagcagagcaagtttttgcaggttattaggtaatatctttgagggaatgaacttagatttcattgttttaaggtctggtcacacaacgggtagtagtgctggagcggcaaaaaacgaccttgttttacactaccaagggaggttaactctagttttcatgtgaccacttaccttgagagttgagaccatggaatcacttgtcgactcctcggcttgtatatttctagtgtcagcatttgcattctcctccccacttgtacttgaaaagttgaagacaacttttttgtttgtgt

SEQ ID NO: 392769 - DNA, 1166 bp, Oryza sativa
  unsure (1)..(1166): unsure at all n locations
ggatggggctcggctacatgtaccactgcattgccatggaggagatcagcagggcgtccggctcggtcggcctgtcttacggcgctcactccaacctctgcattaaccagctggtccggcatggcagccctgcccaaaagctcaagtacttaccaaagctaatcagtggggagcatgtgggggcattggcgatgagcgaacccaactctggttctgatgttgtcagtatgaagtgcaaagctgagaaagtagatggtggttatgtcattaacgggaataagatgtggtgcaccaacgggccatctgctcagacactggttgtgtatgcaaaaacagatatagctgctggatcaaaaggaataaccgcgttcataattgagaaggggatgcccgggttcagtactgcacagaagttggacaagcttggcatgagaggaagtgacacatgtgagcttgtgttcgagaattgttttgtgccccatgaaaacgttctcggggaagaagggaaaggtgtttatgtcatgatgtcagggcttgatctagaaagacttgtgttagctgcaggtcctatcggcctcatgcaagcatgccttgatgtagctgttccttatgttcgccaaagagagcaatttggccgtccaattggtgaatttcagttcatacaggggaaattggcagatatgtacacctccttgcagtcatcaaggtcatttgtttactcggttgctagggactgtgacaatggtaaagttgaccgcaaggattgtgctggtgtgattctctttgctgctgaaagggcaacccaggttgcacttcaggcaatacagtgtcttggtggcaacggatacataaatgagtacccaactggccgattgctgagagatgcaaaactgtttgagattggagccggtactagtgagataagaagaatgataattggccgcgagctcttcaaagaggagtgaaactattattttggaagccaggtatctgatatgtataacttggggaggtgagcatgatttggacaatttgtacacatcgtccctgatgtcctatatctgataatttgtccaagatttgtcatgactttgtatatttccaatttaataagaaataaaatgcacctttctttcctnnnnnnnnnnnnnnnnnnnnnnnnnnnn

SEQ ID NO: 392770 - DNA, 529 bp, Oryza sativa
cagaatgctaagctaaagtgctaaactaagcacgagaaaatctaatcaaccaagcttagattagatcattagctatatatagctaggcgatttaatcatccacgagctagcttattagctaagcagtagcagcagcagaagatcgaagatggtgaaggagttcgtgcaggacgaggagaagcagcggctgctgcgggacgagcacaccgagaagcacttcaccgccggcgaggtggtccgcgacatcatcatcggcgtctccgacggcctcaccgtgccgttcgccctcgccgccggcctgtccggcgccaacgccccctccgccctcgtcctcaccgccggcctcgccgaggtcgccgccggcgccatctccatgggcctcggagggtatctggcggcgaagagcgacgccgaccactaccaccgtgagctgcatagggagcaggaggagatcgacaccgtgccggacacagaggccgcggagatcgcggacatactgtcgcagtatgggctgggcccagaggagtat

SEQ ID NO: 392771 - DNA, 501 bp, Oryza sativa
  unsure (1)..(501): unsure at all n locations
agctttagcgttggcaaggagagagagagaagagagagagagagagagagagagagtaattaaggctgggaggataggcagcagcagcagcgagagggaaacgagcgagcgagcttagctggtgcttgcctataggtagctaagcaaaatggggcagaggaggaggtcggggccgcggcgtcagagccagagcgtggtggtggtggtggtcgccgtgttgctggcgacggcgtcctgcgcggcggcgcagctgagccagagctactacgcgtcgacgtgccccaacgtggagacgctcgtccgcggcgccgtcacgcagaagctcaaggagaccttcaacgccgcgcctgggacgctccgcctcttcttccacgactgcttcgtcagggggtgcgacgcgtcggtgctgatcgcggggccggacgacgagcacagcgcgggcgcggacacgacgctgtcgccggacgcnctggacctcatcaccccgcgccaaggcccgnc

SEQ ID NO: 392772 - DNA, 613 bp, Oryza sativa
  unsure (1)..(613): unsure at all n locations
ggactttttacgagtccaccagccagcgaatgaaagctttgctccgatgttgcacggcttggctttgcgtctgcccaagactcgcctcctctaagagttgaatctggggatttgactggcaaaagtgaaagcacgggggaacaagggccagccgcaacacccgcattatcctttgccagcatcatttcctccactagagcgtcagacaatagcctggacacgcacaaaccaaatgtagtcgggaagaaaggcaagaaacccaccaaagtgctcttgtccactggcggtggccgccgatactgaaggaagagtgacactggaatggaagcagttgccagttggctgtttcctataagcagtgtgtatagtgcataacctggacttcacatctgtaacactcccaagtcccaagtagcagctttttctcccatgtggtttgatctaaatcgcctgactgttttagaaggtttttactgtgtatctacatcctgacccatgctaagggagtaagggtgactgccctgtcgcaaaatgagaagagctatgtaaaatnnnataaataatgatgctaaggatcatgcgcaatactttgctcaaaaaaaaaaaaaaaaaa

SEQ ID NO: 392773 - DNA, 491 bp, Oryza sativa
ttcgccttgcgtcccgcggccaccatcaccaccaccaccaccacccacctcctctcctcccggatccgagatccgatccggcggcgatggcgtcgacggcggcgaggcggctacgggagctgcaggggcaggcggggaacaagacgtgcgtggactgcgcgcagcggaacccgcagtgggcgagcgtctcgtacggggtgttcatgtgcctcgagtgctcgggcaagcaccgggggctcggcgtgcacatcagcttcgtccgctccgtcaccatggactcgtggaccgaggcgcagctccgcaagatggaggccggcggcaacgaccgccttcaacgccttcctcgccgcgcggggcgtgcccaaggaggaccccccacgtcgccaagtacaacttcaacgccgccgccgcgtaccgtgaccgcattgtcgccgtcgccgagggccgcccgtggaccgacccgcccgtcgtgaaggagacctccggatctg

SEQ ID NO: 392774 - DNA, 383 bp, Oryza sativa
tgagtaattaatcgaaaatggtttgcaggtcgtgcgcgatgatccgctgagcggggggcggccaccagatcagcccgcgcatccaactccggcgagaggaggaggaggaagaagaagatgtcttgctgcggaggcgccgaggaggacagctacggcccgccggcgaaccaggccgctccgccgcccaacgtcaatgctcccgggaatagaggcgggccgagagggccgggggccgtcgcggccgggcgggccgccgaagccggtgaacatcgacgtgccggcgataccgttcgaggagctgaagaagatcaccagcaacttcagcgaccgcgccctcatcggcgagggcttctacggccgggtttacacgggacgcttagcga

SEQ ID NO: 392775 - DNA, 612 bp, Oryza sativa
gcttgctgttgcgagggcctttggggaccaaagcctcaaggcgcacttgagttcagaacctgatgttaggcatgtaccaataaattcaagcatagagttcgtcatacttgccagcgatggactatggaaggtaatgaagaaccaggaagccgtcgatcttgtgaagtcgatcaaggacccccaggcagcagcgaagcgactgacgaccgaagcgcttgcgaggaagagcaaggacgacatctcctgcatcgtcatccgattccgctgctgaacacccgcttcgcaacattgtctctgcgtttctcttcgttccgattgaatttgtgtggtggtgctgaaaaaagatggtttacctatagtatgtagctgttgtgaacagaccctagagatgagatatgttagcaaggacaaaactggagatgttcaaacttgtgggttcagtagcgagtagtgagtgtgtgcagggtggtggtgggcggtggtgattcgtctgtgcatacatacaccagcataaactgttttatcaatcgaacggggcgtgcaggttgttgccgttgtgtacatacattgttgcttggttttggctgtgagttgtgaaatggtagtagtccc

SEQ ID NO: 392776 - DNA, 620 bp, Oryza sativa
atctgcggcagcctcaacaccacggtcaccgaggagatgatgaacatcctcaagggcatcgagaaggcgtccgggtggtcgatgccgatggtccacatcgaggacgtgtgccgcgccgagatcttcgtcgccgaggaggagtcggcgtcggggaggtacatctgcggcagcctcaacaccacggtcaccgagatcgccggcttcctggctgccaagtacccccagtacaacgtcagatgcgattgcatcgaagagcatcaccccgagaagccgaccatctcgctctcgtcggcgaagctcatcggcgaagggttcgagttcaagtacaagaacctggacgagatgtacgacgacctcgtcgcgtacggcatggcacttgggttgatccccaactgacggtgatgatggacggcgtgattcccctgatttggcgattacgaccaaacgtgtgctgctttcaaaaacaccattgtgtctatgcaaatatgcaattgctacattgctagtagtaccaagttttccaaaacatttggcggtttggctgtactccgttctgttcatgtaacaggaatgttgtggtctggcccgtggagaaaacaaaaaaaaaaaaaaaaccaaaa

SEQ ID NO: 392777 - DNA, 828 bp, Oryza sativa
gtggctttagccagtcagacttatgacctggttgatgctcatatccaacagctagatcagtttatgagaaaacttgaagaacttcgacaagaaaaggaggcagctacaactgctgctgctgctgctgctgcggcggctgctagtgttgctacaggtacgcctgttgctgctactgtaacagctagcgctggtacttcaactgctgacaatactccaaaaggtggaaggtctagcgaaagaggccgagggggtcgaaagaagactgctaaggtgcccactgagcaaccagcaccagccatagatggggaactgcctgtggatcctaacgaaccaacatattgcctctgcaaccaagtcagctacggagagatggtcgcatgcgacaataatgattgcaagatcgaatggtatcactttgggtgcgtcggcgtgaaagagcatccgaaggggaagtggtattgcccaagttgcattggattccaaaagaagcgaaaaggaaagtgaaatgtgatcaacccttgataggaggtagcttcttgatgataagtggtgatggacgtgggtaacaaaaacatagtagctggtactgtgaaatactgttgtagcttcagtgatgatgtacatgttacccctgtgttaccgaggaaatgctgtaggcgtcttagagttagggaccagtcaatcatgaagagcagttgtgcctgtattggtgtatcttcattgcctttttttggtggatgtgtaggttgtaattgtaatctatccctcccatgtgggcttgatgcaatctacacataaatctgtttatacctaaaaaaaaaaaacaaa

SEQ ID NO: 392778 - DNA, 302 bp, Oryza sativa
  unsure (1)..(302): unsure at all n locations
cttattttaatttataagtggatttgcggtttattttagcctacaagtggatttcacgccacttacactcgtaccataaacccccgtaacatcttttcggttttcactgtgtgagctgctgcctcttgtggtagtatagtgttccctgttcagtgtccagagagtgataaaaaaataattaaataaagcctgaaatgtgctactatcaggcaccctgtaatactgttactagcccgaactggtttgcatcaaaaatatttttaacggttttccnnnnnnnnnnnnnnnnnnnnnnnnnnnnn

SEQ ID NO: 392779 - DNA, 531 bp, Oryza sativa
  unsure (1)..(531): unsure at all n locations
ctaacaccagctttcatcagtgtaacaaacatcagatttcatcagcttccacatgggcaactagtagacactagtcagttcataaacagcagcaatggcatccattcagaaacaacagcagcaaaaattcataggcagaaccgaaacaaccagattttcaatactgaagcatccctttaggattaaacagatgtagatggttcatccattaacttaactagataatcccccgcgcgttgctgcggacataataaataactttcaacatgcaatatgggcctaacatttgggaagaaaaaagaaaaaaagcctccttattcccatataattgagggagtatatccagtggtgattataactaaatattccatgatggagtatctccccaggtagcagtggttggccaatgcaactaacagaattacaactcaaatatatggctgttgaccggatagagcaggtattaataaacaaaattgaaggcccctaaacattgcttnnnnnnnnnnnnnnnnnnnnnnnnnnnnnnnn

SEQ ID NO: 392780 - DNA, 803 bp, Oryza sativa
gataacttggaaccatcttgattggcattattcagattcctattacattgttcggagccattctaatggataagagtggaagacgggttcttctaatggtctcggcatccggaacatttttgggctgctttctgacaggaatatccttctacctaaaggcacaagggctattctcagaatgggttcctgaattggctcttaccggtatactggtttatattggagcatactcgattggaatgggccctgtcccttgggttgtcatgtctgagatattctcgattgacatgaaagcaatcggtggaagcttggtgacactagttagttggttaggttccttcgcgatttcttactcgttcagcttcctcatggactggagttctgcagggaccttcttcatgttctccgcggcgagcttgatcaccatcctgttcgtggtgatggtcgtgcctgaaaccaaagggaggacgctcgaggagattcaggactcgctcatcgactccagatcaagattgagggatccatagaccatagagatatgatccacttgctccactctttctacctgagccgccgtcaaattcgacgcacctctctctctcactctctctgtctctttagcctcctgatctttctctctccggttcttggcagttttgccgtagtgtactcaatacctagctaggctaagtcccgggctactacgcatgcaagctatgtataccatgtcactctgaattgtattgagcaatatatatatgggacacacacacatatgtgtgttctgaggctttaaaacaaaa

SEQ ID NO: 392781 - DNA, 688 bp, Oryza sativa
ttcagttgctggtggagatggagatcccggaggtgtacatcgagtcgctgcccaagaagggcaagaccagcctcggcgacgccatctaccggagcatcaccgacgaggagttcgacccgatcgagttcctggaaggcgtggacctgtccacggagcacaaggtgctcgacctcaagaaccgcatcgaggcgtccaccatcatctggaagcgcaagatgcagaccaagcaggaggccaagtcgtcgtggggctccatcatcagcttcgagaagcgcgagcagttcgaggagcgcgccgagaccatcctccacctcctcaagctccagttccccggcacccctcagtcccagctcgacatctccaagatccaatacaaccgggacgtggggtacgcgatactggagagctactcgagggtgctggagagcctggcgtacagcgtgatgtcgaggatcgaggacgtgctgggggcggacgcggcggcgcagaacctgacggcgacggaggcggcgaggaggctgatggacggggacgcggcggcgaggaagctggacgccatggaggagctggagaagctcaacgaggcgccggcgtccatgacgctctacgacttcatggggtggcacttcgaccaggacgagctcatgaggaagaaggaggaaggcaccctcgacgaggcccgcgaggc

SEQ ID NO: 392782 - DNA, 879 bp, Oryza sativa
ctacatatctggccgggatcgctgcccaagggccttcattagctcgatctgtcgcggaacaagatcgccaacatcgaggggctccgggagctgaccaagctgcgcgttctcaacctcagctacaaccggatctcgcgcatcggccacgggctgtcggggcgcacggcgctgagggagctgtacctggcggggaacaagatcagcgacgtggaggggctgcaccggctgctgaagctggcggtgctggacctggggttcaacaaggtcaccacggcgagggcgctgggccagctggtggccaactaccactccctccgcgccctcaacctcgtcggcaaccccgtccaggccaacgtcggtgacgacgccctccgcagggccgtcacgggcctcctcccccacctcgcctacctcaacaagcagcccgtcaagccccgcggcgcgcgcccccgccgacggcgccgtgtcgcgcgccgcgctcgaggccggccgccccgggggaggctcccgtagcgcgcggaagcggtcgtccgctgcggcggcgtcgcggaggctggggcagcgcggcgaggggagcgggagcgggaggagcaggtccaaggggaggcagccgtcgagcagcttgccggcgaggaggtgaagacggcggcggcggcggcgagtgcgaggtccattttgtgttgttgcgatacattcgaatttagaatttgaagatcttttgaatctggaatttggattggagagagagagagcgtatgtattgctgtgggtgtgaagtttgactgaatattgttgttcagtttgcaaattattacagtgcatcattgcagctaatagtaggtgtgtgtgatgatcagtggaaaatcatgccaccaaaaa

SEQ ID NO: 392783 - DNA, 532 bp, Oryza sativa
tcgggtacttgttttttgtatttttcttttcggtagctactttctacatctctcttatttggatcacgtattatcctttttcattccacgaccgacgaccaatgttccgacacctcgccgccctgatcctgtccgccgtcgtcttggcggcgtccacaagctccggcgtcgtcgatgcccgtcctgtccacaccggcccgtaccacgtcgtcatcagaaccgccgccaagcccagccgtcgcctgatcgggctcggcggcaatgccgccttatgccaagaggtgcactacaaggcgctgtgcggcacgctgacgacgctgccgggggtgatgacgccgcagcagctgctggacgcggcgttgcgggtggcggagtccaaggccatgatggcggagaagcggctggccgacgtgatgaagtcgcgcgcggtgaaagccgaaggcacgagcatgtcgtcgacgctcgacacgtgcaagggcgcctactcgtcgctggccgacgcgctgcagaagacgcgcgacacgatcaagag

SEQ ID NO: 392784 - DNA, 708 bp, Oryza sativa
  unsure (1)..(708): unsure at all n locations
caccccccaatcgctggcgcctttgactcccgccgcgggcggcgcagcgcagccgatggggatccccgccgcctcagtcgcggcccggacagccgtcggcgcggcgctggccgccgtcatcgccgcgcgcgccgtccgccgccgctcgctggacggctccggcggggcagccgggttcgtcgtcatggcgacccacctcgcctgcgggtacaggtacggcgcgctcgtgctggccttcttcttcacctcgtccaaggcgaccaagatcggcgcggacaggaagcgccgcatcgaggacgacttcaaggagggcggccagcgcaactggatccaagtcctagcaaatagcttaatagctactatattggtcatcatattggcaacaatgaccggaggacaagatcaatgcctggactcccatgagtcaaaggttataactggtattattggtggcatcattggtcactattgctgctgcaatggagatacttggtcatccgaacttggtgtgcttagtgatgaacagccacgtcttattactactctgaagcctgtcaggaaaggtacaaacggtggagtgaccttacaagccttcttgctgccacagcaggtggcctaatcataggtctgacttgttttgttggactgttgactgtggagtgctcattgacgtggctcttcgacagcttctagtaataccatctctgn

SEQ ID NO: 392785 - DNA, 1206 bp, Oryza sativa
  unsure (1)..(1206): unsure at all n locations
cgcgggcggcggcgtgctccaagggagggggagggggaggcgcggcggccgggagcggcgtgcacgagctgctcgagtgccccgtctgcaccaactccatgtacccgccgatccaccagtgccaaaatggacacactctgtgttccacctgcaaagctagggtgcacaaccgttgccctacatgcagacaagagcttggtgatatcaggtgtttggccctggagaaagtagctgaatcgcttgagcttccctgtaagtactgctctttggggtgcccagagatcttcccatactacagcaagataaaacatgaagcgcagtgcatgtttagaccatacaattgcccttatgctggttctgagtgtgctgtggtgggtgatatcccttatcttgttgcccatttgagggaggatcacaaagttgatatgcatagtggttgcacattcaaccatagatatgtcaagtccaacccacgagaagtccgaaatgccacctggatgctgacggtcttccactgtttcgggcaatacttctgcctgcactttgaggccttccagcttgggatggcaccagtctatatggcctttctccgtttcatgggtgatgaaaatgaggcaaggaactatagctacagccttgaggtcggcgcaaacggcaggaaaatggtatgggagggcaccccccgaagtgtccgggacagccaccggaaggtgcgggacagccatgatggcctcatcatccagaggaacatggcgctgttcttctcggggggcgaccgaaaggagctgaagctgaggatcaccggccggatctggaaggagcagcagaccccagacggtgcctgcataccaaatctctgtagctaagcaatcacaacattcagaagaaacaaagaaactcaactccactttgcggccggataacatctatcccgttgccatgtcttactgtttttttgtatgctccgaggcaacgccttcatgttgtacctttgctaaacaaacattaggagggtaggacgctcttgtaaagtaaaatgtgtgtatatggcaccccatatcttacaggttggctgatcgagcgttcaagctctctgttgtcttcagttcggctggatctgaaactgcatttttgcttcctgttattaaattgtgaattccattagtcccnnnnnnnnnnnnnnnnnnnnnnnnnnnnnnnnnnnnn

SEQ ID NO: 392786 - DNA, 555 bp, Oryza sativa
tgttttctccttccttcctcttccagtcttcctcttctcctctccaccaccaccattcctccccccttctcccctcctccccgcgacgcgaaggcgaccaccacgcccatgccctccgttcctcgcggcggcgcgaccgcgaccaccaccaccagcagcagcagctagccccatggccaagtcgacgcccgctgcggcggcggcggcgcccgaggaggcgacggcggcggcgctgcgcctccgcctgcgccgcctcgtggccgccgtgacagccggcggcgtcggaggggaggaggccttcgacgaggcggcgtcggcgctcgcggcgctgagagacgcggagctggggccaccgccgaaggaccgccctcgggccggggcggacaggaggaggagtgggcacgccgaggcggcggccgtgccggagcaggtcctctgccctatctcgtcggagatcatgcgggaccccgtcgtgctcgcgtccggccagacatatgatcgccgctttattcaagaatggttaagtgctggaaacaggacatgcccacagactca

SEQ ID NO: 392787 - DNA, 673 bp, Oryza sativa
tgttttcaactatcgcctgaaggagaagatggcgatggccaataatccacatgcttcacccttcccaaagaaatttccgatgcagcccgagaggaggacagcatttcctcaatcctctcactccagctactcgaagattctccctctatttcgccccaagtttaattcaaggtcaaggccagagtcgccagcagcgtctgatgcagcatcacagactcctttccggccaactgaaagtccaaatccaaggtcaagggtccccgctgcagaggcggctccttatgtcccagctgggcacttccgtatgccttgccatagcatggctcctccagtcacagtcaggacttctatccctgttttctctgctccacctctcccacccccaggtgcgcggacacaacagcttcctcctctcatgagccacccgccgccaattcgaatggcttccccggttcgcatcaggccagctcctcctctttttactccttcagcagtccaagggccgaaacctatgatgcctgttcagataaaggatgtgcaacaccaacaaataaaggaaacccggtcacctgtgatgcctgttcaggtgaaggatgcacaaaaccagcttcttaagggatccctttcacctgtgatccctggtcagattaagggatgacaatcccagccaccg

SEQ ID NO: 392788 - DNA, 1012 bp, Oryza sativa
  unsure (1)..(1012): unsure at all n locations
gtggcgccgctgacatccggcaggctctcgcacagcagcggccctctnaccggcggcggctccatcaccgacagcccgccggtntcgccgganatcgatgacgcaaagtactgcagagcagcaagcactccgaagcctcaaatgtaccgaggcggcaacaagactgttggacggtggctcaaggacaggaaggagaagaagaaagaggagacacgggcacacaatgcgcaggtccacgctgctgtttcggttgcagcagtggctgctgcagtcgcggctgtcgcagctgcgcagttgcagccctctggttctggcaaggatgaccgtgctgcccgcaccgacatggccatggcatccgcagctacgcttgtggctgcgcaatgcgtcgaggctgcagagtccatgggagctgagcgtgagcatttggaggctgtcatttggctcagcggtgaacgtcaggacacctggagacattgttactgtcacggctgctgctgctaccgcattgagaggtgccgccacattgaaagcaagggctttgaaggaggtgtggaacatcgcggcagtgatccccgtagaaaagggtacaatgggaggagggcaccatcacaagcagaatatgcagaagcagcaccgcaggctggagagcaatggtagtagtattagtgatgatctttcactcgaggaggagaacaacttcttgggcatctgcagccaagaactgcttgcacgtggcaccgagctccttaagcgcactcgcaaaggtgctttgcactgggaaggttgtatcagtgtacatcaatcgaatgggcctggtcatgctcaaaatgaaaagccggcatgttgctgggacaatcaccaagaagaagaaaagtgtggtgatagatgtctgcaaggatgtcgcggcgtggccagggccggcacctgctggaggacggcgagcaccgccgcttacttcggcctcagggacagcggacaccgggtaatcgaattcgagtgcaccagccagagg

SEQ ID NO: 392789 - DNA, 1017 bp, Oryza sativa
  unsure (1)..(1017): unsure at all n locations
gtcctacttactctctccgattctctcccctccttccccgataggggagagatccagcagcggcagcagccaagctcaagctctcccaccgagatcccccgcgcgccgcgccccgtcggccgccgccgccgtcgtcgccgccatggaggcgtcttcctgggacgccctccgcaagcaggcaaggaggctagaagctcagttagatgaccaaatgagtgcttaccgtaaattgatttccatgaaatctgatggttctgagaatgatatcgagtccgatatagaaagatcgctgaagcaacttcagcaagtaaattctcaaatgcagacatgggtatcatcaggaggctcagaagtcctttctcatacattgactcgtcatatggagatattgcaagaccttacacaggaattctatcgcctccgatcaagccttagagcaaagcaacaacatgcttctcttcttgacttgagagattttgacagagcgaagtttgatgttgaagagggtgctgactctgatcaagctctgctcaaaggacaagctgcgatcagcaggagtactgggcagatggatnccgtgatatcacaagctcaagctacattaggcacacttatgttgcaacgatcaacatttggtggtattactacgaagatagccaacgttagcagtcggctccctacgattaatccaaattctttcatccatcaaaagaaagaaatcgatggacaccattattctatccctggttgcatctgtttgtgcatttcttatttttatctattggatgtcaaagtaatcttgccaaataaaggcgttatagtgttgtatgtttggaaaagtagtagtatacatgcttgccgtgtttgtacaatatcgccccatgttatatcttacctgctgttctagctacattaactatcattctgattgagctacttcaaccccatctgtacatgtgagccgtgacgaagaaaaataagtttctggtattgatttaagtaaaaaaaaaaaaaaaa

SEQ ID NO: 392790 - DNA, 504 bp, Oryza sativa
cttaaaattaatgcaagatgtggggagatactgcccagaatacttcagatgggaagtcaagctgtaccaaacgtaagttaagctggtgctgcgcagtcatctttgtcggaaaccatgtttccatgtaagaacaaattctttggagaaacaaacaagtcacaagggaagacgaaaacaatgaaagaaaacttttagcaaactaattaagttcagttcaaactgggtcagaaatatcatctccaatcctgtttgcatgagatgagggaagttaaccttgttaaaccctgttgattgtaagtgtgtaaaccttaaccttgttaaccctgttgttgtaagtgtgtaaacctttttcagtgacaattcattcaaatgtttccaaagatatggatatcccgaactgatcagcacattgaagaagtacaatatgctttgatagttccttgtaatgtgtcattaagcagaagttgaaaaacgttctagctggtccaaaaaaataaaaatata

SEQ ID NO: 392791 - DNA, 548 bp, Oryza sativa
gtgtcatgtttccaattggaaaagtaaggaacaagtaatattgaatttcggagctatcgcaatgactggttcggaaatagttcagtcgttccagggggttgagtgtgccggggatattatctcattatttattaaatacctggagaacaatacgtatcctgatgacagcaggatctttgtcccaccactatacaagggcaaaggaggtatgaagaaaaagattaaagatgcactcggtggatccaacgaaaagaaatcagcagtggagtttcctcatcgatttatatactgccctgtcttatttctctggtgaatggattgtggtctgtttccaactgaagaatatgaaacagatcggtattctttgcaacaacggtggcgacgaaattaaaaatttcgctttggatttgggaaagaaattaaacaaagtcttaggagactgcaactacaaaacagtgtcatttgatgaaaaatctctgtcattttttcccgtcttgggtacagcccaatgacagggtgttcgcagccatgtatttttttgaacattt

SEQ ID NO: 392792 - DNA, 521 bp, Oryza sativa
gtttgtctcagggagggtttcgtttccgtttcttgcgcctcctccaaccgcggcggccgtcagtggggagcctcgtcggcgtccgcctccgccattcgcgagaggaattcaggtgatccctctccctaccagagccgcgctcccctccgatcctccccgaatctggatgatctcccccgattccgctcggcttcgctgatcccccctccgccgccgccgccgccgccgggtggtgggctatcccgcttgtcggaatcgatcgatttctgaggccttggattgtgatgaagtcatggatatcgggccgcatagcatccagctgatcgcgccgccgtccctctatcacgccgcctccgctgccgccatgggtgaatcaccgcgacccggctatccccgcggcggcgggcggctgccggctgcccaagacgtcgtcggtgagcgtcacggagtccgtcaccacggtgcacgatctcaggtgacgggttactcgctgatcgaggggctgggcatcggcaggtacg

SEQ ID NO: 392793 - DNA, 597 bp, Oryza sativa
  unsure (1)..(597): unsure at all n locations
tcgtatttcttgccagaagtgcctctatctgttggtgatgattctaacagagcatcgagaagtgcggacttgtcatctgggcttgctttataccgtcagcagaatcgtgcacagactattttgcagagaatccgctcacggaaggttgcacagatggctcttacgtggcagcttgattatttaactaagctgaagtggcctcaaattgaacacgagaatgcaccatgggcatcacgtaccccattgtgtagtctgcatagctggtcatttactgggatatttcctgagccagcacctcgttctcctttgatggttgttggggctgcaggaagtgttgacagtgatatggagcgaagatctgtgacgcattgggaagaaactgagagtaccagggaggatggggagcttctggccgtggttcctgctgaaaacacgccaagtgtttctaaaatatcacactctgaagtgtcaccggaggtccgaaaccattctagaggcttatccctgatatcaaagagcgccacaccatctaaactaagcatctcacacagtttttggtggaaatgaggcgntcttgatcctcttgatgattaggtg

SEQ ID NO: 392794 - DNA, 616 bp, Oryza sativa
  unsure (1)..(616): unsure at all n locations
ttgtgtttgagcggagaaaggtgactaaagaggatgtgaaggaacttatattccgtgaaatactggagtatcatcctcaacttcttaaggattacatgaatggaaccgaaaaaacaaacttcctatatcctagtgcccttgacaactttcggagacaatttgctaacctggaagaaaatggagggaagaatggagatgctgttccatcagacaggaaacatgtttcgctcccaaggactactacagttcattctgctccaattcctcccaaagatcatcaaaatataacttcccaagtaccccaaaggattccaggtagaacaggacgaggagcttgccctgtaataccatttgagaatttgagtgcaatgggcccatacaatcaacgaagggtggtaaggaatccagtgcttcctccagccaccaccaacctatcagcatatgcctaccaccgtaaatcggatagctcagaaagagagctccagcaggagcttgagaaagatcgcatgcggtaccagccatcagagcatttcatggatgctaaggtggtgtcacatatgtcccatgatttgagagcttnctcttactacgtttcaaaggcgaaatctgaatgtag

SEQ ID NO: 392795 - DNA, 722 bp, Oryza sativa
  unsure (1)..(722): unsure at all n locations
tcgttcttctggtgattggcattgcagtagctgtatatgtaggttctgtggttctacccaagaaataacaacatcgtctgctgagttactttcttgtttacagtgttcaaggaaatatcatcaagtttgtgcacctggaaccatgaaagactctgttaaagctgaatccaattcctcaactgattgtttttgcagcccaggatgtagaaagatttataaacatctgagaaaactacttggggtaaagaacgctattgaggctggattttcctggagcctggttcgctgttttcctgataaactagctgcacctcccaaagggaaagctcatttgatacattgcaattccaagacagctgttgctttctcagttatggatgagtgctttctgccacgtattgatgagagaagtgggattaatataatccacaatgtcatatataactgtgggtcagatttcaatcgtttaaattgtacgaagttctatacatttattctggagcggcgtgatgaagttatatctgcagcagctgtcaggattcatggaactgacttagcagaaatgccattcataggaacaaggggcatatataggcgccaagggatgtgccatcggctactcaatgcaattgaatcggccctttcctccctgaatgttcgaggctagtaatacctgccatacctgaattgcaaatacctggnctactgtttttgggtttaan

SEQ ID NO: 392796 - DNA, 455 bp, Oryza sativa
tcagcccagatccagcagatccaggcccagttcttggcccagcagcagcagcagagggccctggccggcgccttccttcggccgcgtggccagccgatgaagcagtccgggtcgccgccgcgcgcggggccgttcgcggcggtcgccggggcggcgcagtcgaagctctaccgcggagtgcggcacgccactgggggaagtgggtggcggagatccgcctcccgaagaaccggacgcggctgtggctcggcaccttcgacaccgccgaggacgccgcgctcgcctacgacaaggccgccttccgcctccgcggcgacctcgcgcggctcaacttccccaccctccgccgcggcgccccccacctcgccgggccgctccacgcctccgtcgacgccaagctcaccgccatgtgccagaccctcgacacgagatcgtgcaagaacacccccggcgag

SEQ ID NO: 392797 - DNA, 757 bp, Oryza sativa
  unsure (1)..(757): unsure at all n locations
tcgttcgctatgaaaataggccaattgttgaacttgaggttgcggcacatgaagaactgaagataactgaactgcgtcttgcaaagctttttgcatcagagcctgttgcccccccttcttcaacagttggaggtcctactagccaatcggataaagcagcagctcctgaaattacaggtagctccaaccgaactcgccctccaatcacaacccatgttttggatgtcgctcgtggatcgccagcatcaggaattgaagttcacctagagatgtggaaggatgcatcaacacccccatcattcaacaacaaagatttcaatggatgggtgaccctgggctcatcggttacgaacaatgatggccgtagcggtcaactgatggacattgtcaacaacgtcgctcctggtttctatcgcataagtttcaacaccagcaagtatgcaccttcagggttcttcccttatgtgagcatcatatttgagataaagaagaaccagacgaccgagcatttccatgtccctctgttgcattctcctttntcattcaccacttaccgtggcagttaagttagcctgtccccaagtctgcnagatgctgcatattccatctgaaaagttcgtgtgtaatattcctcttggtagcaaaatgtcgggaaaacaagtttgctttggtagcaagggttgcctgtttatgtgcactgacattatgatgcaagaataaatttgatatactaaaatgtaaaaaaaaaaaaaaaaaa

SEQ ID NO: 392798 - DNA, 778 bp, Oryza sativa
tcgtactccaatattcaagagagagcgaaagctttggaagcgattcaacatttaaaggagacataccacaatggagtgtgtgatgttgcgattgttgatgatggaaaattgcaagcagaatcagattctggtgaattctgggttctttttggaggttttgcaccaatagggaagaaagctatatgtgacgatgatgttgttcttgaaaccacagcccccaagctttacagcatcaataatggtcaattaaagttagaagacacagttctgacaaaatcaattcttgagaacaataagtgctttttggtcgactgtgggtctgatttatttatatgggttggtcgactaacacaagtggaggagagaaaagctgcaagtgcagcagttgaggaattcattgctactcaaaataggccaaagacaacaagagtaacccgagtgattcaagggtacgagaatcatacattcaagtctaagtttgaatcatggccagtaaatagtgcaggaagtgctggcgcggaggaaggccgagggaaagttgcagctctgttgaagcaacaaggagttgatatcaagggagcctcaaaaagcagcgctccagtagacgaggaagttcctcctttgctagaaggcgatggaaaacttgaggtttattgtgtcaatggcagtgctaagactgctcttccaaggaggagcttgaaagttttacagcggagattgctatattgttctctatacatatcattctggtgacaagagagaagaatttatttgactt

SEQ ID NO: 392799 - DNA, 953 bp, Oryza sativa
  unsure (1)..(953): unsure at all n locations
ttcgtcctcaactttcttttttttctctccagatcctgtctggaacttgttcgcatattcttacccataacccatgcaacaaaaatgttcgagataatgatcatgcaaaatacacaaactccaccaaaggctaacgtgaggagatcgtgatcctgaacatgattaggatgattatctaattctcttcagaaaaatgcaaagttaagtcaggcctttaagaacaagggaggacatttaaatatgtgaagcgagaaaattattgataagcttatcaggcatccatttgtcaggtttagatacttttcaaatatctgacttttatgtttgccaggtttgcgttgttgacccttttctttttagataaaccgagtggaatacatgcattccaagggatttattcaccgtgatatcaagccagacaatttccttatcggcttaggccggaaagcgaaccaggtgtacataattgattatgggcttgctaagaaatacaaggatctccagacccataaacacattccctacagggagaacaagaatctgacaggaacggcacgttatgctagtgtgaatactcatcttggaatagagcaaagcaggagagatgatctggagtctgttggctatcttctcctatattttttaagaggaagtcttccatggcagggtcttaaagctggtacaaagaaacaaaaatatgacagaatcagtgaaaagaaaatgctcaccccagcagaggttctgtgcaaatcttatccatcagagttcacctcatatttccactactgtcgttccctgcgattcgaagataaaccagattactcttatttgaagaaactctttcgggatggtattactcgtgaaggataccaactngattacataattgactggactacaagcaaaaatcctcagatgggttctaccaataagcttattcaacaacaaagtgg

SEQ ID NO: 392800 - DNA, 488 bp, Oryza sativa
gttcgcagtcgcagcagcggtggtgtgcgagtgcgaggcgaagccgcgagccttttgcgtgtttggcgactcgctggtggacagcggcaacaacaactacctgatgacgacggcgcgggcggactccccgccctaccgcgtggactacccgacccaccgcgccacggggcgcttctccaatggcctcaacgtccccgacatcatcagcgagtacctcggcgccgaatccgtgctgccttacctcagcccgcacctggacggacccaagctgctccacggcgccaacttcgcctccgccggcgtcggcatcctcaacgacaccggcatccagtttgtaataataagctgctgctgctgctgctgctagtacttaattaattaattatatgcatgcataaaatggaactaattaataagaaatatatatatattgaatgaaattaaggccaacatcatccgcatcgagaagcagcttcggtacttcaatc

SEQ ID NO: 392801 - DNA, 875 bp, Oryza sativa
  unsure (1)..(875): unsure at all n locations
caacatttcagacttcaaagagctgtaccccacgttggcggagggttatattcgctactacatatatgagctactcaaggcattagactactgccattcacaaggcattatgcatcgagatgtcaagccccacaatgttatgatagatcatgagctccgaaaacttcgattgatagactggggcctggctgagttctatcatcccagggaaggaatataatgttcgtgttgcttcaaggtatttcaaggggcctgagcttcttgttgatttgcaagattatgattattctttggacatgtggagccttggttgcatgtttgctgggatgatattccgcacggagccattcttctatggtcatgataaccatgatcaacttgccaagatcgcaaaggtacttggaacagaagcactaaatgcttatttgaacaagtaccatattgagcttgatcctcagcttgaagctcttgttgggaggcatagtagaaaaccatggtcgaaattcattaatgctgataaccaacatctagtatctcctgaggctgtagattttcttgataagcttctacgttatgatcaccaagataggctcactgcacgtgaagctatggcacatccgtacttcctccaagtgagagctgcagaaaatagcagagcacgaccacaatgatcttgtgtacctgctaaaatgatgatccagctgatgatccacgacggtactactttgagtttgtgtgaacgatcgtggaatgtgcttgtagccttgcatttgtaaactgtaatntcactccgttggttgcgtttgatgaatgccgtgacatgcacataattatttatttctgtaatgttttaccataacaaaaaaaaaaaaaaa

SEQ ID NO: 392802 - DNA, 754 bp, Oryza sativa
tgtcacccaaggccttggaaccgtgtggagtcttatcttagcacggcctccacttcgacaagattgcttagatattgctcttaagtgtgccattcactctcaagatgaagtcaggggaaaggcagttagattggtctgtaggatcattgcctctatgcttatgttctgttaatttgccatttttttatttagtgctggttttgtaatgctaatccttgtatttttggtaggttacaaaaaaactctatgaactaacatacgcatcagaaagagttgagcagtttgccatcgacagtcttttggcaattgctaataaacatggtgtggagacgggccagtggtttcacatccttgaaagaatcttcacctgaggtttgaggcaggcagccagggaacttcgggtagtgggctcccatatttcagatgctggaccttctgaaagtacatgcaataagaccgatttggtttcacctaagcaatctgcagtatctgtatctgaggccaaacgccatacttcattgttctttgcactttgcacgaagaggcccattcttcttcaacatctgttcaatgtttatggaaggtctccaaaagttgtcaagcagtgtatccattggcatatacccaatcttgtaagaaacctgggatcctcatgttctgagatgctggctattattcataacccacctgaaggcagtgaagagcttgttaccttgatattgcaaactctgacagaagattcaactccttcagc

SEQ ID NO: 392803 - DNA, 452 bp, Oryza sativa
gggcacctccaaccaaagggatacaatggctgtggcccgcggagccctagagggtttcgttccatcactaggagaagagagaccatacaggatggagatcgagtgcgggcctacaaaagaacaaattatacccctaaggaatgagagatgaatcagatgggttattaatcaggagctgcaagcaaattaggcgttaaatccacggacctttttcgcctagttcgttggctctttcctcggctgttatatctccagggatcaaagatgaagaaaaaaaataacttctgatgatatatatgtcaagcagattcccaatcatggagagcataacgcactagtccctggagaattcatcgtagcagttgtaccaaatgcagtttgtacatgtaataccaacacgatgaatacaaattaattcccgatcaaaaaaaaaaaagaagggcggacaacaa

SEQ ID NO: 392804 - DNA, 505 bp, Oryza sativa
  unsure (1)..(505): unsure at all n locations
aattcggcacgagctcggccaattcggcagggggcgaacatcgaggtcaagcgccaacagcgcatttatgatctgtgggtgaactcctggaacttttatcaatgcagtgcgggcctacaaaagaacaaattatacccctaaggaatgagagatgaatcagatgggttattaatcaggagctgcaagcaaattaggcgttaaatccacgacctttttcgcctcgttcgttgcttttcctcggctgttatatctccagggatcaaagatgaagaaaaaaaataacttctgatgatatatatgtcaagcagattcccaatcatggagagcataacgcactagtccctggagaattcatcgtagcagttgtaccaaatgcagtttgtacatgtaataccaacacgatgaatacaaattaattccagatcgatctcaaacgnnnnnnnnnnnnnnnnnnnnnnnnnnnnnnnnnnnnnnnnnnnnnnnnnnnnnnnnnnnnnnnnnnnnn

SEQ ID NO: 392805 - DNA, 510 bp, Oryza sativa
  unsure (1)..(510): unsure at all n locations
gacttgcgacacacgcagccgagctangcgctaccaccctcccatccatggcggcctccacctccgccacctccttctccactcccaccaagcccgcctcctcctcctcctcctcctcaagtcccaactccgtctgcttcgccagggcgtcggggaggtgcaggatggcgtccgtggtggtgagggcggaggcggtggacgcgaccatcagcccgacggtgagcgcgctgcggccgtccaagaccatggccatcaccgaccaggccacggcgctgcggcaggctggcgtcccggtcatcggcctcgccgccggggagcccgacttccacacgccgcacgtgattgctgaggctgggatgaatgcaattaaggatggttatacaaggtacactcctaatgctgggactttggagctgagaaaggctatctgcaataaactccaagaggaaaatgggatatcctacagtccagatcaggtgctggtgagcaatggagctaagcaatgcatta

SEQ ID NO: 392806 - DNA, 646 bp, Oryza sativa
aggtctttgttttagaagaggaaggaaacgaaattgtagcggggcatgatttcaaagctaagcgagcttgaagactcggaaaccgaaggaggcacaactcaggcgccaagcaagaagcatggcctatggccactcaccgcgctgctgagaaggctgttcacgaggagtgacggcagcaaggagccgatgctgtggctggtgctgaggctgctcattccggtggtgctgctggtggcggtctgtgtggctttctacatgcgcagcggacctcctgaagtagactgcatcaactgttaaattcttgtatattgtcgtctactttacatccggctgtagaggtccgtctgccagctgtgcttcacaatcggagtcgactactactgttcacggtaagttatttccgtggctgctgttgtgttcaatatgtatagaggacaggcaagcattgcatcagctgcacctgtgagctagacacgttcgagtgattgaaacatacaaaggaaaaaatgatactgaaagttcaactattctcgtgtatgatactagaagttactgaaagttcgcttcaaccattatgtacttaacaaaatactaaaattcttttggggacggctatagctcagtcgatttgtgtcctcagccagtc

SEQ ID NO: 392807 - DNA, 723 bp, Oryza sativa
gcgggggcggcggcggcgatcaacctgtggagcggcggggcgacgatgctgccgctgctggtcgcctgcgtcgccgacgcctggctcggccgctaccgcaccatcgtgctcgcctccctcctcttcgtcgtgagcatggggatgttaaccctctcgtcggcgctcccggcgttccacggcgacggcggcggctgcagctacacctccaagtcgctgtcctgcgctccctccaccgcgcaggtggccatcttctacgtgtcgctgtacctggtggcgctcgccgaggccgggcacaagccgtgcgcgcaggcgttcggcgccgaccagttcgaccagaacgacgccaaggagtccgtctccaggagctccttcttcaactggtggtacttcggcatgtgctccggcaccgccatgaccaccatggtgtcctcctacatgcaggacaacatcggctggggcctcggcttcggcatcccctgcctcgtcatggcgttcgccctcgcaatgttcttgctcgggacaaggaactaccgctactacgtctccacccagtccagccccttcgctcgcctcgccagagcgttcgtcgcgctcatcagaggatccaaagacgacgctcttgcccgtcgtggacgatgacgacggcggcgaccaccgagaggagctgagaggcgtgctgcggctgttcccgatatgggcgacgtgcatcatctacgcggtgaa

SEQ ID NO: 392808 - DNA, 828 bp, Oryza sativa
tcgtttgcagtgaagaagggagagctctcttgagagatagcgagagcgagcgagacaaatcaactggctctttggcaaggcggggagaagggaagctcattggcagagtgctcaacttattactcaaagagaacatgtttgccagtgaaactccatccgagtcgaaagagcttggctcaatttcggagtctgtacctcatggcactgcaggattcgaaccttgcagaaaatgtttagcaaaaactgttcacaatgccactccaaggcgacttctgcaagccaggcagctgatttctaatcaaacacaaaaacaccacaaaaagcagtcacctccatcagcatcacacctggtacctcgttgggctatttacgcattgactgttgctggagtccttttcattgcagcagtagctactgccatatatgtattcttctcccgtagaaagaaggataatactgtcatgccatgggctacagggctgagtggacagctaaagaaggcatttgtaacaggtgtgccttctcttgagaggacagaactggaggcggcatgcgagggtttcatcaatgtgatcggcactttacctgaatgcacattgtataagggaactctgtcaagtggagttgaaatagctgttctgtccacttcacttaactcttcacaacaatggtcagctcagtctgaggagcaattcaggaacaagatctcggtgctgtccagagtgaaccataagaacttcatgaacctgattggttactgcgcatgcgaggagccattcaccaggatgatggtgttcgagtatgctccatgtggttccccttttgagc

SEQ ID NO: 392809 - DNA, 494 bp, Oryza sativa
gcagtgcatttctaggttggatgtagcaatgtccaatgctggggtgcgtgtatcagatgatgaaattccaacagacccgctgtctgatcccataactgatcctaaaggtcttccaatcccatctgggaaattcagcttcggtgctggggcccaactgaaaaatgctattggcagctggtctagatgtcttactgacttgtttggcatggatatggacgactatcaagaacttgacaatgaaggtggtgaaaatggctttggcgaatctgccaagccattctatcacctgaatgcactgagtgatctcctaatgcttcccaaggatgtgctcatggataccagtagcaggaaagagctttgccctacctttagctcatcaatcatcaagaacatcctggatgtctttttaccagatgaattttgtccagatcccattcaaggttctttacttcaagcactagagttggaggaccacctggaggttaacaggggca

SEQ ID NO: 392810 - DNA, 509 bp, Oryza sativa
gtattgttcaccagctagttactagcgtcaaatgggggggcagtgtaccatcgtcagctgcttgaaaataccatgttatgtggtggcaccgcatcaatgactggttagttgccttttgtttttgatgtgcacctttgctctattcaaccttgtgaggtataggtcaaatagcgaaagggcctctaacgtaatggctaaggcttccgagtagcatcttcaggtcttggttcgatcccctaatttcgggcttgggtaaaaaaatcccctcgctgtgtcccatccggtctcgggtatgtccttgcgcgtcacccctctggctgggcccctgctgagtgggcagaatggattttatcggtcaagaccatgtttcgatctcttcttaatttaatattgggagggcggtctttccctacccggccgagtttttttagctataggccaaatgcatatcaattagctgtatagggcaaggtatatcattttggtttaaacttacatatgttttctag

SEQ ID NO: 392811 - DNA, 445 bp, Oryza sativa
tgcttctgagggtctgatgctctgtgtctttgaggtttgcctagctgatcgggggggggtcgaggatcaagctggcaggaaaatcaggctccgtgctgaagatgtgcagggcaggaatgtgctcacaaacttttggggtatgaattttaccactgataaattgagatccctagtgaagaagtggcagacattaatcgaagcccatgttgatgtcaagacaaccgacaactacatgttgcgtctgttctgcatcggcttcaccaagaggcgcccaaaccaggtcaagagaacctgctatgctcaggcatcccagatccgtcagatccgccgtaagatggctgagattatgatcaaccaggcttctacatgtgacctgaaagaacttggttcgaagttcattccagatgttattggtatggagattgagaagtttaccttcagcatt

SEQ ID NO: 392812 - DNA, 820 bp, Oryza sativa
  unsure (1)..(820): unsure at all n locations
gcttctttaagatcgccaccctcccaacctccccattgtgctactatatgcttattagtatcatcagttcatcaccaacctctctctcgtcttcttctccctcttcttcttcttcttcttcatcttctacctttgatagtttgattgaggtgttgttcctttgagtgcagcaagaagctgatgattttgatgatagcttaaggatcttgccaaactcttgtgttgggagtagttgcttgcagatcgagctgcaaaggtcccattttgcttctccatctgagcttggttaggttgcgtctgagtacacttctgaggcttctttggtcgttttggcctcgagctccgttcttaaactctgcctcgatcgatcgatctcatctcatctgcgctgttcttgttgctgttgctgttcaattttgagaagaaggtgccgatcgagttgagccgatcgggttcagtgaaattcacttgcgtttttgagagaattgtttgagttggtttcggttcttgagatgttcctgagatcgaaggtccaggagatgatcctgaggaggaggtccagatcgatgaacagcggcggcggcggcgtgcagcagagccacctctccggccagcacgcgagctcgacgacggtttcgtgcgacggcggcggcggcggcgccgcggcaagagcgccaccgcggcgtgtgcgttgttggggtctccgaggctgctgcactgtgcctcgctgccttccggcagccacgccaagaacggcggcggcggccgcngccgcggcggttcggagcccgagacgccgtactcgatgancccgacgtnc

SEQ ID NO: 392813 - DNA, 641 bp, Oryza sativa
  unsure (1)..(641): unsure at all n locations
tcctcctcctccccctttaccatttccaagttccaacccccaaaaaaaatccaaccaaaaagcggagattttccaactcttatcatntnctcctcctcctccccgtcatcgtcatcaccagcacacacccgagagaaaaaaatcctataaagaaatggattgagccatcacccaacgccgccaagatcctgtcctcttgtgtgcgcaacctgtagctccacctccacgcaggatcaacacccaaatccccccatcttcttttctttttcgtttcgtttctgcaagatttgcatcttcttcttcttcctccgaggagtgagtgacacctgagatagcgagaggaggattttcttcggtttttttgttcctctttttggccataaacctcccataaagctcggtttcttggttcgttttttctttctttcttcctctccttcgagaatcgcccgagtgtgaaatccaagatcccgaattccgtgtcttcttcttcttccgtagaaatcccggggtgggcaaagcggtgggatttctggagagggggagagcgctacaaggcaagaagcttgggtgtccgtagtccgtacggttcttgatctggggtcgccgccaatgcagccggacccgagcgggagcggcgg

SEQ ID NO: 392814 - DNA, 556 bp, Oryza sativa
cctccctcgtgtcgacacgatcgtccaaaatagggaagagggagggggttcttcttctcctcgatccggttgaggacgttgaggtagagagaggcagaggcgacgaggaaggatctgatctatcgatggcgcgcgtttcgcattccagaaagcggactagggctccctccaactccaactccaagcccacttcacaaacccaaccgccgccgccggagctcaccgaccgccctgtccgcgtctacgccgacggcatcttcgatctcttccacttcggccatgcccgcgccctcgagcaggccaagttgctgttccccaacacgtacctgctagtgggctgctgcaacgacgagctcaccaaccgctacaagggcaagaccgtcatgacccaggatgagcgatacgagtcccttcgccactgcaaatgggttgatgaggtcattcctgatgctccatgggtcctcacgcaagagttcattgacaaacatcagattgactatgttgctcatgatgcactgccttatgccgatactagtggagctgctaatgatgtcta

SEQ ID NO: 392815 - DNA, 520 bp, Oryza sativa
cggacgcgtgggcggttccgcttctcctctcccctcgccatgtcgcttgccgtggccactcccgcctccgcccgcctctccccgctcaccacctcctcccccgaaccctgccgccgccgccgcctcctcctctccgcagccgcccctctccggcgcacccgtctccggcgccgcatcgccgtcgtcgcgtccgtccccgaccccgcggcgcggccggcggagtacacgccctggctcatcgccggcctcggcaaccccggcagcaagtaccacggcacgcgtcacaacgtggggtttgagatggtcgatcgcatcgcgcgagacgaggggatcaccatgaacacgatccagtccaagtcgctgctcggaataggttcgattggggaagtgcctgtcttgttggtaaagccacaatcatatatcaactacagtggggagggcaattggacctcttgctgcctattatcaagtaccattgcggcatatccttgtgatgtatgatgagatgagtctacccaat

SEQ ID NO: 392816 - DNA, 489 bp, Oryza sativa
gtccccgttgccgtgctggcgtggttccccttcgggtccgagttacagacgaggctgctcttcaaccaggccttcagccgaggcctccagatctcccgcatcttggcaggcgggaagaagcagagctgagcccgcacaaagtccaccaagtgaccgtacataagcatgcacaggtttaggcgaacagcatcacaagaggttaggtccaggattgatcgttgtacagtggagaagtttgttcaggaggcgtcgtacagctgctgacttgctgacccttcagaagttccgttacttttgtacacacagggcgatgatttttttttctttttaggcattttcgagttattacatctccataccatattattcttacgtctgttacataggctgttgctgagtattgtatagatagatgttgtatgcccacaaacaggtgcatcaaagcattttcgttgatttaaatgcaaaagatgagattgtttattctct

SEQ ID NO: 392817 - DNA, 410 bp, Oryza sativa
gcgatttcaccaccaccgccacggcctctgcctctcgctctctctctctctaggcggcgcaaatggcagcctgcgtcgacaagtggccgccggcgggtacctgtgccgcctgccggagaagttctactgcgtcttgccggactgcaccgctacggaccgtccggtggtcaccgcatcggcggcgccggcgccggccgctagcgggagcagcggcgactacgtgtgggacgtgctgcgcgccgaggcgcaggacgacgcggacgacgagccgctcctccgcaagttctaccacgacctcgtcctgtcgcggccgtcgctggagtccgcgctcgcctcgctgctggcggccaagctctgcatccccggcgcgctgccgcaggaccagctccgggacctcctcgccggcgcgc

SEQ ID NO: 392818 - DNA, 416 bp, Oryza sativa
  unsure (1)..(416): unsure at all n locations
gtgaagttagcatgcaacgcggacttggaagaatgcatggagatctctggtagccatgtcatcaggctgttggttagcgatgttgcggcacaccttggtagttcctgtggaagctcaggttgataattcaggtcagcattttcgttccatgggtgcatacatgttctgcgaggtcagttctcacctgttgttaatctagttctcttgctagatagcagtagctacttcattgtgtttgattattgtatcaatttttggttcgaatacatgtacttgtgcaaaacggcacttgtagtcaatactgtacatattaagcccttggtgctggaaaattctgatgttcaagttacaaaggttaattggtgtaatactaatatcttcgctgtccagaaaaaacaaaaannnnnnnnnnnnnn

SEQ ID NO: 392819 - DNA, 380 bp, Oryza sativa
  unsure (1)..(380): unsure at all n locations
nnnnnnnnnnnnnnnnnnnnnnnnatgagtatatgacgacgatgatcgggatcaggtcagagataatcacatatatatataacagagcacaagaagaaattaaaaagcactcatcactatatatttagctggagagataaaagtacttattattattacttaatcatgctctcgcctagctagttaagtagtacccaagcacgcagcagctcaagcttagtagctggggatgtcgtggtggtggtggtcgtctgggtggtcgtcttcttcttcgtctccggcggcggcggcgatcagcgggggaaggcggcgatctcgacccccttgttgcccagggaaggctggggtgggtcgtacgcgcttaagaggcggtaggagga

SEQ ID NO: 392820 - DNA, 472 bp, Oryza sativa
  unsure (1)..(472): unsure at all n locations
nnnnnnnnnnnnnnnnnnnnnnnnacgatcagatttcaaattttcaatacaacaaagtacatacattttctacatgtatttgtcaattactatatgacgaaagttatgtgaaccctacagcagtgtaacacctgtagcatcaagggtagagatttactgtacattcacgcaatcataatcttccttatttgcggaagttgcttcgtagtaacaacaaagaaaacaattgcatacctacagactacagtgatatgtacagctaaagtacagactaaaagccagcatatatcaaaatgcaaggcgtaataatgtgtaacagatcagcaatttcgcggtctgttataattcggaggcagagaaggacacctttcattcatgtgagggtacggctgcatggtgttgtatccaggcaactccattcggtacctgccctttatttggcagaaggggagcttgacactgtcatcgtgtg

SEQ ID NO: 392821 - DNA, 1222 bp, Oryza sativa
ttttcttattctatctgttaatgaacataatatccactttattttgattaattgatgttcttgtacaactccattattgaaaatatcttccgaaagaaattagaaactgcacgagcctctgcatcggcaaaattaaatggccgagagcaaatgaccgaaatcaagataagagtccatataaaacggtgtgaattcaggcacttcatagttgatagttcgcttagccggtgttctgcattccagcagcaattcccttcatggtcaggatgagggtgtcctccagccccggcgcatactcactggtcgggttcagcttcaccagctccgcagccggcttagaccagtccatgatctccttggacatgtgggggcgctacgtgacatggtagtccgggtcgcggattcgcttcatcgtctaagcctggcagacattcagggtggtgatgtaggcattgcggaggcgaaggcgctgcttcaggtagagatcaccttcgagaagacccttgtgtccagcaacctgaaggagaagctgtttggtttcttcccagttggccctcagcttctctcccagaggccatagctcctcggagacaaggagcttgtcgtacaatgcggcgatgccagggtcacccttgggcgaaaacccatctcaaccagatcgatcgtgactctgaagaacgggccactcattgtacatctcctggagcgtgtggaggttcctgatgtccttctccaggatgtgcttgaaggcagaaccgaagccaagccagacgggaaggtgcaagcgagtttgcgtccacgcgaagatccatgggatggcacggagtgattcgatgccaccactcggctttctcttggatggcctgcttcctatattcatccttccatactccatctctggtgttgcaaggcggaaatactcgacaaagcgtggttcctggaagacgatggaccggtattcctttgtagccaccacagccatctcatcaagcagagcacgccattctggtttcggcgcaattggtggatgcatgccatgctccagagtggcagccgtgaaacgctgcagtgtcctgaagcaaaggtgctcctcaccaaaggactgctcaatgacttcaccctggacagtgacccggagagatccatggattgtgtctggtggctgacacaagatggcaagatgagtgggacctccgcatgatgggacgcgtgaaacaaaaca

SEQ ID NO: 392822 - DNA, 664 bp, Oryza sativa
  unsure (1)..(664): unsure at all n locations
ttggtttttttaaattacggagtagttttatttcccagagaaaagcatccctcctaaaagaccacaaacgatgtttttcttcaactaaaatgtactgtaataacaccaaaggagcattctgaaaattgccccgcccaaattgtacagttgacacgagtgaagcattagtgttactcagatttacagtctggcctaatcaactcttaacatcattttcccggaattatcagaatcacaactcgtcatttactggagagttgtcggccatcagctcctcaagggagaattcgtcctcttcaataacctcaccatctttgccgtcccatggttcagattggactatcgttggggtaccgtccaaaggaagattacccttcccaccgcgccctgcttccttcacaaactcagttatttcatcaagctggaaagcactaccgagtggagcatatgcgccttttttcacgttgagagcaaccatcgctggatagccataaccaccaactccaacttgcttctcaagatcagcttgcttcccagcagctgtccagacaaaactgtatggactctttttaaatttctcagcaacagataatagcagctcaaggtacttgtttcttccttcggcctttgaatccaagatatctggantgtgnactancgtccg

SEQ ID NO: 392823 - DNA, 1122 bp, Oryza sativa
  unsure (1)..(1122): unsure at all n locations
nnnnnnnnnnnnnnnnnnnnnnnnnnnnnnnnnnnnnnnnnnnnnnnnnnaagctgcaaaatatattggaggcttcaaggagacagggaaaagataagtttgtaattcaaaagacagagattcaccaccaggacggtatgtttctgctactgattacacgagtacaggttgtgtcgattttagcacagttaatactcccacaaccacacattcactaactttggtcttttacacataactgtcgatcaaagacttcctcatgtcatcaacaatcgcggcaggctgcccttctctcagcttgaagacgctctcaatgaccgatagctcagtagccgtagtgtctgagccacagaaagcagtccagtcattcactgtcatgcccgcagcaatgacctcgctgcctcggttcacggttccagcaacaagagggacttgcaggagcgtggacagctcatcaagatcttcaatggatgtatgaggatggactaggccacccctgtttgtaatcgcacagtagcttcccacaaggatgtttcctgcaattgtctgccggaacacctcaaccccaagcacatctgcaataagttcctcagtggccttgtcgaggtcagggtgtgtaagcgcgacatggtcattgcaagctacacaattgccaagcgcagatagcctttcatcaatacgctgaacaaccacttgatcaggcaagcagttcctcagatgctgaagctcttgatcggtggtagtgtgaggcaagagaagtccattcttgtttccgacacagagacgaccaattattctagtaccacctatggaggtcttgacaacaggaataacatctgcgagctcagactcaaaggcactgtagaagttctctgatcctccaattgcaacaagacaataggcatttgtcaacttggagaaaacaccaacttcacaattgttctcaaactgaatacgggtcgccatggtcgattccgcctcgtcgcagccgccgcttctcttctactaatcaacacacacctggagcgcaaacaccgaagatgatttaccccccaccaaaaaaaaaggagagagattacggagtaatcgggtagcatagacgcatccactattcggttccac

SEQ ID NO: 392824 - DNA, 545 bp, Oryza sativa
cgccggagtccacggggagatcggagcctgaaggcaagcaaccaccgccgccgacgacgacgacgttgacggcgacgaggagacgatgagctaccagaaagtgccgcctcctcaggacggctaccctcctccagggtactcgcagccatacccgccgccaccgtccggcgggcagtacccacctacgcagtactacccgccgccgaaccagcctcctccggggtaccagggctacttcagcgaggggcagcagccgccatactactacccgcccccgcatgatccccaccaccaccatggtcaccaccaccaccacgaggaccatcaccaccacggccaccaccaccatggccaccacgacgatgactgctgccttggcttcctcagaggatggttggccattctttgctgctgctgcgtgctggaggaatgttgctgctgctgctgctgatggcctgaatgctttgaagctccctgttatcaactattctggaatggaaaattttatgtgtgaatttgattttctgtgattgatggacagtacg

SEQ ID NO: 392825 - DNA, 988 bp, Oryza sativa
gttggtggtaatgatcattgcccatctcgtcaggattgtgttgatgatgaaaccaagcatattgaaacatctgctgaccatcatgatagtcagggtagggagaactctgatttgcaagcccaagattacaagggcaccagctgtgcagatagaagcatttcattctgtgccagcaacgtagaggagcagaatgaagatttcgtgaatacaaaattcagtaatgatggtccagatgttcaagctgaagatttcaaagaaataagctatacagatacaactattattgatcatagcccagagagccggcagatcaagactacctgttatacaaccgctcccattgacactcgtgagagccaaaatacacaagctcaaagtcttgagggcattacttacacagggccatcaatgcatgctcatgagcaaaatcagggcctgaaaggcaccagatacaaaattatgatagacaaaggccatagtgcaaatgatatttctttagtaaacagttatccagagatgaatgatgtaactatggatttcgaaagaggttgagaatactacagtgataccatcaaacagttccacattgctttccaacacctcagggggacaaattcctgtggaagaacatctaaatggtcaagcagcaaaaggtgttaaagatttatgggagttgcctgaacctgatgattcctattaccttccactggagaatagtagcgtgtataatggttcaggtggcttacagattgggcatagacatctccctgctggacaacagggttctgtagtttgcatggagaatggtattttaagtcagcagcagtcacaagtcaccattgcggctgccttcccaatggacaatccagcgtcatttatgcaaccttgttcaaaccggcaaagcaatggtcaggtccagacagtagctaatgacattggaatgctttcttactcccttgaacatacagattgcattgggcagtcaact

SEQ ID NO: 392826 - DNA, 789 bp, Oryza sativa
  unsure (1)..(789): unsure at all n locations
ccacgnntccgtctgcnccgccgacgcctcctcctcctcccgcatctccctcctcgcctctcgctgccggccgcgcttcgccaagatgaacaaggagaggcttatgaagatggccggcgccgtccgcaccggcgggaaaggcaccgtgcgcaggaagaagaaggccgtccacaagacggggaccactgacgacaagaggctgcagagcacgctcaagagagtaggtgtcaacaccatccccgcgatcgaggaggtcaacatcttcaaggatgatctcgtcatccagttcgtcaatcccaaagtgcaagcttccatcgccgcaaacacatgggtggtcagtggctccccacagaccaagaagcttcaagatgttcttcctgggatcattaaccaattgggtcctgacaacatggagcacctaaagaggattgctgaagagatgcagaagcaggtagctgctgcaggtgccactgcccaggcaaaggaagagaacgatgatgatgttccagagcttgttccgggagagaatttcgaagaggtagctcaggagacaaaagcctgatcatagataccacaagtagtgaaatgttacttgaccgctgttctgaggtcatggttttctatgacggccctgttttgcttctcctcgtaggccaatctttgtatttgcaattggaaacttttagtttctccgagtttttacctaagttatgaatgctgagatgccatggagtcctttttacctggttttgatgttcacatttctggttggttcagaataaaaaaaaa

SEQ ID NO: 392827 - DNA, 461 bp, Oryza sativa
  unsure (1)..(461): unsure at all n locations
agncagcangacccaaagctgcacaagcccacgcccacgcctacgcccatggagaccgccctcttctccgccgcctccctcttccgcgacgccgacgacgaccagggtggacgccgatgagcaggtgcagtcggtgcagtacgaggaaagagcccacaagttccccggcatggaactgaaaataagggaattctcaagtcatcagctgaatgctaacatgctatggcctgggacgttcttatttgctgattggctggtaaagaataaatcgattctgcatggacggcggatcctgggaattgggaagtgggacgggagctttggccatcttcctgcggaaggcatttcaagtagacatcacaaccacttgattacgattgatgggggagatccagggggaatatagcttacaacttgcaaagctaatgatttggggtgtccttcctcatatccggaatnnt

SEQ ID NO: 392828 - DNA, 472 bp, Oryza sativa
gtggtgctcatccataacccatgtgagctggtctcatttgctagattaggatatgacaagtggacatggctgtcaccacacttgagatttcaggattgcacctacatggatggcctatcgtatgcactgacgttattgggggaaatggtcctgttggacctcaacactcactgtgatcacagcagagatcatcatggacaggacatacgagtattcgcgtgagagaatttatattgttcacgctccatggggtgatctgttgcacgtttggagaccaccacacggagatgggcgcgggtatgacgaaattactggccgttcagctcttgtgagcaacactgagaggacacaattatatcgagtcgatactctggctcacgagctagtggaaataagtgacctgggtgaccatgtattgcttatggcgaataaccaaacttattgtctttgcgcaaaggaatactcactgtgg

SEQ ID NO: 392829 - DNA, 547 bp, Oryza sativa
  unsure (1)..(547): unsure at all n locations
agcngctgcnggtggaacaggacaatttgctgtgcagctcgcaaaactagcaggcaacaaggttgttgccacatgtggtggcaaatgtaaagctgcacttctgtcttccttaggagttgatagagttatcaactaccaaaatgaaaagatcaaagatgttctgaaaaaagagtttccaagaggagcagatatcatatatgaatcggttggtggggaaatgtttgacttatgcttgaatgcacttgcagtccatggacgccttattgtaattggtatgatctcccagtatcaaggagagcatggatggaagccacggaactacactggactatgtgataagattcttgctaaaagtcaaactgtggctgggggtggcctaatctcagtatggctcacttgtggcaagatcatcttggacaaactttttgacctgtatgcctctggaaagctaaaggtttcccttgacccgaagaaattcgcgggtgtagcttctgcgcctgatgcggttgaatatcttcattctggccagagagttgccacggtcctc

SEQ ID NO: 392830 - DNA, 450 bp, Oryza sativa
aagctatttcatctgagagagtatgtcgatgatacggaggattatattaacatcatgttggatgacaagcaaaatcaacttctacagatgggggtcatgctctccactgcaactgttgtcattactgctggtgtggccgctgttggtctttttgggatgaatatcggtatatcgctttatgctgatcctacaaatgaggaggagaaacgagcatcaaacatgaaattttgggaaaccactttgggaaccattgctggctgcacggttatgtacatagtagccatgggttgggggaagagaagcggactgctgcaataatgagggtgccacgatgaattcacacaagttgtcgattgcttgcctggtcagacaaagctctatcaacaggaagacaacatagggctcgactgtttaccttcttgaacatatataactgctgcctctgttggc

SEQ ID NO: 392831 - DNA, 710 bp, Oryza sativa
  unsure (1)..(710): unsure at all n locations
atcagatccaagtccaacgatcaactactccacctcccgctacaagccttcagcgcccaaatcgagtgcctacctttatctctnacctttcgcaaatcgcagccggccgccgctgtagtagcaaacatctccttcgtcttccctacgcgtccacccgaaaaagaaaaaaaaaaagaacaggagaattatccccacttccagagtccaaacctccccgtccatggcgacggcgagctcgatccggccgccacgcgcggcgctagtcctcctcctgctcgcgctgtccttctccctcaccctcgccgcccacttcgagggctttggctccgacgacctccactccgcccacgccgacgcggcctcggcagacgacgaagacgacgaggggctcgacgtcgagctcccgccgccgccgcgcatctccctctccacttcaactccttcccctcccgtcaccaccaccaccaccaccacctccgctccaaaccctaaccccgatcccaacccgacgctgaccccgccgaaccccaccccgacgctcgatctctgggacgaggacgagttcgagggcatccctgtcccggaagcggcctcctccgacgaatcctccacgccggcggaagccgccccgtcagatcccgcggccgatgccgcggccgaggcggcgccagccccgccccggcggcccgcggagctgctccgcgcgtaca

SEQ ID NO: 392832 - DNA, 452 bp, Oryza sativa
  unsure (1)..(452): unsure at all n locations
ccaccacctcgaaggtcttgagctccatctccggcgacggcggcgacgacgacgacgacggcgaggaggagctagtagctagctgagccagacagcatggggttcgcggtggtgaggacgaaccgggagttcgtgcggccgagcgcggcgacgccgccgtcgtccggcgagctgctggagctgtccatcatcgaccgcgtggtggggctccgccacctggtgcggtcgctgcacatcttctccgccgccgccccgagcgggcagcgacgccaagccgtcgccggcgcgggtgatcaaggaggcgctggggaaggcgctggtggactactacccgttcgcggggaggttcgtggacggcggcggcgggcccgggagcgcccgcgtggagtgcaaccggcgagggcgcctggttcgtggaggccggcgncggctgcaagctcgacgacgtgaac

SEQ ID NO: 392833 - DNA, 485 bp, Oryza sativa
ccgtgacctctctctctgtgtctccgccgccgccgcctccgtcgctcgccgcatccgtcggaggcgagatgggcatcaagggtttgacgaagcttttggcggacaatgcgcccaaggcgatgaaggagcagaagttcgagagctacttcggccggcgcattgccgtcgacgccagcatgagcatctaccagttcctcattgtagttggaaggacggggatggaaaccctcacgaacgaggccggtgaagtcaccagtcatttgcaaggtatgttcaaccggacaataaggttgctggaggcaggaatcaagccagtatatgtttttgacggcaagcctcctgatctgaagaaacaagagctcgcaaaaaggtactcgaagagggaggatgccaccaaagaactaacagaggcagtagaggaaggagataaagacgcaattgaaaaattcagcaagagaactgtgaaggtcacgaagcagcacaat

SEQ ID NO: 392834 - DNA, 491 bp, Oryza sativa
cgtacgcgtgggttttgtgcgtattttagttgcaaactttattgctccgcgttcttcctttctctgtgtttgtttgtttccagttgccactaaccagccagagccccgggggggagaagagcgagagaggaggagaaatcttgcagcaatccctcgcttagattcgccattaccgccgcttttgttcccaccaagattaccaccccctcctcctcctgtgctcgagcgctcgcatcgcatttcaggctgcttcttgattctgcgaggaggttgaaatctctcgcggtatgatctgatttcgggttgattttcgtcacgcggtggattccttccccccaacactattccggtgccaacccttttttgtttttttgtttttttttgtggctgttcttggcgtcgcctctactggcttcttgccgtgctgcagattgcaacagctgccattccgttcgttccggtggagtgcaccccttcatcaccaaggggga

SEQ ID NO: 392835 - DNA, 697 bp, Oryza sativa
  unsure (1)..(697): unsure at all n locations
caccgctgccgcctccgcctccgcctccgccgatccccatccatccatccggcgagcgagcgagcgaggagggtcgccgtcgctcgccctgctgcttccgccgcatccgttccctacttatattattttgaagagatgggttgatctccaaggggccggaacctcccagctcgtcgacgtggatcatcttcatcctctagtgatttaccttcctgctgctggaagatgaaaggaacatgcgagcaaaatgatatagcattggtctctgagaaaaaagaatggaaaggagcttcttgcccagtttgcctggagcatccacatgatgctgtcctcctcctctgtacttctcaccacaaggggttgccggccctatatgtgtggtaccaaccaccagcattctaactgcctcgaacacttcaaagaagcttacgccaaggagaagttggcccacagtgtattaattgagtcttcacctggcctttcattatctttgaattctcagccagccagcaagcaacaatgtgcaatggnacttgcatgccctctttgtcgtgggggatgtccaaaggatggactgtggtcgaaccagctcgccagtatctcaatcgcaagaaaagagcctgtatgcatgatggctgctcaatcatgggtcatacnaagactttgcagcatgtgaattccagcnccttcagcaacc

SEQ ID NO: 392836 - DNA, 717 bp, Oryza sativa
  unsure (1)..(717): unsure at all n locations
gctggctctgggttggccgtgccctcctgtcacacctagcgccgggtagaattcatgcttgttcatgctccaccaccatgcacatgaatgcatttgagcagaaacctggagaatgaagctggcctatcatgccgagctgacacacctcgatgaagtcgacgctgctgggtgccgcacaaccgaccggggggattattcggccctttaactctttcctttgccaggatgatatggtgaatcacattctgagggctcctctataggatttgacaggatgggggcgaggcccatcgcttagggcagacaagcaaggccatgatatataggcttgttagtcgtggtacaattgaggagcggatgatgcaacttacaaagaaaaaaatggcattggagcaccttagttgctgggcgtctcacgaaaggcactaatattgtccaggaggagttggatgatattattcggcatggctcaaaggaactttttgacgatgaaaatgatgaagccggaaaatcttgccaaatccattatgatgatgctgcgattgatagattattggaccgtgaccaagctgacggggagagcctgtggaagatgaggaagangcggatttctaaaaggattcaaggttgctaactttgagtacatagatgaagctaaggctttagctgcaaagaggaggaggcncgcaaaaggcccaagcttnaagcttcaactct

SEQ ID NO: 392837 - DNA, 533 bp, Oryza sativa
  unsure (1)..(533): unsure at all n locations
cggaactacccgttgagctcaagcatataaataaacccgggccagggggaggtggaagacgaagatgaggaacaagctgggcacccgcttccccgcggcacggatcaaaaagatcatgcaggctgatgaggacgttggcaagattgcactagctgtacctgttttagtatcgagggcccttgaattgtttttgcaagatttaattgaccgaacttacgaaattacactgcaaagtggtgcaaagacattgaattccttccacctaaagcaatgtgtgaggaggtacagttcttttgacttcctaactgaggttgtcaacaaggtaccggacctcggtggcgctgactcatgtgggagatgatagagcattaccccagaagaagaaaagcctttgccaaattggaagtgaccccgggagtggggggctcgatcaagcaaaatgacctaagaggtgcaaatatcagtcccagggacgttggagaggtcgagtagaggcgaggcgnccaccaccagcggaggaagttgtttgtcaa

SEQ ID NO: 392838 - DNA, 443 bp, Oryza sativa
ctcaatcgccaggccttgattcggaagtatgcccccgttgccattgtgatcggtgtagttttgatgctcttttggttgaagaacaagatatggtaactgcaccaaatgaaggaagctgggcctgcgttacaacactggagaaagaaaaacaaaaaaattaggttgattctggatcaatagtgctttggtgacgtgtatcccgtatctgcccattcaagcgagtacttcagctgcccttttaccctcctcctcactacaaagctattcaagtcaattcgttgtagcatacagtagaccttataacggaactcggacttgattttgtgaacccttggaaccgtacatacaagagctctgtagagttgaatttttttatattgggatgatattgcattttattttgcaaactcatgtaagaattcaggctgaatatcctatattac

SEQ ID NO: 392839 - DNA, 508 bp, Oryza sativa
  unsure (1)..(508): unsure at all n locations
gctcaatcgccaggccttgattcggaagtatgcccccgttgccattgtgatcggtgtagttttgatgctcttttggttgaagaacaagatatggtaactgcaccaaatgaaggaagctgggcntgcgttacaacactggagaaagaaaaccaaaaaaattaggttgattctggatcaatagtgctttggtgacgtgtatcccgtatctgcccattcaagcgagtacttcagctgcccttttaccctcctcctcactacaaggctattcaagtcaatccgttctagcatacgggccctatgccggacttgattttgtaaatccttggaactgtacatataagagctctgtagagttgagttttcggtattgggatgggattgtattcttttgcaaactcaactcatgtaagaattcaggctgaatntcgtatactccatatctcttggtnttnatgcccnnnnnnnnnnnnnnnnnnnnnnnnnnnnnnnnnnnnnnnnnnnnnnnnnn

SEQ ID NO: 392840 - DNA, 736 bp, Oryza sativa
  unsure (1)..(736): unsure at all n locations
tcaacacctagattcccttccctggtggttgatcgatcgatgcgcccagcccacatggccgcgtgccgatcgccatcatgacattgccatggcggtgatcgccgccgccggaggggagggggacgcgggcgtcatcgcgcatgtggtggtcgacgtcgacnagagttgtgcggcggcggcggatgatgatgatcgcagccggcgcccgagcacgggctgcaggatttgccacctcggcggcggcggcgacggcgagatggcggcggagagcgggagcgggcggctggtgaggctcgggtgcggctgccgcggcgagctggcggcggcgcaccggcgttgcgccgaggcgtggttctccgtcaggggcaacaggcgctgcgagatctgcggcgagacggcggagaacatcaccggctggggcggcggaggcaaggagttcatgaagcggtggcacgcgacggcgggcgtcgacgtcgaaggctcctccaaggcatgcagcggcttctgcaagagccactcattatgcaatctcttgattgcgtgcttgatcattgtaatcgtcttgccatggttgctccataatcatgtgctttgagatcctctaaattgccattttggataaatcattttcagctattcagatgagatggctattttagggtgtgtttggttcacagtcatgcatggatgggaccatattttgttggatacgacgatccaattttttatttggttt

SEQ ID NO: 392841 - DNA, 722 bp, Oryza sativa
  unsure (1)..(722): unsure at all n locations
ttttctttcgcccttcctttttttttttgcggaataagtatgaatgaaatatagttcaagacatttctcatccacccttcatttttcccctcctgtttgctgattcagattagctaggaatccattcaagctgagtagccggagcttagtgtgatcaaagggatagcttattgacaatgatattaattagcgttaccgctaggttcgataatgtgacaaccttaaactactcttacagcgtcataaacaacagggtcacacgaagtgtgattagcaaatgccagaatgcagtatatacactctgttagctttctgaaattcaggtaccacacctcacgtaatcatcctgtgttctattctctggtataagtgtgcatcattgcttcacatctctgccacgagcttgctgtactgatctagagcgaggtcaaatgaagtgaatgaataaggagagagcgctgcttccatctcttctgaagcatctggcagctcgcttttaaccggtacgactttgtttggttccccaattggaattttcaccccgccaaattgccggatgtgagaacagtcccatttaatttgcccctgcccaaattcccnggnccnggggttccttattntaaaanggcccccccgggggaacccccctttnttccctttngangnttattcnacnggggtnnccgggnaccnttcccnnntaaatttccccccacccccnt

SEQ ID NO: 392842 - DNA, 513 bp, Oryza sativa
gtaagaagatgttactagtatgtgaaaagagaacgtaacgctctctgtcctctactacacgataattgtccagtaaagtaaacatcatcatcatatcaaggtgaaggccatcagtcatacaatacacacacacataaaaaagggctgtgctgctgctacactcgtgcctacgcattcatctattctcagacaagggcaatctaaaaaaacagatggatgccgtgccgcctcctcttccttggatctggctaactcgcaaagggcaacatctagaacttgaagtctttcttcttcgacttcccgtccttctcctgcttcctcttcctcttgcttgcgttctccgccaccatgtcgctgaaatcttccttctggttccggagcttctcctcctcccgggcttcctcgtacttggcagccaaaacatcatccataacttcaagctcctcaggttgtatggtgacatccaccttatcagacttctgattcttgagaagatccacccttttaggacca

SEQ ID NO: 392843 - DNA, 379 bp, Oryza sativa
ggcaaggtgtaaagtttcaggggaataaccattttcctaagagaatgcacgttttctgggggcatgaagtcaacttacaatttataaatcttccattcacacttacagtatgtaaagagaattcccacccaaaatttctctcatgaacagacccaaagatgagggcattatattcatgggcatgtgccaaataaatggcaccttaagcattccatttcagttgggggggtttcactaaccgccaggacgatggtttccagagaaggccgccccactcgtgctataatgtattggcaaatgcatgcgctttttattctgtggacatgttaacttaaacttttttgatcaagtacatgcagctgacagtaacaaaccacag

SEQ ID NO: 392844 - DNA, 521 bp, Oryza sativa
  unsure (1)..(521): unsure at all n locations
nnnnnnnnnnnnnnnnnnnnnnnnnnnnnnnnnnnnnnaancngaatcangttgaagtttagaacggggcaacatatatctgacaactgaaatatgatcgagactataaatccaaggaccaaggattattttataatggggttacatccagaataaggaaaacaactcagtttcaggtttagcacagggggggcccttactgctagaaatgctagctggcatgcatatgtcgtacttatcatataagctgtagctacagttttgaagctttaattttccgcatgaagatcttttttaaagggttcctaagtccatcataatataagccttcatagaattttgtttccatccaaatttgggtaagaacttgtctccaattatcggaaaatacttaaacaacctgttcaaaagaattttcccagggactggcgctccgttgggacatttcccaataatccataattccttgaatgacaaggtatctaggaaagcaatgtcctctgaaaactaaatttttaaaa

SEQ ID NO: 392845 - DNA, 479 bp, Oryza sativa
accctgggaaaatgaatttaatttccttccaagactggtagatgaacatagatggagagtctcaatttgggtctttaataattaacatcttctgctgagttacaaactcagagctcaggttatttggcacataaacattcttcatggaagtggaccaaaacttatgggttacataacatggtcttccatgtgaaaaattaggctcagggaattaattttacaacagcaggtatacacacaaaactcatgggcaaacttgtacaacttggccttgtggccagtctgcaccccctacagattctgagggtttccttggggttgggggaatctttccttccattggttgcagcctttgttttagatggaacactttaatttggaactggaagggccttgcgcgttctcctggtaaaacttccgaagtggagggaagctccttctgggtttcatccatgacagcctttcaagaacgccaccct

SEQ ID NO: 392846 - DNA, 431 bp, Oryza sativa
atcagtcacataaacgttccagttaatcaattgtaggttcaagttcaatcatacccttacaatatagccggataacaggatcttaaaaaaaataagtccgatcaagccacgagttcagcaagaaaactggaattacacttttggtcgctttacctaaaccatttggatactcatcaccttcctggaggcttcttgcacaacccctcaaccctcatgctaaaagttcaacatcctcaatcctaaatagtgctcatggtagcagccttacctatcaaattgtgcaaaaaggactttattagccaaccaaaagttgcaaatggaaaggaggggattgcaatcagggtcgacatacttagcaacagaacaaaagagggggccatggatgcttaggaaaccatactttaaataaatagctattttagttaattgac

SEQ ID NO: 392847 - DNA, 390 bp, Oryza sativa
tttttttttttttttagtctccaactataaccttttttatttccaggctcagcacatggcaaatcaaacatcgatatgcacaaagtccatcccgtcatactatggcctcttattccaaacgatcagaacagatgggcgtgtcatgcgtatgcgcatattacattacagcttggaaggggatttgtaccatccccacggctcatcggaggcgtactccgtcacttgcttgacgcttaggtagttgccaatgcccccttctccgagctcgcgtcccaagccgctgcgcttgttcccgccccatggagcttggcagaagcagggttgcggagcagctcaacccagatactcccgggatcgatcttcctagttaatctctggaatcgcttcgcg

SEQ ID NO: 392848 - DNA, 511 bp, Oryza sativa
ggcacgagcggcgccgccgccgccgccgtcgcatctgccggcggcggccctagcctcctccccgacggatctgccgactcgaaggagagagaagcgagtcaccgccgcctcttcttctctttcatagttttatctccgcctcaccaccgcctcaccgcctcttccctcacgcatgccgccgtcgcaatctcacactcctccaaccctcaacgaagcgcttccgccacagccctcaattttcgtcgccgcatctgctagcaaagatccaggcgcctggagaagaggaacacgagctaccactaccttctttcctttcatctgccagtgaggatggtcgcatcttggtgaggatggcggcaactcgccggcgcgtgagtcccccacagcgtcccccaactttttttctttatagcggggggcttcctccccctcgcatcagaaaatttctttttctagggcaatgcatgcatgggaaattcccatcactttcccacagggaacttcccccatc

SEQ ID NO: 392849 - DNA, 525 bp, Oryza sativa
ttctttagctgctggaggcggcggggcccgagggcgggcccgtggagttcaaggcggacgtgacggtggcggcggactggagcggcgacgtgatgacgatcggcgaggcggtggcgaaggtgccccctatgaacaaggagcggtacaccatctacgtgaaggccgggacgtacaatgagtacgtgtcggtggggcggccggcgaccaacgggagcatgataggcgacggcatcgggatgaccatcatcacggggaacaagaacttcaagatgaacctgacgaccaaggacacggcgacgatggaggcgatcgggaacggcttcttcatgagggggatcacggtggagaacacggcggggccggagaaccaccaggcggtggctctccgcgcgcagagcgacatggcggtgttctaccagtgcgagttcgacgggtaccaggacacgctgtacccggacgcgcagcgccagttcttccgtgactgcacagtgtcggggacaatcgacttgatattcgggaactcgc

SEQ ID NO: 392850 - DNA, 428 bp, Oryza sativa
tcgcttagcttatagcttaaaccatcagagctgcaaaggaaattaagtaccaaagtactgtactgtactgtactacagtttcaagccaaccaaggcaagacttgtgagagatttttgtgcaaagcaagatggctaagcaacagcttgttgtgaagatgcccatggataccgagaggaagaagaggaaggccttcaaggccgcagttggcatgacaggcgtgacatccgcctcgttggatggagacaagctcatcgtgatcggcgacggcgtggaccccattgcgctgacgacgatactccggcgcagcctcggccacgccgagctgctcagcgtctcctccggcgacgacaagaagatgggcggcggcggcggccacggcggcatgggcatggggttcggcggtggccacggcggcatggggttcggg

SEQ ID NO: 392851 - DNA, 321 bp, Oryza sativa
tcggttcgcttcagcaatggctacaacgtcgccgacggggatagctatgaagctggggggcgaagaagagccctccggcttacctgtcgctgctgcaggggcctgcagctgcagccaatctcactctcgccatcaaagctctcaccggaggcgtcagctctgcttccggaggagcccgcgttctcgactccacttacgcagggaaatgcatcccgctgccgacgcagctgcggagcatggaggcgaccagggcggccatggcgtccaaggtcgggacccgcgccgtcgccgcccacctcgcccgctccttgttcctcctcg

SEQ ID NO: 392852 - DNA, 673 bp, Oryza sativa
ttgtcggcctccacggactcgccaccgccgcacctgggtctgaacccccgtcttgctgccgccggaaaccgcgtcgagaagttaaccatggggtctggctcactcctcctctccctcttgctgggtgctcgtcgtcgtcaatgtcggggtggcggtgaaccaggacgggctgtccctgctcgacgcgaggcgcgcgctcgccgccccggatggcgcgctggcggactggaacgcgcgcgacgccacgccctgcagctggacgggcgtctcctgcgacgccggcctccgacagcacggttaactctggagctgtgcactccagtccggcaatggaggacagtaagctggtgggtgcccggtgttcttggttgtccttgctgtatgtggacccgtgccattgatgcccggtagggcagatcgctcgtctgctgtccctcgagagaagaaaagtctgtgacggaatcaaatgtaggcgtgccctgtaattagtactgctactttgccttttctcctgagataagctaggggttttgttcaaggctcatggtgatggcccatgggggggttggatcaagtatttcctgctcttcaactcagcgggagagttggaaattctaatgccaccgagtgaatgaatgaatctgccctctttttttcggggcctcttggtgct

SEQ ID NO: 392853 - DNA, 633 bp, Oryza sativa
ttttgtttttttttttttttgggtcattttttccagtatcttctaaacaaagatgcaaacttaccacggttcactgatttatttcactacaggctacaggtacagaaaatttacgcgcatgtcacagattgcacacaatcggaagcaaaaacagcatatgacgaaacatagggacaagctagttagcttcacatttcacattgatcacagcgtcatttgtcctggctactttcttctccctcgtaatccatcaacttccaggggccatcggcgcccctcaccatgcccttgtccctttgcacgctccacgacggcgggacgtggtactcctccttgagcgcgtccacattcttgttcaccagcgccacgtcccggtcgacctccagcttgaacccgccgcgcttgccctgcgccccggcgacgccgtgcatgtagcactcgaggctgtgccacaccgcctggttccccggcgacttgaggtacggcgacctcctcgtgtcgacggggagctcgacgccgacgtccgcgtaccccatcggcgggtacttgggcacgacgtccggcgagttgcaaaccccgaggaggcgaaggccggggagctcgtttaaaagctttttgaacccggattcccca

SEQ ID NO: 392854 - DNA, 535 bp, Oryza sativa
  unsure (1)..(535): unsure at all n locations
nnnnnnnnnnnnnnnnnnntttttttttttttttttgtgcagttgtgctgagtactataattcagtacttgcaaagtcaaaagtagcacggacacagtcacgcccaaagctgatgacactcgacagacatactgtactgtgcctggagactcaagtagccaaagcccacacactgtcaaaactcaaaaccaccactagctcatatcactacattacagatcagtttacattgcagagtgcagcagcagcagcagcagctaacaccaggtcgagagaacgggggatggtcagagcagccttgggctggtgtaagggccattgaggatgctgttggcgatggcgtggtagccggcctccgtcaggtggacgccgtcccagttggcgtacgccgacggggtccgtgcacacgctggaagccccgcacgccgcagctcgccttcgggttgaagttgtacggccctccgccgccgcagccacgtcctcaagcgccccgtgcctgaaacccgaacntgcttggggttctgagccgaaagga

SEQ ID NO: 392855 - DNA, 579 bp, Oryza sativa
  unsure (1)..(579): unsure at all n locations
ggccagagaaggggagtctttggttttgagagagctaagtattcagaatccgggcctcattttattcgggaaaaagatgctcaggccagttccaggtcacctgatggcaagctcacaagttcagacagtcacgcacacacatacaatactctcggacaaactgtaacaagatgcaagctcccttgagattatcttatctcactctacgatgactgccggagctctgggcgcacgaaatcggcgttggcaggcacggagatgtcgacggtgggccgcagctcagcgcacacctcgattgcgccatggacggggtcggacatgaagttgctgatgaggtcctggttgatgggagcatccttgtccactgtcacgaatgcttgctgggtcaggatgtagtcgaagcgtggcgcccatttccttgatcccagacgaagccgtcgttgagcagttgtcaaccatgaatgaaagggccactcccaacgaggcatgcatgaaggggttcagtgagtccacggactcgatgacgctcncgttgatgntctctgagtaggagtgacccttntttctaaggacctggat

SEQ ID NO: 392856 - DNA, 441 bp, Oryza sativa
gggagaattggatgccaagagaaactaatatttacagaacagtttaactaacatcctttgcaagttacattcttttcaactggacagactttctatagaaagccatatgaaagctcagaagtgggaacatgccgaactagcagctcctgcagctgctgaaaacatctactacgagggggaacctcaaacctggtacaggatttggcgatgccatcgtgtaactaactagtcattggcgactaactctaagtttgcattctctaacctctggaggacaagcttcttttgtggagcaaggcctttcgcgatcgccacggagcttacgtcgacgaggacggggtcgtcttttttgaagtcgcccttcaggacactgagggcgatcttgttctctaaccgtctgctggatcaccctttttacaagcctagcaccgtagttagggt

SEQ ID NO: 392857 - DNA, 438 bp, Oryza sativa
aaaaaaaaaaggatggctgaatgactgaatgatattatgataatgttaaatgaacttgaactgttcaagataggatagataggagggggggagccccccggagggtggaaggcggcggcccaccaaaccctaaattcctttcattttccttttttttttcccgcatccgacgcatcgaggcaggggatattcttttcttatccttctaagttttcgttcttgcattcttctcgatgcaagagaagatgtcaatggcgtggcgtcccccgacgagttcagcaacggttgcgcacggacaacgccaccacctgcgcccactgcttcagcctcatcttcaccgtctccggcgtgtctcctgggagagagtatggacatgggctctcccgagcggcgacccctcggacacattccggcgaggaggcgccgcacgagcagggg

SEQ ID NO: 392858 - DNA, 261 bp, Oryza sativa
  unsure (1)..(261): unsure at all n locations
gaacgcaccacctcctcctcctttntnattactcccgcggccgactccccagccctgctccagtttggtccaatccaaccaagcagaggctgcagcctgcggagcagaggagaaagaaacagagtttcagtttccgacatgccgcggctgctgcctggaactggaagggcctcctccttgtcctcttctttgctactgctcctgctgctcggtgccgcgatggcggccgctcctttggctgcgtttatgttaactaagacc

SEQ ID NO: 392859 - DNA, 370 bp, Oryza sativa
  unsure (1)..(370): unsure at all n locations
cgtctcgccatgctgctgttcttgatgccaaggtaagaagcccggacgttcattcatctgaacccatctttgacaattacgaagaacatgaggtctcaaatgatcaatcacaagcggcagtttctgatgagaagagaagcacaccgcattcggagagagaatttgctggtacagacgatcgctcacacgaactcatttctgatgtttggaaagatattgtcggtgcaaatgatcagtcattagcatcagctcacgatgaagaaagaagtcctgatcaatcggttgcgattatttctgatgatcacaaagcaattgtcagtgctacggatgattcctcaaatggnggaaggtttctgatccataaggggca

SEQ ID NO: 392860 - DNA, 297 bp, Oryza sativa
aatttgcaacccgcagtcacatatacctccaatccctatgccccttccatttcaacaaaacaactcgcctggaagcccccttcgatgttctataaagaacatagcaatcctcatggctatgttccaccctttcttttcctgcccccccccaggttgatccctgtccagatatcctgttttagttctagccctcacatggtattcatggaccctcctaatatgaagaatcatctatatatgggctccctgctattagagccctctaaatatcaagatgcctgtgtgtaatttgtactt

SEQ ID NO: 392861 - DNA, 712 bp, Oryza sativa
gcagctcatccccacgaccaaatctcgccgtctccgcctcgccgccgccgccgccgccgccaccgccaagagggggggaagcaacccgcagccgccgcgcggcgagatgaacaccgacatcaccgcgtcggtgaagccggagtacccggtggtggaccggaacccgcccttcaccaaggtcgtcggcaatttctccgcgctcgactacctccgcctctccaccatctccgccgtctccgtcaccgtcggctacctctccgggatcaagccggggatccgcgggccatcgatggtgacgggagggctcatcggggtcatgggagggttcatgtacgcctaccagaactccgccggccgcctcatgggcttcttccccaacgactccgaggtcgcccgctacaagtacaagctgtagtgagaaactttatcgattcgctgcggtctctctctctctctctctgctgctgcaagcgtttacatcttttttttcctttttcctgatgatctcgttttagcgtcacttgttgatgtgcgagatgtgtggccttggctgaataaatgttgtacgctgcacgcttgtgaggaattcgtgctacaatttagctccctttgccatggtttagtggcaatttggttgccgatctggtaaaaatttatggaactgaatgtgaccccccgcctgggaaattggggcattctataatactcatct

SEQ ID NO: 392862 - DNA, 474 bp, Oryza sativa
gtatatgtcacctagagggatgaataggtatttccaaaaatttcttaaacttacaaacagcttagaactaactggatagtccggtaccactgcagacaatctgactatagagcagtcggatagtccgactgcatcagaacaatccaatcagagcatcgccagagaaaaactataagtgacctggaaaatagaaatagaaatgaaaaaataatggtggtggtggcaggatgtagcgtgggttgatcgtttagaagcacgaaagctccttgaggcagccggtggcagtgcccttggcattcttgcagacggccatggtcttgttgtttttgccagagtactcgaccttgatgtcattcaaggtgacgccggtgcacggcagcttgtcggagcagaggaggctaacagcctcgggcgtggaggaggtgcccgttttgttcttgaaggtgatgtccttgatggtgaccctggagttgc

SEQ ID NO: 392863 - DNA, 648 bp, Oryza sativa
ttttgtttttttgaggcatggggtaaaataaaatatctgtaaagtcatgtacataaccacaagacgcatgtgcgcagtgatcttgaaacttcactgtaacaacgatctactgttatctgaaaccttatcgatcagaacaatctaaaggatgaaaggaaagtgaagaaataaacaggcctaaatattaaatgcaacacagatgattaatctcaacatagatccacccacttccatttaacgatttcattttgcctcagcgcaccacatagttcctcaatcgtttctaatgcatactacacagagatattccctctgttctcaacaggggctccacgaactaaagtagttaaagttatcaatgatggacaggtcagatctcatcgtcttcggtggcttcatcatcaacagcagagctgttcccgttagcaggctccaattgcttgccattggaccctggggacttgccgttggacttattctttgttgttggttttttgcccttctcggcttgctgcagctcgaggcccttagccgacagcctccgcctcctctttgagttcacggcttcagctggttcttcagcagtagaattatccacttccattggactagatgctggaggaatcgcttgtccattctgtacagcat

SEQ ID NO: 392864 - DNA, 826 bp, Oryza sativa
  unsure (1)..(826): unsure at all n locations
ttttccatcaccagctcatccctctctagcgcgcgttcgtccgaccctcccccgcggcggccctacgagcgccgcgcttctctttctagccccctcttccgcattactccctcataaaggaggaacagaggaaagactgggcagaggagaggacctatagctgagaagaagcagagcaagtgaaggagaaagccccgtaatcttggccatcctcctcctcctgctgctgctgcaactccggctctgcctttaaacagtgcagcccgggcggcgccggccacgacgctcgtactcctagctagcagcggagaacgaacagcgtgcagggactcgcctcgatagcacagtaaattccattccatatcatataccattccagccatcactctccaccggcaccctgcatttactgctcccccatcactcgccccggcttccttgagcgcgatctccagatcatcttttgtgtagcgagaaagctgacgacggggaagggcggcgtggtcagcatggtgccgcgcgagcaggcggaggaggccatcgtggctgacagcaacggcaaggaggaggaggtcngggtgatnggcgtcacgccggggagcacggcgccgacgaccaccacggcggcggcggcaagttcagcatgaagaacctgctctggcacggcggctccgtctgggacncctggttcagctgcgcctctaaccaggtcgcgcaggtgctcctgacgctgccgtactccttctcgcagctcgggatgctctcgggcgtgcttctgcagctgttctacggtttcatgggcagctggancgcctacctaatcanc

SEQ ID NO: 392865 - DNA, 737 bp, Oryza sativa
  unsure (1)..(737): unsure at all n locations
nnnnnnnnnnnnnnnnnnnnnnnnnnnngtaggaaaacaatcattgttcttccatattacctcgagtcagcaatccgaattacaacaatttctcgttgggccatacatataagtcttgcgatgatctcattcgtatcgttcacagcttaaagctgcttctgaatgttcataacactgtcgggactcaggaacagttaaacatctctaaaacatgtacacgctctctggggaaaccatcctttaaactatatagtacagttcaatctcccacatacatataagcataagctctagtgacaacaaataggttctacaaatctgatagcccaagtcacatgcgatgctatgcgaatcgcgctcctcaatgtgatgtgccgaacattaacactttcactctcaagaccttaaccttttaagcgtccctttcaccgcgatcgtaattcctgtgcttatgcatatcctttctttttcggttgtcaagctccggagaacggctactcttggctgtctatggacaactcaccttcctcagtgttttcagtcaggcgagcgacgccttggngatcctcccgatgtgcagaatggggccaactctgcctcctctcgtgcttgatcttctcgtcctcggnagccaattccacaccatgttccagttccctctcgattaggtcatcatcaatccatgagatcaacctttttagcaacatcggctttcgatttcctncgtttctccaggg

SEQ ID NO: 392866 - DNA, 620 bp, Oryza sativa
  unsure (1)..(620): unsure at all n locations
nnnnnnnnnnnnnnnnnnnnnnnnnnnnatggaagaagtgaattttattttgttatcactccatacagtggaaagtatattgacatttcagctcatttaatccacgagtcttgccatccctctcctgtggcttatgcataactatttttatttcgattcgtcatagccggtgaaaggtacacagatcactcagcagcttttcctttcctgcgattgctaccacctgcagaggctccggtgcctcccatctccacaaggtagtagatcattgagtcgacgtcctcgccaaatatgctataggcttccatgacctggatgtagttgaagcccattgccaggaggagctgcatgctgcgggttagcacggtgtccgggagaacgaagcactcctcgccaactctatcggcagtcccagctgaccgagaagacccactaatcgcagcagaagaagatggctctgcccctgatgttgatgactctctgaagttaagttgttgttgctgctgctttagaatactctgctcggngagggcctccatcaccatccgctctanttccttctctggcaantccaaatcagngtatagtcggccttcagccagaagtgcattctcaatctg

SEQ ID NO: 392867 - DNA, 489 bp, Oryza sativa
  unsure (1)..(489): unsure at all n locations
nnnnnnnnnnnnnnnnnnnnnnnnnnnngttgtaaattcagccacatgttatcatatcttggatgttcgaagtcacagctgctacatgaagcattcagaggtcaaacatgttggtaagctagtacagcagaagttctctaaagaaataacatggtagcatcatgattacagtggttgctacagtagtatttaactgatgaaataataccagcattcatcacttcaagttattgacatactggactcttcaaagttcaaacatgttcctacagatcacgattacgaatcggcacctaatgaagccatctgtttgttgagctcatcatcagccttcttcaggaacacatcccagccactgccctctccccaatccagcatatcatacggcactgctgtcattaatcctggcctcacagcaccatgttgcatcaccactcttacctccacctcctctctctcctcctgctcaagttcctcccatgtaaacag

SEQ ID NO: 392868 - DNA, 513 bp, Oryza sativa
  unsure (1)..(513): unsure at all n locations
nnnnnnnnnnnnnnnnnnnnntttttttttttggggagcaaaacaagcggcgccactttattcgcaggagtataactgtgtaagaccagttaaagtacatgcaatgttggtatagcatccttcacaaacgagaggctgcacaattacaatcacgccgaagcaattggttgcctgcctcccctacactacaccccaaaatccagcacccagctgagccgcttcatccttcctaatctagtaagatccaattttattgggtatatcttggtgtacttttggttgggctttttgggggcactacttggtttgaagtttctctctcgtcggcttggaacccggacacgatgtgtatcacaacacttctcatgctgacttccaataaccaaacatgaaatgtaactcccatggcaaccgcgccatatacaccaggtacatgttactggtccacctcgtcaggtaagatgacattgtttaggtatacaagacgcatctcatctctccaaatcaagtccc

SEQ ID NO: 392869 - DNA, 525 bp, Oryza sativa
tcgtgtgcggcgcaggcgctgcctctcctcgccccgttgcgcggcgccggcgccggcgcctcctccaccgcatccgcccgcgccgccgcctcctctcgccgcagatgtcgccgccgcctcctgtcgccgcagaagtcgccgccgccgccgcctcacgtcggatctgcacgtgccgtctcaccggatctgcgggcgccgcatccctttgttccccggtgccggcgcctcctcccttcctcccacggtgcacgacctcggcgcagccttctcttctccccacggcaagcaggtaatggagctactgatagccttgcagtaatgccttctgctcttgcacttacggagaatttggatttttgggactcttactttctgtttgtatgaaatgaatgtaattagttttcagtggcttatcctagctgattgtggtgatgaatatgatgtttaaatgagtaaatcatgtattgtgaatgggtgactgattgtggtggctgaatggatatgatgcaagcaatttttagaaca

SEQ ID NO: 392870 - DNA, 521 bp, Oryza sativa
tcgtaaacctagcagcagcagcacacgtacgcactcgatcacacgtgcgcatcatctccatctcctcaacaatggcgggctcgacggcggcggcgctgaagttcacggtgaggaggaagccggcggagctggtggcgccggcggggccgacgccgagggagctgaagaagctctcggacatcgacgaccaggacgggctgaggttccacatcccggtgatccagttctaccggcgcagcgccgccatgggtgggcgcgacccggcgccggtcatccgcgccgccgtcgccagggcgctcgtgagctactacccgttcgccgggaggctccgggagctcgaggggcggaagctcgccgtcgactgcaccggcgagggcgtgctgttcatcgaggccgacgccgacgtgaggctcgagcacttcggcggcgcgctgcagccgccgttcccgtgcctggaggagctcgtgtacgacgtcccctgcttcgcagaggtgcttcgctcgccgtgctgctgtttaggt

SEQ ID NO: 392871 - DNA, 516 bp, Oryza sativa
aagaaccgcgcggcggcaccaaagcgagcagaagcagcagccgaagggtaccggagctcgcgcaacaggagagctgtctccatgaggaagctgtgcccgaacctggagcgcgatgacgcgcgggacacggtgctcgaggtgcccatcccggaggagatgttctcacgcggcagcggcggtggcggctcccgcggctccaggttcggctgcaccaacgtcaagtcgtgggtgcggccgaacgcgtccgaccgctccggcggcgccggagaagccgtgctccatgagccgcggcgagctgcagctcatgctcggcgtcatcggcgcgccgctgataccgttccccgtcgaccacgccaagcagtcgccctgctccgtcctctgtgaacagctcaaggccgatcccattgagtcgtccacggccaagtacataatacagcagtacattcgtggcgttgggcggtgagtgggcgctgaacaaggtcacgaacatgtacgcgatggggaaggtgaggatga

SEQ ID NO: 392872 - DNA, 442 bp, Oryza sativa
ccccctcccaccgctggccgcctcccccgcccgacgccgcctctccccctccctcccaccgccgccggctctcccctctaccttccagcggtgccgcttcccctcccctcccctctcccatccggaggcgccgctccctctcccccaatccctcccgtctcgccggcacggcgcggagaaggcgggcgcggcggagacggcggcgacagccgtcccttcccctctccctctacctatcgacctcgacggccgtccatccctctcggcgatggcgccctctccaccctcaagatccggcggcgccgtcccaacggcggcgtcgacagcgatgacggtgtcggtggcatccgcgggtggatccgtcggccgtggtggcaaccgcgggcggatctggcagcggcggctccctccaccgcctcttttctcaaatccctccggtggc

SEQ ID NO: 392873 - DNA, 479 bp, Oryza sativa
ttaaatttttggatcatccactcagccggcgaacgcctcaccctgccgtcaagatggccagaccagctgggatgcggtgaagaaggagcggctagtgcagtcagcacagctaggggtcgccaaactccacatcggagtggcgttagaggacctgccgttgagggggagccgccgtcatccgatcagatctggagccaccgtcgccatggctctccaccgcggaggcctaggcagccaaggacacgaggtgactgccaagctcctccaacgcctgccgcagcgccgtccacccctcccgccatcggcgatgttcatgaaggaaacgggatgtaacccgatccgctgggaccagcgccggtcggcaccaggagagccgcgacaggtccggggcatcaggcatggcttccttctccttgctcatcacggaccagcgctgtatcggtgagacctggcggctggaggctggccgtccctgtgct

SEQ ID NO: 392874 - DNA, 928 bp, Oryza sativa
  unsure (1)..(928): unsure at all n locations
ttgagaggacgctcctggctatgccagaaaatggcattggcttgttcccggacgttggctttgcttacattggtgccaaagctccaggaggtggtgctgttggatcttaccttgggatgacagggaaaaggatatcatcacctgctgatgcccttttctttggtcttggaactcattatgtaccttcagcgaacctgggacctctcagggaatccctcttgagtgctaacttcacagatgatcctcacagagatgttgagtcattgctgacaaagttcaagaacgagccagagtcagggccccagctagataagtttttaccatatatcatttcttcctttggtcctgacaaatcagttgctgaatctgtggaagagcttaagaagtgtagtcaaagtgatgatgctgcagtggcagaatgggccaacgaggccttggcaggactcaaaaaaggggctccattttctctatgtttaactcaaaaacatttttctcaagttgcatcagcatataggaataatgaacactatctatcgaagttggctggtgttatgaaagttgaatatcggattgccttgaggtcatcggttcgaaatgattttgttgaaggtgtacgtgctgtcttagttgacaaggaccagcatccaaagtggaagccagcaactctggaagacgtggacaagggtgaggtggaatcagtttttgaaccattagctgctgaggctgagttaaatgtatgatcttcacagcaaacatgtaatattattggtaccggaataccctcttcaatttccctgttatgttgcaataagaaataacaaggataaaaatgatgattattgagccaataaataatatcatgattacagtatttgtgacttnnnnnnnnnnnnnnnnnnnnnnnnnnnnnnnnnnnnnnnnnnnnnnn

SEQ ID NO: 392875 - DNA, 836 bp, Oryza sativa
  unsure (1)..(836): unsure at all n locations
cctctatttgcgttgcgaggcgacgacgtgccaaccacgaacagaggcggcgctgcaaaatctcgcgaccaagcggcggcggcggcgggagagaacgagaggtgaccgatggcgacgggcggcgccgccggcgaggacgtccccggcggcggcgagttctacctgcggtactacgtggggcacaaggggaagttcgggcacgagttcctcgagttcgagttccgccccgacggcaagctccgctacgccaacaactccaactacaagaacgacaccatgatccgcaaggaggtcttcgtctccccctccgtcctccgcgaggcccggaggatcatccaggagtccgagattatgaaggaggacgacaacaactggccagagcccgaccgcgttggggaggcaggagctcgagattgttatgggcaacgagcacatctccttcaccacctccaagattggctccctcgtcgacgtccagaccagcaaggaccctgagggcctccgcatcttctactacctcgtccaggatctgaaatgtttcgtgttttcactcatcaatctccacttcaagatcaagcctattcaatcttgagctcctttcagtctcttaattgtgttatggccagttttagagaattctgtattattatgtatgatccagcgggttaaccatggtggtggggtgtttgtggaacagagggtggaatcttaatactttggtgcctgggattgttgttggattgtgcaagctttgggtgctcgttactcaagtagtgatatttattattgtgaaatctttttctnctccnnnnnnnnnnnnnnnnnnnnnnnnnnnn

SEQ ID NO: 392876 - DNA, 407 bp, Oryza sativa
  unsure (1)..(407): unsure at all n locations
ggangcnaagaggccggaaatggcggcttcttgcgcgctcaccctcccctccgccatctccgtctctgtctccgtctcctccaattcacctcgacggttcaggcgctctaggagggtggtggccatggccagcgtggggcagaaggtgtacgcgcccggcgtggcggtctccgagggcaatggcgggctgccaaaaatcgacctcaagtccccgcatggaagtaaggctgaaatttatctatttggagcctgcgtaacatcttggaaagtccccagtggaaaagacctcctatttgtcagaccagatgcggtgttcaacggccagaaacccatcagtggtggaatcccacactgcttcccccaattcggtcctggcaccatgcaccagcctggattctgtcggaaca

SEQ ID NO: 392877 - DNA, 699 bp, Oryza sativa
  unsure (1)..(699): unsure at all n locations
aacagaacangccacaggataacaataccgagtcctggagaaattttgtcaatgagtatttttctccaaatgctaaaaagaggttggtgtgtatctctctatggaagttggtcgccaaactactggagttttccctcaggatgtatggcattgtgagatatgcaatcggaagcctgggacggctttgagaccacagttgaggtgttaccacggttgtgccaaatcaaatatgccagtggtacattggaagaattactatatgtcgacatgccacgtgaatcgcagaatgcctctggtcagattgttttggactataccaaagcaatccaggaaagtgtctttgagcagttgcgtgtggtacgcgaaggacatctaaggatagtttttaatcctgatctcaagatcgcttcttgggagttttgtgcatggcgtcacgaggagcttattccacgtagatcaataatcccacaggttagtcaactgggcgcagttgtgcaaaaataccagagtgctgttcaaaattcgacaaatttgtcaactcaagacatgcagaataattgcaactcgtttgttgcatgtgcccgccaattggctaaagcactggaggtgcctttggtaaatgatctgggatacacaaaacggtatgtgcgcttgcttcagattgctgaggtggtaaactgtttgaaagatttgattggt

SEQ ID NO: 392878 - DNA, 453 bp, Oryza sativa
agacgttccttcgtacgcttcaccggagtgggtggagacgagacgcgagcaaacccaaaaccctcgcggcgacgccatggccgccgcgctccgcgccgccctccgccgccgccacgccgcctcttcgccggtggcccgcctcctgccgtactcgtcccctggaccctgcgccaagggcggtggcgccgcctccaccctccacgccgccacgcgcggcgcgcgccgctccgtcgatccaggcgccctccgttgtccgtcgcgtctgctccgccgggggaggatacgccggcgcgcgccctgctcgcggtgcctccccgctccaggcaccctttatggtccgccgctccgggtccacccacgggagccactgctcccgtcacccctgccgctggcgtcacttgcctttcaccgggaatctccacttccctttttggtgccccgccgacctcccga

SEQ ID NO: 392879 - DNA, 863 bp, Oryza sativa
  unsure (1)..(863): unsure at all n locations
tggagctggtgggncccccgggctgcnggtgatgangcaccagggggcgtgttccctagcattgtggggagacccgtgacaccggtgtcatggttgggatgggccaaaagggtgcctatgtgggtgangangctcaggcaaaaaggggtatccngnctctaaagtacccaattgaacatggaattgtcaataactgggatgacatggagaaaatatggcaccacaccttctacaatgggcttcgtgttgcacctgaggatcaccctgtattactaactgaggcccctctcaatcccaaagccaacagagagaagatgacacagatcatgtttgagaccttcaattgcccagcaatgtatgtcgcaatccaggctgttctatcctcgtatgctagcggttcgaacaactggtatcgtgcttgactctggtgatggtgtgagccacactgttccaatatatgagggatatacgcttcctcatgctatcctccggttggatcttgctggccgagacctcactgaccatctcatgaagattctcacagagagagggtattccctcacaacatgcgctgagcgggaaattgtcagacacataaaggagaagctcgcttatgtcgcccttgattatgagcaggagctggaaacttctaggagcagctcctctgttgagaaaagctatgagatgcctgatggccaagttattaccattgggccagaaaggctcaggtgccctgaggttctgttccagccatcttttgttggtatggaatctcctggcatacatgaagctacatacaacttcctcatgaaaggtgttgcacacataaggaaggtcctgtatggtaatggtgtcctaagtgg

SEQ ID NO: 392880 - DNA, 594 bp, Oryza sativa
  unsure (1)..(594): unsure at all n locations
nnnnnnnnnnnnnnnnnnnnnnnnnnnnnnnnnnnttttggttgaacaatgaaaccgttcagcactcattcataaagaaactgtggtatctacgttccagaatcttttcacataaagtgttccaaaattatgttgaagagaccatcgtctcgaatcctaatattgtttcagatgaggctaggaaatagctgcttcaaaaatactctctctctcccggcgaaaaaaaaatattcagttacctatcactaacaatctaacacagactagtgttatctcgtatcaattggttgcagggtgtttcgcctttgaatgatccttcagagcaccagaggagttgaaaggctttttgcatgagttgcagacatagctagcagaacgcttaggcgtgtcgttctttatgggccgtcctctttggcctgttttgctgagggtttgtaacttggaagatgactaccccccttggctagttattagtaccagttttggttgcccgttaattgggtcttccttctttccctctcatgtggaaatgtctccaggggtgttaccactggttcctttccccttatttctggtggatccctccccccnaac

SEQ ID NO: 392881 - DNA, 416 bp, Oryza sativa
cctttccggtgtttttttacccttgggcaaacacccaccatacggctcatttttattccaatccaacagaaccacatgcgcatgccaacagtatgaatcaaaagctgtttcgaggtgaagcacaatgcgcatcactccctggccgatacgtatccatcagcaataacagaggaatcagtagatgttcgggacgaacgccttgcgcgacgccgggtacttggcgccgaacttgccgacgtaccaccggcggtgatccctggccctcggcccgaggttggagcaggtgtagaggatgaaggcccaggcacgccggcgtccacgccaccagcgcgtagccgagccactccacggcctcgccgaagtagttggggcaggtgaccacgtcgaacagcccgccgcggggaatctggtaccct

SEQ ID NO: 392882 - DNA, 515 bp, Oryza sativa
  unsure (1)..(515): unsure at all n locations
tagattnatggtttnctcanccccattaaaccccagaacctagttccgtgcactgacttgnaaaatgcaatatcttgatcaactgtaagactactctttctcagttctttcgggaatggcaacagcaaggatcacgatgtgtgaattctgtgaatgtgagaagaacaatatttcttcagcatatgcctggttcagatatgataaaactgaccattgtctctgcgcttgggagaatctaagctcacaatgtcatcatgaaaaggtttatgtttgagccgctccccttgcctgagcaacagcactctgataaaggttttcgtactgggaagctggagaatcccagctgaaatcaatctgcatatccttctgcactaactgtttccaaaccataggttttctgctgtagtagctgaatgccctttccaagcaactgcttagatcctgctcatcagtcctagcaaatgtaaagccattccgcagctccacaggtatagtttcatcatcaaaatcaaaaa

SEQ ID NO: 392883 - DNA, 750 bp, Oryza sativa
  unsure (1)..(750): unsure at all n locations
ccgaattcaacgtttccctacaatgaccttaaagggccgtgcacatgctggttcctagataagcaataggtagtgatctctatgtggttcttactctagcaaggctgattcagtggctccatcaccagccaagatgaacaccgcaggcaaacccaaatacctcgattgtccagctctgttatctcaagagcatatatagcccacagcctcacggagtccgagactcagggtacgtgaccctcgtttcctgcacgccgacgctattcctgcggcctgcctgccgggcgcgtcctgtatagaaatgggtaaccaccctgtattatcaatgaaacagcatattgtatacggagtattctgttcgagtatgtttcaggattctttgataattgataccctaccacaggtctaacaaatgaattacggtataccactaaacaaagaattttaaagtgacattaagttttctctgagatttttcatgccaacagcattacaggattctagcatgacgaacaaacatcctttggccaaatgattcttctttagcatcccataatatgatacagggaagccgtcttgaggttgagagtaagatatcgacgccaaatttcctaccaggcttaagatgacgcttgcttctgagttgagctactttcgagcccttgctgcatctccagcaatttctgctgctcctccatcattctcctcttttgggtcagncttgggggcctttggttttntgggtggant

SEQ ID NO: 392884 - DNA, 643 bp, Oryza sativa
ttgtttttggatgaaaagcaacaacactgttgagttcagggaaattgagctccccatcacctgaacttttacaaaacttccaacctgaacttgtacaaaaatttcaaacacttgctgcaccgacaagtcagtttgcacgtttaaagtgacaaagcaagcagatggcgcatacaaaagctctacttgcaaccaaagccaaaataaggagttccaacattccattaagcattaatcgccagtcatcagactcgcagctcattacaactaatcccatcctgacagtgcacctgatcctacctccggcacagaggatagctgctcaagagctgacgagccaaagacggtgcctttggctttcttcttcttcttggtgtgatcgattaccaggccaccaaattttccatctcgggcaatttcctgatttttgcccttcaactcaagctctggattgttgccttcaccggagaacaccaagtctgcaaatggcatttctgtgtcatcaattccgtcggcgttcttctcttccttcttggcagattttgtcctcttggctcccttactaacctttttatcagtatgatcaacagaagagttgtcatccttcctctttgatttcttgttcttgacatgttctacagccgct

SEQ ID NO: 392885 - DNA, 801 bp, Oryza sativa
  unsure (1)..(801): unsure at all n locations
nnnnnnnnnnnntttttttttttttttttggagtacaactcaaaaccttttgattaatgcacaaagacaagaatgcagtgctcgtgttttacagaaaatttggcatcagtgacataagctgccgcattcataacagtgttctcaaatctttaagggtacaacacaatgaggtcagtatgattcttgtttcatatgcgaaaaatctgacaacacaaatatgacaaacaaggaaagccatactcatatttttcagacttccaaagctccaggaatccatgtggcatcgcacgatgaataacaacatcatcctgtaaatcttttattttttcgagtaccaagtggatgctagcaagtcattatcaccatgtgattcggagcgggatacaggcttcctccaagggatttcttttttttcagttacacaattttcttttccttttcctgagaaaaggttatcaacagcagatggcagactcattgtcaaaatgctgcccaaccagcacctgtgctttttgtttgcgccgacgctgtcgatgacggtaggttttgcttcatagcagaaagatctgaaaaggcgtcgctatttctcttggcgggttcttttggagccctgattccagcattagagccagaattcatccttgcggcagcagggtcatttggtggaggtggaagaggagatcgaagcttcccagctgaacccggtggcggcgcaaggagcatgcttgccttgggttttgcactggcccctccagataaaccagctgatgaaagcataccacttccagttgatggcttatt

SEQ ID NO: 392886 - DNA, 371 bp, Oryza sativa
ttttttttttttttttacacatcagacaatccaggcaaatatattctgctgcaaaatctgattacatcgcaacgcagaaaacgtctcctctcatcggagggtaaaaggcatctaaattattggacaccacacatgcagccacacagggcgaaacgaacaatcttacataggcgtatccctgcaaacaaaaaggattccgggataccaaggggaggcgacagtagtaagccgacccatcatcgcctggtcctacagcagcacgtaattatagatagaagcaatgctcgtggtatgatgttaccaacgccgggaggccagcagcatcgcaggcttgcagcaacgctcgccctcctcggctctgtacatgatca

SEQ ID NO: 392887 - DNA, 935 bp, Oryza sativa
gagtatgtttcctctgctttggagcaagtaaatcatgcatttgaagtagtagggaaatcaataccattatcaattgtagcatgcacatgagagcagctggacaaatcaaagcatgatcgagttaaaaatgaatgggaaacgggcaacattactacagtagtttattactccatgcctcatgcagagagcagtgctgcgaattgatctgccaggctctttcacagtcgtcggagaaactgcagattctccacccaggtaccacttctgaatcatctcggccacattcttgttctccactgtcagcttcgcctcgcccttgccttctgtcacaaatgatatctctgcaattaccaggggtgttaggaaagtggaaggtgaggacggagttgggcttgaaatacttggactgaaagaattcagtcaccttctccagagactcttcctcctcatcctcgtacttgtccactgacacgagacggtcgcgcactgagccctccagctgcacgccgtactgtgatcctttgatctccttgatcaccacgatcctgaatagtttctccacaggagcagaaactagggcctgaaagaagccatcatcctgcacaagctcctctgccttcttgcccttccaactctccaaatgccctagtacattgtccttttcaagatacaccccgatggcgttgtatttgatctgaaggaaatgaatctcaatgtctgtaatgccatgggctagcagtgataacggcttactgacggtgatctcctgaggaaatgggatgccctccacctccacggtggccatctctgtgcccattcttctgtagaggtaaattaataagcaatggagccgaaactgaaactgcttttgctccttgtgatgcggtaattgttgatgagagaaatagagaggagaggaggaagatcgaaagagc

SEQ ID NO: 392888 - DNA, 714 bp, Oryza sativa
  unsure (1)..(714): unsure at all n locations
cgaatcaaactcgcgcgccggaagagcagccgcagcaatggcgggcgtcgcgcctcttcgcctccccggccttccccttcccatccacctcctccgtctcctcctgctcctgccgcttccgncccgccgtcgcccgcgccccggccaccagcctcccggccgccgcgtgacccggcgcttcgacgaggtggagggggtgtcgaagaggcggcggggcattggnggcggcggcggagggggctcgcaggcgtcgtcgtcgtcgtcgcgtaaggacagagggctcgccgttgacttcaaggagtcgcaggtctcagatttcgaggaccttgaagaggacaaattccttaatgctgtagttaaggtctattgcactcatattgcacctgattatgggcttccttggcagaagcaaaggcaacatgcaagcacagggagtgcctttatgattggggatggcaaactattgacaaatgcacattgcgttgagcatgacacccaggtcaaagtaaagagaaggggagatgacaaaaaatatattgccaaggttctagcaaggggtatttgagtgtgaccttgcattgctgtctgttgagaatgaggaattctggcgaggaacagagccacttcaactgggtcgcttgccgtgccttcaggattcagtaactgttgtgggatatcctcttggtggagacacnatncctgtaacaaaaggcc

SEQ ID NO: 392889 - DNA, 590 bp, Oryza sativa
  unsure (1)..(590): unsure at all n locations
tctgttgggttcagccttccgggctcaggtcagtctgatgtgaatggaagtttcatcactattccaaggttgctattttgattaactatagcttgtggcagtatttggccatcttgcctgataaataaccagtcatggcgacaacggcttcaaagataattcctcaaaccctcccagaaatcccaaccaccccagaaccacagcagtatactaagactgctccagacatccccaaatcaaacaattctcgttcttcagtacctaaattgctacaagaatcagaccgcggcaagttgaatcataaattggagccaaaggaacaaaagccaaaccaccacctgaaagagtctgttgatgtttcatcggccaagtgtcccacagaagtgagccaagaaatggtttcagaaggtattgcaagtcaagaaaagaaggttgtggagtatgagagtgtgaatnggagctccacctcatttcacacatgcgaagggagttgtccaggaaaagcaagttgaagtnctaggatgacggatcgatccgagaccggtgaaaggggtagtagtagcagatgcaggccaagcacaagcagtgat

SEQ ID NO: 392890 - DNA, 729 bp, Oryza sativa
tttgaaagaggccaagaaaggccaagaaagaactgataaatggattagaaaaaatggcaggagttcgatccattataggtgtgaagagaatgggtgagcttgatcagaaggccttttataatgcatgcaaaaataaaatgccaaataataagatgaaattggcacttgtttgttcaaaatgggaagatgagataacaaaaccagaatggcatcctttcaaagttatcgagactgctggacagacaaaggaaaatcattcaagcaggatttttgaggaacaaaagagaaggttaaaataccggaaataatcaaggaagatgatgggaagctgcaggctttgagggcgcaatatggggatgaggcttgcaacgttgtcgttaaggcccttggtgaaatgaatgaatacaatcccagtggcatgtatcctgtccctgagctgtggaacttcaagcagaaccggagtgcccctatgccagaggcagcaagttacttgctgaagcagtggaagacgcacaagaagagaaacacctgagtgagatctggaccctgctcgtggtatcgttatctgtagaattcgtcccctgacatgtagttggatgaggctgcctattagtgaagcaagtattcatatctcccagacattgtctgtctctactggcgacattgtagtgcacatttgagagttgaggctatatgaatattcgcaaactccagtaatgtaaaaaacaa

SEQ ID NO: 392891 - DNA, 1011 bp, Oryza sativa
  unsure (1)..(1011): unsure at all n locations
ttttacagcaaggctgtgaaagggaagagggtctgaaagctgaaatacttgttttacaagagaagctatcttgctcaagagagtcctaccagacttcacaaaatgaaattgtgagcttgactgagaaaaatgagaccttgtgtaaagaataccagtctttgattgagaactacaatgctttggaggatgagaatggaacccttctttcagaatgcatgaggctcgagcacttgtctttgttccttaggggccataacaatgaggtagcaactgcattgggatctcttactgatgagatggctttgttgagtgtaggtaaggatgaacttgattgcgaagtccaagagcttagcagaagaggtatgatgcttgaatcggaaaacaataacctaaaggagtattttatctacctgatagagattctcagcgctcagttagccctctcagagtttgatttgaatatcaacaaaagcatttgccaggagttggccagtgaacttgagagctgcatggcacagctgtcgcagaaggatgatgagctacttgaagcagaagataaggttcatttgttgcaaggaaagaaccgagaattatgtggagttgttggctcgcttcaggttgccattgaaggggctaaaattgtgaaagaggaactcgagaagaaaatcacaacgttgactgaagagggaaacaccaaagatggtgaaatttcgcttcttcgccaagcaaacgagagactgcaggtggaagctgacatcctaaaagacaaggaagacagtttgacttcctcacatgaattactgtcgaaagaggttgaacaacatgaaggggaatttgttgtgttgatggatgatgcgatatcctcttcagtgaatgcggcagtctatgaagagaaggcacttgaacttatgacgggaaaatacagaacttaaggccaacttgacgcacacatgtgagctctgatagcatctttgtctgatcatgccaatgagctggaagnaaacactcttt

SEQ ID NO: 392892 - DNA, 482 bp, Oryza sativa
  unsure (1)..(482): unsure at all n locations
gttcgccccccaagccaaatccacgcatcgacgcggcaggagcgggcggctgctgcgagatcggcggcgcccagatctcgcgcccaccagcggagatgaagatcacggcgctcctcgtgctgaagccgtcgtcctccggcgggggagcatcctcgtccggcggcggcggcgggtcgggcggccccgaggcggtggtgctggcgaacgcgacggacgtgagccacttcgggttcttccagcggggcgccgcgcgggagttcatcgtcttcgtcgcgcgcaccgtcgcccagcgcacccagccaggccagcgccagtccgtccagcacgaagaatacaaggtccactcacacaacaggaatggtcttttgcgcagttgcatttatggatgatcactatcctgtacgaagtgcaattttctctttctgaataaggtacttgacgaataccagaaggttttcggggactttttgnaagttctacaa

SEQ ID NO: 392893 - DNA, 516 bp, Oryza sativa
tctcaagacaattaacacgacaaatcatggagagatcagccaccgtctttgtagcgctcaccttgctcgtcgccggcagcgtcgtcgtcgtcgtcgtcgtcgacgcctgcgacggcgtgccgaggatgtcggccgtggaggcgtgcaagcaggcgagcgtgggcccggccatgtcgcggacgtgcgccgagacgctgggaacctcggcggacgagcagggggcgacggacttcatggtggccgccgcgaacgccgcgacggagtcgtacaaggctggcaaggaggccgtcggcaaggtgctctccaacccgctggcgcccgacggcgagcggctgccgtgcctcgtgtgcgcgaacaagtacgacgacgcgtcgatgctcgtcgccagcaccgccgacgacgccaagcgctgcaagctgagcgccgacagcctccccgacctcgtcaccgccgtctccgccgtcgacgagtgcgccacgaagatgttcgaggagagccggaacacgacgtcggtgt

SEQ ID NO: 392894 - DNA, 696 bp, Oryza sativa
tttttaagttcccctaaaggcgctcttcttggccttgctagttatgattcagatgatgaggacgatgagggtgataatgaggataaggttccagtttcaaacttatcgtctgaaactaaagctggcgcagctcgtccaggagaaggtgaaaaagccactgatggtgaacagcatggaaatcataatgaaagaaattctgtggtccaaaatgctgcatgaggcgaagatcgtaaatttaatgatgaaatgtctcataggaactcaagtgcagaacttaaacaagagctacgtgttcatgacacacatagtagggaatttccttcagatgccaaaatatcaagtcagccgaaggatgtggctcctaccctggatgagaaggcacatggatattcccaaaatggaaaagttccaccttcaggcaataatgttgaaaattttagcattatggagagcagtcaagggcatttagggcagagcagcactgaggaagattttgtacaggagccaaaggctgttcgaagaaaagaatccgaatcttcttccaaaagatataatgatgatgataaatctagcatgtatggaaatattgataaaaagggtagcttcaaggaggaaaaaggatctgacaggagtgtgagacatggagctgatacaagggaaccccgtttcagaaggaactttaagcaggatgaatgc

SEQ ID NO: 392895 - DNA, 484 bp, Oryza sativa
gtcgagttcccgtgaatggattagtgctctatactgggaccattgtcaccgatgacggcaaagagaagaaggtcaccttcgactttgagccgttcaggccgattaacgcttcgctgtatctgtgtgacaacaagttccacacagaggcactgaatgagcttctggagtctgatgacaagtttggtttcataatcatggatggcaacggaacactgtatggtacacttagtggcaacagcagggaggttctttacaagttcagcgtcgatctcccgaagaagcacgggcgaggagggcagtctgctgtccgctttgcccgcctgcgcatggagaggcgtcacaactacctgcgcaaggcggctgagcttgctacccagttcttcatcaattcagccaccaaccagccaaacatcgctgggcttattcttgctggctctgccgatttcaagaccgagctgggaaaatctgagatgtttgatccacg

SEQ ID NO: 392896 - DNA, 920 bp, Oryza sativa
tgttgttcaatgtacttgccaacaaagtacaacctataggttccaccattgatcaaaggttgaaatcatctgccaacaatccagctctcaccagtgtacctcaaggtcaccatagagatgccccagttcctcttgcaacaaaaatgtaccactcacagggaaactaccggcttcgattggaactcggtcagctttaccgccaatcatgttcagagcattcaggcagctattcaattccgaactcatcacaggagaatggcttgatggtctcgcatttatcaccaagagataattcatcattaaatgttgctcagaagagctttgttcctcaaacaaagtctatggaccagcttcttgcgagcacaccagaatcatgccctgtaatcccgcagcaagtagcagcaagtgtgccaaaccgacaagcaacaaaatctcagaaagcagaggttcaagtatctgcagtaaaaaacgaaatggcaagaagcagatgcagcaaagatgctgttcggcattcaaaaaacacaggtaataagaaggcccatcagcaaagaaacggaacggtacctgtgattaaatcctcagtagactagctcatttagtggtagattgttggtgtagcggctccatctgtgaagagttgttcttttcaaatgaaaaaactggttctcggaatgatcttggattggacaatctgattacagggtcattttggtccgttaactcttgagacattgctactaacaacttttttactccatctctgatgatggaaattacctgtacatatcccggctgcaaagtcctttctgccccccttgttataaatgacatgatgaacattttcaatatagcttttgatcatttcgaaacctacaaatctatcttccctctacatcactctattcattcattatactttc

SEQ ID NO: 392897 - DNA, 578 bp, Oryza sativa
aaatttatttattggagcaaaaccatttccttctctcctgcctccttgggctcatctctctctctctcactcttctccctcttctcaccaccagacgccatcaaacccctacctcccgcggcggcggcggcggcggcggccggcggcgagctccggacagacagaggagggcgcgacggagagggcgaggagggaaggagggagggaggcgacaggcatggggaccctcgggcgcgcgatctacacggtggggaagtggatccgcggcacggggcaggccatggaccgcctcggatccaccatccagggcggcctccgcgtcgaggagcagctttcaaggcatcgcacgatcatgaacatatttgagaaagagcccagagtccacacggatgtttttgttgctcccagcgcagctgcgattggcgatgttgagatcggacatggatcctcactctggtacggctccattttgagaggcgaagcaacagcaatcaatatggacctggatacatatacaagacaatccccttgcacatgttgcaaaagccaacactcagaggaagggttctccaaccata

SEQ ID NO: 392898 - DNA, 728 bp, Oryza sativa
ttcgttagaaaaagaaagaaattaaaaagaaaatcacggcgcgtgagcttgcagagacagcaatggtgagagttgctgccgccgcggcggtgctcgtgctggcggcggcggcggcggcggcggcggccatggccgccgagccgcccaccgatgacggcgcggtccgggtggcggcggggctgacgaagtgcgtgtccgggtgcggtagcaaggtgacctcctgcttgctcggctgctacggcggcggcggcggcgccgccgccgccgcgacggcgatgccgttctgcgtcatcggctgcaccagcgacgtcttgtcctgcgccaccggctgctccacctcgctctgattaagtactaatgaagtaattaaccgcgctaattaataataaatcgcacctacgtatgccacatgtggactcgcttgactaattaaatactgccatgcgaatgcgattagtggattatgaaaagaggaaatgtaagaactcatggctctctctgtgccatgcctgtactgcattgaaatgaatctgcatgcagccatgagctgatatacaaatacgaccatgttacctgtaatctctccatcattgtgggggctttcatgctttaataaacgtgtgatattgatattatgtgattaattgtatgcatcgttggagtttcaactagtctactcttgccctttccctctatttttaaatatataatgttgttggttttcgtat

SEQ ID NO: 392899 - DNA, 660 bp, Oryza sativa
  unsure (1)..(660): unsure at all n locations
taaagacagcaggtctggtccctgttctgtatgcgaattcgtgatagctatgagtcctgcgacataatgctctcgaaagctgattcggagtaaacgggcatacatatggcgtctggggaggttccttctgtgatcttagtagtgcacataaccttttttgagctccctagcatttgacaggcacatgtccttgttggaggccaaattcaatcatcgtgatgtctgtaagacgcagcaatcttcttgctgggtgggtttctttgctttatacacaccacgagtccattcaattcattgtttatgtgtagagatgtacacgtgcttcggggttttacctttcgtgtgctattctggcccgtctgttatgattgaaagacgcagtttactcctctaggtctccatcagataggcattattttgtcaaattgttgctctattggaggctgtaaactgctgaaggctgtatcttgctccccaccattatttcggtcttgtttatggtgattcagtagaagtagtaggcctgttaatttgtgtaaattttgtcttgtgcggagtatacatacatgaacacatacgacaatggaatggtatgcgtcgataactttcttactctgaacacttaatgcaggatacgctanattctggctaaaaaaaaaa

SEQ ID NO: 392900 - DNA, 518 bp, Oryza sativa
  unsure (1)..(518): unsure at all n locations
cggtcctcagcgggcggtgtgtgtgtgtgcgccggggcgagaccagacaccaacctgtctctctctctctctcccatccttcccctcctcctcctccgcctcgccgccgccgccacacgccgcacggtctctctccccgagattcgtgggcggcaggaagtgcatggggagaaaggatgccagagttgcgtagtggagtccggcaagctcggttgaaggcaaagaaggttgaggaccttgcagcacaggacccagctgagaacttggtagcggtggcaccgacggtggcaggaagacgtggtagaggaaggggtgggaggggggnnnaggtagagcaacaggaagaggaagggcaggaggaagagggcgaggtgttccggtgattgatttggacccggaccaaccttgtgaggttcttccaggagctgctattggcggagtcgctgctgggggcccccatcatatcgaggaacttgcttataagggttgtgaagatggatggtgggagtgctgagaag

SEQ ID NO: 392901 - DNA, 794 bp, Oryza sativa
  unsure (1)..(794): unsure at all n locations
gtggcattgcacgatgcggcggtggtgcgccgccgccggcctcggcctcggccgccgcctcctctcctcctctgtctccgcccctgcccaccgccctcttccggcgcacctcatccccagccccaggccattgcccttctcctcccgccaccacctcttgactcctcctctgggtctccatccctcctccccaccgccgatgcaatggcagacgcagcaggtgcgccacttcgccgccaaggacagatcgcgcgcgccacggacgcccaccacctccaaggtcaagaagtacaagatcaagcccccctcctccatgaagtttcgattcagagtcatgaatgacggccaggtccgaggtggagagccggcaagcgcacaatgctcacctcaagtcgaaggaagcgaaaagaggacttcggaagcttgcattagtgcacttagcttatgcaaaagtgataaaggagctcaacttctgcagctaggaaatcaggacagacatgatggagtttggcatgcgagacagattgacgagtactgagtgccaactactgcattcctcacactgatttgaaatgttatttttttcccaattgttgtttgatgcattctcatctggttttgttttctgcacaatctggctgataaagcccacccgtcttgtgctatgtacaatattcagcataatagtgggataactgctgctggtgnnnnnnnnnnnnnnnnnnnnnnnnnnnnnnnnnnnnnnnnnnnnnnnnnnnnnnnnnnnnnnnnnnnnnnnnnnnnnnnnnnnnnnn

SEQ ID NO: 392902 - DNA, 309 bp, Oryza sativa
gcctatattttctgcacacttcgttcttctcctcgtggtcagcttgagcaacgacgtggtggtggcctcggccgccggcggcgatggccagttcacgtaccaggggttcgcggcggcgaacctttaccgtggacggcctcgccaccgtcacggcgagcgggctcctcgtgctcaccaacttcacgtaccaggcgaaagcgcacgcgtttcacccggcgcctctccgcttcctcggcgagtcctccacggcggcggcgggggcgaacgccagcggtggcgccggagccgacgtggcgcgggtcttctcca

SEQ ID NO: 392903 - DNA, 806 bp, Oryza sativa
gtcgtactctccccctgcgaagaaagaaaaagctttttctttttcctcccggcaaaccctagatcggcgccgccgccggcgccaccggggtactctccccggccggccagcccccgtcgattcggctctctggaaggctggcacaccggatccgcgacgtcgggggatggtgttctgctctcgccgtgggggagagtgtccggcgccggccggtgcgctggagaagtggaaatcgatctcctcgccggccggcggcggcggcggcttttcttcgccggatgtatccggtgacggttatttgattcttgtctctgttttctcttttttttccttgtatgtataaacgatttattttctcaagatagagaggaaaagctctgtatgctgttcttccgatggatagcgaccgtgcgcttgttggagcggccaaaggcgccggcttttccgccggtatggtcttgtcgcatatgacatccgcctgcgatcggtgatgcctcatgaggtcaactctttttttttttgtcgagagtatttgatttgaaggggactattttttcgagaggatttggacttgaagagaatgaggacgtgcgatgattgaagtttcgggacctgaatctcagtcgggatggtcattaggcgagagaattacaaagtgattataatcattatatggcgtgatttgtaggtccagagatccgtatttctgtggcttgagaagcatcatgctgttcggactttattggaagttgtcattatattttgttggcatatcactggcaatatacaagtgttattaaaaaaaa

SEQ ID NO: 392904 - DNA, 1054 bp, Oryza sativa
  unsure (1)..(1054): unsure at all n locations
ctcacctcgcctcacctcaccatccgacgagcccccggatcaccggctccgacctgtcgccggcggagagcgccgcgngatccaggcgttgaggttggggagcggggtgtgtgtgccaggcgctcgggcgggggcgagcgggcggcgacgatgccggtggcggcgtcggccatctacttcctcaacctccgaggggacgtcctcatcaaccgcctctaccgcgacgatgtcggggaaatatggttgatgcattcaggatgcacattatgcaaacaaaagaactgggtacatgccctgttcggcaaataggaggctgttcattcctttacatgaggattagtaatgtctatattgtgatcgtggttagcagcaatgctaatgttgcttgtgctttcaagtttgtcgtggaggcagtggctcttttcaagtcatactttggtggtgcttttgatgaagatgctatcagaaataactttgttttaatctatgagcttcttgatgaaattatggacttcggttancctcaaaacctctcacctgaaatcttaaaatgtatataactcaagaaggagttcggtcgccattttcctccaagccttcagataagcctgttccgaatgccactctacaagttactggtgctgttggttggagaagagagggtcttatgtacaagaagaacgaggttttcttggacattgttgaaagtgtaaatcttcttatgtcttctaaagggagtgttctacgatgtgatgtgactgggaagattcttatgaagtgcttcctttctggaatgcctgatctgaaattgggattaaatgacaagatcgggcttgaaaaagaagctcaactcaagtccaggcctgcaaagagcggaaagaccattgagcttgatgatgtcacattccaccagtgtgtcaactttgacaagatttaactcacaaaagacagtcagctttgtgccgccagacggcgaatttgaattgatgaaatatcgaataactgagggtgtaaattctcccattcccgggttctaccaaccatttaaggaatt

SEQ ID NO: 392905 - DNA, 518 bp, Oryza sativa
  unsure (1)..(518): unsure at all n locations
cgtctgcgcttgacggagaatgcggttttctcgccgctaacctttatacaaaaagtgttttcggtgaagatgctttggtaaatatcagcatcgagaaccagtttgatggcaagctcagtggttccatcagaataaggagcaagccccagggaatcgccctcagcttaggagacaagattcccctcaagcagaagggaggcagttaactcccatgactctgtcacggttgtatcatcatttttagtaaattccacgctttagtgggattgaattgttgagtaaagttcttttttgtacaaaagatcaaagaaaggaaagagaaccgggatgatgttcccagttggataatgctccagagctattgaaggacgacaaggtttagttcaatccggatttgcctcctgtccctgttattggagtgtttagtctttttgataaaaagaaatgacgatgtagaaatagatgtgaagtttccctcggttattattaacaggcaaaacaaaaaaaaaaatatnnat

SEQ ID NO: 392906 - DNA, 518 bp, Oryza sativa
  unsure (1)..(518): unsure at all n locations
aaaccaaacccccgcgacccacacccaaacccgccaccgattccgagcgcgccgcggcgagcgagcgggagagaggggggtcgcaagcgcagcttcctccccggccatggatctcctgcacggggagagcgtccagaccacggtggccatcgccgtcgccgtcgtcgcggtcgccgcgggcggcgccttcctcctcctccggtccaggaagcccaagggctgtttggatcctgagaacttcaagaagtttaaacttgtggaaaagaagcaaataagtcataacgtggccagattcaaatttgctcttccaactccaacctctgtattgggccttccaattggtcagcatatcagtttgcagaggacaagatgctacaggcgaagaagtaatcaaaccttatacccctactacattggattctgatctagggcattttgagcctgttattaagatgtaccctcaaggaagaatgtcacaccatttccgtgaaatgaaagttggtgnttatatgtctgtg

SEQ ID NO: 392907 - DNA, 536 bp, Oryza sativa
gggctggatcgcccgcgcgaccgacccggacttaccggctcgacccacccacgcgtgctttgtttggcatgtcgcagctgaggtcaggtctcctgccatccatggcggccgggtgccacatcaatacatcatgttcatgtcagccgtcactggcagctcgtcagccacaggacgccagattacttcaagtatgctcgtcaaccggtcgatagatgtgttcggagatgtggagaaaatgcttcaagtctcaagcattacatgcatgcaaccgtaaaagcagtgtgctcctgagagagtatactttctgtacatataccctcatcagcgttactagcccaggcacagaaagcatgaccagtgaaatcataggtcataacatacgagtctggcattagtttgtttctctattgtttcctttatccgatgcaaccattgtcaatttgtcctatttctagaaaagaaaagaggttgttttcagctgttgtgtactgtgctactatgatactatcatgcccccatgccatcaaaaaaacaaa

SEQ ID NO: 392908 - DNA, 1046 bp, Oryza sativa
  unsure (1)..(1046): unsure at all n locations
gatctgtataacatcacgcatgatcctcatagagggcccatctgcggtggaatgggcagggaacttcttatatccttcaaaagatcaactggtcaaaagcctcaacggataatattctatagggatggtgttagtgaagggcaattttaccagggtctattgcatgagcttgatgcaatccgaaaggcttgtgcatcactcgaagcaaattaccaaccgcaggtgactttcattgtggttcagaagcgccaccacacgagattatttgcacacaaccacaatgatcagaattcagtcgacaggagtgggaacatattgcctggtactgttgttgactccaagatttgccatcctaccgagtttgacttcttcttgtgcagccatgctggaatcaagggcacaagccgtccccgctcattaccacgtcctgtgggatgaaaacaacttcacagctgatgcgttgcagaccctcaccaacaacctctgttacacttatgcgagggtgcacacgatccgtatctattgttccaccagcatactatgctcatctggcggcgttcagagcccgtttctacatggagtcagatagctcggacagtggttcaatggcgngtggtcgtggaggnggttcgtctacatcgcgcagcactcgtgctgcaggtggtggagccgtcaggccccttcctgcactcaaggacagcgtcaagaatgtcatgttctactgttagaattctactaactcttcgcttggctactactatcagttagcctttaaattgcctcccatttgattgcacttagttgttcatcatgggaagcctcaaataagaagtatgcaagacttctgaagccacatgctatcatgttgtgtgtttctgggacacaccattctatttcacattatctgtagactctatcccactatttcataaaagctgggcttcccctggctctatttgtactctaattcgtatggacctgtttcatcatttcaaaatggtcaattgtcttgtttgcatttggnttttaaaaaaaaaaaaaaaaaa

SEQ ID NO: 392909 - DNA, 738 bp, Oryza sativa
tttgtttctttgaagaaagagagtagtaaacagtgaccataaatctcctaaaagcttccactgacaaactgccacatgagcttctaattagtacttcatcttctagagttgcttaatagtatagttataacgacaaattcatgtcagaacaccccacagttacaacagaagctatccccctattcccctgaatgattagctcaaactatcctagtgcgcaaaggtaatggtcaaaactcaaaagtaataaaaggcaggaaactatagaacctagcgttgtctacatatttatagcttcaaaatgggaggtgaacagaggcatcttggaagcaatcaactgttttactcagcattcagaagttgcctttgacgattccactgtttctgtgatctcctgaagaagttctttagaaatagcagctgggtcgagctcatagctatctttagggacatttggagcttcttcccctgacatcctataatagggcacctcatgtgaaaacctaaacatctcttctttgggaattttcttgatggcattcaggtcctggatttcgctgaaatactgttcgaaacccagcaaccttggaccaagggaatgacagaaatgccaagatcctcgtcatactcatccagtacctcaactacatcatagggcagggagaaactttatctggagtatcttcatcccagttcagggaccaattcgatacacagcccagagttacctttctgtgg

SEQ ID NO: 392910 - DNA, 400 bp, Oryza sativa
aggttcagaaaccccagaagaaattcataaaacacagggcaagactgtaatgtagtagatgggtttaactgtcttcccctctttttctagatttctgtaacgtaatgggtctaactaatctgatctctttttctagatttgtctggctaattgcggatacaacagcatgtactgatacatactccgtatactgtaagatggtcaacatgaatcaacagaccgttcactgacagttcttctgagcacatcaacgtagggcaaaatcctctctacatcaggcccataatacagcgagaatattggattctgcccgggcgaatgcatcagccgcgcttgcgccatctcccatggaaagcttcgatggagacgagcttgatcaactcgtgcgcgatgatgatgt

SEQ ID NO: 392911 - DNA, 476 bp, Oryza sativa
tttggttttttttttttttggaaggggaaacataattttccattgaagtgaaataagaaggaaaagaataaactgagtgcgattacatcatgtctacttatgaaacagggataacaagaattttttttctcaaacacaggaaataccatctaggaaagttacctaattgccacgacttgtcagtcacacgagataatcacaaggcagaaaggagaaaatgaaacaaacggatcgctcattgcctcgacaaagaggccttgctgcagctgccagtaaactaggatccccggaccatgaatgctgtttcgctgaagcaagacgcaacaataataaagcctggcaacttcatcgttcttcttcttcgtcgtctactgatgattagatcacaaagtggagcatgccccattttgcgcctttatcttcttcttcgccttgggtggctgcagcaccacctttattgccgcatcgaaaacaaa

SEQ ID NO: 392912 - DNA, 527 bp, Oryza sativa
  unsure (1)..(527): unsure at all n locations
nnnnnnnnnnnnnnnnnnnnnnnnnnnnnnnnnnnnnngatagggccaacatttaactgatgacaaatggacaaattacatgagaagatctgaattttttgattatgccaccacaaagtaagttccaattttggtaccaataacaaatggaatgccagacctatgtcagaatagatgtacaattacgatggcattcttgggtaaatgggagcaaagaataattagcatttctcacatgaaaaactgaggcaaatttttgcaattttgccactagccccgaaggagcacagttcgcaatccagtaccctggggcaattctaaatacgatccctcagtctgatcattggtgaaataattcacttctattgacccttattttggctgattgcccctctgcttcaacatcgttaacctcgccccgggttcggcggaatccacaataacaaggaaggcgctgatcactcgaaacaaacctataatcataagtcaactcttcccatggatttatatcccgctttgcaaaaatg

SEQ ID NO: 392913 - DNA, 434 bp, Oryza sativa
ttgttctttgataccttttgttttttacctttttttttaaacccgaccgggataactggtaaaccaataagaaaaccatgaaaaacattgcaattcctgcaggggctgaggagccggatggcggaggagtccaaggagaccggggcgcggccattcttcccggggaccggggagaaagcccaggagagccccggggaagccctcatctcgtcgggggagagcgagaccttcctgcaaaaggggatccaggaacaagggggcggccaggggctcgacaccatttccgagatccaggagcggcaccaccccccgaaggagatcgagcgcggcctggtcgaccttccaccaggggtccccccacatgggggccctcgtcgaggcccaggggcaccagcttaacgacattgagaggcacgtcgggcgcgccaacttct

SEQ ID NO: 392914 - DNA, 786 bp, Oryza sativa
ttggtttttgaatttttttgtttttaacacaaggggcgatcataaattagccatcactcaggaagcacaagccatgagcacttgttgcctcacttgtactagagtgtctactacagtagtatatagtatacaaaagaggaacttggaatttaaatagtagaaatacaggaggagcatcatctatctggcagtagaaatccccagaacaaatcaccagcatggcctactcttcgcctaaagactctcacttgtactaacaacgatgcacacacgctaggcctggccaggggtactctggattctagtccttactacttattatcctgcctagtgtatcatcgttactgtagttgccttgccagggtgctgcgccatggacacaactccattggcttctctcaaactcctagctcttctgtactcgatctctgcatccgagcatgactgtccacccccaactttcttcctcacttctatgggttttagagatatttcatccctcccctttctgaatggatggcaatctttcaccatcccttcaccctcacacacatcccctccttttgttcctttgaatatgtccaggtgcactacattttgtggagacccatttgaaagcttttgctctgtagattttctttgggcctgtggatcacttttacattgaagagtgatttatccacctcagtagcaggagcattgttcccaaatggagatatactgaacccctcatcaagcgcatctggtatctccacgtaggtttgagttgtaacgatttcatctgcg

SEQ ID NO: 392915 - DNA, 664 bp, Oryza sativa
  unsure (1)..(664): unsure at all n locations
nnnnnnnnnnntttttntttttttttttttgtatgttgttgaggaatatattacacatgaattgttgcatggacacgatcagttacacacgaacagggcgtgcagtggcttactacgaaacagagaacaaaaaagaattttacccaccacagctacattacactttttttttaccacccccagtgccaatctttatttatttttacagacgccagccagtcaccttcctcatctccggccatcttgctccgccggcgatcgacgacgacgacgacgacgacgatgggatattcttactatcacatggagcactcggcggggacgccctgggggaagcgcttgggatcggtgcagtagttgtagatcatgtacttgctctgcacccaccgcatccgttgttgccgcgtgaggtcgagctcctggttgtaccatccaccggcggcggcggcggcgcggttgccgggngcgnanncggtgccgacggtngcgccgcagcgntncggccacnggnggcgacgagcangcgtctnanaggaagcctgcngttaggaagccganaagggnnnngtcgnanagtccntctttaagnntcnanccttntgtcgnnnaannttcggggttannacaggctgggnanagagncnnaangnntngttctngngnt

SEQ ID NO: 392916 - DNA, 591 bp, Oryza sativa
  unsure (1)..(591): unsure at all n locations
nnnnnnnnnnnnnntttttttttttttttggtcttcttgcattcttaaattcggtgctgtttttaaaaagagcttcttagctatgtaggaactgagaatggagcaagggaatttgcagggagagtaacaccaccccctcgaagagaaactgaaggtcggctccagttagcagtggttatggcattcgaatcaaagaacaccacaacaactgttatatcatcatggaagtgccgccttaccccacgatcaattttcttcagatctgaatacctcatctccctcttttttgctgcctgctgcattgcagcctttactagtcttctagcaatcccattgcggggattatgttggacaagatcaactgcttcctgattactaatatgctcccatagtccatcagatgcaaaaatgatgaactgatcagttgtctgtaattggggtacaacaatagctggntcagaactnagaagaggcctcctgaaagtttcttgaagccgaaatttgctatgcaaaggttctctgttgaactccggttncttcagatacacatctccaatggatcttgttatctggataatacccttcacacgc

SEQ ID NO: 392917 - DNA, 588 bp, Oryza sativa
  unsure (1)..(588): unsure at all n locations
ttttttttttttttttgcagggaagagtaggtcaaggtgtttaatgatcatgaaaatcatcatgttagtttgcctagaagagctaaaatacattatacacacaaatttcaacatccttgtttctaaactctgatggacacgaatatatcgagtccccgaaatctgggtctaagatatggccgccagtaacaccaaaagatgtatcgcttgatgcgtacaaaatatgtttctcaagaaacaaactataaacgaagtatccaagatttccttgaacgcagcaagtaacggattggagtccacactggacgaggactcctatctagtagaccgaagcataagacttctaagtagcagtagcatcagcgtcctctgtagatttcttgtattcaggcttaagttcatgcgtcccttgatttggaccccttttgttgtagaaacacagatcattcaatatctccttcaagaattgctctggttgatcagtttcttgcatgagattcttaagagaccaattcggctgcctctcaaaaagcttgaaataagatattttccagttccctgcgatcccttctcgttcntttcatgtct

SEQ ID NO: 392918 - DNA, 482 bp, Oryza sativa
gttgggacaagggcatgcaggccgaagggaactctcacaatggcacaaggaatgtttcgaaccaactgtgtacaaacattcacaccaaataaaaataaatgagatcacatgaatcaaaatccaagaaaaagagcgtacgtggattgaaccacatacacttttgaatcagaatagtgcatcaacctgcctactcaaaataactccaggtacaggttttattttatattttttttaatcgaacaaaacaatcaggcagacaatgtacatcgcgagagcgggctggttacgatcgctttgctttgatcacaaagcgaggccttccttccgaaatgagattctgctacacctgtgcaccgcgccgcttttcacaggcccatcgaccgttttcacgggcttttcggcgtcaattatcgcggtggtattttgtttggagtcgattgccttttgttcctttctgctcttcagaacagattcaagcccct

SEQ ID NO: 392919 - DNA, 930 bp, Oryza sativa
  unsure (1)..(930): unsure at all n locations
gatgaacagccttctgtcgaaatttaaagcatatgtctgcagtacatccaattgccttggttaaaagaagaagaagaagaacagcttaacgttaagggagtcctttggtcatcaaagatgaaaacaaaaggaattcaattctataaatattccagacacaaattgtagcatggctggtcatgaatgtttgccaaaccaaaaaatgaaccgaagcctaatagttcaaaatgttttgactccaacagggcttcagatcacatcccagtattatcttgtggatagatggtgatcaagtcttgttatatggtgaatccagggcactggggagaaccaatgagtagataatcctatcccaatacgccttagagttagcagctgttcgaaagcatagtcgtaaatagcctgtgcgactccatcttcatcattagtggcaccaattatatttgccactgctttggttttctcagacccatttgcaagcgcaacacccaatgatgctagctgtagcatttctatgtcattttctccatccccgatagccattacctcatccggactaatgcaaaggtggtccagatatagaacatcttcaccccattgccttttgaagttgcaggaggtacaagttcaagcatatcaggctgtgcttgaaccacacgggcccttccttctattgccttttcccagaatggcctcaatgcagaagaaattccctcaggagtttcaagcaagagcactttctgtatcttcagctgttcctaaaagctgatcaatagacgagancatttcagcgttaggttnatgatacacataatgganagaatcaaccnggaggatcatcatanatagagaagcatcggtcctggctaaaaaatactatttntacnttggggnccccaaagnatatnacttttgctaaaaggggccntc

SEQ ID NO: 392920 - DNA, 679 bp, Oryza sativa
  unsure (1)..(679): unsure at all n locations
gnaattgtaatacgactcactatagggcgaattgggtaccgggccccccctcgagttttttttttttttttttttggaacaagctgcgattaagatggacaggttcagtagttatcctaacaggttcagaagtgcggcatccagcctaataacatccaccccccagctggtacttaaacaaacacgacataaacaagactaccaaaacatccacaagttcaggccataacatagcagccaagcggctgctcagcagaagaacatggagctcctgactttgttatgcaggcgaggcagctcgggcaccggagcgctgcccgccgaggtatggccaccatggctcgacgacgtctccgacatctcgtcgaacttgatgaactggctgacctgagcagcagcgagatgcgcgtagcaaatgggtgcaacgactgatatggctgtagtgctcctctggtagacataggaaagggagtggaccaactcctgaagatcgtcagcagagaacctatctcatcatgaaggatatgataatgtgtaggccttgttgttcccatcattccccgcgttgcgcccacatgttgaagtcattgttccttgggatganagactgcttgtcccacaattccagaagaantttttttaaatccagccaaaatttggttnanatctccttcccacc

SEQ ID NO: 392921 - DNA, 561 bp, Oryza sativa
  unsure (1)..(561): unsure at all n locations
aagcagtaacgtacagttcaaaattgattggtccagtatgtatacatagcatagtacattacaatctttcgatagcagaacgagcttacatggtagcttaaaaacatggtatagttttcacctgatgacattgaagttttctggatagacatgcgtgctttcaacatctcctgaagttcaaaccttgtaaattgcattgccatgaacttgtccacaaaaccaggacattctcgagaaacctctctcattacatttccaaaacttcaatcccagtacttaattacgccatcccatccacatgttgcaaccttgctagtctccaagggatgccactcacatccaatgcaaactccattgtggcacttcaacgtcttaaatctcctgcagcttttccagtcccagaaccagcaactaccttcaccatctcctgacatcacgaacctcccatctggtgagaagttcacttgacaagcgtaacctgccacaatgtgacccgcaaaccgcttcttcttgttaagttgaaacctctncttggtactgtatatcaatatctgattgtnc

SEQ ID NO: 392922 - DNA, 746 bp, Oryza sativa
tttttttttttttttttctcctatttccacattgaagccttctcctttttccgggttctcttcaagcgagcgcatcatgtcagtaagattactcttcttttctcctgatcctttcgatggctccacatcagtttcaaccgctcctttggatggctcgtgtgtcctaagagttttcttgcgcgagaatgtgcgggacagcgatgactgcagcccaacggcgtgcttcttggcaacatctttagctgatttccacctttcacgagccatggcagtctcttttgcgtgtcttgctgcagcctccctagattttgcttgctttttctctcggttggtcagaagttgccctgagaagttgtaaatgatcaacagtactaaactcaaggcacccacaagcaatgcaccaaatattgtaatgtcctgatttacagagtttggtttacagctgcccttgtggaagcatttggtttgggaagttgatcccttcctgcaatagaaatactacaagagagtttctttatagtgcttggacagtataagccggttgggcagaaaacatcatcggtgctaacaacatgtggccatctatcagcaccaccacaagtatgatttggcttcccaggaggtggctgatagccgtatgggttactgatcccacctttctctctaactgcatgcaggccacctatggagacgtaccgcaacgtgtgtgcaccgtcgcttggatgaagttcctactctgaaagctt

SEQ ID NO: 392923 - DNA, 970 bp, Oryza sativa
tttctatctgggcggccttcctttttttttttttttttttttttttttttgaaaaaaatgtggcgacgtcttttatgtgataaaaaaacataatttatgattttcaattaaaaggcaagagggaaaattgaccatgattgtccatctaatgaagggcacaaacaacctaataataggacaaaacctgccctacagatcatccacgacttagggtgacaaacaggaatttccctataactagttcgagggagtaacgcatggacctatgtttgcgggagtgcactccctcaatcgattcattccaaaactccattgcccaactctacagaaggagaaaggtgctcaccacctgcgggatgttggctaatcatgtaaaagatctaaccatttgcacaagagctctctttattcttcacagatcaaggactgtaaaactgagcaactaagggttgtcgtctcatagaattgtagaatttaagaatcacataactctttgaacagcagcacagttttaacctaccacagtgtccagtagtgaccaaatccataactaacagtcaatagaatccataactaatatttcctatctccagttcccttccatcagaccacgggcagaaaactgaattaatggataaactctaccattttctacattcccaatgagtatactcacttaagggcaatgatgatgagtacatgagatagctcaacttaaattggagaccatcttgttcagaagtttcagtctttcacccacactggtaacttgacaaacaagagccacacatagtggactgtttctctccatactcctaactccttagtgacatgcaggagtactgcatgtttctaatatgtgatcatcattttccttttttcatcaacctattgtccttatcagcttgagaagtggcttatttcatgtcagcactaacacagtagctcaaacgtactttcatgtataaag

SEQ ID NO: 392924 - DNA, 564 bp, Oryza sativa
  unsure (1)..(564): unsure at all n locations
tcctctattttggcccccttttttaacccccccnctgaaaattttgaaagtttaagtattatgcgatggacggagcatcttttttatattcgcagccagggcctcgtagccctaatatttgacgtaagaatgctcgattgtgtacgaaagatgctcattaatttcccagattctggcaatgttgaactgccagggcaacatttgcatgcaattcatgtccggatgtccctatcaaatactccatgcaaattgcaattgcatctatcaaactgacataacctggagaaactggtccatagatgcaagtatcaggggcatgcaacaggtcgtctaacccaccaagttcttattactaacttgttgctggagagtacgcatcttacacgctaagacaacggcgcaggaaaagatcggtcgtctcagtggtcgtgagaaatttccttgaggacattgcccaggttagcctcggccctggtgctctccacccatttggcattgatcctcactctctcgatgctctgcttcaccgtcctcgcgatgttggccttcgtcctgctcttgaag

SEQ ID NO: 392925 - DNA, 509 bp, Oryza sativa
gaaaaaaaaatgatctgctatactcaaatataatcatgatcgagaaaaaaaaatcatgtacagttacataaacacatacgtacagccagtatacaaacgcaaatgaaaactaaggcacacagcacgcgttcaactctgatcaatatctgatcaacaagcgagttcatgcgtacacctcgcaacatttccactcgtgtatagtgacagccgaaactctttcgccatccaagatatatccaacgaaacccccctacctgtcctctcgacttcctccgatccgctacgggtagctagggtcgttcggattcaagtgaagaagtcgtacttgaccggcgtgccggtgggatcgatccatggctttgcgtgcaggaagttgtcgacggtgaacttggtcgcgtccgccttgctgatcaccttcttgtaccccggccacgcgacgcgccccgccgtgacggcgccgggccccttgttggcgtactcggcgtaacagagcgtcttgagcgcgaact

SEQ ID NO: 392926 - DNA, 451 bp, Oryza sativa
ggcggcggtcacccaccgggcgagcggcgccggagcggcggcgcccttgtgggctttgacgtcgccggaatcgtccgacgagtcgtcgctgctgtcgtcggccgccgacttgtgcttcttggacggctcgggcgcgggcgcgggggcctcgacgaccttgtagagctccttgggcttgaggaacttggtgacggcgtagacggcgagcggctcggcgtcgccgacggtggcggtgacggcggagttgacgaccctggtgtcgagcgtgacggtctcgcccttattctggacgtcgtagctgtagtccttcttggactcgctggcggtggcgagcgtggtgaccatgccattgttggacttgaggagctgcagcgagaagtagtccgggacggcgtggtagaggaggatggcggtcttggccttgcggtgaggctctcgtaggagggcatga

SEQ ID NO: 392927 - DNA, 837 bp, Oryza sativa
attggcaaacgaaaaataattcgtgaatacaactttaattgttttatatacgtgttcttagctatctaaaaacaagggctgaaaaataaactttggttaaaaaaccccaaaatcaacgccaaatttaaggttgaaaatccaaatcctagctgataaacataagcataagcaaaaaaagatgaggccctttatttctttcttctagcaaggcacatgcacacatttggctcttgtctcagaccgaatgcatccattcatgtcacgagtggcatttgagtttttgacaaggggagttttgaaatccaagctgggctcaaagggtgtacactgatcaaaaagcttgaaaacagaacagcggccgaacacaaagtgagatctgaaaacgttcatggtggaatagtgttcagacattgcttgatgtgctgagtgcagactgaacttggggagaaacagaacaggtttatgagcttgagtcgccggggttccctttttctccgctacagcagtagaagtggggcagcttcactcggccacagcacctgcaacggacaatcactggaaccggcttcaatgctttcggtccattcctcaaacccttcttgtattttgagacctttttcttgggaacggccatgaggtccatgccgccggcgacggcggtgcctatgcccgggagcacgaacgattgggcctctgtgagaggggctggagggggagtaggtagtataggaaggcctgaaggcaggcgaggcgccgccgccgccgctgccgctcgccggagccaacccgccgccgccgccatggatcgccttcccgtggggttacggggaagaagga

SEQ ID NO: 392928 - DNA, 674 bp, Oryza sativa
  unsure (1)..(674): unsure at all n locations
nnnnnnnnnnnnnnnnnnnnnnnnnnnnnngcttggtaaatttcagcactttccaccccaaaatcgagtttaaagacagtcaaccacttgtttccgacgacaaagggcagcatcggattactatataactaatccagaccacgagaataaacatattccaaaagtaaactggttgggcatacacacggcaaaaagagtagaaaaagtaaactaagagcttaaggtagtcgcagctgaggaatccaggattgtcattattcggcagcaaaaatgtactactgttcatcaaccgacacaaagctaagctgagcgttgctgatacttagtatccatagcttgggtaggtggtgccaccgtagctgcctccattgtgaggtgcaggccctgctcctgaagcagccgatccgtaggatgcgccatatggtggtgggtatgaaccgtagctcagatcaactgctggagccggagggttagaagctggcggaggagggccctgaggagcttctgccatgaaattctggactagttgctgggcagtttggacttgggatgcactaccaattatctcaactgtcatctncccaggtgcacctctgctttcctgaaaagttacngttgcaccactgtgcctangaatatagctaatactagcaccagttgtccaatcacaggat

SEQ ID NO: 392929 - DNA, 624 bp, Oryza sativa
atggtttgctttttgtcttgtttttaaacagtgtcctaaccacaggttccgccttccttggtcacatccatacaccgatggtacattgatatacaatactgctcaaattctaatatactgctcacagaatgacacaccaaaaaattctcaggttatcaggttcttccaagatgctgcaccctgcaaacatgttttctgtcaacagtgggctggagccgaaaaatcgtgggagctgtacaggaaaaaaaaattgctcaagattccaatagcccagcaacacacctgtggctccgataacaggaggccggacatgtcaccctaaaacttatgcttttcctagcttaaaactatagctcttggtctctgccgataaaaatacatgtacccaatgaaggctccgatcctttctgtgcaatgtcgccttgagtgcaggctctcattcagatcgcatcctctgttgaagagcaccaaaatggagaagaattttagccgcctcagttcacagccagggctcattctttactctcttggggtacagcagaatgcatcggttggtgtcagctggaaacgcatgggcccaagaacttctgtactgcctggaagagctgcttctcctcaaagggc

SEQ ID NO: 392930 - DNA, 612 bp, Oryza sativa
  unsure (1)..(612): unsure at all n locations
nnnnnnnnnnnnnnnnnnnnnnnnnnnnnnnnnnnnnnncnaaancggaagaacaggattacattgtacccaaatcctcttctcttgcttgtcacacaaaaaaggttaagacccccagctcataatcaagaaccacattactacgtactaatcgtgttgttacttgctagcatgtctgcagcttaaagctgagacgacacatcaacaaggaatttacaaactaatctagccaggctaattaggagtatctttgcaagttccaaattaagatccgcgctgccgctaattatttctgtacacacgcgtggaatccatcttctttcgatcgttttacccggcccgtgtccatccatgattcttcggtgatcaaaagctcaaacccataatgtcgtccagatcgaagacaacctcgtcgttcttgaagaactccatgccggcgacggcgtcgtagctccagtgcagggaggacgtgacatcgccctggtccggcccgaagggacccggcgactccgccgccccgcgccgcggagctgccgggcgtgaggctgctcagcacctcctcctggtcggacgagccgatgccgccctccaccttgagcggctgcagcagcg

SEQ ID NO: 392931 - DNA, 526 bp, Oryza sativa
acagagcaacattgatttcatattcccattaagtgcagcagaatgttgtcaggcatttttcagcaaagtagttctactaacttaattatcaacagatgaacagcaaggtaccacttactactccttaatacataacaagcattccggcagctaagatcttacagtagactatatagagtcatccactaataacttacacaacagaatggatagcaaactggcgattctttgcctactatcttgctcactcctagcagttgataccacatttttgggtatcagggcctgggacacgggtggtgaatggatcgatacgaacccacagcaaggagaagatcgatgcaaggaggatggcccaaacaacaacaatggtcggtgtacggttctgccgacccatgagacccttaaggaaggggtacaggtggacaatcacccaggatggcaaagaagagcttcccaaagagcggaccccatgactggtagccactgttgatagcgtaggagataccagcaacaacaccgacca

SEQ ID NO: 392932 - DNA, 568 bp, Oryza sativa
ttttttttttttttttttagttgctaataaatgattaataaatataatataaacataagtgggaagatgacttcttttaaaaaaaagaaaaattaaaggaaaaaaaatcttcttcctgcattgatgttcctttgccaagagctaaagcataataacatcacacgttcgcgaacagtttatagctattggcgtccagaatgatctgccggaccgcggcgactgacgcgacgacagcgagcgcggagaacacgacggcgatggtggtgttgagccagaacacggcgcccttcttggacggcttgaacgtcacgccgtagaacaccgccggcacagcgaagtccagcgggaggaagccgaatgcgccgacgagcgcgctcatgtcgccgaagaagggcaccatggccgcgatggtggcgcccagcgcgacggcggcggtgcggcagagcacccccggcgcgacgttcctcgcggcgtactgcccggccttggggtcggacaggaggccctccaggacctcgttggtcggctgcaggtacaccacggccaccgccgacagctgcagcagcgt

SEQ ID NO: 392933 - DNA, 564 bp, Oryza sativa
tatagtatgccaacctttacagagatgtgctagtgaccagtttggcagaatttccaggtctggttttggcggctctattggttgacagaattggtcggaaagtgtcactggggatcatgcttttgttgtcctgtgctttccttgcaccacttgctgtacatttgggacaaggttcagtaactactcttctattctgtgcccggacttgcatcatgggaggctttgctgttctatacgtgtatacccctgagatctatcctgcatcatctcgcaacacgggggtaggaatcacatcttcctttggccggattggcagtatagtttcacctgtggtgactgttagtttgtcagagaactgccgccagaaagaagcagtgtttttcatggacctgatgctctttctagcagcagtggcatgcgccctcatccctctagagaccaagggccggcaaatccactcgaggcagtgatgctctcttcagtttgatgtacaaaatcacattacattttggtatccagcacatatttacacctgccaaaatcactgacttttggattaacaaa

SEQ ID NO: 392934 - DNA, 545 bp, Oryza sativa
  unsure (1)..(545): unsure at all n locations
ctcctcttatgaagaagatatgatgagggagggagatgcatgtgttgcacttctaagaagcaagctccatggccttgtccagaggaaccgcagtctggaagaggagaacaagcaattgagacatcaagtcagtcgtctaaaaggccaagtatcctcccttgaaggccaggatactgatagaaagatgctctggaagaagctggataattcttccactggcaacagctacctcaaggaaaagcagtttgttcccaacaatgatgcaaaggaagccatggatctcaacagcacgtcgtgttacagcaggcagcaattctccagggcacctctggtgagatcaagagcaccaagggttccaaatccaccgccaagtccaacctacaccccacccattagtaaatgcaagaaaggaaggaggcatggctcctcctccaccgncacctcccctaccttncagattgctgaagagcactaaagcagtgcaaagggtgcctgatgtagtcgagttataccggttattgggtagacgagaaggcaaaaatgat

SEQ ID NO: 392935 - DNA, 817 bp, Oryza sativa
ggttatcgttatcctcctccccacttcgacggcgcgccggcggcgatggcgtcgcggaagctggtcctcggcctcacggcggcaaggcggttgaggtctcgcgctcccgtgctcgtctcgacctctcccttcctggaagcctccacatcgacttctgacgccaccgccgccaccgcgacgcggggttcggggttggggccgtgggggctgttcctatcttcgagggccctctcgtcgactcgtccggtgtctctgtccgccggtgatgcgcctggctcgtccgctgcggaccacaggtcgatactaccagaggatgagtatcacaaattagcagatgagacaatacatgacctgcttgaaaaacttgaggaatatggtgactctcttcagatggatggcggtgacatagactatgggaatcaagttctaacactaaggttaggagagttggggacatatgttgtaaacaagcaagcaccaaacagacaaatttggctatcttcacctgtgagtgggccttctaggttcgattgggatgcaccaacaaattgttggatatacaggcggacaggagctaatcttgttgaacttctggagaaagagattggtgagctctgtggtaccccagtagaactttcataacaatgaagggaaaataccacggaactaagttggatggtgcatatgacaaatgtgtcaatgtatgttaaatcaggtgacgcttggtatggttagttcttttgatggaaccaaaattttgttgtactagacacgtccgatcactgcttggaagttggaataaatacctgtcctcaat

SEQ ID NO: 392936 - DNA, 416 bp, Oryza sativa
gaggtgacggccaaccaaaaccctcctcctctcatcatcgcccaaaaccccccaagaaaccagaaagaaacctctcctgctcctctctctctcttttcaccggcagagggagaggaagtggagagacagagaggaagaagcagagggaagaaaagaaaaggaaggagtttgctgcagctgtgaggagtagaggaggggggaagggtatcaacaggtttttgattggaatgcagcaccaacacctgatgcagatgaaccagggcatgatggggggatatgcttcccctaccaccgtcaccactgatctcattcagcagtatctggatgagaacaagcagctgatcctggccatccttgacaaccagaacaatgggaaggcgtcagagagccgctggaacccaactaagctccagcac

SEQ ID NO: 392937 - DNA, 518 bp, Oryza sativa
ggttttcctttttttttttttttgcagttaaaatatgtgttacgcgtttcggtgattccaaaaggaaggaatataataactaactgccctttgttcatgaggctgtgttggttggccagccaccagattagaatgcacaaacgtgtgatctccgaacggaattgtttcacttttggtcctctcttacagcgacatattaatgaagtatacatacatcagctcaagtacgattttccatacagaagaacctaaaacatggttcaaggtgcagaaggtccatcaggcagttttgtcttccttttcctaccaagaatggacgctttctgcagcctcacaccgccagcgcgccactttcttgaaagcggtcatcgagtccctagcagattcgaacacttgagcttcttcttttgtaaggcgcggaacaaactcgggcactgtcatcatgggagagctgtgtgacttgcttagtatctccttgtacctactagtgaatgcatagcgcaggaacagcccaatgc

SEQ ID NO: 392938 - DNA, 591 bp, Oryza sativa
  unsure (1)..(591): unsure at all n locations
ccataccacaaagtttgtccactncaattggnatttcatccggtgcaactcatagtaaccaggctgcccttggtgagatcagccaatctctaggtcggatgaatgggcatatgaactatagttttcagggcatgagtgctcttcatcctcattctctgcctgaagtccacaatggagtgaacaatggtgtcccttacaacttaaacagcatggcacaagttgtcaatggaaccaactcgaggacagctgaagctgtggacaacagacatctccataaagtgggttccggcaacctcaatggacattcatttgatcgtgcggaaggagctcttggattttcaagaagtggaagttcttctgtccgtggtcaccagttaatgtggaataattcaagtaacttccatcatcacccaaattctcctgttctatggccaagccctggatcatttgtaaacaatgttccatctcgctcccctgcacaaatgcatggagttccaagagcaccatcgtcgcacatgattgacaatgtgcttcccatgcaccatctccatgtaggatccgcaccagcgatcaacccatcactttgngata

SEQ ID NO: 392939 - DNA, 592 bp, Oryza sativa
gtcactgtcaattgacaaaattcagtagcaaatcctactctgtctgcatcaatggctggcccaaccatcgtcctcctcccggcctggggatccggccacttcatgtccgcgctggaagccggcaagcggctgctcgtcgccggcgggggcgccgtctccctcaccgtgctcgtcatgcaggcgccgacggagatagaggcgtcggtggtcgaggcccacgtgcgccgggaggggctttccgggctcgacgtcaccttccggcggctccccgcgtcgagcaccccaccggctgcgaggcgaccgaggagttcatgtcccggtacgtcgagcgccacgcgcaccacgtcaaggcggccatcgccggcttggcgtcccccgtggccgcggtcgtcgtggacctcttcttcacgcccctgctcgacgcggcgcacgagctctcgctcccggcgtacgtgtacttcgcctccaccaccgcgttcctcgcgctcatgctgcggctgccggagctccgggacgacctgaccgtcgggttcgacggcatggagggaaccgtggacgtgcccgggctgtccgccgtgcccgcgtcgtacat

SEQ ID NO: 392940 - DNA, 965 bp, Oryza sativa
  unsure (1)..(965): unsure at all n locations
ttcatttgttccatcaacataggttatacatgtgcggtcttttttaggaggggagaagggtgttcatttgtgaacagaagctttatacaaggacacagttaaatcagcatgtaaaaactggtgactctgaggtggatggctctgaggttgagcgcagtggttttgcaggacatcctatgtgcgagttctgcagaagttcattttatggagataacgagctttacacacatatgtcccgagaacactattcatgtcacatatgtcaaaggcaacatcctgggcagtatgattatttccggaattatgatgactcggagttgcatttccgtaaagatcatttcctctgtgaagatgaagcatgtttggcgtagaagtttgtagtcttccagagcgaagcagagctcaagagacatattgctatggagcatggtgggcggatgtctcgtgctcagaggaatgccgcacttcagataccaaccagctttatatatcgaagaaacgagcaagatgaaaggcgtggtagaggtaggggacggaattctcaccgtgatggatctgaccgggataccccctctatgcaaaatggcagtgcaattataggcaacggttttccaagtcgagttgataatgttacagggtctgtgagtgtcagttctagttctgggcgaggagaatctggccaaagctcaggcaatggacgtgtgtttgaacacttgtcctttcctcctcttcaagaccaggatattcctgatgcaaggatggactctgctcctgatgaaacctcattcccttccctctcagagcagcaaaccagatatgctcatgctcttaagtcagagttcccttgctggccaacttgggggatgagtantagtccctccactacctgggtcaagtagcacagggggtctacntcaactcaacagggggctacaaagtctagcgagaacacacttgcatcaagg

SEQ ID NO: 392941 - DNA, 805 bp, Oryza sativa
ttttaatttgattgggaaattattattcatgcaacaaagctgtacaactgatcccatgtttctatcgcaggtttgacaactgaagaaatacaacattgcttttggagaggatttgtgtgcgtgagaggctttgataggacatcaagagcacccagaccactgtatgcaagactccactttccagcaagcaaaattaccaggaataaaaaatctgcaggttctgctccaggaagagatgatgaataggccatctggaaaaccagaaaggaaataaagaggaggtacatatgatctgccagaagatcactgacctgaaatggatcgctgaccaataagttgccgtaggcaattcaattatttctggccatatacatctgctggaagttatgaactccagccactgacgaattcgtggtgctggtattcttcggcaacatgatccatcatacaaattttatgcttggttgttgcaaacaattcttattcggtgacagtttctgctgatagggaaaaaaggcatgtccggcggctcaacggctctaactgtactttcatatgagtggaaccgattgttgtacatgtgaaaagtttccccttcaaaatggtcattcatgttgttaggtcattcatgtagtcgatgtcaaattaatcatcaattatttgatttgattcattcccaagtttaattggctctaaaaacttgttaactgcaggccagcaatgtcataatgtatgtcgggaaaaggtaaatataaatcgtcagcatttccctgaaaaaaaaaaaccccaaaaaaaaaaaaaacac

SEQ ID NO: 392942 - DNA, 473 bp, Oryza sativa
  unsure (1)..(473): unsure at all n locations
ggacgnctgtgtacggagcaactcgcaaatcgcgatcccttgtgctcacatcccaagcttcccaagcacacactgttttagtgttcacaaacacagccttccttctcgcccaaatccgtcaaccatgtcgctgatccgccgcggcaacggtttcgaccccttctccctcgacctctgggatcccgtcgacggcttccccttcggctccggcggcagagcagcagcagcggcagctcttccctcgggccaactccgacgcggcggccttcgcggcgcgcgcatcgactggaaggagacgcccgaggtgcacgtgttcaaggcggacgtgccggggcttgaagaaggaggaggtcaaggtggaggtggacgacggcaacatcctgcagatcagcggcgagcgagaggggagcaggaggagaagtcggacaagttggcacccgttgagggaagagcggcaagtttctccgaggttc

SEQ ID NO: 392943 - DNA, 717 bp, Oryza sativa
  unsure (1)..(717): unsure at all n locations
tcttttggncctatttgctaatgaattagcagagatgcaattcactttcttcttgttttttggatatatcggagtctctctccttagccctgtcatgcacaacctgtggatctggagggtatctccctctcccatccttcccctctcttagtattgtgtgccactgatactaacatgacaataatttcaggggactggcaatgcaaatttctactttgccactggtttggcttacacttgccttcagaccgtgttggttgtagagagtgtaagttcaatgataaagcatgacaggaagctaagattacttgttacagcttgatttcattctctctaagttcaacaactctgacgctttagtgtttttgcttgtcctcccggatacaagcgtgtttttttgggcagagtttggagtatatgtagtttattatttttgtagtatatgtattgttacgattgttatttgtaccgcccgtgtttgtaaaatatggaccacaaatcatgtaacccagtagactactagaaagacaccaggtttccccctcgaactgtgcccttttgatctggcgtggtgagattggtgattggtacattacatttgtaccatcagtttgtcaggtcaagacaaattaacatggcatggactggtacctttgttttcggttgctaaatgaaatagtacaagtactttggttcgttcnnnnnnnnnnnnnnnnn

SEQ ID NO: 392944 - DNA, 886 bp, Oryza sativa
  unsure (1)..(886): unsure at all n locations
tcgtacaccaaaaccttatttcttccccatgtccaggctggtctccgatcacggcgcgatcggaatgtaaagctgctctgaatggaagtgagtaatactactactgcctaatcctagaatactagcagcatagaaaaagagaatagtggaatataggaaaagagtggagaagttgcagcatagtgttagtttcagtcacccccctttttttttactttccttttctttttcatttttcaacgaagatagctttattaaaccataaagagaagaaagaggatgccctggcctccagaagagaagcagcagcagcagcatcaatgaagccaccaccaaccacaccaccaatgttttaaaatgcagggccattcagatgaaaatttagagcccctcctattactaccatatcatatcaccttagctaatcttaggtactattaccacccaccgacccaccaccattgatgaattaccccccaaagctcttgataagctaccaccaaaatagccactagttttatagcattcggggcgatgtttagccacacgactagtactaggaccaaccaccggatacatgtaacactactactgcctgattgcaactgtgtgcaaggcagtgagtacagcagatatgtaatggacccaagaacnagtgacaggtttgagtgagagagagagagagagagaggaaggcttnantagctagtgtagtgtatgtaaaancacaagaagatgaacaantcagtcagtgtaggtgtgatgaaangggaaggaccactcactgctgatgctgcaccantctgttgtgccaatgtgganatgtgtcancgttggtgttcatggtccccctgancagcaaatgcagtcccaaaaaaaaaaaaaa

SEQ ID NO: 392945 - DNA, 466 bp, Oryza sativa
atcgcgccggcatcgcattgacatctccgaggaaagctttggtatatattgttgcgaagctagcggccgccatggcagcgtcgacgcgcgtgtgggtgctcgccgcggtgctcgtggcgtgcgcgatcgccgtccgctctgcccgcgccggccacgccagcggccacgccgccgccgccgacgaggaggacgccgccgccgcggcgccggcgccgtcgaaggggcacgggtgcaacccgctcaaggacaagacgtgccggcacgacgaccgccacgatccggagaaccaggaggaggggggggggttctgggcgtccggctgccgtccttcccgtccctcaccggagacgacggcgacgacgacgagctgccgtcgttcgacacccacatgaccattctcggccactgaaaacaagggtgtcatggctgcaccattttaatcgtcatcatcattatcttcttaact

SEQ ID NO: 392946 - DNA, 718 bp, Oryza sativa
ttgggcgcctgccgtgccggaccggaatcgccgggtcgcccaggcgacccgttgctattgccaggagaaagaagatggatgaagcaagggtgatctgctggaacatgacagacgagaacctggtacctgaggcacggacctctgctgaagtaagacagcaggatctcacgtgatgacgggttcacactagacgcggtgaacatctggtgaggtactgagaatacatacctgatatcttcgcatgaataacctatcagggactaatcgcctggtcttttaccgcacccgctttgaaggaacagggcgtggcacgagtttctagaattgtttccggaaaggcatatctatgatcccccagaagagctccttggtctgcgctgaggttgaggattcaacgacttcatgcaccttctgcgtttggacttcattcggattacctgcatctccagaagttctccagaatttgatgtttggagtggaaatctgtcaggtgaaagattaagttatcgatgatcatgcttaagagaggtggacggaaacaaacagaccattccattagctgtactgtaatatctatggttacggaaattttgttgttcaggcaatctcttaaaatatcaggccttttattcacaaatgccactttgtgtatctgtaatccaggatattttgaaaagtagcataaaaaaaactctttcattgggtcaaaaaaaaaaaa

SEQ ID NO: 392947 - DNA, 530 bp, Oryza sativa
tcgcccacgcgtccgatcctagctaggtagctatatcgtcgtcattaattggagctagctagggaggcagcaggcagagcgcaggggggcggccgggcggcgagggaaccatgagcaaaggtgctatcatcggcgcttccaccgtgctggtggtggcggtggtggcagccgtgtgcgtggtgtcgttcaagaacggcggcggcggcaaggaggatggcgagctgtccacgtcggtgaagtcggtgaaggccttctgccagccgacggactaccagcagacgtgcgaggaggagctggggaaggccgccggcaatggcgccagctcgccgacggacctggccaaggccatgttcgccgtgacgtcggagaagatctccaaggccatcagcgagtcgtcgacgctggaggagctcaagaacgacaagcgcacgtcgggcgccctgcagaactgcaaggagctgctggagtatgccgtggacgacctcaagacgtcgttcgagaagcattgggggttcgagatgaccaacttc

SEQ ID NO: 392948 - DNA, 741 bp, Oryza sativa
cgccgtccccgcctccgctcccacacgcccttctcgcccctcgcgcaccgatctccgctgtagttctccgcgccgcccccgctctccaccgcccgaacacagtcgctcgcctcgccggtctccactccgcctcgtcatccacttccactcgcccaccgccgaaaggtcagcgtcactggaatttaggctttcaataaagatctcctaaggcatatcaaggctcacgggcaagggatctccctcacagattcttcaaggaggagggactgcatactcagtattgccgtagcgtggtgccgccgcccatccgggagtatccaccgtcaccgactacccttctctgagcgggtgcaaatcctgccaattgaccccatctcaggagaacgtagagccatgcggttccgtgtagtattcctgtagtccactcctgcaatccacccgccctctgttttgtcaaacttctcatctccccttcccttccgccgccatgctgccggccggtagcctcaccgacaagcagctccacttcttcgacgccaatgggtaccttgtgctggggtcgttctcgagcgcggaggatgtgaaggcaatgagggaccgcatggcggtgctcatcgacggctttgacggcgctggcgacgtcttcttcacaaaggatcatcggcaggtgaagaatgacttttctttcagagtgcggagaatatcttttcttctttgaggaaaagcatttgagatgatgat

SEQ ID NO: 392949 - DNA, 746 bp, Oryza sativa
acgaaacttaatggacgctgaagatttgcctccacttatcgatgcaattaacagggaagccaacggcttcagcatcttagcggagctccaatcgatggtcacaaagctgtcaatgaagagtaaggtgactatagtgaacagactgaacacattgaagcttatcactgagatattcatactaatcgttaggcatggaagccgctacaccgtagaagaagcagagaacttgatgaaatcactgtggaaggctgcgaggaacatgtcggaaattgaggacatcatggttatctctggatgtagtagcagcctaaagactcttggttcccttgtgaaagaagccgaggaactcctgcctagagagagggcatccgaaatggaagtgataattgagcatcctagctgtgtcaatcgaaatcagattaatgaaatcgtatataatctgtattattttaatccgtaccctcattggaagactgtgtgccggggaaatctgatagtcgatctgaaaaccgaaattaaaaattactcgtgcctgccagtaataaaatcaaagtgaaaatcggcctttaatcagctgaggccaatgcatagtattttttttcttacacttttgtacattccattttgctgctcttctcttctttttttctactctttcccaatcatgtaacaacgtaacttatcatttctatcaatgaaatggctgtaaggtagagctggctctacgttcttatgtttacaacaaa

SEQ ID NO: 392950 - DNA, 590 bp, Oryza sativa
  unsure (1)..(590): unsure at all n locations
nnnnnnnnnnnnnnnnnnnnttgtggtgagacaatgacgacttcaaataagttcttattgtaactggagaacattaattacatcccttctgtaaagctcagggaagcataccttattagtatttttaccatcactaagcactaaaatatagatgtaactagctagatacattgcctcattgcatgctttcttcagagattattgacacactgatgagatgaaagcaggctatcctctatatgttggatcatggaagtgcaggcagaaccttcccagtgcaggttccgaatccgacattgtagccttcacccttgcaacaagctgtcaagatgacctcatccccatcttctaggaacttgcgggtcgagtttccaactgatatctccttctgcccattccatgttagctccagcaaacatcccaaagattctgtctcaggtccgcttagtgtgccagttgcaaacatatcccctggtctcagattgcatccattaacagtgtggtgtgctagttgctgtgttaaagtccaatacagatgcttgaagttactctttgcaaccattgatggttcactttgctccttgggctta

SEQ ID NO: 392951 - DNA, 720 bp, Oryza sativa
gggggttttgtctggaaatttgttatttcattcatatgaatagtagcacactcatatcataggaataccctgtgtttacaaagtaacactaaaaaattgcaatggggctcctcacaacatgcttctcagatacccacttgaagcttccctcggcatggttagttttgctaatatcccaacttaagcttaatgaaaatgttttcttctccttcatcttggtgaattctagctttgttggtgacacacttgtcatcacctccctgggcatatcaatttccacggtgtaggcttgaatttgcttctcccacattagtaacagtccggttcaccacaagcttgccagcacttgcccttactgctactgatggatagttaagttcagcttcagttattttgcttcctttgcaggcatctttctgatttgcaattatctcaacttgaacatatgtgtaacccaggccacagagatatgaaatgtattgtgcatcatcaatgtcatagatcagaccggggtcaatggcttcagaaggattaacatgtccagcaccaactgcgaaatgccctgcaatattgtatctttcatccaggattgccttcttctggttatcaacaacataagctgttgtcatgattgcggacttgatcgctgcggatgaccaatctgggtgtgttcccttgatgagagcagcaatgccactaaggtgaggagttgacataaaa

SEQ ID NO: 392952 - DNA, 551 bp, Oryza sativa
ggtgttttttttttttttgttttttttggtacagtaagatgctaactttctgaagcctcacacagtgacaaaagtatcacagatttcacagcctcatcagcaaaggggggaaaaaacttggtactggaagaagagcatgtgagcagtgacaaagttaagggcttaaagagaggttctacagagctgggtttagtttcatcctcaaattctcatccttctgctgttaggagcacgctggccctgcagtaggggcagtcgctgcgagagcgcagccatcgctcgaggcaggccgagtggaagatgtgcttgcaccgcagctcgaggagcccatctgcatccccacatctctccaggcatatagagcactccgttgaaggtcccgcgagttcgtcatcatctgttactctgcagctggctacttcttgtgtaggagccggttcagaacaatgcgcgatgaacgtatgcttatctgcggtgttgaggtttcagctgtgctctctttgagtttgcagggagcgatcgatacgtagtgtggaagcacttgttagact

SEQ ID NO: 392953 - DNA, 552 bp, Oryza sativa
tttttttttttttttttagtgataattaccggacagtaattcacaaaaatcagcggcgacctcctcctctagggtgaggtgagagagctcaaaatttaccccccacgtacaggaatcggaacccaggattagatagagaaagagagattagaatcgacaaacacgggtcacatccacttatctatctccattagattaagccttctgcatccttcttcttcttctgctgctgctgttgctgcgatggtgtggtggttggttgctgctgctagacgcttaggccatccacgccacattgcttgtatgtcagtgactgcctcctcggactgatggcgatcgcgcaatccaccgacacctggacttttggggaggagaagccgagcacgaggatcttggcgccgacgtcgccggtgatgcggaggtcgacgcggtcgctgatcgcggcgtcgcggacgaggtcctgggcgtcggcctggagcacgttgaagcggtcgacgatgacgcgggtctggagcaggcgggtgctgtgcgccggctgctcgaacccgggca

SEQ ID NO: 392954 - DNA, 581 bp, Oryza sativa
  unsure (1)..(581): unsure at all n locations
nnnnnnnnnnnnnnnnnnnnnnnnnnnnnnnnnttttaaattttttttggagaaaaaaaacatatttcattcctcaaaagcagaacacagcggccaaaaaaacaggaggcaaaaatggaggagagcccatgaatcgatcgcctagctccaatgttctaaccttgagaaatgagaaaaaaaaaacaaaccaagactcgcccgaggaagctagggcccaactcggcccaagaccctcaggcgcgtgtacgcacgtagtactagtagcaccagtccccctacaaacagaaacagggtcgcgtacgttttattgttgtgaaaatgtatttgtctccgtcgtcctgcccgtgtcgcaccagaagtcccgaaaataaaaaagacgtggcctccccgcgcgcccgacgcgcggatgcggctcgatcggtctcacacgcgcaacgcggggcctcgcgcggtgccccacgggttggcgtcgatggccggccgcggctgtggctgctggtggtggtgccggtggtggtggtggtggttccggtgctccttccgcancgacaaaaccgtgcgccgccgnacgcttcttccgc

SEQ ID NO: 392955 - DNA, 946 bp, Oryza sativa
  unsure (1)..(946): unsure at all n locations
nnnnnnnnnnnnnnnnnnnnnnnnnnnnnnnnnnnnnngtgttttttacaaggaaaaaccaatgatatctccaagcaaaatatatcatctgatttacaaggaaattgggaaataagaaatataaattaagcaaagaactttactgtcccctcacggacccaatataaattaagcatttgattttaataaatataatctgaaacggagggagtaatagctgattaaagcacccaataatatatttcgctgataagcttgtacatctccgacttgtgcttcacgaggcggagcactccagtgtcgtcgcagcgctccacctcgacggcggtgaacacagcgaacagctccgggttgtgttgttcgtcggcgtcgaagaagccggtctcgaagaacctggcgatgcagaagttggcagagcccaggtgcacgaggtgggaagacacctgcgtcaacgccttgggcggcgtgtactccagaggaaggaggctgtgctgctccggctttctcccgccgctaatgagatcagacgcagataggacgttgtcggtgccgggacgcgaggccatagaacaggcccgtgctccggcacgttacacggcgaaggccggtgaacggcatcgcgcaccactcgccgccgctcgccaccgcgctccactctccgcgctccgtgtggaacctgtaggtgccgacgccttgcttggatatccagatgtccaccccatccaccaccgcgtaggagtcgaattggaagtcgncgcgttgcttcaccatgtaaggaggcggcgggagagtgtggcaacaccagtcccgtcggcgtcggtgaagctctccctactataggttagggcgtggaagcagtgatcatggccgccggtgaacgggccctggatgtcgtcgaggatgtaaaggtcgtcgtcgccgatggtgagggacacgggggagaact

SEQ ID NO: 392956 - DNA, 416 bp, Oryza sativa
ctttctttctcccgcaaacagcacaaaaaggcagcagctttgctctgctcgggtgttccgccgccaccgccgccgccgacgaatcactccggcgggctcttccctcctcctcgtcgtcgtccaccggcgaccggcgcttcgtacgaagatgttgaacctctttaagataaagggacagaagaaggaagaggcggcaaatacaaatgggagacctcctgctaagaagcaaagtccaggagaattacctttccataaagacattgctgagcttaatcttccaaagaaaaccaacattactttttctaatgggaaggatgatctgaagaacattgagattacttctccggcctgaccaaggatactatggtgggtggagctttttgtttttactttaccaagttccttctactttaccc

SEQ ID NO: 392957 - DNA, 484 bp, Oryza sativa
tcgcagctaggcctcctgctacactggacatcttcccatcctggcctatgaggaggagctctcttccaacaccgaaggatggatgttcaaatgtaacggcagacacaacggactccgagagcagcagcaagaacaacggcgatcagggtgcagcagcagccgacatggcgagccagtttgatcagatcccacagcagcagcagaagcagcacaagaagatggcagcaagttccactcacagtgaccacaggatgacaaagacacttgatccaaagataatgagaaggttagcccagaaccgagaggcagcacgcatgagccggctgcgaaagaaggcttacatccagcagcttgagagcagcaagttgaggctggctcagatggagcaggatctcgagagagctcgttcccagggcctcttgctgggaggatcaccaggtggaaacaccagcgcaggagcggcgatgttcgacgccgagtacgg

SEQ ID NO: 392958 - DNA, 450 bp, Oryza sativa
  unsure (1)..(450): unsure at all n locations
ctctccttcctcctaaaccctacgaccatgccgaccctcgccgccgccgccgccgccgcccgccgcgccggcggggcactgcgatacgccgtgctgggcggggttcggtcgctctcatccctccagccgtcatcctcctcctccgccgcagccgccgccagcgaggaggtgctggtggaaggcaaggccagcgcgcgcgccgccgtgctcaaccgccccggccatctcaacgcgctcacgaccaccatgggagctaggctcaataagttttatatgtcatgggaggacaaccctgatattggctttgtcatgatgaagggcagcggccgagcattctgtgctggtggggatgttgttaggttgcaccagcttataagtgaaggaaagttggacgagtgtaaggatttcttcacgactntgtacagttttatttatgttctgggcacatac

SEQ ID NO: 392959 - DNA, 528 bp, Oryza sativa
tactataggggatgctggtccgcctggagccgccggggcggaactggcgggacccacgccgccggttgaatgccaaaccctcgtcctccttccatggcgatttgacccccaaaccctagcaatgccctagactaggactagtaggtagcggaaggaagctggaatcggaaggaaggaaggaaggtgggagggatgggttcgaaatcgaacacggagagggcgaggaaggcgctggaggccatgaagcagctgggtttctccaagaaggaggccacccctgtcctcaagaacctcctcaggctcttcggcaacaactgggagcccatcgaggacgagtgctaccgcgccctcgccgacgccatcctcgaccgccaccaggagaccgcagctgaccgcggctgcagcgcgacaaggccaacgccggacgatgatcatcacccccttaccctctgtggtgcttcgcgcgacgtggatactgagaccgacgaaccttgaaccaagaagcctagggccaccaactcagatcct

SEQ ID NO: 392960 - DNA, 853 bp, Oryza sativa
cccacgcgtccgagaagctcaacccaatcccctcctctcccccaattccgccgccgccccctgctcggatcctcccccacccccgccgccggcgagaagggcccgtaggcgcggcctcgtctccttgctgatcccgactccgcgcgcacggccggtgactcgactgcctcgtctcggttcgaatcgagctgggagatattgaggagcacttggactgaagaactcaattttggagcacttggattagcattggccaccctgctggactcactgactgttaaaacggctctggtttaaggagttgtttctcttgtggtcattctttggattatgggagctctttgttcatgtttgcaagctgattattccgaccaccatgggcatcatgcttcgccggcattagggggatgcatgtgcctcagatgttctactcagcagctcatcaatgcgtacactgttttattccgagctgggacagtgcacgcagtttctcagtctatagaagccactcctgttgattcatctgaaagttcatttgacacatatcgttcacccccaagaccacttccatatgatgatcctacattctcccctcctcagcgtgctcggttagtgtcaaggcatggaccttcgtgccattccccagaggaatcagaaccactgagggcaaatgacgacgaggaaatggaaacaccaagttcaacacataagtcaagtaaaacaaactatgacacaaaaatgaaaagaagcagctctactcatggagagaagctgccagcaaaggaacctggaaattatttcacatactgttccccatccgctgaagatgagatgtcctgccaacatgtcttga

SEQ ID NO: 392961 - DNA, 795 bp, Oryza sativa
  unsure (1)..(795): unsure at all n locations
tttgctccagctgcaggcgctacgagaacgacgccggggccgacctcgtgaacgacatatcgtccaagtcagatgtctgcaacgtgtacgcagccgaggggattctacggatcacccaccagaacatccccagcatggtgctcacgtacaggcagctatgcaacgccaccgactccttcagcccgaacaacctgctcggggaaggcggctttgggagggtgtacagaggccacctcgaagagatcaacgagatcgtcgccgtcaagcagctggacaaggacgggttccaggggaaccgcgagttcctggtggaggtgctgatgctcagtctcctgcaccaccccaacctcgtcaagctgctcggctactgcaccgacatggaccagagaatcctcgtctacgagtgcatgcggaacggctcgctggaggatcatctcctagatctccctccaaaggcaaagcctctcccgtggcaaacgcggatgaagatcgcggtgggcgcggcgaagggcatcgagtacctgcacgaggtggccaacccgccggtgatctaccgcgacctcaagacgtccaacatcctcctggacgaggacttcaactccaagctgtccgacttcggcctcgccaagctcggccccgtcggcgacaagagccacgtcagcacgcgggtcatgggcacgtacggctactgcgcccccgagtacgccatgaccggcaagctcaccaagacgtcggacatctacagcttcggcgtcgtgctgctgagatcatcaccgcaggcnggcgatcgatacc

SEQ ID NO: 392962 - DNA, 776 bp, Oryza sativa
  unsure (1)..(776): unsure at all n locations
gcggaatacaataatgtaaggagccagcttagtgcgatcaacagaaagcaaactggaagcttagcagttcgtgatctttccaatctggtaaaaccagaggatatggtcacatcagaacatctagtgacactccttgcagttgttcctaagtactctcaaaaggattggttgtcaagctatgagtcccttgacacatttgtggtaccgagatcgtctaaaaaactttatgaggacaatgagtatgctctctacacggtaacattgtttgctaaggttgttgacaactttaaggtccgtgcacgtgaaaaaggtttccaggttcgcgattttgagtatagttctgaagcacaggaaagtaggaaggaagagctggaaaagctaatgcaagaccaggaagcaatgagggcatcacttctgcaatggtgctatgccagctacagtgaggtattcagttcctggatgcacttctgtgctggtgcgtgtctttgtagagagcattcttagatatggtcttcccccatcattcctgtctgctgttctagcaccttctcaaaagggtgaaaagaaagtaaggagcatcctnggaggaactctgtgggcaatgtccatagtatttacttggaaatctgaagacgatgttgggtgtagctggtcttgggaggcaaggcagtgtttttggagtaattactacttttggcaaacaaaaaaccagcgaatgggtccgatgtatattattaattggtgatancgtcaattctttctttgatttattttac

SEQ ID NO: 392963 - DNA, 465 bp, Oryza sativa
taggggaaggagaagtcccagaagctgctcaagctgttccgggagcaaaggcagcgagatggggcacagcctgtgccgcagcaagctcagcagcagcagcagcagcaccagcagcaggcgggaaagaccggtaacggccaccatggtgtgccgccgcgactcaaaacagctgtgcaagtctaaatcgaggaagctaggaaggactctgagctcactgtggaagaacaggagcttctccctgtaccaatgctagcagatttttgagctgagtttgatcagtggatatgtacatcttttcttgttccatgtttctcttgatctttcttttttttttttttgccttcttctttgttgtttccttgtgtaaagtaaaactatcttcccccccttctcggtcgggtgatgtaggccatttcctctttgtttttctttgccaaaatatgtgcatagctcatctttccctct

SEQ ID NO: 392964 - DNA, 1017 bp, Oryza sativa
  unsure (1)..(1017): unsure at all n locations
aattcggcacgagctnnnnccnnttcggcacgagaatttcgtttccaaagagttgatcacagtacgtgtgtttagctagaggaagctggtggtggcgagaccatggtgggcaagggcaacgagtgcgccgcagctcgccgccgcttcagcctccgggcggcggcggcgtcgtcgtcgtcgtcgtccttcctcccctgtctcttgctggcggcggcgctctccgcggctgctgccgcgcgcacggcgacggcccgggccccgcgcagtctcttggccgcttcccgacgacgaagatgacatcggagttggagaaggaggccggccggtacgtcgacgacagctcgcaggcggcgaggacgaacaacaagatcaccaacctgcaggtgtcgttcgtcggccacggacatgatactccagcagatggagaagggcaattcgctgatgctgcatacccggcgaagtggaaaccagatcaggatccgtccacgccatcgctggtcgttgctcatcatctaccgaatggcaatgctcccttcattgatgctgcttacccagtcaagtggagtccacgtgctgatgggcctcctaaacaaccagccaccttccctgcttctccaaatggtgagatggccgaattcactgattctgcttactcggtaaaacggagtccacgtagtgttgcacctcctaaagcaccgggcatctttgctcaacattctaatggtaacaaggcccaattcactgatgctgcttacccagtcgactggaatccacgtagtgttgcgcctcctactccaccggctgccttgtcttctgtggctcatccagctgcaggcatacatatccagcgcgggatgctcttcttaatgaagaagttgcatcctggcgccgtcttgccggaaggcacgaagctggcgctgccgcacggcgaccacagcgtggccgcagcggcgccaaggttcatctacattgacaagggcgacgccgtgccgttcgacctccgcgccatggacgcca

SEQ ID NO: 392965 - DNA, 522 bp, Oryza sativa
atcgtcgtcctcctcctcctttcctctcttcggggaacccttcctcctcctctggctcgctcgccggaggcggtgacggcggaggcggacgacccgacggcggcggagacgctggagaagttccgcctctacgagacgcgcgcgaggttctacctgatcgggacgtcgcgggagaagcggtggttccaggtgctcaagatcgaccgctccgagcgctccgagctcaacatcagcgaggaccccgtctggtactcccagcaggaggtcaagaacctcctccagcgcatctccgagggcaaccgctccactggcggcctcaccttcgtcaccaaggcctatggcatcgctggttgcaatcaagttcttggagtcatattatctgattttgggtcaccaagcgctgccaaattggttgcatttgtgggcatcctatttactgtatagatgagagccagatgataaccattccacactcatctgtgcagacagatgttgcaacctctaagaatgagctaaggtaca

SEQ ID NO: 392966 - DNA, 571 bp, Oryza sativa
  unsure (1)..(571): unsure at all n locations
cactcatctcgtcacctcgtcagtttcatgcatataagggccctagcttgcaatcctctctgcattgcatctcaacagagcaacacaaactcacacattgccaattccctttcttggtttgattctggctgctgcaatggcttcgtcgctggccctggtagctctgctcctcgtgagctgcgccgtggtggcggcggcggcgaccaagtacaccgtcggcgacacgtccggctgggcgatgggggcggattacaccacctgggccagcgacaagaaattcaaaatgggcgataccctcgtgttcaactacgccggtggggcgcactcggtggatgaggtgagcgcagggaactacgctgcgtggcaccgctagcaacgcgcttccagagcgacagcagcggcacgaccaccgtcaccctcaagaccgccggcaagcactacttcatctgcgggattgccggccactgcagcaacggcatgaagctcgtcgtggacgttgccgcggcctctccagccccagtcccaaaagccctgtacaccacaccgacgacttcatntacgacaccagcga

SEQ ID NO: 392967 - DNA, 943 bp, Oryza sativa
cggaatccgaaccctagcctggtagggtgggggcactatggggtgggcggcgcggttcctcacggcagtgtccttcctcgccgccggcgtgctcttcgcgccggacgctctcctcggtggctccggccgctccggcgccggggtcgcggcggcgaggctggcgcacgtcctctgcttcgccaccgcctggggcgccgcgctctgggtcactcttcatcggcggcatcgtcatgttcaagtatttgccaaggcaccagtttgggagtctacaagggaaaatgttcccagcctacttcatgttgatatcagtatgctcggctatatcagtggcagcttttgcgtatctacatccttggaagacggcatctaccattgagcgctatcagcttggattcttgatctccgcccttggttttgacctttccaaccttctggttttcacgcccatgcaccactgagatgatgatgaggcggcacaagatcgagaaagacctcggcatcgggcagcgaggtcgggttttcgaagaacgcggaggtggcgaggacgaaccccaacgctggcggccatgaacaagaagttcgggatgatccatggcctgtcgtctctggccaacatcatggcgttcggtagccttgcaatgcactcctggtacctcgccagcaagctccagatctgacggcatcatcaccactgcttctcccatgtctccatgttctgtgcctctgagttctgaagcttgttgccgtaagctgctgatcaaaagttggatactaggtttatgtaacagataaactgatgaaggaacttgtgatagaaactttgcaataatttggagaaatgatgtacagatcgctgggggtttgttttgatttgtttcaatgcattacaaatactacgagggagatacctttctcgctgataaattgagccggccttttggag

SEQ ID NO: 392968 - DNA, 417 bp, Oryza sativa
ccatgggctcagcgcataaacaagaatcggcatcgggagcaattgcgacgggggagaagacgactcgagcggggagcgagtcctcaggccaccattgggcgggttacagctgcagcgcaggacgaggccagcagcccccgcctcccgctccggcatcgccctcccccgagagacttccgccgctacatcatcttcgggtgcccttatcgccaccccaagaagccgaaagcacccgcaaaagacaaagtccaagagaaagtaccacagcagaccatgattgctagctggggcatggccaattatgttgaatataatcaagtgaagaacatttttcaggagattggtgagattgttggtatttatttcagtagcacgaggcatctcgcagttgttgattttttctacagaacaagctgc

SEQ ID NO: 392969 - DNA, 763 bp, Oryza sativa
aagtcttaggtaggtcactgttggtggcacgtttttgagaagtttatgatctgcatgtccacctaagatatccagtcaagtgctaaaaaggtcacaaaaatgggaggcagaaaggacaatcatgactcctcaaatgccgacaaagggttccatggagcgtatccaagcggttaccctggtgcatatcccctaatgcaaggataccctaattcacctggacaatatccgactcccggtggataccctagtgcaccaccgggacaatacccaccagccggtgggtaccctggtgcacaatatccaccaagcggttaccctccatcacaaggtgggtacccttcaggagcgtatccaccatcaggatatccacaacaaccaggctacccgccagctggttacccaggtcatggccatggtccacccatgcagggaggtggccatggtgcaggcgcccccggctttggagcgctgctcgccggaggcgccgcggtggcggctgctgcggtgggagctcacatggtacgacccggcggcggtggcggccacgggatgttcggccaccatggtggcaaattcaagaaaggaaagttcaagcatggcaagtacggcaagcacaagaagtttgggcgcaagtggaagtgataagcaaactaaattgcactgcagtttgcctccggtttcttgtttggttgaagtgctatagcatgatgggattaagtgtccatttaccatatatatatatctatatattcatcgaaaccaa

SEQ ID NO: 392970 - DNA, 611 bp, Oryza sativa
  unsure (1)..(611): unsure at all n locations
ggcgccgtcaccatctgcgagatcaaccgcgacctagttgcggcggatgcggtgtccgacgatggagccaaggatgcctacggggatgtcctcggaaatggtcttcagcccgattcctttccagtcggatgctcttgttgccacccacgagcctcctgctatcactgaagctgctgagccttctgagattgtccccagaacaagtttagcttccaccatagctgagtccttcaaacaaatgctcttcccttcgtgcgatgtgagttggttctttatcatatcttagtgactcaattatttgccactcttacgaataatatgtcttcatttgcaaacagaaaaattattaaagaatattaaagaatccttcaaacaaatattaaagaatcctacattctaacaagtgaccgacaaaacgatgttaaagctgttgaatggaggccaaatagtgaaaagatgattgcagttggctgcaagtactactgccaacttaagatgtctgcatgttcttttcatgtaataataatacctggtggcataatctgctgttacattgggttgatttttttnnnnnnnnnnnnnnnnnnnnnnnnnnnnnnnnnnnnnnnnnn

SEQ ID NO: 392971 - DNA, 624 bp, Oryza sativa
atctaaagcggaaggtgttgactgtacatcacatcatcacacctcatttctccttttatgtataagtggtggtgcacacaaaatcacatggaataggagcttcaggtacaagggaacacctaatgaacttatcatcaaaacagtggtcatttgatacatggaatgcactcagctgagattactttgtagtcatattttcatacaggtgggtcctttgtatagaaaaaaaggggtagtcttacactaagactaaatgaaaacagagacatctaagctacctcaagactttctcagctgcgtacttctctactttcattgtcctgttccttcttctaatgttttcgttgttatcgcgctcgacttcatcaacaagaataatttcaggttcatcatcatcttcataaccagcgttctccatttcacccttgtcatcccaatcctcctccggctcctgctcctctttgccatcatcttcatcatcaatgtattcatcatccatatactgttgttgagctcgcagggtgtggaactctggtgggggagagcagtcttcagtgatcgcctcgtcccgtttcatcacgagatgcctaatgattctctcgtccttatctagcagggtcttga

SEQ ID NO: 392972 - DNA, 627 bp, Oryza sativa
  unsure (1)..(627): unsure at all n locations
cattcgcaagcagcttcattcattttgagtacagataatactcatgctgttcttgtgcaccactcggaagctgcataatctcttgatttttagcccaacggctttgctaatatatgtgcgtcgcttgcgttgccattaattcttggatgttgttgctactgttgttttggaagcgatagcttggagttgtaaggtgaggtgaggtgcagggtggtcgatcagtaggtggaaaggaggaatcgaggagatggacggcgagattggggaggacatgctcacggagattctggtgaggctgccgtacaagtcgctggcgaggttccagtgcgtggccacgtcgtggcggcgcctcatctccggcgactacctccgccggaggctgccgctcatcacctccggtgtgctgtaccaggaaggccggggcggcggcggcggcggcggcggcgaagggaggaggaggcaggcgtacacgtacgcgtgcgcgtcgggngtgtggtgaccacggctgctgcgtggcggaagccgacatggtattcttccccggtcacgagacgtccaccatcatcgacgggtgcaacggcatgctgttgtacctacgcatcgcatccggcggcggggtttcacgtt

SEQ ID NO: 392973 - DNA, 1050 bp, Oryza sativa
  unsure (1)..(1050): unsure at all n locations
gagaaattgggaggtgaggttaactaggttgaggttgggcgagagagggaggaagggaggcggcgccgncacccccctcnccatccccggccgccgcgcccccccccccccaagcttccctccctcccttccgcaatctctcctctcctcttggcgacagtaccaggaaacaaggaaggagcaacgcaacagtgggagggattaattaagcttaccgggcttggctgtcaatttgacctctccaattccacctccacagggtagggcaacacgaggccggagactaaacaacaatctgattattcacaacaacttctctcctctccatgatggcttcggtccaccggcccctctctgccatggcagttgccgcctttgccgccgtctcctcccttgagctgcctgacaggctgtctcaccacaagttgcctgacacaaccgtggatgccgaagctgtcgtctcgattccagccagcaggcccgatgtatcagcagcaccttctgcttctgccatgtctcgcctgcacttcctgccacgcaatctgcagacttcgcacccggctaaagcgcctcctgcatctttgcctgtcatccacacggtttaccactatgcaaagtttgccaaatactactcggaagaggaggcagtgacgactgcgatgccatcctcgtcatcgccggatgttctgtacctctcggcatctgccggaccctaaggtctgcggtgactcacatggcaagtctcagacagtggtggttctgctcgggtggttgggctcgaggcagaagcacctcaagagatatgccgattggtatacctccaggggttaccatgcagtgaccttcaccctccccatgtctgacattgttagctacaatgttggagggaaggctgagaagaatgtagagatgctctcagaacatctcgctgattgggttagcgaggaaggatgggaaagaagattgttttccanaccttcagtaacactgggctgggctttgctaatggggtgaatactggagaattacaggagggcanggatccttctg

SEQ ID NO: 392974 - DNA, 494 bp, Oryza sativa
taaaccctccccaactccacgaatcccgccgccgccgccgccgccatgaagcgcgccgccgacgggatggagaagcccaagttcctcacgcgggaggagcgggagaagctggcgctcgagcgccgccaggccgccgtcaccgaccagcgccgctccgccctcgacctgctccagtcgctcccccgcccccctccgccgccgccgcctcccctttccaacccccctcgcgactcctcctcctcccaccaccgcgactcctccgaccgtgaccgtgaccgtgaccgggaccgggatcgggacagggaccgggaccgtgaccgggagcgccgccgcgacgacgactcccgccgcgaccgagatcgggatcgggaccgcgaccgaggcgactcctcccgccgcgaccgcgacagggagcgcggtgaccgcgaccgcgaccgtgaccgggagcgcggggacagggacagggagcgaggggacagggagaaagatcggct

SEQ ID NO: 392975 - DNA, 784 bp, Oryza sativa
  unsure (1)..(784): unsure at all n locations
gagngtngntgangtngtctatccagcaaaagaagagaaaacatatgctatagtgagtttctctcaggccatggctgatctgaaccttgtgttcttgttcttcctcctcttgtctcctcccatcttatccgatggggtgcttcaggtgatgggaacatcgatgaataggaggagcttgcttcaggccaagggtggctgccctgtgagctttgagaaccagaactacacgaccatcaccagcaagtgcaaatcgccatggcctgccgacctctgctgcccagctctgaacgagttcgcatgcaatttcagccaatatatcaacgacgaaagcaccaactgcgcagaatcgatgtgggtctacctcaacgcccatggaagctatccagctggcctgttttcaaacgagtgcgcagtgcttgactgcaacggtaacaatagcaccattagtactaaccaaactgctaatggaagcggcacccgaggggctaaaggaatatcagagatgtactcacttgtgacgaccttaattgtatctggactcccggtgttattgttctactgaatgaagtactctctccgtttcacaatgtaagtcattctagcatttcccacattcatattgatgctaatgaatctagatagatatagaatgacttacattgtaaaacggaggaagtaagaaaagatacactatcacacagaatggacatgttacagttgtggtaataagttgcgtttcagcatatatatacattacgagataagagtaaaaaaaaaaaaaaaa

SEQ ID NO: 392976 - DNA, 934 bp, Oryza sativa
ttagtttgagatgcacagcaaggcgtccatggcctggatcctggggcttggcccgagccttggccttgtcagggtccccggcattggcctggtctacaccgagcttgccagcggtgttcctcacatcttctcgcacttcatcaccaacctcccggcgatccactcgacgctggtgttcgtctgcgtcaagtacctcccggtgtacaccgtgccaccggatgagaggttcctggtgaagcggatcggccccaagaacttccacatgttccggttgcgtggcgcggtacgggtaccaggacatccacaagaaggatgacgacttccagaatgatgttgttcgatagcccgattctgttcgtgaggctggagagcatgatggacgagtacagcgactcccacgagtacagcaccctgttgatgagcctcccaaataacccagggatcagcaaatggcggcgtgaccaccaccggcaccaacaatgtcatggaggtgatgagctgcacgtcgccccatgactccattgtgccggtgaactccaggtccgacgacacgggcagcagccaggtgatgccggcgtcggggcagatggcgttccagagcgtcggcgacgagatcgcgttcctgaacgcgtgcagggacgccggggtggtgcacatcctcgggaacacggtgatcagagctcgcagggattcagggttcgtcaagaagattgtcatcaactacatgtatgctttcctgaggaagatctgcagggagaacagtgccatcttcaatgtgcctcatgagagcatgctcaatgttgggcaggttttctacgtgtaatgtaatcttagtagcactagattgtaaactaaacatgcatgtgattgtatcattcagaccgacttgggaaagtgatttcatccctcgaggggatattccctcgttttatgc

SEQ ID NO: 392977 - DNA, 684 bp, Oryza sativa
  unsure (1)..(684): unsure at all n locations
taaggtctcccgccgcacctcctcccgtactccggcggccccgacctcctcacggaggcacttggggccgagagcttcgatccggacgacgacgacgacgccaccgccgcctcccccgccatggaggacgtcggcgccgccgtcgccgcggtcgacgttctggccccgccgtgcaagaggccgcaccacgtcctcctcagcagcagcagcgaaggcgtaggccacgacgacgacgacaaccagcacgccgtgatggtgctgaggaggacgaggagcgggagggcgttcccgccgccgatatcggtgatcggcaagggcgggcggccgtggctgagcctccgggcgcaccgggaggccggccggctcgtgctgcgggagatgcggctgccgtcgcaggagttgctgcagccgtgcaaggaggacggcaggttcaagctgctcatccacccggaggccggccgccgtagtggcggcgccggcgcggggccacgcgtaggatcaggaagggaaggacacggcgccctcgagtcttgatcagtagatcagacagaattttccttttctttggtctttagagcaccgtaaattcttcctctccttcctgcgataatgtgcatgatcttgccgttaatcaatacatgcattggctttgcagcttnnnnnnnnnnnnnnnnnnnnnnnnnn

SEQ ID NO: 392978 - DNA, 434 bp, Oryza sativa
accccgaaaaaccacggggaaaacctcacacgtcttcgtccctccagcctgtccccggtccccctcctcttaactccgcatcatcgcatcctctctctctccccacccgtgtccatagaaattcctctatccttgattgattctttcttttattgtttttttttctcttcttcctcttggagggggaggagatttggggaataatcaacgtacattacccagtctcacactcccacgatcccgtcaagggccgccgcaatgcgcgtcctcgccgtgggcctgctcgccgcggcggcgttggcggcggaagcgacacctcaactttcacccaaattcacctcccccaaaccaccatacaagtatgcctatgccatcaatccttggtcaacagccaaatgtgccgcctggttctaattcacgcagtaagcagcagt

SEQ ID NO: 392979 - DNA, 1142 bp, Oryza sativa
cggtccgaattccggggcgctagcctatatagcaactgaattgcagccaatccacgtactaccgaccggttaccgatggagctgatgctgccgccatgggcgtccttcgtcggcgtagtgctcgccaccgtgctgttcctgaaagcggtgctcggccgtagccgccgcgtgtacaacctcccgccggggccgaagccgtggccggtcatcggcaacctcaacctggtgggcacgctcccgcaccgctccatccacaacctctccaagaagtacggtcccctgatgtacctcaggttcgggtcgttccccgtcgtcgtcggctcgtcggtggagatggccaagttcttcctcaagacccacgacgtggtgttcaccgaccggcccaagaccgccgccggcaagcacaccacctacaactacagcgacattacgtggtcgccctacggcgcgtactggcgccaggcgcgcaagatgtgcctcaccgagctcttcagcgccaagcggctggagtcgtacgagtacatccgtggcgaggaggtgcgcgcgctgctgcggaacctgcacggcgcggccggcggcgtcgtggtgctcaaggactacctgtcgacggtgagcctgaacgtgatcacgcgcatggtgctggggcaagaagtacctggacaaggatgcgggggggtcggtgacgacgccggaggagttcaagtggatgctcgacgagctgttcctgctcaacggcgtgctcaacatcggcgactccatcccgtggctcgactggctggacctgcaggggtacatcaagaggatgaagaagctcggcaagatgttcgaccggttcctggaacacgtcgtggacgagcacaacgagcgccgccgccgcgagggggagagcttcgtggccaaggacatggtggacgtgctgctgcagttcgctgacaatcccaaccttgaggtcaagctcaagagggaaggtgtcaaggcattcactcaggacctcatcgctggcggcacagagagctcggcggtgaccgtggagtgggcgctgtcggagctcctgaagaagccggaggtgttcgccaaggccaccgaggacctgccccgcgtcgtgggccgcggccgctgggtcacggagaaggacgtcccga

SEQ ID NO: 392980 - DNA, 712 bp, Oryza sativa
tttcgtttggaaacgcccctaacgaccaactggaggcgccccgccccaaatcttgagatcgcacgatggatggacatactaatggcgctaagggttcctgctctaagccatgcgagccattaacagactactgcatccctgattacattctgaatcctgactctgaacaagtcctcgttgatcaggcaccatgtcgccctgtgggagtattcatcaactctagaagtggcggccaactcgcaagcagtttgatcaaaacgtatcctgagcttcttaataaagcgcaggtttttgatttatcagaagaggctcctgaaaaggtgcttcacagattgtattgcaactttgagaagctcaagtctaatggcgaccctattgcttttcaaattcagagcaacctaagactaattggtgctggtggcgatggcacaccaagttggctgcttggtgtagtttagtgaccttaagctctctcacccacctcctattgcaactgtgcctctgggaactggaaacaaccttccattctcatttggatgggggaagaagaacccaaccactgaccaagaggcggtgaaatcatttcttggacaagttaaaaaagcaagagaaatgaatattgatagttggcatatcatcatgagggatgcgagctcacaggaaggtccatgtgaacctattgctccgttagagctgcctcactcattgcatg

SEQ ID NO: 392981 - DNA, 796 bp, Oryza sativa
cgagcttgacgcggtggagaggcgcgcctccaccttccttggctggcgtcttctcttcatcctctccctctccaaagctccatcgctgtcccctctcccacccctttctctgcattcggccagatccagccaatagaagctatggccatggcatctggctcccctgagcttggtggagtggagaggccaaggaggggaggcctcccccagtatcttcctctcccaaatcaccattgctgccagctcttcctcccccttccggatccggccagatctaggcttcatcgagttggggacttccagatctggagctccagttcatggctacgtgctgcatccaccacaacagcaacgaagacgatgtgacggggctcgggagttcccgctgatggcggcaacatgctggagaatttcctgacataaaatgcaccttttcttgtttctgaatttcctgggctccatgtgcaccttcaaccggattttatttagttgctatatgcaggtcactcggcaatcctgcaaatacttaatggttggttggcgaaatgtgcagcccacattaggagtgcaacaatgaagtgcttccataagtttaattatacattcaagcatcaacttcaggatctgtaccatctatttatatcatctttctgttattgattgatccaccaaataatatgttcctagctattgtaactttggttattgctttaactgacatgaaccatgaattgcttgtatgctaattattaattgtaacctctttactgaaatatatatctatgttggaatgtgt

SEQ ID NO: 392982 - DNA, 411 bp, Oryza sativa
  unsure (1)..(411): unsure at all n locations
atttgtcaaaacgccaggaagagaccctgaacttcactactctttcgtcggggtaacctgtgctccagcattccagtttgaggacaacgaaatggcaacacgggagaccatgaagacacttgctcctaaagccgaagctttcatcaactaccttgttccttcagactgagtctgaaaccatcactccaagtagcttgctcttcgtgatgaactttatgtaccaagctactgattcagtactgatgtttactgcttgatctgagatctgttcaggactcgcaatgcagaaatcatgaggcctgaaccttgcatatatcatcactgtatcaaactggttgtttggttacatagttttgactctttttatgaaatattgtgattgctgaaaaaaaaaaaaaaatatcaccnctt

SEQ ID NO: 392983 - DNA, 475 bp, Oryza sativa
tcgtgaagaaaacccaacccgcgcgacagcacaagcacagaagcaaaagcgaacgacgaggagagacgcgaccaccgccgcgggtcactccccatcccaatctcatccagattggatttgagcggatagaggagggatggatgggaatttcgggagcgaggagcggattcttgtggccggcgtcggttcttgccggcatcgccatggtgcgcctgcggtatatgacataactcaaaaggttagctctcattgcttcaagggttatgacaatataagcccaatgaaaaaggttgaatggaataatagggggtttctctacattccatgcattggttgcagctgttgtttctttttacctggttgtgatatctgacctcttccatagcaacataataattgatagaaactcatggctatctgatgccatgtttggggtctcgattggttactttttgacagatttggggatgattct

SEQ ID NO: 392984 - DNA, 546 bp, Oryza sativa
  unsure (1)..(546): unsure at all n locations
ngagcgnncgangncgngcaaccagcaaccgcttctgtaggagaggcagcgccgcgggcagccggccggagatggccggcgccggcgccggcgagagcctggacctccccgtggtggacctagcgtcctccgacctcgccgccgccgccaaatccgtccgaaaggcttgcgtggagtacggattcttctacgtggtcaaccatggagccgagggattggcggagaaggtgttcggggagagcagcaagtttttcgagcagccgctgggggagaagatggcgctgctgaggaacagaaactacctggggtacaccccgcttggcgccgataagctcgacgcctcgtccaaattcaaaggagatctcaatgaaaattactgtatcggacctatcagaaaagaaggttatcagaatgatgctaaccaatggccttctgaagagaatttcccatgttggaaggagacaatgaagctataccatgaaactgcacttgctactggtaaaaggatactctctctaattgctctgagtttgaatctcgacgttg

SEQ ID NO: 392985 - DNA, 779 bp, Oryza sativa
cgcatatggtgaaatgttgaattttgagatggctattgttttttacgagcttgctctgcacttcaatcctcgctgtgcggaggcatgcaacaacctgggagtaatatacaaggacagggataatcttgacaaagctgttgaatgttatcaaatggccttgtcaattaagccaaatttctctcagtcattgaataaccttggagttgtctacactgtccagggaaagatagatgctgcttcaagcatgattcagaaggccatatttgcaaattccacgtatgcttgaagcatataataacttgggtgttctttacagagatgcaggaagtattacttcagccgtacaagcttatgagaaatgccttcaaattgatccctgattcacggaatgctggtcagaatcgtttgcttgcgttgaattatattgatgagggctttgacgacaagctttatcaagctcacagggagtggggaaaacgcttcctgaaattgtatccacggtatactagttgggataacccaaaagtcgctgatcgtcctctggtcattggctatgtgtctcctgattactttactcactctgtgtcatacttcattgaagctccccttgcacaccatgactactcaaattacaaggtggttgtgtattctggtgttgtgaaggcagatgccaagacccttcgattcaaggataaggtattaaaaaagggtgggttgtggagagatatatatggtattgatgaaaagaaggttgctagcttggtaagggaggacaaagt

SEQ ID NO: 392986 - DNA, 428 bp, Oryza sativa
ttgcgtctccccccaccaactagctctctctctctctctctctctcgcgccgccgctacgctcgccgcgccgccgctacgctcgccgcgccgccgcgggtggggagatttgaccggcgttgactccgggatggacgggcggttcccgctgccgccggcgagcggaggggggcgggggcaccaccggcgggcgcactcggagacgttcctgcggctgcccgacgcggacctcctcctcgacccggagggggacttctccttctccgacctcgacttcccctccctctccgacgactccccggccatctccgacccgaccccgccgccgccgtcgccgatggctgcgacccccgcgccggcgccgcggccaccgggtggggcgcacatgaggagcctctccctcgacaccgccttcttcgagggtttctc

SEQ ID NO: 392987 - DNA, 427 bp, Oryza sativa
  unsure (1)..(427): unsure at all n locations
tacattgctgcttctgtgcccgaccagacaagggaagctaagcaccatcaccagcagctactaggtggaggaggaggaggaggagaaaaaaaaatatagagttagtcacagctcaggcagggagagacagagagagagaaagagatttttgagagagagagacagacatggagaggaggaggtctcggaggcagcaagcctttcaccccgtctccgagataacgatgtactcctcatcttaggtagctgcggaggaggaagaagaagaggggttggttgttggtggccggaggagcaccgccgacgatggtgacagtggcgccgccggcatgggaatagcggcgccaccgtntcagccaggtcagaccaccacgttcgtcataagccaacccaccagcagcaagagctccccggcggcgatcgtcgt

SEQ ID NO: 392988 - DNA, 373 bp, Oryza sativa
tttgcttattactaccaccaccactgtactaccccgcacgacacggcgcgacacggcgcaacgcgacgcgaggaggtgagcgcggatgccggcggacgcggcggcgaaggggatgaagctggagaggtacgcgagcggcgcgggcgcgatgctgctgctgcggcgggcggctgagcggcaaggtcgtgtcggcgtcgtcgcacctgctgttccgcgccaccgtgctcgccacgatggcgctcgtgttcctcttcacgttccactacccgtcgctgctgtcgcgctccttcacgctctctcccggcgccggcgccggcgaggggggagccgaggcgcacgcttggcaccggagcttgcttatgtcgtcgtcgtc

SEQ ID NO: 392989 - DNA, 376 bp, Oryza sativa
aggattttcatctcataatgggcctaatccccctgctggattttcttctcagggtgggtctaatcagatctatggttcggcatactcaggttctctctctctctgcttctcctaaaacaatttcagtttctaataagtttgcaatgttttgcagaaactcgcccatttgatgatcttttgggtataaatactagccattatcaaccacagttagctagacaaacaagtgatatagaatttgttgatcctgctatattggctgtgggtaaagggcggatgcctggaataagtgattcagggctggagatgaaaacctcccatacttttccctcgcagttgcctacatcaaatgatccaaggtttcaattacttatgc

SEQ ID NO: 392990 - DNA, 451 bp, Oryza sativa
  unsure (1)..(451): unsure at all n locations
ggagcgangngntntntcanatcntttcatttcttcaaagggagatgcccgaccggcaaatgtgaatgtgaggatcccgtcatggacatccgtggatggagcaatagcaactctaaatggccaaaaactcaacttgacatctgcaggcggtttcctctcggtgacgaaactttggggcgatgacaccttatctctcaaattccccatcaccttaagaaccgagccgatcaaagatgatcggccggagtattcgtccatccaagcggtgctgttcgggcctcacctcctcgccggcctgacgcacggcaaccagaccgtgaaaaccagcaacgactccaacagcggcctcacccccggcgtctgggaggtgaacgccccagctccgccgtcgccgttgtcgttgtcggctgggtcaccccgggtcgcagtcgctcaattttgcagttgttac

SEQ ID NO: 392991 - DNA, 827 bp, Oryza sativa
ctggtggcggtggtgcgcgcgtcgtacgaggccggggtcggggtgatggcgaccaaggtcgggatgatgacctacttcgacccggccaccggcaagccggtgccggtgaccgtcgtggggttccgggagggcggcaacgtggtgacgcaggtgaagacggcggccaccgacgggtacgacgccgtgcaggtggggtaccacggcgtccgcgaggagaagctcacccgcccggagctcggccacctcggcaaggccggcgcgccgccgctccgccacctgcaggagttccgcctccagtccgtcgacgggtacgaccccggccagccgctcgacttcgccgacatgttcaaggagggcgacctcgtcgacatctccggcaagtccatcggcaaggggtcccaaggtggcatcaagaggcacaacttcaagcgagggctgattgaccccacggcctccaagaagccaacagagctctgggaatcggatcggttgccgggacgacgccgggtcgggttgtacaaggggaaagaaagatgcccggggaggatgggaggaaccaagaccaagatcaggaagctcaagatcgtcaagatcgacaacgacctgaaagttgtcatgatcaagggcgccgttccagggaagcccgggaacctcctccgcatcgctcctgccaagatcgtcggcaagaacatccccaagaactagactatttttctcatgtgtttcgtcctgttctgtgagatttgtgatctgttgtttactgaattactgtaaattggagatgttctttgcccatgtccaatttacagtaattcagtaaacaacag

SEQ ID NO: 392992 - DNA, 422 bp, Oryza sativa
  unsure (1)..(422): unsure at all n locations
ggcacgagatctgccgttcacctgatgataatgagctgactgtagtagtttatcaaagacagaaggagaaaattgaccctatactagactgggtaaacactgantttggcttcggngcctgtggtatacacaagctttgttggtggagaagcaagatgaaggggtagctattgctgtagaaactggtttgaagaataccaccgactttgagttggcatctattgatgctatggcagcagcagcccattccctggtaatccctctcgcaatattcagagggaagctgggaattgagcaggcaattgaattgatcagacttgaagaagatcaccacgttgatagatggctgtgagagtctgatgtatatgccgatctcaagtgcaatgtctcagctgttgtgttctttacttcatggcactagc

SEQ ID NO: 392993 - DNA, 394 bp, Oryza sativa
  unsure (1)..(394): unsure at all n locations
ggctcgtgtatgtaagcacgtataatgtggtttttggaggagagccgattgtcaatgggaacgaggcgctgccttatttccctgttgaagaccatgttgatgcctatgcgcgtanaacatcaattgctgaacagttggtgctgaagagtaatggccggcaaactaagagtgataaaagcagtcgtctttatacatgctcaatacgtcccgccgctatctatggtccaggtgaagagcggcatcttccaaggatactagcccttgcgaagttgggattagcattcttcaagattggggatccaaatgtgaagtcagattgggtctatgtggataatcttgctcttgcactgaccttggcacgcatgggacttttagatgatattcctgacaggaa

SEQ ID NO: 392994 - DNA, 754 bp, Oryza sativa
gcggctgttcatggtgtcggagctcgacctgccgctggacctcgtctccaggaaggtgaggaagatgaagatgatttcgccgtccaacgtcgccgtcgacatcggcggcacgctcgcgccgcacgagtacatcggcatggtccgccgcgaggtgctcgacgcctacctccgctcccgcgccgagggggccggcgccgaggtcgtcaatggtctcttcctgaggtatgaggcgcccaaggaacccaacgggtcgtacgtggtgcactacaaccactacgacagctccaacggcaaggccggcggcgagaagcggacgttcgaggtggacgcgatcgtgggcgcggacggcgcaactcccgcgtcgccaaggacatgggcgccggcgactacgagtacgccatcgcgttccaggagcgcgtcaagatccccgacgacaagatgaagtactacgaggagcgcgccgagatgtacgtcggcgacgacgtctcgccggacttctacggctgggtgttccccaagtgcgaccacgtcgccgtcggcaccggcaccgtcacccacatgcccgacatcaagatgttccaggccgccacccgccttcgcgccaaggaccggatcgagggcggcaagatcatccgcgtcgaggctcaccccatccccgagcacccgaggcctaagagggtggcggggagggtgacgctggtgggggacgctgagtgggtacgtgtcaaagttgctccggcgaggggttctactt

SEQ ID NO: 392995 - DNA, 572 bp, Oryza sativa
tgcctgtcccccaattccccacttccccaacccaggcgatcctccgccgccgccgccggcggccggccgcctccctccgccgccacgcagccgcgccccctccgccggacactccagaccccggtgaacctcccctccttcgccggccgccttgcccgcgcccgaacgccacgccaagctcaggatcatttcgtcgatttcgtggattggatggccaaccttggcggtggcgcgatgccggcgggatcctcgggcggcgacggcgaggtggaggccgggttcgcgaagctccagggggaggatttcgagtactacatgcagacctactcgatcatgctggggcgcaacagcaagaagtcgacggtggacgtggacctctccagcctcggcggcgggatgaacatctcgcgccaccacgcccggatcttttacgactttcagcgccgccgctttgcgcttcgacgtgatcggcaagaacgggtgcctcgttgagggcgtccttcacctcccgggaaccacccggtgagctggatttccagatctgctcagattgcggcaagaagtttactttt

SEQ ID NO: 392996 - DNA, 333 bp, Oryza sativa
cttcttctcctcttctctccccttctctctcttggtttctctctctagccatcggctgcctctctctctctctctctctctctctctcctcgctgccccataggtggacgcgggtcaacgggccggtcgccggcggcggcggctgcggcggcgagaggaggtagaagctccggcgatcgcgagggcaggcggcgggttggtgcgctgccggcttcgagttcgagcgggcgggccatggggaggaacgggagcgttaagcgtacgtcgcaatcgggggtcggcggaggcgttcacggtgatatccccgccgacttaccagcacatggcgggagg

SEQ ID NO: 392997 - DNA, 528 bp, Oryza sativa
ggttacctctctctctctctctctctctcctcttctcgtcgccctaatccccaatccaaaacgaatccccaatctcgtccgcgccgccgctcgccgtggcctcccccgtgcgccgcccgccgcttcgcatcccggtgagaagaaaagagaggaggggaaatggagatacagtcatcagggaggccaatcgatgtgctcatggagaaggttttgtcagtgaacatcctctcctcggactacttcaaggagctctacaggctgaagacttaccacgaggtcattgatgagatctacaatcaggttgaccacctagagccatggcatgaccggcaactggcgtgggcccttcagcgccttctgccttctttacaagttcttcaccatgaagctcacggttaagcagatgcacggcctggtgaagcaccctgactcgccttacatcagagctgttggatttctttacctgcgatatgttgcggaaccaaagacgttgtggagttggtatgaaccctacattaaagatgatga

SEQ ID NO: 392998 - DNA, 436 bp, Oryza sativa
gtctgagagcgggaggcctcctcccaatctccccccttccccttccatagttccggggtggcgctcttcagacgcgagcgcgaggagcaccgggtccgcttgccggtggccggcctgcctcgttagccgccgtcccgtccggggcgaaaggaagcatacctcgctcacttccatttggagcttcccccatccgcacgcgcaccagctgttcgacgaaatgccaccgcgcgctctgcccccagtggaggacgacgccggcagggactggtcttggtgtcctccccgaggtgggcctccaccacatcatgtcctttctagactcgcgctaggccgcgcgaacctgtgtgctgtcgcggcggtggcgcaaccctttggcgtaccgtgcctttgatcaacgctgactttgatgagttttgatctcgcttttaccacggga

SEQ ID NO: 392999 - DNA, 558 bp, Oryza sativa
gtgtataacctcatgtcaatccgtaatgttccatgaagagtgatatctacagaagctttcactgccgagaatatttgtaacatctgagaacaaaaccagagtgctttctccgatatcataaaaatattggaagaagagagtttcagaaggttattggtggcgatgtcaaaggcacatagacacaggacaaagtgattgactcaaaatgaaggattcaagtcagaagggttgtttgtcagtgacctgcttgaaatctgactgtaatgttgttggtgacattacttccttcaagcgtgtgattcatggacctgtggatttggtaatactaattgatagtgctctctctgatggataggaataaagcttaccttggcactgtaaacttgtgcttgcaccattgcattaccttatatttttggaatcctggatctttaccagttgaccactgttgaatgctcccattctctggatttctggatggatagctaatcatgacttttccattaccaattttggattttaaaatctggattcgtaacctttatctttaaaaatatt

SEQ ID NO: 393000 - DNA, 433 bp, Oryza sativa
gaagttaaaacccacactttataggtgaacaatgaattttccatatcaccagttcacagttcttgtcccgatgcgagcccttcagggctagcttatatcccaatgttgaattaacaaagctattctaaatttagagattgtctacttagtactatcctatttgaacattgttgcaacattgttacattctatttgccatcacgatgacctggagcttcacaataaaatggttactcaattattgttcatctccagccgagagcctaaaagaagcttcagcccttacttcttctagcttgcccaaaagttccttcatgaactcggatttagtcccatgcgttatgcgaagtatatctgctgccctggttaaagacatcagagcattctttgtgtactcaagcaacccatgaagctttccgaagtatagaactgt

SEQ ID NO: 393001 - DNA, 541 bp, Oryza sativa
gttattgttttggcagaatatacgatcccgggttcaaatccaaagcacactagatccatgtatttgcgtgactccatgaccgcgctactaacttagctaatgaaccgaggtgactgcagatggaatgtgtgagatgcatatatatatatatatataacaacatggatatgtatatgaaaataaatcatgggggccggcaattgatgcaggtgagtgagagatcgaagatccatatatagtgtgtagtacgtaggtccgggctgggggctggggcgatgatggttatagtacaggagggaaaaattagtgcatcctgccctgctgcgtctgggggagaaggccggggatgtaagggacgccgaacttggggatgaactcctggccctggatgaaggcctccacggtgaactccttctggacgtcctggtaggtgagggactggacgcccttccacttggcgcgcttgctcatgtcggcgccggggccatggttgtcaacctccgcgtagtagagggtgtccagggcgaagttgccgttccac

SEQ ID NO: 393002 - DNA, 448 bp, Oryza sativa
  unsure (1)..(448): unsure at all n locations
tgcagcgcgtacgcatgctcgggtcctctttagcgggcgcggcgacggcgccgggggaacccacattgccctccgccgccgccgatggggcggctagtagcgggacaacatctggcgctggtgctggaacgggaatcaactcgaactcggtgctggtggcgctgctggactcgcattacacggagctggcggagctggtggagaaggccctgctgctccagacgctggaggacgccgtcggcaagcacaacgtcaccatcttcgcgccgcggaacgaggcgctggagcgtgacctcgacccggagttcaagcgcttcctgctcgagccgaggaacctcaagtcgctccagtcgctgctcctcttccacggtctccccgcccggctcccctccgggtgcctggtccgccgtcttccaccccnacgctctccggcgaggaggttgagctc

SEQ ID NO: 393003 - DNA, 383 bp, Oryza sativa
  unsure (1)..(383): unsure at all n locations
cattgattataatatcccattccttccttccaatgtgagatttgattagcggaggaaggaatggccgtgacggcggaggtggagtcgtcgccggcggcgacggggaagctgcggtacaactcgccgctggtgcaggtgtccctgatcgggttggtgtgcttctgctgccctggcatgttcaacgccctgaccgggctcggcggcggcgggcagctggaccactccaccgccgacaacgccaacacccccctctactcctgcttcgccgtcttcgcgtcctcggcggcgcggccacaacctcctcggcccgcgcgtcaacctcctcgccggnggcctcaactacccggtctacggcggctccttcctctactacaaccaacaac

SEQ ID NO: 393004 - DNA, 526 bp, Oryza sativa
gttacgtttaccctattggacatttgttcggcaccatggacatcagtgacccggcgagaccctgcttcctggacatcgacaccggcagcaccctcacctggctgcagtgcgactacccctgcattaattgcaacaaggtaccacacgggttgtacaagccagaactaaaatatgcggtgaaatgcaccgaacaacggtgtgccgacctgtacgctgatctgagaaagccgatgaaatgcgggcccaagaaccaatgtcactatgggattcagtatgttggtgggtcatccattggcgtgctcatcgtcgacagcttctccctcccagcaagcaatggcaccaatcctaccagcatcgcatttggctgtgggtacaatcaggggaagaacaatcacaatgtgcccacaccggtaaacggcatcctcgggctcggtagaggaaaggttacgctgctctcacagctcaagtcccagggggtgatcaccaagcatgtcttgggccattgcatcagcttaaaaggaaaggg

SEQ ID NO: 393005 - DNA, 704 bp, Oryza sativa
  unsure (1)..(704): unsure at all n locations
aacaacaaggggaagcagagcattggttgcctattctggcttcttgccaggatggttctccagatgcgtggtacaattctcccaggacacaagtgggatgtcatggttgatctgttcttctacagggacccagaggaagcgaaggagcaagaggaagaagaggcggctctggtggctcctgattatggtgcggttgcggaatatgctgccccagcggctgatacctggggtggagaatggggcactgacgctgcagctcaacctgctgccattccagcacaggctggtgctgactggactgctgctccagctcctgcagccggaggatgggacacggctgctgcccctgcccctggatgggaacaaggcagtgcaccagtcccagcggcagcacccacccctaactggggggagtgagtgaaagagtaactgatccagttcatgggtcagaggctgagtttgttgccgggagcagctggtagacactatttaagtagctttaatctttttacagtactgagttatttagatgcaaatcaaattttgtgttcttgacaatgctgggactgcgaactagccagccttttttttgttacaatctcatggatagctttatttcaagagcaattctgctttgcgaacaaagtgtatgtgtttgcaacaacaaattgatggggttttctcctcataaaaaaaaanaaaaa

SEQ ID NO: 393006 - DNA, 483 bp, Oryza sativa
  unsure (1)..(483): unsure at all n locations
tcgacagattgctgttgattgcccaagaactgtgccagatgtnacctttttccagcaccctcaaattcagaaatctntggagcgcatttcgtatacatgggccatccgtcatccagcaagtggttatgttcaaggaataaacgaccttcttacaccattcttggtcgtattcttatcagagcatctagagggcaacatggacacctggtccatggaaaagctttctccacaggatgtttctaatattgaagcggactgttattggtgtctttcaaagtttctcgatggtatgcaagaccattacacctttgctcaaccaggaattcagcgccttgttttcaggttgaaagaaccttgtcattcgattagatgaacctgtgtcaaagcacatggaggaacaaggaatggactttctttagtttgcgtttcgttggttcaattgcctaatgactcgcgagattcctttcatcttgtaacacgctt

SEQ ID NO: 393007 - DNA, 609 bp, Oryza sativa
  unsure (1)..(609): unsure at all n locations
acttgtgggaggcttcctcctccttctcctaggggagactagacgccgacacctccacctcccgtctcggctccagaagcttctggaacacccttccggcttcaattcccccctgctcgggtcgggtagctcccttccatcatccatggccgacgccaccgccgccctctcagctcggagcaaggtgcaagctttcctcgaagcggctcgtgccggtgatctcgactccctcaagaagctcgctgcggcgctcgacgaggagggcaagggcgtcgccgccgtcgctgctgccgtcaaggacgccaacaagcgcaccgccctgcacttcgccgcccgcgagggccgcacccacgtctgtcacttcctcatctccgacctcgccctccccgtcgaccccaaggacgacgatggtgaaactccactcatccatgctacgcgccaagcccatcttcaaactgtaacctatctgcttcaccatggagcagatccttccgttgcttcttccctcggaggccacgccattgcaccatgctgccggatagggaacctgggaccttatgaaactatttttttcaaagggggttnatgttgaataagaaagngatgccg

SEQ ID NO: 393008 - DNA, 642 bp, Oryza sativa
  unsure (1)..(642): unsure at all n locations
aatgattgcaacatgaattnnaggctnangcaganngaaagatccttgatgatnctcttnacagaaagccgcagattgactgggttgaagaagatatctctncttggatggataagagttacacaagcagcactttggagtgtaacttattaatgcaaaacattcaggtcttagaaagtagtttggctggtaaagacttggtaaggctggaaagagatatccttgtacatatcgaacggctgggagcattgaaatcattcaacgcgtctatctccagggccactctaacacaaacatatgaatcagagttttcacttcctgggaatattattaagcttgatccagagattcctctcgaggagcaaaatgttgtggtaattgttcgaagtgggaaaagtcaagagaggaaactgaaaagaatgaaagcatcagaaaagggctctcgggtctccgtgaaaacaccctcacgaaaatcaaagaagtccagtagtagtcaatttatagctgagtggaaaaactatccaggccgaagaaggagcattgtacgagaacaatcagcattgctggttactatcaaggagtgtgcaaaccttgagaaaataagagaaaacttgttgaaggatgggagtgaagtcagccatg

SEQ ID NO: 393009 - DNA, 475 bp, Oryza sativa
ccccgtctcgccgccggggagaccgggcggccggcgggtcccccaccccaaaacggtggcgggggttagcacgggctgtgcgcggtcgagcgtccccggacgcctcggcctcgtcggacgtggacgccgcgcgcggcgcggcacggttagatttggatccgcgccttgccgggggatcagacgagaatcggttgcgtctgccactgcattcttgcagccagggtgcatcccgtcggggcaattgcaggcgaactccagggcgtcgctgtacgtgcaattcccgccgcttacttgacatttgggacaatcccctgaaaccaccgcccactctagtagaaacccactcctcatgctggcaatatagccggccatactcccattgtgacgctgaacgatcggcacaaccgtgaagttacagcccggtggaatcccatcctcgtgtaaatggtggtcgctgacgagccggacggaggag

SEQ ID NO: 393010 - DNA, 689 bp, Oryza sativa
ggatgatccgtgagattgccatggacagtgctgattcagacctgaagaaggatgacgcaaacgaacttttagtagctcttaaagctgagaaagaggaactagaagcagcacttaacagggagcaagtgcaaactatacagcttaaagaagagattgctgaagcagaggctagaaatgcagagctgacgaaggaacttcaaactgtccgtggccaacttgctgctgaacagtccaagatgtttcaaacttgaggtggatgttgcggagctacggcagaagctccagagtatggatgcattggaaagggaggttgagctgcttcgaagacagaaggctgcctctgagcaagcagcgttggaggcaaagcaaaggcaaagttccagtggcatgtggggctggctggtgggaaccccacctgataagtccgagtcttgatcacctatctatctttacccgacaatctcatacggatcgcgcagattcatatacgtgtaacatgtataaactttttgaatgtcttctacacttttccttttcctttttctttttatcgttttctggcattcgtgttcatttggcgacaaaacaataaggcgttttggcaagcgttatctgatattctcatagaaaattgttagctcatccttgtatcgcattcaattcttattaggtcgtaaaaaagcttgtat

SEQ ID NO: 393011 - DNA, 538 bp, Oryza sativa
tgtgggatcatggccagttcttctgtggcttgttacaagaacctgcataagaactgggccgtcgcaaatggcgaaagcgcgccattgagctcgccgagtccaggcttctgaaggacggctgggccagagtactacgatggcaagctgggacggttcatcggcaagcaggccaggaagttccagacatggtccatcgctggctacctcgtagcccgtatgatgctggaggacccgtcgacgctgatgatgatctccatggaggaagaccggccggtgaagccgaccatgcgacggtcggcatcatggaatgcctgaaatgttttgatagaattttttttttcccaaagagaggttcaatgtggaaacttataggagttttgtccaaacatgaaaatggggttcaaaatttactgtaactgtactgtcagttaggacagaagtgtatacgatagatccaagtcgtttcagagcaattttgtccaacttttcgtatctggcttcatcaatccaacagagaagaagtttttgttggtgaacc

SEQ ID NO: 393012 - DNA, 453 bp, Oryza sativa
  unsure (1)..(453): unsure at all n locations
ttcagggtaggctggtagcttttatggttggttcaaataacatttgctggaaaaatttggctggttggtaagctggttcccccgggggatggagtgagaaaaaaaaaagtaatgcaagagaaaagaaagggaagcctgcaaatttcatcagccttttcagataggaaattccattgttcagatttagtatatgtcaataatcaatggccgagattttaggaagagtctccatagagtcccttttgcaatccagtgcatggtctgttgaggtagttgaccagcaaatggctaatgtgcagtttgtcccttgtgttgtaatacaactaagggtccaggcaatgaattgcttaggacctctgccctgtagctgccatgagcaagagtgaactgtttatctgtagtctgtaccccattgcacaataaatnnnnnnnnnnnnnnnnnnnnnnnnnnnn

SEQ ID NO: 393013 - DNA, 677 bp, Oryza sativa
tttagtttactcagtttggcaccttaataattttttggcccttgacccttaaccggcctttggattaatctggcaggagaagagtatagttaatggagattctgttatgcttgttcagtctgctaactggctggatgtattacttgtggtagttcagaacaagttgactccaagcacctcttccagaggagatgcgacagtacgacaccttgctcgtctgaaaagcaagggttcccggaaaatcatttccagtgctacctcaactaatggaactatgttggcctattcagattgtgtgaaaccctgcctttttgcactaagacataagggtggaaaaaagtttactctagacaaactagagctgccaaagggattgctgaattctcagtgtatgctgttttctattgactcatccagtttgattctagctggccgtgatggaaagatttatgttgtagacattgccacacgggaaatttcaaatgtctttcaacctatgagaaaaatggatggagcttccaaagaaccacctgttacaaaaatgttcctcagtgcggatggacagtggttggctgcagttaactgttctggggatatttacatatttaacctctaggtgcaaaggcaacactggttcataccttgtctgaatgatgggtctgttacattggctggct

SEQ ID NO: 393014 - DNA, 458 bp, Oryza sativa
ttttcctccgtgccagctctgcgttaatcatcttcctcctcgctgtaccaatctcttgctgcgtttggggggagcaaagcgagcgagaggccgtgatggcggcggcggcggcggcggtgctgcacgcgctggtggcgctcagcctcgccggcgcggtcgcggcggcaggaagaggcggggagcagccgctgtcgaggatcggcatccaccggaccaccttcgcgatccagccgggtgcctccgtcgacgcctcgccgctcctcctcggcctcgagggacaggacagagaatgggtgactcttacctataacaaccccaagccatcgaaggatgattggattggggtgttctctcctgctaatttcagggattctacttgtccatcagagagccaatgggttgaaccaccacttctatgtacagctcccataagtttatatttgcaaactacaagaatc

SEQ ID NO: 393015 - DNA, 566 bp, Oryza sativa
gcaccggcaggggctgagaaggaagtggggcccccttccctgacctcctcatcggagccccctcccctcttcgatggaaccaccaggttgtacgttgcgtaccactgcccttacgcgcagcgcgcgtggattgccaggaactacaagggtttgcaggataagatcaagattgtcgcgattgatcttgcagacaggcctgcttggtacaaggagaaggtttacccagagaacaaggtaccttcacttgagcacaacaatcaggtgaaaggagaaagcttggatttggtcaagtacattgacaccaatttcgaagggccagcattactccctgatgattctgagaagcagcagttcgctgaggagcttcttgcgtacactgatgcgttcaacaaagcatcgtactcatccatagtcgccaagggagatgtgtgcgatgaggctgttgctgctcttgacaaaatagaagctgctctgtcaaagttcaacgatggcccattcttccttggccagttcagcttggtggacattgcgtatgttccatttattgaaaggttttagatattttt

SEQ ID NO: 393016 - DNA, 383 bp, Oryza sativa
  unsure (1)..(383): unsure at all n locations
gtcgcgctccacctcccagcgtcttcggcggccagccaccggcggcttctcagcttcgccttcgatgaggacgtcacaaagcagcccgaagtgaaccgttcgtccgggaacagcctccggcggccttctcagcttcgccttcgatgaggacgccacgaagcagcccgaagtgaaccgttcgtccgggaacagcctccggcggcttctcagcttcgccttcgacgagaacgccccaaagcagcccaaagggaacgacgacgacgtcctggtctgggtgaaccggcaggagaggaggctgctcaaggccaagttccagaacaagctcaaagcccaacgtcgtcgtggccaaggacggcagcggcaagttcaagaccatcaacgan

SEQ ID NO: 393017 - DNA, 823 bp, Oryza sativa
  unsure (1)..(823): unsure at all n locations
cgtagtactatttcgcttcgcctctcctctctacctccgtcgccgtccggttcctttctcttcctccaagtaaactcggtctccgccgcctcctccgccgccgcgccgccgattcgcagccatgccgaccgtaagcgtgaaatggcagaaggagaccttcccaggcatagagatagacaccagccagccgcctgttgtctttaagacccagctatacactctgactggtgtaccacctgaaaggcaaaaaattatggtgaagggtggaatattgaaggatgatgcagattggtctactttgggagtgaaagatggtcaaaaattgatgatgataggtacagctgatgagattgtgaaagctccagagaaaggaccagtatttgtagaggatctaccagaagaagagcaagtgggtgcactgggacacagtgctggtctttataacttggggaatacatgttacatgaattccactttgcagtgcctgcattctgttccagagctgaagtcagctttattgagttattcagataatgtgaggggtaatggtgttgaccaagcctcccataatttgactgttgcaactcgtaatactttcggagagcttgatcaaagtgttcggcctgttgcacctctactcttcttacagacgctgcgtaaaaagtatccccagtttgcgcaacaacaaaataatgtttatatgcaacaggatgcagaagaatgctggacccaattggtgtatacactttctcaaactcttacatcagaaccaagtgaacctcctgctggtcnaatgaaggactttttggggttgatcccgtga

SEQ ID NO: 393018 - DNA, 727 bp, Oryza sativa
  unsure (1)..(727): unsure at all n locations
nnnnnnnnnnnttttttttttttttttgaaacaaggtgaaaggtcgcgtgatttgctattaagtgcaaaatttcaatcagtttcaggcggtcacaagtgcttatcatgttacaaggtcctttgaaactcccagcctgaatgactgagacaggttatcaacaggaaatctacgagtatttgattcgaattcgagcatatcaaattcgcacaatgagaaaccaggtgatccattctccagtctaattgctaaattgacataccatgcagcgccggattcgctcagatctcactgatgtactctaaaagagattcgacctcttgcctcagggcagcaactttctgctgctgggcagcaatcctgttctccacatcttgccctcgcaacttcttttcaaagctgtcaaccacagtggaatgccttgtcatgagcttatcctgcaactctctctccttggcaaccaattcctctacctttggccatatctggtaagactgagaggatgactgcagggatgtcaacaatggcttcaactcttttgctaattccttaaactgtgcatcagctgtcttacgagccactttgcatgatttaacatctcctgacctagataactcgtgtaatgaggtctccagtttatcatgagctgctagacattggttgaagatagcctggatttgctggatgatgctctgtacctcatcccaatgcagctttgccagataagaa

SEQ ID NO: 393019 - DNA, 493 bp, Oryza sativa
gttagcaaaaatggtgaattctgattttttttttttttgcatgattcaccactcacttcccccatttgcatttccatttccatttcctgtacataggtagccgagcttttcggttttttttcgtagctcgaaacatttctttcccatctctcctcgcatttttttttggttcttccgtttcggactgctgtttcggttttcacagcagttttggaaacaaatttttaaggaaaaaaaaagttgaaacgatagtagagattctaatggacgctaggtttttgatcagtgcatcctcccgacgcgctccgcggcggcgcgcatgacgccctccaccagctgcggcatgtggaggtcggcaccgccggcgtcgccgcaccccggcgcggacgccgacgctcgccatgtacttgtgcacctcggcgcggatcatctcctgcatcgcggcggcgaactccggggtgaacgggtactgtgtcgtcgaggcggcggcggc

SEQ ID NO: 393020 - DNA, 502 bp, Oryza sativa
aaagctaatgaatctgtccacattgcacaggagattagcagtggctgcagagatacacagctctcggtaaagcttctggtcatatgatcatacatgtaaagctttccttccaactatcatgtgcttgggcttcagcattgttacaaaaaaggattatagtagctattaaacctacacatttgcataatggaagaccataaaaagggtcgcaaaagaaatatgtccacctcggcaatgcaaaatatcagctttgctagtattttcttgaccattactccaagaaaattgaccaagaaaagaagcaatggtagattagtgtttgagcgaaggttgtcatttgttaacggacaactcgtgaaggtgagccatgtcagggcggaggtcttgggtttgcgccccacatcttctccaaaggacctttacagcgcctctggagctccaggtacctatccaggttgaagttctgcctctgaatcagcttcttctgccgagactcaaacag

SEQ ID NO: 393021 - DNA, 788 bp, Oryza sativa
  unsure (1)..(788): unsure at all n locations
ggacaggtagattgcatccttaattaaatagatgaacagaacttcagacagccaatcatctaatttactggtatggccgttgttttacagagtatggcatagcaacaatcaattggtgtttttcctaaacttgcaaactatgactcatgaatattcatgccgaactcgtccagttaccttcctagtttaggtgtacactgaaaatttctggaaaaaaattgtacacgtttatgttctgatcatctatgaaagctgtggatgttttgctggggggcacgctaaccttccgacaatcaatctatctccaggagaatgcaaaattggactggaaattccgtggtatttagagttcagttttgctggattttgaaggtttcttcttcccttgccaccatttctttaccacctttgacaccttgttcacatggccttttaactttttgcctgtatccttgatctgcttcacaacttgttgtttcaaatctttctttggtgaacccttatctttgaaaacttttcccaagttctttgggaagtcatcgtcctcatcttcatcatcatcgtcatcatcaccgtcaacaccaaaattgttcttcatcagatcatctctagagtacattttcatgctggagctcctggaatacccnccatcgatttcaatatcctatccatctcagnatcttttggagggctagcagcaaaagggtcgccaggacccgatcttttgggaantggtggtgggatccacaaaggcatgctttcagaaagatcttgcaaaggaaattgga

SEQ ID NO: 393022 - DNA, 801 bp, Oryza sativa
  unsure (1)..(801): unsure at all n locations
tgggggngggcctttttngntaanaacnccaagntggggaaagggggatttgtcccaagggggattaaagtggggaaacgcccaggtttttccccagtcaggaagttgtaaaacggacggcccagtgaattgtaataggaattcaattatagggggaattgggtaccggcccccccttggagtttttttttttttttttttttgtaaagtaatgacggcttcagatcagcttatcaataaacacggcgttgtcctaacacaggcagagggaattaagaaagctagaccatagcaattactcacccaagaaaattagtccactacaattcaaataaacctaactgataatttaatcacctaaagtcgttacagtgctttccaccaagggtgttcctcggggccaggattacaggagaatcgatggagttcctgagtacacatcagagtacttttgggcatgtccagttagtgaagcatgatgaaaaatttgtcgcgtataatacaggtaaactccaactcactggaagggtcaaaatcaaaggtgagacccttcactggtaggtctgcacaaaccggagaaagcagctttccggataagagggtgaatattcccaacgaaaatctcctgatccaacatggcaatatgggaccagatctcagtagcatattgacgagaaaacgacttgagatagcccaatgtgcagagacaccattgctcgtgccgaatcctgcagcccgggggatccactagttctagagcggccgccaccgcggtggaggtcaagaccacgtcagagcacg

SEQ ID NO: 393023 - DNA, 627 bp, Oryza sativa
  unsure (1)..(627): unsure at all n locations
tttctttttttttttttttttgtaaagtaatgacggcttcagatcagcttatcaataaacacggcgttgtcctaacacaggcagagggaattaagaaagctagaccatagcaattactcacccaagaaaattagtccactacaattcaaataaacctaactgataatttaatcacctaaagtcgttacagtgctttccaccaagggtgttcctcggggccaggattacaggagaatcgatggagttcctgagtacacatcagagtacttttgggcatgtccagttagtgaagcatgatgaaaaatttgtcgcgtataatacaggtaaactccaactcactgggaagggtcaaaatcaaaggtgaaaccctcccctggtaggtctgcccaaaccggaaaaaacactttcccgataaaaaggtgaatatccccaccaaaaatctcctgatccaacttggcatttgggaccaatctcctttccttttgacaaaaacaattgaaataccccttttcaaaaaccttgctccgcccaatcccgcgcccggggatccctttttctaaaagagccgccccggggggaccccctttttcccttaataaggtaattcactggtttcngncacnntcc

SEQ ID NO: 393024 - DNA, 617 bp, Oryza sativa
acaaccaggccagggagggggaatttaaagggaaaaggttaggacccattagccaaatttaacttccaccccccaaaggaaaaatttaagttccccacttaaccaaatttccaaaattaaaaacccttaaactggataaatttttaatccaaccctaaaaagttcgttaaccagtggctttttccccccaaaggggtgtttccttcggggcccaggattaccgggagaattcgatggagttcctggagtacacatcagagtacttttgggcatgtccagttagtgaagcatgatgaaaaatttgtcgcgtataatacaggtaaactccaactccactggaagggtcaaaatcaaaggtgagacccttcactggtaggtctgcacaaaccggagaaagcagctttccggataagagggtgaatattcccaacgaaaatctcctgatccaacatggcaatatgggaccagatctcagtagcatattgacgagaaaacgacttgagatagcccaatgtgcagagacaccattgctcgtgccgaattcctgcagcccgggggatccactagttctagagcgtccgcgacccttaagtaggccaacgatcgtaagccccccc

SEQ ID NO: 393025 - DNA, 530 bp, Oryza sativa
  unsure (1)..(530): unsure at all n locations
nacctgcgcacaaggctgaanccgaaccttagccgcgctcaattgtccactaacatagaaaagctgctcaagctggcataattttagttcctacattattgccattacataatttacagctagattgctagtactatggtacatgctagtatatcacagcgtacatcacaggaaatccccagactggaatggtgtactggctttgatccgtggcttggtgacccagttgaggattgctgctaagaaactgcaatgactggatgtccggaggtggggcctgggggatttgtggaccgctatgaaagggtggttgctgtagatgaggttgctggagaggagcaggtgctggttcctgcaactgcccaaatggtgatatgccaggaaatccctgaagagagctaagtccgaattgctgtgcaatatacggtgcctgcattatatggcttgttgcaagaaattgactggttggagttctcagatgatttggaatgtcatttgatattgtaggggatcaaccctagcggaacttc

SEQ ID NO: 393026 - DNA, 455 bp, Oryza sativa
atgagcatgcacaatatttacaaataaacagcctgaggacacaggttgagactcccgaatggatgattcaccaactcaatttcaggaccgtcttaaatacgacatgcaaccatgctaaaatgacccaatatttctgacctgtgacaaacccacattctcttaacctaacatatgtactaacagcttgcccacttcaagcattacgccatccaatccagttatagatgcaaaatagccggtcaacattaatacagcgctaatcataatgtgccaaacaaatgatggctcaaaaaattatgcaaggtcacatcaatgcacggggccgaacttaacaacttttttactgacaggtttttcttggttcagaagggcaacatcaacaaagctgagtgtttttgatgaaaatctaacatgaggtacattgccagcgcttgcttatatccaggaaattttca

SEQ ID NO: 393027 - DNA, 502 bp, Oryza sativa
aaccacagaatcagtataatatacgagtagttgttatacatggaagaactgggtaacaacatcaattgtctgatggcagtagtaaacaaaataactgctaactgccacatagtactatattctctagtataattaggcgcaccactaaattatttatatatatatagagtagtattatatatagtagtatatcgcaatacttcatatgctgccactttttcttccataagggctaatggcatcttcttcttctcgtgttgtttaatggagctatccactaaaaggtgacagaagcttaaaaacgaaaagaaaggggagctaaacatcctaaaaactacgctgacactccactccttttttcccctatattccgataacactttctttgcttcatgtattctatgatttctggagagggtttcagccacttccattgtggactactttacatcccgatcgccccgtgctcggacagcctgggcatggggaagaagcaggtcct

SEQ ID NO: 393028 - DNA, 504 bp, Oryza sativa
actcatgataacagcaagtgaggatgctatatatattgccatagctagcaagataatcagtttcggagttttcacaggaacatatttgttcccgtatactcaaacaccaggtagataatggcatcaagaaatccaagggaaggctacagactgcagacagaagaatgggactgagggtgagctgaaagcctttcaaggaaaggctacagagtgcctgaatgtcagtccttacaaggttgatatcgatttattcgaccagatgctcctaggtaaatactttcttgtggaaaaaaaaaaaaaaggcggccactcaccgggccgatcaatcatcccatcctgttgcagggatttttgaaacatcacaccattcaggaggaaaggagtacttcgctgcatacgcatcttggagtttgttgtccttggctggacattgctcaggctgtaccatcttgctcaacatgttcctcttcctcagccttctgcttcaggatgaactcaggagag

SEQ ID NO: 393029 - DNA, 444 bp, Oryza sativa
tttttttttttttttaagagaacaaatgcataagtatttgtatttcaaccttatttttgatttatttatacttgggaagcgcatatattgggcagcagcaagcccaatcaagaagcattacatataatcacgaaaacaagcttgtgtatataccaatgttacacaatcatcatatatgagtgcacaagtcccacggtagaattgctccattgccgagtataggactagtagtgcccaccacctcctccggatccatacccgtagccagagccagaaccatagccagatcctccgccttggccgccgccgcctccaccaccaccaccgcttccatatcctccaccataagcaccgccaccttgaccatatccgctgccagatccatagcctgagccgctaccatacccaccaccttgaccgccgccgccaccaccaccatgtcca

SEQ ID NO: 393030 - DNA, 561 bp, Oryza sativa
tctagttctagatcgcgagcgccgccctttttttttttttttgtcaagagtagtatctttattgagaagcaaaagcaagcggcaaaaccattacacactgcttgctgggcaccgtcccatggccgaacgtgaaaaacatagcccaagagagtagtacaatttacagcagcagtagcatatctccctcaattatacactcaccactcatcgtcacagcacaagcactaggtttttggtcatgctaaggaatgaaatttctccagagctagcacctaaaacctttttccgtttcggaggaaatcagctcaggttttctgacgtggcatggttacaacaaggtttcttgcttgtttctgcaagagaaaccagtcatgggcctcatggaggttcaccaaatttacaatgacaggcttggaggccaccagaagatgtcggtgaaggcttttttttactggatgatcattgttcacagttcatggcgcggattgctgatgcgaagagatcaatcttccatcttctctttgctcaagcagtggttgattctgcaagcttcaatggccc

SEQ ID NO: 393031 - DNA, 848 bp, Oryza sativa
  unsure (1)..(848): unsure at all n locations
nnnnnnnnnnnnnnnnnnnnnnnnnnnnnnnnnnaaggggtttgcctatgacctgaattgggcgggccctatcaaattgatcgaagaataatttgggttgattctgaaaataacatccaaatcagtatggcaacctttgccctacggtaaatgcatttatgtctgcaaacaggctacagcttcaccatggacaatatatgatggaagaacgcgagattgtatactgatcaagatacaaaataagctggagttactactgtcagtaggtacaaataatgtccacatcagttgccagccaacgacataattgtacaccggtcgtattattgtgagctgctgcgcacaaacaggactggaagcctgatggatggagaacgtgttggtggtaatggtatacatcaaagccacatcgtgccggactgctacatgggccacaactctttcacaatagttttctaaacagattgtctccaatgttatctttgtcaacaaattgtgttaccaggctcatcatgcatgtaacttaatattgtcaattattttttctcttcgccttcagaatccgactctgcaaatacaggtttcggctgagtttgggaatatgctggtgcaatgaactttggatctttctctgcagcatctgcatacttcaaaattgcctctcttggatcctcgtccatccatgtctccttaatcaaaccaccctccttcaagaggtactgtgtcaacaagctgccttttgtagtaccgactcttccaccaaagccaggaccattgactggagcttcaggtttatgtgatttgagcgggtctttcagtatcttctctctttggcgtttccgacttgg

SEQ ID NO: 393032 - DNA, 556 bp, Oryza sativa
cacatgcattggttgatctaaaaaaacaattacaattgtgtacctgtctctctatataaaaaggggaaatttaatacacttttatttgccagccagattgagttggcaacgaattcttaacaagaatgacaaaaaaaaaagggaaaatgaaaagagaaaatatcatcgagcttttggtcgctgttaaaaaaaactcgacacgacattacttgcaaaattaagcctagtaattagcggtagtagtatgctcgtcccttctacaaacaggcgagagagagagtgagaaaatcaaaaacgataaatggcaatgcgcgctcgatcaggccgccgtgcgaacggctcagctagcagcgcggcatcttcttcttcttcttcttcttcttcttcttcttcgtctactgttgcggctggcccgccatgctgaaggattggctcttcatcgccgtcgacttcttcgccggctcgccgccggcgccggcgccggccatgctgaacgattgtccgcccatcgcccttggcttctttgccgccggcggccgctcgtcggcaggtactt

SEQ ID NO: 393033 - DNA, 1360 bp, Oryza sativa
  unsure (1)..(1360): unsure at all n locations
nnnnnnnnnnnnnnnnnnnnnngaacaataattcgcatcttcacggctttattgatctataattctatattatcaaatacaatgcttttatggagatgcatattcaggctacaaccagcaataaggtgcacataatttttgtctatactgtcaaggaacaacgcataggtagcttgctccagcacctcagtaatttacagttgctttgatagcgtccaggaccttgttctttgtgggcatgtaaaatgtttcataaacaagagggaaaggagtgtccaggccgcatactcttgcgacgggcgcttctaacctttggaagcagcgctcggtgatggatgcggcaatttctgcaccaaaccctccgggtgattggagcctcatggctaacaagaagttttcctgtcttgctgacagaggcctctactgtttctttgtccccatggaatcagtgttcttagatctatgagctcacaagatattccatcctttgctgcatcttcgcatgcttcttccagtactgcaagttgagctccccaaccaattagtgttatatcacttcctttacgaatcacctctgcctcagacaagggcagcatataatcctcctctggaacttcttcaacagccaaacggtacaaccactttggctcaaaaaatacgactggatttgggtctctaatgcttgccaacaacaatcccttggcttcacgtggacttcgaggtatgattaccttgagtccaggaacatgacaaaagaaagcctctggtgactgtgaatggtagtgaccaccatgaccgacagcgccataaggtgatcgaatcgttaatcctccacaggttaattcatttccacctccggtatcctaaatttagctgcttcattaacaatctgatcaaaagctggaaagatataatctgcgaactggatctcagcaatagctctattacccattgctgctagaccaacgncaaatccagcaattccctgttcacacaacggcgtattgaaaactctattcctgccaaaccgatcagcgagccctgttgtgcagcggaagacaccaccgaaacccacatcttccccgaagacataagagcgcgggtcggtgtcgagggcgatgtggagcgcctggttgatggccgtgaacaggttcacctccttccccgctcctcctcccaccttcccctccgccacccccgccgccgccgccgccgccgccgccgcgtcgccggagaagcatctcctactcccaatccccgccgccgccgctctcctgatctccctcaaagacttcgccgccatgaacggaaatctcgcgaatcgatcaggctcagctcgaagtaggtggagaaattctcg

SEQ ID NO: 393034 - DNA, 609 bp, Oryza sativa
  unsure (1)..(609): unsure at all n locations
aagcaaccaatcatatgaattccacaaagttcaatcgttcgcggtttgtcccataccacactgaaatatcatataagttataacaatatataatatcttctcatcagaaagtaagcggataacgcgcttaaccaaatttcagccaagctgctaggagactccataccacgctgtctgatactgaaccattaagttcacaccggtactcaataatatcccggaaacagaaatccagtcctacaaacacccgaagggaaaacttgctagtcctttttgtggttcccgttggtagccggtgacctggacctgtctccacgcctcctgtgagaatctctgtcatgtggagagctgccccgacgatcccttgagcgcgagcggtccctgcggcgatccctcgagcgagagcggtccctgcggcgatccctcgagcgagagcggtccctgcggcgatccctggagcgtgagcggtccctctgacgatctcttgagcgagatcgctcccttctgcgagaccggtaaggtgatgggctcctggaacttctttgagagcctctgcggccacaatattttncaggtggaggagttcttctcccgagtcttttagctttt

SEQ ID NO: 393035 - DNA, 390 bp, Oryza sativa
gaacttagctactctcagtaacttctgtgagttctcaaaataaagtacagattacatctctattacccatgcgccatggtcaactccaaaaagacacggatattttcatattctcagatccaagtaccttcaaaacgagcacctgaactgcttactaccaagggaatggaggaaagcatcttccatcaaaaaccatcaactactacatgatcaactcaactcttcataggcagcaaaaagggaatgccaaggcgctaatacttgggatgctcatacccatcgttcttggtcttggcctcaagaaacgaggcactcgccttgtccaaaaaccaaaccaacttaccgtccgttggctgaaccattcttgcaggaattgatggagcatcagga

SEQ ID NO: 393036 - DNA, 489 bp, Oryza sativa
  unsure (1)..(489): unsure at all n locations
nnnnnnnnnnnnnnnnnnnnnnnnnnnnnnnnnnnnnnnnnnnnnnnaagcaattagtaggtctgcttatacttttttttcttgagaactaggtctgcttatactcctttacagtttacacgctagatatcagatacactagataacaatacatacttcaggaagcaggtacagatatcagatattgctacatactacctagcttagctagtcatcaggcaggttgcagtatgattcttggtccccatgacttgcttaaatcgacctctgaactcatccaagatgtctggtctctagggtgggacactagatagaaagactagcatggatacaaacctagacaacactatacaagttttctcaaggattacaggaagttgttctgacagcttcattcgtctacacataatctacatgtcagttttggaagccttctcagaatcagctagcaggaaaaatgaaactagaagattaatcaagcacaagttc

SEQ ID NO: 393037 - DNA, 510 bp, Oryza sativa
tttttttttttttttttttgaagtacagaaatcttctgacagtactaatccatttatctgaaagatttgcgtggtacaaaaaaaccacacacacacaaacttgatacatcggcatgcaacattagttgcagctcaagcttctccctcaacatgacaataacagaggaagatataactaagaaaaataaaattttacagacaaatcgacgacgacacagtcacatcactaggggaatgcagagaccgtggagggaagaacacgattcttaaacctcctttcctcctcttctgacaccgcctctcgcaacacccggacgcacatttcccgccatataattaacccgaggctaattataaatctgtaattaccaatttaccgcaactctgcactgcagcttcttgcaggagatgtggagagagctgtaattaatttaggagtagttcaccagggagcggtacgtcacgccgggcttccagctcgccgggatgacgttgtttgcgacgagcacc

SEQ ID NO: 393038 - DNA, 619 bp, Oryza sativa
gaagaaagtttcactcaaaagtgaatcagatatgaatcagtactgcaagaaataagtatgtcttgtcatatcaattttttttaccacgcaaagaaatattttatttaccgctctaatggatcgttggatgtattttgactgccttggccatctggtggtgttggtacggcacccatccaagctccatatggggaaacaaatgaattactctgcagtggaggtgctgtccaccaacttggaacagccatggcttcaccagacagagggaaggcgacgccggccttcacctacaccacccccaccaaggaaccccgggaggcaaagcttgagccgttggaggagcaatctcccgcttggatctatggctcatcacttgaggtttgaggagatatgaggattagggatgagtttcaggaagactgagcgacaagcggtggatttatggattaggggcaaacttggcttgggtctaccgcgggaataagagggtgatttggcgcataaactacgcgggaagattagcagccatggggatttggcgccctagagaagaggagagcgcgcgaggaggaagaccaggggcgtgcagggaacacccgatcccctttggcgagaaaac

SEQ ID NO: 393039 - DNA, 1114 bp, Oryza sativa
  unsure (1)..(1114): unsure at all n locations
nnnnnnnnnnnnnnnnnnnnnnnnnnnacacacacaagccaccgctatcttttatttgagtcgtatagttttaatacaatgaacatacaaccaggcaccggtgcgaactcctgccacagcaattctcgaaaggattcaaatcccagtcggttatcctcaataatcacaacaatcccagaatgtatttggctccaggccttcaggggtgggttgcgcctccctggatatgatcgctcactggtggggggttgaccacagggatatccaagctgccgccttctgattctggggagacctcccgcacatcggcgatcaatgcttccgactgctggaaactaccccactccgcatcaccgataggacggatgtcgaccccatccacggccagttggacttcagtgttatcattggaaactaggacagatcttgagtcactcacacaagctttgtcgacatcgtcatctgatgcatcgacgtgctttgtcaagggaggggagttatcggtgccggagcatgattcagatctctcttcgcatacctgcttcgtgctgctttgctctctctggacttgtgattgaagaataccaacaagggatagaagctcctctttttctttctcaacagcatgtaacttttcagcagcttcctttatccgagctgcaagcatctgcttcagatgcccttaccttctcatctgctctggcaatagttgcttcttgtattactgcttgctctctagctttccctagctcagtgcgccacatatgagcctcctgaagtgcagcatctctttccttcagcaattggtccttctctttactcaagctaattaccttttcttcagattgtcttagcttgagcatggattgttccatttgtctttccattgcttgtcttaggcgctcgatctccgaacatagaagtcttctctgttcatccatcgtatgggctgcagaagcagcagcttccgcagcctctgcagtctctgttaatttatttgctatttccttaattgtagcatcccgagcacgaatatccttggccaaattctgcaactcctcatctttcacccgaagagtctcctgaggaatatgaaaagtagaaaattgacaaa

SEQ ID NO: 393040 - DNA, 822 bp, Oryza sativa
caggactaagttaaataagacagtacgaaaaaaacgacagcactatgccactttggtatgttcaggtctttgttagccgaatatacagtgaggatgtaacaagggggcaatgctgactgctactgctaggagaacaattatttggataaactttcttgattgttgcattagcatcctccacgacaccatttttaccgacataattgtcttgtctgccgctttgtagtttttattgaggattctgcttagtacaggacttgcctacgaaattcatacctaaaaaaccggagggaaaacttacctaggaaattttgaatccaaggaccacattttcgttcgctacccatcaaggtagtgcattcacaagcatcaagcctttcagttttctacagaataggctcgctacgtggcatgccttctacctgctacaaaaacctaaagtacacagaattagcctactcgaagatggcgattctcccttgagcgccatggtccatggtcgcttcctctaatataagcagctgcaaaattagcaaaataatttctctgctgaatgactccagctactatttcttcagagccaattcgagtagtcaaagtcgcggagcttcctaaagtgcttctccacatcttgcctcgactttgcccactcctctctttggatcacagtggtcgcatcgtcccttttggtcttgtcaattattctgaatgattcccctccatctcgtatgagtagcaagtcatttctcctgtccctcgtctttcctgcagggacactaaccacaacttttgctctcgtgattgaccttgcccacgcgtaca

SEQ ID NO: 393041 - DNA, 636 bp, Oryza sativa
gttctggtaaacacacgctcaaggggcaatcaacaaaatacagtacggtatatcagtacttgcacaacgatttctttgaaagggacatgatattcatggttcaccaatgtgatcgagtctagcacagcagaggacacgaaattgataggtcccggtatcctcagaactggaacatggcatacaagcaggttgtaaaacagagggcttccgaattttcgccctcaagcctcactggagatatggtacattcaggaggaatctgcagcggccggtggtggtgccggctgtgcttcggcgcgcttgactgatgcgcatttgatcagatggttgtagctccctttctccttgaaaagttgggagaaatggtgcttgcagtataggataccttccaaagctgcataattggatggcgaaatggcacagccaccgtgagaacatttgaagcaggacttgtggtaggcctgtccttcaactgtcaccttctctagaggatacgctgttttactgcaagtggcgacacttctcctgtgtcccctggaaaacatggcgtgcggctttgctaggtgatcttgtcagctcaggagtcagcttctcagatgcgggtttcgcgggtgattggaagctcttgttgaacaa

SEQ ID NO: 393042 - DNA, 425 bp, Oryza sativa
gtgtgaaggatcaaccagccggggttggtggtatcagacggtcacgcgctgttcatgctgaagctgttctgcctgttcgcgcgcacgcccacgccggcgccgacgttggcgccgacgttggcaccgacgttggcgccgatgcccgcaccagcgccagctccagcgccagcgccgacgccagcgccgacgttggcaccgacgttggccccgatgccggcgcgagcgccgactcccgcaccagcgccagcaccagcaccagcaccagcgccgacgccggcgccgacgttggcaccgacgttagctccgatgccagcgcgagctccagcgccgactcccgcaccagcgccagcgccagcaccagcaccagcgccgacgccagcgccgacgttcgcaccgacgttagcaccgatgccgggcgagcgcca

SEQ ID NO: 393043 - DNA, 434 bp, Oryza sativa
  unsure (1)..(434): unsure at all n locations
atataaactccttatatttcttaatatatcacagtaggagcctctcatgctgtttctcgtaaaaaaaaagtgaatgtaattatttgtcatcgtcttggaagagactacggttcaacttgtggtgagcctcccgcatctccattttctcacacgtggtggtggccgccgcctcctcatcctgtgacgtattgctggcattggtgccatgtgtggtgagctgagggttgtgcattagctcttcgccatccacaaccacatctttcatcatctgccagtccctaaaatccgtcctcattataaaatggatgttttttacctttccactagctatgtcttctgccgttggtgcatttcttgggtatacaatatgacggccatcaccatccacagttatttgtacccttccacattaacangatttgacaaagtattta

SEQ ID NO: 393044 - DNA, 549 bp, Oryza sativa
tttttttttttttttctcttgaacataatgtgcagtatatgcacatcgatcagccgtatacatgcaaatatttgcattagccataagccattacattaattagtagcagtacaaaactcggttcgtatgaaacaaccgatcgatcgaactcgacccaatttcacgtacttgatcgaatacaaattaaactgaaaattagcagtacaggtcaaaggtgatggtatactagactggtaatgcgccgtacgtgtcgtcacacattacgcctagccgtgcgtggttattgcgctatccaattccaaacttgtacgtggacggacgagcgcgtcgatcggcgtcgaccttgccaccggcttacttagggacatcggttgcctttggctccgtggcgggcttggccgcggcttcgtcggggtcgctggacttcggcttgacctttcccttgccgcccttggcgcgccgggccggggccgccgttgtcaccgagcgcgggcggcaggatggcctccctgacctccatgaaggagatggcgtatgggcgcgcggcga

SEQ ID NO: 393045 - DNA, 512 bp, Oryza sativa
caaaatactacaacataaccgaattctgatctgctgtatactgcatacaaggttggttatacacaagctgagaagctttcagtgtgacagcaatccgcggataaaatgaggagaatgataacgatcaccaagaagatagccaagcaaaaattacatcaatcaaggaaaaaacaatttggggataaatggactccaggaaaaggtaactgcagttcgagagggccgaactgatcaataaacatcatgcagcatacattaattcccaccagaatttattcagcaggtagcttttctttgagatacttcagaattgctttcgttcctcgctccagcagagtccgccgtatgctcctgaggggatttccatcaagtttcaagacttgcaggttaggctcaagcaaacccagctcaggtgggagtgttgttatattgttgtccgacagatcaagctcaatcaaagaagttaaatctttgataccctctggcacagatgtaagataattctgactcag

SEQ ID NO: 393046 - DNA, 690 bp, Oryza sativa
ggcaattcgctgagctcgacatgcgccgtcttgatttttttttaaaacacaacacactttgttaaaccacagcgtttaggggaattgaattccccaatacattcgcccaggataaacataagagttggaccatatttaacaagagagaggtcaactgaaaaaaagaagcaaactttataatgaaactaagcagcaatgaaggagcaaatcgatagggtactgtggcagggccgcgacaattgcatccaagggcctctattgatatgtactccgcttgacgaactggtaaaccccttcggctgcctccacggaaacgacacatatgagaggtttggtgcgaagccttagattttggtgtgagcatcaccggactccacaaaagatttccacggggttcatcattgaatctgaggagcttggactgcaatcctgcaaaccaaggttgcaaatccaatctgggctcaacccgaaacgataaaccctgcatggttagtgctgtgagacaaagaggaagaacttccccaaatccagccaaccaatgactcaatccaaagatggtggcgaagcaattcgctggcttggtaacacgatggagagggttgaagaagaggagaccatccataccggcatccaggccagcactgcagtcgcatccgcaccacagcggtcgttggcaggccgcattgggca

SEQ ID NO: 393047 - DNA, 673 bp, Oryza sativa
  unsure (1)..(673): unsure at all n locations
nnnnngnnnnngnaattgtaatacgactcactatagggcgaattgggtaccgggccccccctcgagttttttttttttttttttttgacaaaattcaggtggggaagctctcccccctggtgatttagtctaaacaagtttgatggtaaattcaacggtgtaataacacgacaattttgatctcctatcgcagaggcagtaggcaatttcccaccaacaacacaacacatgacatcttcagagattattattcatttcccaccaacaacaacacatgacatcttcagagattattattctggacagaccgtcttgcggcaaaagttagaagacgtcaggattgaagtgcccggggatggagttgttctgctgagcctgcttcagatgcatcgtcagcgcatagttgtttatctctagggtcctcagttgctcctggtactgcacaacaagttgcttcaaactctgaacctcctggctcctctcgtcgaactccttttggcgctcatgttgaatggcgaccgctcgcttgaggacagcgtctctcccacacaacgtcaatggtccttaaactcatatttcctttggaattttgtgtgcatcactcctgtccccccnantgaatctccaaantctaaccctgaggncaacccccctcccctttnaaactttnttt

SEQ ID NO: 393048 - DNA, 1210 bp, Oryza sativa
  unsure (1)..(1210): unsure at all n locations
nnnnnnnnnnnnnnnnnnnnnnnnnggcgatctggaatcatcgtcatgatgtcattttcaagaaataaaccccctcgattggatcctgcctgcaacgttgcatccgcgaggcagctctctgggcagagaatcttaagattgaagaccgacatgtagtctccgtttggaaagaaattttctcctccccactacaaactctaaatatgttgtaatgaacttttcatcctctatgcaatgacaaaattcaggtggggaagctctcccccctggtgatttagtctaaacaagtttgatggtaaattcaacggtgtaataacacgacaattttgatctcctatcgcagaggcagtaggcaatttcccaccaacaacacaacacatgacatcttcagagattattattcatttcccaccaacaacacatgacatcttcagagattattattctggacagaccgtcttgcggcaaaagttagaagacgtcaggattgaagtgcccggggatggagttgttctgctgagcctgcttcagatgcatcgtcagcgcatagttgtttatctctagggtcctcagttgctcctggtactgcacaacaagttgcttcaaactctgaacctcctggctcctctcgtcgaactccttttggcgctcatgttgaatggcgaccgctcgcttgaggacagcgttctctcgcagcacgcacggtcaattggctccttaagcatcatattttccttttgcaagttttgtgctgcatcagctcctgtacgctccacgattgacttctccaaaacttctaaagctcttgaggcgcgagcacgcgcatcgcccatgtcagatgcatttgtcatctctctgacaaatagctcaacccattcagaaccattattacctgtctggcaactatctgcagcagctgggtgttcattagctgtactcacaccaccattattaacaataccttcaacagacggataaactgctgtcgggagcccattttcagatttgcaaccagtagctgataagatagcctctgtagactccaagcgcagattgtttaaactctttattgctgaatccaaatcatctccagaagcatcaagagctccttcgagcaactggggatccatgcccgggaacaaggaggagaggtggtggaggtggnctcccggcggcggtgaggggagcggcaggacctcttggccggatg

SEQ ID NO: 393049 - DNA, 459 bp, Oryza sativa
aacaaaaacatcaggggtttaataagataaaacggaagaaaagctgccatacaattatttagtgcccatccaatactttggctagataatctttctgataggaagagcactgctacagaccaaaggatgaactgccccgaaagggcatagcatgagtacagcagacccattacatataacgttaaataacaaatacataaatgaccgtcttcccattttactgccaaatgatgccttcgaaggctcatagatgaaggaagggttatattggcctcagtcctcagaagtacctttccatgaacccgagttaaatataatagaggtgaccaacatcagttaaaagaaacacatgtagtagagggaataaactttatgcaatggaaattatgaactaatgctcacggaatcagtgtcagctaaaaaaatgggtcgctatgtattaatgtgatctaaattaga

SEQ ID NO: 393050 - DNA, 419 bp, Oryza sativa
ttgtgtttactcgtgaaatcacgtaaatatataatttctgaaggggcagaattcacgtctgttgatattctgtgatcgtctccatgttttttcgttatccacttagtttacatacataacaacagatgcctaacactgttacaggagaacgttaaatgctctgtttcttcaacagtatcatgctggcacaccattcaactcttctgggatctctttgctcagcactggaaggtgccccttctcctggaggctcttcaccgtctcgtagagcgagtcgctcacaggtatgaagtggaggccaagatcctgcagcttcttgttggacatcttgtacggctgcttccgtgggttcacctcctcagagcaccttgtgggcacaggatactcggggaaaagcttgccccggatgtggacgacgt

SEQ ID NO: 393051 - DNA, 927 bp, Oryza sativa
  unsure (1)..(927): unsure at all n locations
tttagggctctttggcgcacgggcggcggcgttcggcggttcagggagcggtgtccggcgccggagcttgcagctgaagaggcggtatcttgctgaggctacaacatcgattttctccatccactcatctcccaaaaccaaagggaggctcggtgtgtagtcaaaaattgaaggagagggagggacagggtcacgggacagtttgcatggcatgatccatattttgctaaggttctattagagtgtcattccgatggccccatttcatggacttacgggctttcatcctgcgtgcacgtgttttaaagctttataggcaggccttgcgcatgactcgccgagctcctgtgcatgcacgcgatgagttgaggcaaactgtaagagctgagattgaaaaaaatcggccgttgcgacgattaacagaagattaagttcttgatcagtgaaggtctgcaacgattaaaaggtcttgatgagatgcttgacatgacaggaaatagttaacttgagtttcatgtgggaatctactgttgtattcaattctctcatggatccatgtagttatataacacactttaccctttacaaagggcaagacatttgttgttctctagtttcatctgcggaacctgtacaatatttggggctggattggggttaggttggctcagaactacagatcatggaccttttctagaagtcagctggtttccacaccaagatattttggttaattgttttctgtaactttcttatcaagggatgtaaagtcgaggatagttctgtattttttttctcacacttaacatagaacaggactgaaggtttttccagttttgagctaattggttttcaattgtactatcctttcatgtgaaattacgaacagaattgatnccattgaaattaaannaaaaaaaaaaaaaa

SEQ ID NO: 393052 - DNA, 494 bp, Oryza sativa
cacgggacagtttgcatggcatgatcatattttgctaaggttctattacagtgggcggtcaatggcccatttcatggatctacgggctttcatcctgcgtgcacgtgttttaaagccttataggcaggccttgcgcatgactcgccgagctcctgtgcatgcatgcgaggagttgaggcaaactgtaagagctgagattgaaaaaaatcgccgttgcgacgataaacagaagattaagttcttgatcagtgaaggtctgcaacgattaaaaggccttgatgagatgcttgacatgacaggaaatagttaacctgagtttcatgtcggatatgaggttcaatttacacggaagctgggtttgcatgagctcctgcaaaacattcattgctctgtgacctcctacacctgatatttccagaacccataaggcatcaagccacatgaacttgtggcctcctgggattagagtttgttagaacgggcccatttagatt

SEQ ID NO: 393053 - DNA, 567 bp, Oryza sativa
cttgcctcgacgactttctctctccttttctccgttcatctcgagcagaggagaggaatggattcctcctccacctccgggaggaagggaggaggactcctcctctcgccgccgccggcggcggtagttgtggcggtggcggtgctcctgtcggcggcagaggcggcgacggaggagccgtgctacccgcggctgttcagctttggggactcgctgacggacacgggcaacttcgccttcatctacggcaacgactcccgcgagccggcgctccgcccgccctacggcgagaccttcttccaccgcgccaccggaagattctccgacggccgcctcgtcgtcgatttcatcgcggacgccctggggctgccgttcgtgcggccggacttgagcgggcggaccgcgggggactccgcatgcggggccaactttgcggtggggcggtgccacggagctcagcccgtcttttttccggcgagaggggtgcccatggctgacatcgtgcccctcgcctgaagatgagtgcttcccgatctgttgaaactgtctgccccgcgacctgcccgt

SEQ ID NO: 393054 - DNA, 472 bp, Oryza sativa
cccggcgccatcgcctcctccctcctcccgccgccggcgccgccgcctcgcctcgcctctcctcgctcatcggcgctagccatgcgccgggaagaagcgcaagtccgcctcctccgacaagcagccgaagcagcagcagcagcggctcccactcggcgccgacgccgacgcggtcgccgacgcggcgaagcgccgccgctcgggggcgtcgaagaagcaccaggcggaggagggaggcctccataccttcctccctcagcgccaagatcctccgcgaggcgctcacccagcaacaggaggagtccctcgccgaccagcgccccgccgacgtcgtcaccgtcgatccgtccccatccttctccttccccgtgcccaagaaagatggcgaggaggacgaagacgatgatgacgtcgacgagttcgatggcttccacgcgcaaagcgagtccaaccgagcgtgcccgagattgat

SEQ ID NO: 393055 - DNA, 593 bp, Oryza sativa
tatgtgagagagctaagaaggaaagaaaggttgacacacgtcaatcggcaggtgcttatcacggaactactgtgcgtcaagaggatcatggacacggtactatcgcagatcgaagtggcagtcgtgaaagagagataattggctttatatgagatgactatgaagaactttgcagtagtgaggaaaataagcaatcatccaatatgctaataccagagttcagcgattacttcagtgctgaagagccccagcaccaagattctgttgcaaaagaatcgtcccttgatgacatatgcaacgcattcagcgggatgcacctcagaggagatgcatatcttgatcctactgagtccatgacttgtccggggaatagattgatcattgctaggaggaggagaacaccggaagaggaggaatatttgagaggttttaacccaagggctccaaattttgttcctcttgaactggacccagaatcagaaaaggtggacctcaagcatcagatgatggatgagcgcaagaatgctgaagaatggatgattgactatgcacttcggcgagctgtgaataatttatgccctgctcgaaagaag

SEQ ID NO: 393056 - DNA, 534 bp, Oryza sativa
tgcatcaataaagttgtctcacgatggcctatgatggagatgaggaacaaagccaggattatctattcaagattgttctacttggtgactcttctgtcggtaaatcaaatttgctggcaagatttgcaaggaacgagttctatccaaactctaaatctactattggagtggagttccagacacaaaagttggtaattgatggcaaggaaatcaaagctcagatatgggacactgctggacaagagcgcttcagagcagtcacatctgcctactatagaggagctgttggagccctacttgtttatgatattagcaggcgtcagacttttgatagtgttggtcgatggctgaatgaactgcacactcattccgatatgaatgtcgtcacaattcttgttggcaacaagaccgatctcaagcatgcgcgtgagggtgagcaccgcagaaggcaaagctctggctgagtcacagggcctcttcttcatggagacctcagccttgggcctcatcaatttcggggagttttcccaaact

SEQ ID NO: 393057 - DNA, 547 bp, Oryza sativa
ttcaaaatctcaattccagacattggtatcaaaagcagtttctgaaggatggctcgactcttcgtttgtacatgtaggtgccaatggggatgtccaagatgatgaacatgagaagctgaggaggtacaagaaagaggctgtttctatgattcatgagtactttctctctgatgatgtacctgagattattcgcagcctcaaagagcttggttctccagagtacaaccccgtctttattaagaagcttataacaattgctatggaccgcaaaaacagggagaaagagatggcttcaattcttctatcctcattaagcatggaattgttctcaacagaagacattgtcaagggtttcataatgcttcttgaatctgcagaagataccgcacttgatatattggatgcctcagatgagctgggactgttcctagccagagcagtgattgatgatgtgcttgcgcctctgaacttagatgagataagcggcaagcttccaccaaactgcagcggggctgaaacattgaacatggcgcgctcccttgccact

SEQ ID NO: 393058 - DNA, 684 bp, Oryza sativa
tcgtttatctttctttctcttcccatcccactcccttccccacacgctctccttccttccttccttcttcgcttcttccgacgccacttcacctctccttcctccctccctcgccgccgcgggctgcttcctccctccctcccgccgcgtcccgccattcccggctgattactcgagccgccgcggggcagatccgtgccgggataggcctctcgctcgcgcttcggtcccccgtctcttaccggcggataaaccctaaccggagaggaggaggagggggaggccatgagggggaagaagccgcacaaggagctcaagctctccgtgcctgcgcaggagacgcccgtcgacaagttcctgaccgcgagtggtacattcaaggatggtgaactgcggcttaatcaaagaggtttgcagcttatatccgaggaaactgcagatgaacctcagtcaacaaacctgaaggtggaagatgttcagttgtcaatggatgaccttgagatgattcaagtcattggcaaggggagtggtggtatcgtccaactagttcggctacaagtgggtggggacattatatgccttgaagggcctacaaatgaaacattcaagaggcagtgcgcaaacaaatagttccatagctcaaattacattaagcacacataactcacatatagttctttgccc

SEQ ID NO: 393059 - DNA, 510 bp, Oryza sativa
gcgttctgcgaggaacacacacacaaacacaaacagaaaaacacaacacattaagctagctagaagaagagagaaattaaagaagctaggagctaacgatcaggatggctgctggcatggtggcgacaatggtgctactgacgtgccttgctgcaggagggctggtcgtcggagctgaggaagacggtggcggcggcggtcttggccggctggggtcgccggactacggcgacgcgctggcgaaggccatcctgttcttcgagggacagcggtcggggcggctgccggcgaaccagcgagcgacgtggcgcggggactcggcgctcaccgatggccgtgaagaaaacgtgaacctgaccggcggctactacgacgccggcgacaacgtcaagttcgggtacccgatggcgttcacggtgaccctgctgggctggagcgccgtcgagtacggcgccgccgtcgcggcggcgggggagctcggcaacctccggcggcgatccggtggggcgc

SEQ ID NO: 393060 - DNA, 708 bp, Oryza sativa
ctcttcctagaagaacggctcgagtgtttcaggatcttgaaattcgacatcgaaaccgagcgtctgatgagatctcctgagtgttccagcaaggcacacagtagaactagaaccctgccttgcattgaacttctggagcagttgcctgccttgcagcagctacttttcaggctaattggctgccagcctgaaggtgcagcaggcacgaactaccttatccaatatgcattagccctggttttgaaggagagcttcaagatctactgtgcaatcaatgatggtatcatcaatcttgttgatatgttctttgatatgccaaagtatgatgctatcaaggctcttgttgtctataaacgagctggccagcaggctgaagatctttctgacttctacgattcctgcaaacaacttgagcttgccagggcattccagtttcctactctaaggcaggccaccatcatcattcattgcaacaatggaggagtacatccgggaagcaccccgtccctcgattaacagcgtggagaatggtgagaggaagctagtgacctacgaccaagaagctacagaggagtctgaaaaaccagcagaagaggagaaagatgagcctgcagagtctgaacaagaacatgagcctaaacaagaaccaaagccaccagaaaccactggagatctactaaacttggatgcagaggtgagtccattggt

SEQ ID NO: 393061 - DNA, 367 bp, Oryza sativa
tctatatgctgctgcttctgcttgcgattgcgagctctctcctctctctctctctgtctttcttttttttcggcttgcaaagcttttgctttgttttaggtgcttcttttccactcctttactgttcccccacttttccttgctttgtcacgcacacgaaaagctcctgcctttaccttatctccgctcgccttccctcacccccgtcgtagtgggatttggtggctgctcgcctctcgcgtttcttttgctggattggggcgttcttgggagctcgggaattcgggtggtttggttgggtttcgtggagaattgcggcagatctttgagatgaactgcgggccgcccgaacaagttgccgcgggga

SEQ ID NO: 393062 - DNA, 643 bp, Oryza sativa
  unsure (1)..(643): unsure at all n locations
gagaaacgcaagcctctagtctgctaaggtgggcgtcgccatcgggagaactcaggccacaagaattcctcctctccgaaaactctcccctctctctgctgctgtggccgcatcatctcctcctcatcttcttctccacagcctccagctaggccatggcgtccaccgtctccttctccccggccaacgtgcagatgctccagggcaggagctgccacggccacgcggcgttcgggggctgctccgccgtgccaagaaccgggccaaggatgcgttccgtggccgtgagggtcagcagcgagcaggaggcggcgccggcggtcagggcgccgtcggggaggaccatcgaggagtgcgaggccgacgccgtggccgggagattcccggctcccccgccgttggtcagacccaaggctcccgaaggaacaactcagatcaggcctcttgacttgacaaagcgccctcgtcgcaaccgcagtcgcctgctcttagggccgcattccaggagaccaccatctnaactgccaatttggtgctcccctgttcatccatgaaggggaagatgatgttctattgagtatgcttggtgtataggttggttgaggattggttttnataggttaaagtttgtaatgttggtgta

SEQ ID NO: 393063 - DNA, 455 bp, Oryza sativa
tcggttagattgcctgccagctaacgaggcactcgccgaggaaaaagagaatcccgctcgtgctcttgctggtgtcgatgtcgccgccgtggtcgctgtcgctgtacccgacgaagtgtgccttgccaggacacctcgggtagtagagaccgtggtcgagagtccccgcaacgtagcggatgatcctcttcacggcctgctggtgctccgtcgtcggtcgctgcatgaaccgactgacgtagccgacggagaaggccaagcccggccgtgtgtgggtgaggtagcgaaggctccccacaagacgtcggtactgtgtagcatccacctcctccgccgtgctgtcgcggctcagcttcagtctctcctccatcggagtgagagctgggttgcaatcggtgagcccagccagctcaaccacgcgcttggcgtaggcggtctgtcgaagcgtgatcccg

SEQ ID NO: 393064 - DNA, 964 bp, Oryza sativa
  unsure (1)..(964): unsure at all n locations
ttgtagaaaacaaaattggtcgtgatgtgcaaaaccaggccctttttagtccacaagttgactcttcatccctcctgtacaacatggttcctaatctgacttcgaatgtttcggatggcaacttatcaacgatcccttctggatcaacttatctgcagaatgcaatgtaatggttgcttggacgactcttctggtttattgcaaaatacaggagagaacgatccagcaaccagaacatttgtgaaggtttacaagtcaggttcggttgggaggtcgttggacataacccggttctctaattatgctgaacttcgagaagaactgggtcagatgttcggcattaagggtcaattggacgaccctgatagatcaggctggcagcttgtattcgtcgacagggagaatgatgtgcttctccttggagacgacccttgggagtcctttgtgaatagtgtatggtacatcaagatactttcacctgaggatgtgcataagatgggaaagcaaggaaatgatcccacggtatctgtcctggagtgagagaacatcggtgcccatttctgggcttccagggaggatttctgcagtgcatggtggcactcttgctctcgacaatgcacgtcgtcagaagtcccaaatttgtatcttgcatgtacgccgtacatgtttccagaactctctgttacctattcggtgcaggccaccggaaccacgaaacctgatattttgtaggttccacttaggaatcagtatcggtttaactcttatcctagatgatttgtaactcgcacggcagtccactgttttcatgtttcatcgagtcttcctagacattaaacttagttgatattgtatcaggatttatgtgtattgagattcctctacatgctttcaaccaaaaaaaaactgcaataatcgangcgcacgaggattgtttcaaaaaaaaaaaaaaannnnnnnnnnn

SEQ ID NO: 393065 - DNA, 770 bp, Oryza sativa
  unsure (1)..(770): unsure at all n locations
atggcattaatggaaaacctaactacctgcatggtatgggcttaggttctgaatgaattgaatgaaggaatttcacgttcaagaagacttaatcttaagaatcctcaagatagtctgcttggtcaaatccctcgacgcacacgagatgaacttatggatcactgggcagctatccaggaattattgcagcatttttggtcatcatatccaataacaacttcagttctttataataaggttcaaagaattaaggatgcaatgacccagatatatcaaaagttgcaggatataaaggaatcagcacaacctgatgtgagacacgaaatatctcaactagtaacgcccatgacccaaggctttggagcctgccttcaaccatgacttggagccgcagcaaaaattcatcgaaatccgggaataagcccaatgggttttaactttagccgagaagactagcttcggcgacggattagggattgatttactgctagagcaagagggctacttgcagttctggaggggttacctccttgagccttgattctcatgtatatttacctgagctttatagtggtgggcataacgtgcttactaaacgccccaatttttcagtgcctgattcattccaggcatactctgggatggtttgtgttcatcacagttccaggtagaaccaaaattttgtgtacactttggaaagaaggaaaaaaaatgagcacgcgttgatgctgcgttccttaaaaaaaaaaaaaaaannnnnnnnnnnnnnn

SEQ ID NO: 393066 - DNA, 484 bp, Oryza sativa
  unsure (1)..(484): unsure at all n locations
aatctntctctcacagctgcacaagtggtagctagcttactctaattaaccttggttgtaatccatggcgagctgcagcaagtggctggccgggctgatgctgctggcggcggcgctggcgtgctcgctgccggcggcgagccgggcgcagtgcaggtggggttctacaacacgagctgccccaccgccgaggcgctggtccggcaggccgtcgtggccgccgtcgccaacaactccggcctcgccgccggcctcatccgcctccatttccacgactgcttcgtcagggggtgtgatgcatcagtgctgatcttctcgccgaacggcacggcggagcgcgacgcggcgccgaacaaccccagcctccggggtttcgaggtgatcgacgccgccaaggccgccgtcgaggcggcgttgcccgcgcaccgtcttctgcgccgaaatcttggctttgccgcccggacaggtcaaactaaccggaatt

SEQ ID NO: 393067 - DNA, 659 bp, Oryza sativa
  unsure (1)..(659): unsure at all n locations
tgngttagtgcccatccgcccactccactccactccactcccctctcccgcacttccatccccaaccccgcccccgccgcggcgccaccttccccctctcctcttctctctctctctctctcatatgggctgccgcggcgcgccccgctactgtccatcctagcgcggagccgcagcttccccacacgtccatggccgccgccgccgccgccccccggttcttgcccgtccgcccgctctttctcctcctcctcctcctcgtcctggccggcgtcgcaagcggcaagacggtcaagagggacgtgaaagcattgaatgagatcaaatcttcgttaggatggagagttgtctactcatgggttggtgatgacccttgcgggcatggtgatctgcccccctggtctggtgtgacctggtctcagcaaggagattacagagttgtcaccgaacttgaagtctatgctgtatcaatagtcggtcctttccctacagcagttacaaaccttttggatttaaaaagattggatctacacaataacaagttgacagggcccattcccccacagattggacggctgaaacacctcaggatattgaacctgaggtggnacaagcttcaggatgtgctcccacctgaaattggtgaactgaaggaactt

SEQ ID NO: 393068 - DNA, 668 bp, Oryza sativa
  unsure (1)..(668): unsure at all n locations
gnaattgtaatacgactcactatagggcgaattgggtaccgggccccccctcgagtttttttttttttttttttttttttttagggatttcaaccttgtattgattttggccctaaatggcatatatgtacacaagagaggggaacacaagagaggggaaagtactctaatacccttgacatactactacacttaacacccccactcaaattgcaatgtgttatgcaattaacatttgcatttttgaaggtgtaatactataacaccctaggaccacaaaactaaaatatttagccctaatctccccaaagtcttgatgatgtcgtcaaagtgtgccaattcttggatgatgacgatgaagaagaaaaagatccatctcctcttcaatgaatggacctcggagccttcacaaactgttcttcggccctcggtaccttgaagccttcacaactcgttcttcggctcttcattgatttagagatgtttgacaatgatggaaagccttcacaaactgttcttcggacctcctagatntgatgatgacaagatggtgatgatgaaggactcncaatggtctccgtcctcnttgatgaagatattcactccaagggactgtgaatgacaacactccatntgacngtaatgnaacacncncggaannttaacnt

SEQ ID NO: 393069 - DNA, 537 bp, Oryza sativa
aggagaggaatttggggattttccacagttcattgatctacccctgaaggggaaatataaatatgtacaaaagagatgcgaaaatactaaactacccctaatatcttaacacccccactcaaatgcaatgtgtatacaataatattgcatttggagtgtaactaaacatgagaacacaagactaaatattagcctatctttaaagtcttgatgatgtcgtcaaagtgtgccaattcttagatgatgatgaagaaaagatatatccccttctcaatgaagtggatctcggagccttcacaaactgttcttcggcccttggtaccttgaagccttcacgaaccgttcttcggctctttattgatttggaaatgtggttgatgatgatgatgacaatggaacttcacaaactgttcttcggtcctttgactgatgatgatgttgatgaaggcccttcacaaactgttcttcggaccttcgctgattgatgatgatcatgatgacaagctccgacatggagacgatgaacccacgcgtaag

SEQ ID NO: 393070 - DNA, 483 bp, Oryza sativa
  unsure (1)..(483): unsure at all n locations
ttttttttttttttttagatcaaaggcttaaaagttgtggtaggcaggtttcccttttcttttccatttctgccctggaaatacatataggattatatcacaagattaattgctctcatccttgagaacggctaagtgaagaagatccgacatacacgagagcatttcgacgttcacaaggcattccagtttcatggcagcaaaataaccagcttatttactactactacacaagaaacctatctatattccatggtacatacagactgcacaattggccgctatatggactatctanagttctatattaacaatactaccaaaacatctggtgcatgaaactagaatggtanactggatctactgaagaactgactcagctatgtggtacatgcagcgcctgcaanagcaacttcggtggacgggctaggagttgacaacctggaaaacctgaaaatcccactgatgcaggagttgcagctg

SEQ ID NO: 393071 - DNA, 375 bp, Oryza sativa
aaagggtatggaacagatacacataggctgtccattgcatatagctacgaccaaaataactgattacagcactggagatgttgtccgaccctggtgtctagtgagaggcacacatgctagcttgggtgcaatatttacaaggtaattagatgtctatagaaaggctataaagggcgctaataataaacatagaaacaggctggagatatttagaaagccctggcagagtcacttggcgataacaggaggatgacaggttgtagccgatgcatattgccttcacaagacatctgccgatgcttccaggcgatctgttttgtaaaagtggaatatgcaaattgatccaatctggaaactgttgattgcacaaaacgg

SEQ ID NO: 393072 - DNA, 446 bp, Oryza sativa
ctgaacagttgctgtcttattgatcacaccacacaatcaagaagaggaggcatgcaattaagctgaaacattgaaacaaattaaaaaaaaaacacagcaatacgaacatcaatctatcgttagcagattgatccgttcctctagctagctagcagacgacatcctctcatgtttccacacactaacaaattaaaaccaacaataaattaatacacctcgtactcatcattaacacatcaataagccgagatcgagtagccaacaaacaagagcttgagcttgggcgccatccatggcgaggcaggggaatggcggctgaactagatggagcaggtgtagccggggggagggttcttgccgcaggtgaggaggagctggagcgcgaggggcaggtagatgttgatgttgaggagcttgagcctgatggtggtgcagaggcacacggc

SEQ ID NO: 393073 - DNA, 575 bp, Oryza sativa
ttttttttttttttttgcaaacaacaaataacacataacataactgatacatagtttacagatgccaaaatttgcgcagcaacaagtatgacaaaactcgcgcagcgattagtccactaaatttcgtacgctaaaagaaaaaagaatacagcaaggctacccaaggaacaatagccatttgacagcattaacccatattagttgctataactccatatcagcagacatttttatgctgctagctgtttggatctcttaacaaacttcgatgtatggcatttcacatcttgggtgaagacaaaagaatgggatgcctgtcgcaagtgccaaaagttgagatgtgccaggacggcatggatcatgtaccgtatatatgtctatgaactggtgcgccaaaacctttaactacatccatccatctcttttctaccattagaacagagttgtctgataggtggccaacaaatagcactggatcttaaaagcaaagaaataaagttattccttatttttggcttaacttttttttttgagctttctttaagctttttgttggaacctttgagaagtttttt

SEQ ID NO: 393074 - DNA, 698 bp, Oryza sativa
tctatttagttcatgccacccattatgaatccctgagggaaattgctatgaagatactgcaaaacggtgtttctaccgttccaattatgttttcctcatcaccagatggctcatatccacaattgttgcatcttgcttccctttctggaattttgaaatgtatttgtagatattttaaaaattctcaaggtaatttacctattttgagccaacctgtatgcacaattcctctgggtacctgggttccaaaaattggtgatcctaatggccgtccattggctatgttgcggcctaacacatctcttagcgctgccctgaatttgctggttcaagctggtgtgagctcaataccaattgtggatgacaatgactcactgcttgacacatattccagaagtgacatcacagctcttgcaaaagacatggtgtacacacacattcgcctagatgagatgaccattcatcaggctctgcagcttggacaggatgcaaattcgccctttggattctttaacgggcaaagatgtcagatgtgtctacggtctgacactgtgttgaaagtgatggagcgattagctaatcctggggtgcgccgtgttttcattgtggaagctggtagcaaacgtgtggagggcataatatcactgagtgatattttcaagttcttgctgagctaagtgaaaatgcccgagccatct

SEQ ID NO: 393075 - DNA, 692 bp, Oryza sativa
ccgtctcgatccttcgcgtcgccaccgtccttaccgccacacgccttccgtatatagctctcccgcggacgaacacctgtcgtgcactgcgcgcggggggtggcggacgatcggatcgggagaggacgcgacgcgaggcgggctgcgttgtgagggagagaagggatgctggcggtgttcgatcgggcggtggcgccgagccctgaggggctccggcatcccggggcggcgggggacggcgcggcggggctcgccgagaggttccgcgacgcgcgccccggcgccgtcaccgtcgccctcggccccggcggcgccaactccctcgcctactcctcccacggccagagccccctcctccccaggttgttcgcggcgacggacgagatattctgcctgttccaaggcacgatcgagaacatcgcggtgctgaagcagcagtacgggttgcacaacaagggctccaccgagatcaacatcatcatcgaggcttacaggacattgagagacaggggaccttaccctgcggatcaagtcgtcagagacatcaacggcaagttcgcgttcgtgctctacgattgctccaacaactccgtcttcatggccaccgatgctgatggtagcggtccattttattggggagttgatcctgacagccgtcttgtggtttctgatgatgacgaaattgtgaataa

SEQ ID NO: 393076 - DNA, 518 bp, Oryza sativa
cggacgtggttgtatgcagtgacacaagcaggcgggatcatgccgccatggccgtgcgggaggtcctcgccggcgacaggaaggtgggcaccgtgtccaggtcggcgaggaggaggaggcttgagctccggaggctcgcgcggacggcgtcggcggtggcggaggatgaccccgccaagagggtgcggccggcgtccgacagctcctccgactcgtcggagtcggctcacgtagcgcccgagcccaccgcggaggtggcgagatggccggcgtgcgtgtcgcacggggcggtgtcggtgatcgggcgccggagggagatggaagacgccatcttcgtcgcggcgccgttcttggccgcctctaaggaagcggcggtggaggggagcggcgtctcggaagaggaaggcaaggaggaggatgaggggttcttcgcggtgtacgacgggcacggcgggtcctgcgtggcggaggcgtgccgggagccgatgcacgtggtgctcgccgaagaagtgcgggtg

SEQ ID NO: 393077 - DNA, 722 bp, Oryza sativa
tctttctctacttatccacggacatatgatgtgctacatgccaatggagtattcagcctgtatatggacacgtgtggcatcccttacatcatgctcgagatggatcgcattctccggccaggaggcgctgcgataatccgggacgcgcctgatgtggttcacaaggtgaaggatgctgcagacaggctacactggcacagcgaaatcgttgacattgagaatgggggcctggatcctgagaagcttctcatcgtggacaattctcttccattcccagatcaccctgcatgatgttgataatttccacatcttctctgatcatcatcttcagaatcagaaaagattgttcttggatgcttgtatacatgcacagatgaagagtataagaggactctacacgcaatagttacatatccagatgaccacatagccgaataatccaatgtatttgagctgtttactccactagacactgtcagattccaataaaccagtataggtaacttaatctcctgagctctgtgttgttcccagcatggtgttggatgtgcagagatgcaaccatgctcgattctgtagagatgtagtatctaattgctctgcatttgtatattgtatactagctgtgtattatcggtgagatttctgtgaaattccttcagagtttgccttgctttgcttgctaagcaatggcatgattcatgtatgatgatggaatctgt

SEQ ID NO: 393078 - DNA, 567 bp, Oryza sativa
  unsure (1)..(567): unsure at all n locations
ttggttcttagcagcagtcgttgtgcagaggagagtctcctttgcttcccaagttgccatccatggccgccaaggtgtacaagccggccgccgaggtcaatctcggcccggacagcgacgagttctacatcagccctaacgtcaaagctcctcgggtagcagggctgctggtgaagatcttcgtgtggattcttgagatgccgatcatcggctcaatggtgctttacatcctcaagaaggataatctcatcaacaagcttgtccaagatgctgaaatcccagagcctccactgttcacttccacacacagctgggaagacattccagagcagaatgtgtgcctgacgaagccggacctgtcgccgccggagcgtgtccaggaagccgtcaggttgcctccctgcgagcctcgaaatcgaccctcgccggctcgccgccgtcgagcccgaaacgctggacgatcagggatttcaacagggcgtacagctcaagggaggtcactcctgttcaggttgcaaagaggttcttggctgcagtgaaggaatgctcangcccaggcctcaacat

SEQ ID NO: 393079 - DNA, 467 bp, Oryza sativa
tgttgctgtagtggtcagtggcaatagtggggacataggtcacactattgtgacaactgttggtggaagaaatgggcagccaaagcagacaattagttacatcgcagagcgtgctgttgggcgtggttcatttggagttgtcttccaggctaagtgtctagaaactggtgagagagttgctgtaaagaaagttcttcaagatgcgagatacaagaaccgggagctgcaaacgatgcaaggtctcgatcacccaaatgttgcatgcttgaagcattacttttgctcgactactgcgaaggaggagctataccccaacttggttcctgaatatgcgccagaaacttgttcatcgtggtattagacaattacaataagatgagccaacgcatgccattgatttatggtaaactttatatgtaccagatttgtagggctttggcatacattcataactgtgtgggagtatg

SEQ ID NO: 393080 - DNA, 540 bp, Oryza sativa
cccttttgtcaccaaggagagaagatgtttcataggtctgaggataatgagttccctgttacgaggccccgttactcgatgcggcggccacgtgtacccccacccccagctgtggccagaagtacgggtggtccttccactcaacatgcgaattcttcttttgtggaaagtgggttgagagagagttctagtagggaagagcatactatgcagaccgaatatggacgtgtataccaggaggcatctcaccagcatgggacatcagctgaaggcattgggctcgatgaacagcaaaatggggatagggaaaaccctatattgggctcacaatcttctctgtctgtttcgagccctcctagttcacctccacatgtttcacatgatgagatggatgtttctggtgattcacctgcgttgccaacttctgctgatggtgatcgaactgtgatgtctgacattgaccatgcggcttcaaccttagatgcagccaacacaagcagaatcaatacctcatgcacaggttctcacttgggagatgat

SEQ ID NO: 393081 - DNA, 590 bp, Oryza sativa
cacgtcttcgtcttcccgtggctcgcgttcggccaccggctccctgccctcgagctcgccggccgcctggcctcgcgcggcctccgcgtgtccttcgtctccaccccgcgcagcatcgctcgcctccgccgcccgtgcccgtccgtcgagttcgtcgagctgccgctcccgcgcgtcgacggcctccccgacggcgccgaggccaccaccgacgtccccgatcacatgtcatccgctctctggaaggcctccgatgggctcaccgcgcccttctccgccttcctcgacgccgccgccgccgcggggaacaaggtcgactggctcatcctcgacggcatgctttcctgggccgccgcctccgccgccgaccgcaaggttccctgcgtcctcatgatgccgtacacggcgacggcgtgcgcgcatttcggcgtgccggatgaggcgcgggacgccgaccgtttcccctccgccatagcccggcggttcgtctcggccttccggagcagcgagcttctcgccgtgcggagctgcgtggagttcgagcccgagtcggtgcctctcctgtcgaacatcttcggcaagccggtcgt

SEQ ID NO: 393082 - DNA, 453 bp, Oryza sativa
gtttgtcgtcaccattcctatccttattggctatcaggtcgagtttcacatacatcatgtgaaggaggctgcgagggttacgaaaatcgtggcattgcttgacaaggctggcaaaccaagcaaaactgcacctcgatttcttaagtcaaagcagaatgcagttgtgcaggttaccttagacgctccggtctgtgttgaagaattctccaaatgccgagctcttggcagggcattcttaaggtctggtggaagcacaatcgctgttggagtcgtaacgcgggtactcgggcaagatcagaactgaaagacctccgcccaacatctgaaaatttgaacgtatctgcagccgtgccctgctttggggtccataatattgtagttgactcaaaacggtattgccgatgagaagaagtttggcgacggcatttttcactgtgtgttcgtcgccatttc

SEQ ID NO: 393083 - DNA, 641 bp, Oryza sativa
  unsure (1)..(641): unsure at all n locations
ctccctgccattgttccgctcgagtgctccgctcggctcgctgcgaggttggtgctccgcgggtccacgcggcgttgcgagagtgagagagagaggacgaggtcctcctccttccgcgtcccccgctcgctgcttcatccgcttcttcctccctccatcttcgcttgtgagctcctccgcgcgtcgcgagccttactgaaacttctgatccctccgaaaccgagaaaagaggggaatctgtgaagagattttagcagcagtgcaatggaggtatttggaaaatccgtgattgctgagcccagcaatgtgatttacttgtccagtattcttaacacagaagggccaatccctagtcacaagtgtgacaagaattgccagaacgagcacgtctttggcaacatgtaccgttgcaaactgaccgggaccacgcacatctgcgacaaaaactgtaaccagaggatcctctacgacaaccacagctcgctctgccgggtcagcgggcagctgttcccgctctcgccgctggagcagnagncgttgagggggatccgtagaagcatgagntcgacancaacgaagggtgctcctttaagcgcaggcgaaggtgcacaactgcatccatcccctttcgagaggtccta

SEQ ID NO: 393084 - DNA, 649 bp, Oryza sativa
  unsure (1)..(649): unsure at all n locations
aacaaatctggtagactgatggaagcacatggtcctaggttgttaggatcatcatataaggacccagtttcaagttttcacctcttccacaagttctccgtagagcatcaagaggtctactggtcaatggtgctgaaggagatctcaatcaagttcccaacaagaaccaaagtcaattctagatacatcagataaatcaaggaaagggggaacatggctccaaggtgctgtgcttaatattgctgaatgttgtctgttaccttggccttcccaaaacaggacagatgacagcacagctattgtttggagggatgagggtcttgacaatcacccagtgaaccgtatgtcactgaaggagcttcacaatcaagtgattacagttgctactgcgcttgataccatgttccaaaagggggatcgaattgcaatagacatgcctatgacatgcaatgcagtcatcatatatttggctattgtccttggtggttttgttgttgtgtcgatagcagacagttttgcacctcaggagattggtacacgcatgagtgtgtcaaaggcgaaagctatttttactcaggatttcataattagaggagggaagaaggttccactatacagccgtgtngtgcaagggacttcatctaaagct

SEQ ID NO: 393085 - DNA, 303 bp, Oryza sativa
tcctaaaggcttacaagagaagcaaccatccggaggaggatggccatggcgacggcctgcggcatccaccgtctccttctccgcccgcccgtccgccgcgagcgcggtccggccgtgcgccgccgcggggagggcgagggcgcgggcggcggcgggggagagcggcaagtggtgggcgccgctgctggggtggtcggggaaggccgactacatcgaggccccggcgccggcggggggggttactttatttttttacaaagggctttattgtatgggcaataatacttttctgacagggcgggg

SEQ ID NO: 393086 - DNA, 505 bp, Oryza sativa
  unsure (1)..(505): unsure at all n locations
ctcacacaagagtcattccctattgcattatgtggtgttacaatacttggttctcataatgtgttggtagctttagatgagaccaggtcagatctatttcttattgagctcaagggtgagagcatcagctacaacaaggtccatatttcagatcttgttcaagacttatctggaacagtcaaacttctacctttaatgtccaatggtgtcatagcttttgcaagctccttcttctgtttcccttctgaaacttaaaggaatcgatgggttggaagtaattcagagctttgaacaaccagctgctgtgagtgatgcgttgacaatcacagaaaaagacgaagcttttgccgttgtgcagcatacaggttctgaaatcgaatttgtcgtcaaatttacaagtgatgtcaccggtgaagttattagagaaaaaattaatatagatcaacataggggcaatattcaaaaggtcttcttgaataactatatccgnacagataaatcacan

SEQ ID NO: 393087 - DNA, 755 bp, Oryza sativa
cgaaaaggccacagctttcaatataaacaaacaccaaacgaatcccttcttagcggtagtgcatccccatccatccattctcgcacaagattccgtcttttcatccaccaatctcgcgaaatctccgtctaattcaagaaaagatgagctgaggaatgagaggagaatattggtgttgcgaattgtggattgggaatttggagtttggattacgaggagggggaggaggagctgtttaggcgacgtctttcaggagcgtgatccaggaggtgaagggcgagatcggcgccatctcgcggcgggggttcaggtcgcggccggggcgagtccggcgagtggcggcggcggcggaggagccgccggacgagtcgtcggcggcggcgctggtgatgcgggagagctgctggacgcagctgccgccggagctcctgcgggaggtgctggcgagggtggaggagtcggaggggtggtggccgcgccgccgtgacgtggtggcgtgcgccggcgtctgccggagctggagggggatcgtcagggagatcgtgcgcaccccggaggcgtccgggaacctcaccttcccaatctctctcaagcagcctggcccgagggatgctcctatgaaatgattcattgtaaggaaccggaccactcagacatattacctgtacattggactgactgatgcattaactgatgatgggaagtttctacttgctgcacgcaaatgttgtaggaccacatgcactgagtacctg

SEQ ID NO: 393088 - DNA, 653 bp, Oryza sativa
ggctatctgggcgttcagcgtggtgacctacttcccgctggacgtgctcaagttcatcatccggtacgcgctgagcgggcgggcgtggaacaacatcaacaacaagacggcgttcgtgaacaagaacgactacgggaagggggagcgggaggcgcagtgggcgacggcgcagaggacgctgcacgggctcaaccagtcgtccaccagctccgacctcttcaacgacaagaccggctaccgcgagctctccgagatcgccgagcaggccgcaaagcgagccgaggtcgccagactgagggagttgcacacgctcaaggggcacgtagagtcggtggtgaagctcaaggggctcgacatcgacacaatccaacagagctacaccgtgtaacatacagcatgccatcgatgtgttgttgttgttgttcatacctgtgttttactcctccccatctgcaagttatttggaaatgggggtttcgacttgtgttttgacatagatgtttcttcccttctttgtattttgttaacagggaatagttcccgatacaacaggtggtgcacttttgagtatagccaagttttttgtaacattttggctttaaaccggtttttttggcaatgttattgttcccattgcaaatttgcagtctatc

SEQ ID NO: 393089 - DNA, 575 bp, Oryza sativa
ttgtagaagagggaggagtagacgcaagcccacgcgaaccgaatcgaatcgaatcgaatcgagaggagaggggaggagagagcgcacggaagagtccgtaatccgttcgcggcggggaggaggaggtgggcccagcgatgcaggcgcacagatcgccggcgatggtggggggcggcggcgcgggggccgtcgggccgccgtcgccggcgacggtgccggtgaggcggcgctgcgagggcacggccatgggggccatcacgctcgacctccgccccggcaacggcgtcgggcccttcaccctcgggatgccgatttccgatgcgttcgcgcagatagagggccagccaacactctacgacgttgtccacgtgaagtacttcgatgaggagcctctaaagttggattctgtcataagctttcctgaccatgggttccacctgcgcttccatccttggtcacagaggcttcgtctcattgagatctatgacggtgaaaagactgcaactgcgatatgcaaagtccttaattggtggcccatcaacattagccacttttggtgctgttatggataattc

SEQ ID NO: 393090 - DNA, 780 bp, Oryza sativa
  unsure (1)..(780): unsure at all n locations
tcattatggagctggtactacccattctatgttgctcctttcgtatctgacctcaaaagtcattgtcggttcgagatatctttcaccgtagacaaaccactgcgaccatttgatcagctcatggcagttttaccactacgaagttcgtgtgctctcccagaatgttacagaaaagtaatgggccgtaaagaatttgaccatccgaagttgcaggctgacacaattggaaaacgtttcttgtggaaatgtatctctgaggaagaactgcttcaggccaccaaagagttagataaagagctgtcgatgcatgagatgagacggaatactccccggcagagaagatctttctgcagaggaactcaaatgctcaggcacttgccaaagttattgtgcaactgcaaacatcgtcatgttcgccggagcaaaagcttccaatagattcagctataagtggacttggaggctggttatcgcctgatggcttgagcaatggtttcttttgctcacccctacaaaatctgcaggacatcacgaatgatcaggcaatatcagcgatgttcttcaaccctgaggcagggaatccaattccaagactacttagcaatgtcaaagtacctgacaagacggttacggaagctgacatctcaaggaggctgctctggcacacgtaccctggctcgaggcngccaccgcccatcgttgagaggccngacaccatctggaagccgatcagcaagccgtcggttcacgggagggagcacaggacgccngaaccggtgg

SEQ ID NO: 393091 - DNA, 768 bp, Oryza sativa
ggtgacgggactttcgggagtgtatggcgtgctataaataaacaaaatggtgaagttgtggcagttaagaaaatgaagaggaaatattattcttttgaggaatgcatgagtctacgtgaagtaaagtctttgcggcgcatgaatcaccctaacatcgtgaagctcaaggaggttataagggaaaatgacatattatacttcataatggaatacatggagtgcaatctctaccaacttatgaaggatagagtcaagcctttctcagaggcagaagtccggaattggtgctttcagatttttcaggctcttgcatacatgcaccagaggggttactttcatcgtgacctgaaacctgagaatctgttggttagcaaagatgtcataaagctggcggactttggtcttgcaagggaagttacatccgtgccaccatacacagaatatgtgtcaactcgctggtaccgagcacctgaagtattgctccagtcatctatctatgattctgcagttgatatgtgggctatgggtgccataatggccgagctgttgacacttcatcctctttttcctggcacaagtgaggctgatgagattctgaagatttgcaatgttatcggtagccctgatgaacaatcatggccacaaggattgtctcttgcagagaccatgaagtttcagttccctcaggtcagtggcaatcaactggcagaggtaatgacatcagtcagtagtgaggcagtcgacctgatttcatcactgtgctcatgg

SEQ ID NO: 393092 - DNA, 865 bp, Oryza sativa
  unsure (1)..(865): unsure at all n locations
gggcaagaagaaggtacaagaggatgagagtgatggcgatagtgacagtgaaatggatgatgatgagggtgcagatacaaaatccataattcttgatgatgggaattcctcgcatggatccaaatgtgaggacgagaaggttgatctgggttcaattactgaatcaccttcagatggagagacctcaggtgagaagtctggacgctctgaatcagaggagaatggaaacggtgttcaggagtccagggaacctacaattaggtcagaaggtgaatgcggtgattttatatcagatggtgtggtggagcatgagattggagtggtggatgagcacacacctgagaatggtgttagtgctctttcagaagaagtgttgaaaccagatgtaaaagcagaggataacactgcttctgcttcagccacatcacatcttaatgacctagaggcgcctccagtagaagaacctgccaatggaaatatatctcctctttcacaggaaccactggacctgacaatttacagttcagctgcagaattggaggtacttggcatggagagactcaagctagagttgcagaatcgtggactaaaatgtggtggcaccttacaagagcgtgctgccaggcttttccttctgaaaacaacacctctggagaagctaccaaagaagctgttcgcaaagcccagtggtgggggaaagtgagaactagtgcatataacagctaaaatgacgaaatgcaaatctatatgtgatgttcttttataatttgaaattgttgtaatgtgatgataaacttttgtcttgccgctgaaaattaatgagctatgacgtgccagtatgcanatnttntnnaaaaaaaanaaa

SEQ ID NO: 393093 - DNA, 588 bp, Oryza sativa
  unsure (1)..(588): unsure at all n locations
ggatangttattaaaactaagagaccctctcaaaatataaagtatttggctaaagacgagtcttaacgcaactccatttctgctgttgtccctcctgatgaaattggagtgaaatttgatgatattggggcactggaggatgttaagaggacgctggatgagcttgttactcttccaatgaggagacctgaacttttctcccatgggaatttgttaaggccctgcaaaggtgttttgctctttgggcctcctggaacaggaaaaacactcctggcaaaggcacttgcaacagaagctggagcaaatttcatcagcataactggttctacactcacatcaaagtggtttggagatgctgagaagttgacaaaggcccttttctcctttgctagccgattagctcccgttatcatatttgtggatgaggttgacagcttattaggtgcaagaggtggtgcatttgagcatgaagcaacaagaaggatgcggaacgaatttatggcagcttgggatggtctaaagtccaaagagagccagcgaatccttattcttggtgcgacaaatcgtccattngatctagatgatgct

SEQ ID NO: 393094 - DNA, 567 bp, Oryza sativa
  unsure (1)..(567): unsure at all n locations
acaacaggaaacaagcttntgcccatgatttancccaagcgcggnaattaacccctcacctaacgggaactaaaagctggaagcttcccacgcgggtgcggccgccccttttttttttatttattgatgaatcatttgaacaaaagccatattatttttcctcgcctatattatgtaacttgttcttacagccataggagcgtactatgcgtaagaaacagcaataagcttctgttccgtcctctattagctactccatatagcagtaagtaagttgtaagtagtactccagttactagtactataaatttaacaagggcgatggatggatggtgtgttacagtagtataattgagatggaagaggtaggatggatggtcaggcgaagagcttctcggcgaagatgtcaagaagggatagggcctcggcgacggtgagctcgaggcggaactcgggcccgtcggtcggccgcgagggggggcccggtacccaattcgccctatagtgagtcgtattacgcgcgctcaatggccgtcgtttaccgcgtcgtgactggggaaacctggc

SEQ ID NO: 393095 - DNA, 482 bp, Oryza sativa
cacagcttacaactgttgtattcagaaaaaaaaaacagtatttcacagcttacaagaaaccatcattttttttttcacggctaatatgagtagccaaagttactaataaacatcatcaatacaacatcaaatgacagcacctctgtactgcaaagcatcctcactctcatcaactatgccaaatctagagaagggttctgaggtgaggcgaaaaaagaaaaaaaaattaccggcccaggtaggatacacaaagtcctcctagatgagataaacaaagtaataacataggccataggctacatcatattcttcttcacttgagaaaaaggaaatccaggacttttccagggatgtatttgcgatggtgatacaaaatgaaacttaggagtggtcatgccatggacatggcctctatggtttcttactttcttcactctgctggtgtatggcacaatgctcttcttagcttggaccttcatgtt

SEQ ID NO: 393096 - DNA, 673 bp, Oryza sativa
tgtttgccgccgtcgccgacgccgacgacgccgcccggacctgctcgaagaagaggacctgcacgacgacgcggagcgggaggcgctcgttctgcacggcgtgcatgctcgcctccggcgacagcttcttgctgtccatcagctccgcacagcctctttcttcttcccccttcgttaaacccgtgatgctcctttgagatacattgtcgatggcgcggtatagcccgtcgtgcacgggccgagttgcgaggggaaccatctcagtgagggcgatgaacttcgagagtgggaggttggggtccttcgcaatctcagccagatacccatcaaccagcttcgcgatcgcgagcttcgagctgcgggagacaccattcaggttgtcatcatcaccatccatggcttcctgatcatcatcctcttgtagcttggcgccatcatcgtcctcgcggggctgcgccatgaactcctccagcatcgccgagatcatgtccacattgtacatggcggcctcgtcggagttagcggggataaggaggtccgagaccgaagcctcatcccacttcgcgccgatcctcttcgtaagattgtcgcggcacgcctcatctgatcccaacaagcatgaggctctgagaagcttaaggaggaaagagcatgggactgaaccttcctcaga

SEQ ID NO: 393097 - DNA, 949 bp, Oryza sativa
  unsure (1)..(949): unsure at all n locations
ggggaacaccaatgagcaaattgataaactgtggataagtatgtgtgaagtacagcatgatctgaaacccctcaatcagatggcaaccggtgtttctcagtgcatcactgaccagaagaacatagtgaatagaattctcctcatccacctcacaaaagctggatccatgattgaatacaaagtccacttcatgcatgatcagtgttcagcactagcagcaatcactgtctgaaaataccaccggcatcaagttcttgacgttcgtttcgttacattctcagtattgccaacaattatggatcacaggttatcagtcaccaacatggcacaaagatccctccacaccccctctgttatgttccgaaaaattccccataattaattacttcaatacaggtagggatgaagctacaagcagggcaatattacactagacatctgatccatggtgctgcctggattggtttcatctaaaacaatatgcttcggctcgcggccaactgatcatgtagaggaccaccacactgcaatccttgatcttgcaatcccaatcccgtaaccccgccatccccaagggtccggcttggcgaattgaaggacccattcgcggcattctgtggcttgacatcggccgtcgatgagaagggggcaaccgctgcggtcagagttgatgggttggactgattgctgatcaaggaggactgtgatggcgagggaggccggtcatccgtcaggttaaccgtggtaatgtcatggatgctggatctcctcttgtccttgccaccgnagttgagcctgatgaaatacttctgcgcatggctggcaacctgcgtcggcgtcctcgtctgcacgaaattgcgggatatgttcctccaatcccctttcccatatttcttcagtcctaagaggaacaacttgtgctcctcctccgtccatggcacgcctttct

SEQ ID NO: 393098 - DNA, 435 bp, Oryza sativa
acgtccgccaacataaatattatacattctggaggtcaacattctacccaggaaacaaaacattacatcaatgaggatacaactaatgaattaacttgggttttccctagatggcaagagtctttacagttcatttcatcaactatggagttcaccaaagtccgaccgccctttcagctaactgcagtacgctactacggaaacaaagtgtcgtggtgatctagagaaacagctaggagcgcttctgcttacagccaagcacaccatgcccctcaaaaagggcgcgcatttcaggaagcagccaggcctggagaagcaccgctagatttacctgaacttcggcttttttgagggtcctcccttgaagctgctgcgctccggtggcggacgggaacttgctgaaggtctttacctttgcgccgccttccttttttt

SEQ ID NO: 393099 - DNA, 465 bp, Oryza sativa
ttggggtgaaaaaaatgcacggatatatatatatatatatatatatatatatatgtatgtattattagaaaaaaaatggcatagatatagatacataagaaataagtgaattacaccagctggcgcagtggcacatccggaaaaaaacatgaaagaatgagggaaataaagcaaagaataaagctaggtcgtcacttatttattccagaaatggccaatggccatttcctagtgctccgaccctcagcaaaataatctcatcagtagctaaattcgtgcagcaagcaagatgccctcgatctccatggatctccatcatgggtaggcccgacgaaggcgtttccttctttggggctgactcgggttttggctcgggcttagactctggctgtggatcctgcttttggttctggcttggattctggttctggttttgactttgagtatgactttcgctctggcttc

SEQ ID NO: 393100 - DNA, 549 bp, Oryza sativa
  unsure (1)..(549): unsure at all n locations
aattgtaatacgactcactatagggcgaattgggtaccgggccccccctcgaggcttctcttgtgctgtctgcattctgcaatctgcattgcacagaacagaaccaacaccatggatccagcatttttttctcatttcctacactggtaggtagagctccttatggtttatggactatacaacaacagcaatttctttttctgccatatgccacacgcagttgctcaccctcaccccctaaactctaaaatttcaactgaaatctccttctccttatggcgatttgcgcaacccgaaaaagggaccataattcttcagagattcaggtgaattatatcatgctctgagcttggcgaagaggttgccgaaggagaacgaagctggtcctggacagggcgccggaggctggctgccccggcgacttgccgttggcggcngcggctgangangangatgatggggangaaggcncttcttgacgttgacatgacgtttgcgactggacccgagcctccatgtctctttcacggtcgccgagcttccgaataa

SEQ ID NO: 393101 - DNA, 566 bp, Oryza sativa
gatcagctatagagtaattcattccatccaaaatatcagatgacgagcacatgaaacttttaccagttacaggcattgaatgttacatacagcacaaggagaaggtgaaaatggggtaggaaatgtacaatgtttttctcttgtacaacatacagcgtgttttgacagttttgggttgcctgttgcttccatgaaccaggagtaatctaatcatagaggagctgcagctacaagaacacaaagagaaaaattgctgactagcagctgctgatacaacttggaaagctgacaagctaaggccgtaagttcgacgaagagtttcacagatcactccctaaaagatgtatgatcatgagagcttcgtcaaagcaaattaaaatggcaacctttgcgttggagatcaaaaccattaaatatggaaactcctgagatgctttacagattggacagaaccccacatagcgttgaaattagtgtacacggacttgactgttatgctgatgcagatctagtgttatctattctgtgtttgttagaactacactacagatcaacatctggcaatg

SEQ ID NO: 393102 - DNA, 476 bp, Oryza sativa
tttttttttttttttctggtttgcaagtggccttttgtgtgtgtgaacttgtcctcgaacagtgctgtgagaaacagtgtctgtactactgatacatatatcgtatatatcctaaaaacatgcatacatttttgttggtgcatgctgaggagatgtagaacggtagccgctctgctatcgtcacagaataaacagttgttaaactaagatgtcagcatcaggtaattcaagcaccttgtgcgttccttttgatttgcttcctggtctaaattggtttccttcaatgtacagctccttcaaaaatggatgtttgtataatccttcaggaatcctcccaatgaagttgttattgtccaagtataaataggtcaatcttggaatatgaactagctttggtgatatcgatccaatcagcctattattagacaagtgcagtatcttgaggtttgtcaaatttgcaatctggtctggcagaa

SEQ ID NO: 393103 - DNA, 519 bp, Oryza sativa
  unsure (1)..(519): unsure at all n locations
nnnnnnnnnnnnnnnnnnnnnnnnnnnnnnnnnnnnnnnnnnnnnnnnnnnnnaaaatggaagtacttttcttcaatatagagatacctcctgacgttaaacatgtgtatgagtatctctatctattaaagctagaagatacctattaaagaagtgcaaaagaattctttccaaggagatccttctcggaaacaatatgtaatttaccaacttcttgaaaaacaacaataaatcgtaaacaatggatagaagccatgagtgacactagtcggctgggcgaatacggagtactccgatcgataggaggctgtgactcgctagttcttttccttctccttgttcttggaagggacgcggccgtcggtcccggcgagtatgctgtacttctccttgcgcgttagggcggtgcactcgaagccgagctggccgctgagcgtcttctggatgtagttggccacctcgatgggcgacttgccgccgctgcaagtgagctccttgggcagctggttcaggaaggtg

SEQ ID NO: 393104 - DNA, 374 bp, Oryza sativa
aagcttaaaccctttttactaattttgccttagcacaaggttaatacgtacagagagacggtcaatgcccgcataagtgagacgagtatggtatatcgcggcaatgcgaaggagacgaagaccagctgagtcaaacccacacgggcaagataaccattgcttattgcatgttgccaaagttctacactagccgacgtggttctttcctctggagtagatcagatcagcggatgccccattttttgagcaacctagccagggccctcgtgaaccttttcaacttcgactttgaattgcgcagccgcgacattttgtcgctgcctggctcgctgcttttcttcttgttgctgctgctgctgctgctcgtgctgcgc

SEQ ID NO: 393105 - DNA, 604 bp, Oryza sativa
  unsure (1)..(604): unsure at all n locations
ngatgtaaacagaaaatataaaggctatcgttcccatccaaatcttttgccagacaaataaataaaacacgaattttacaaaaagagaacggtcacacacgtttatgaataccgaccatttcaagggtcacaaacgaccagcgattttaatttacaacaccacgtctgtgaaacaaataataataaataccagttaacctgcttcagacttgagcacaggttgtgcaacaatggcgtgctccggcctgccaacacgcagttggtgttttgagatttgagattatatggccacacttcttttcatcccaacagcggtctggtctggttagcatccctttgacgggtatagctgctactttcaaaacatggcagcggttcaaaattttctacctagaagtttctccctctgtattgttgcatctcaggtgcataataataaacaggacgagtctgccccatcatcatctgctgcccatactgcaactgtggcccagcaggatgcatgtaaccttggggcgaaggtccaggctgagcattgtacaccataggctgtccaccataggccggtggaaacattggaggtccaagaggtgctgtaggcatg

SEQ ID NO: 393106 - DNA, 567 bp, Oryza sativa
gtataatataactccaccattacaatggtttttagagggcatatcgaaattacatccagctgacgacgacggcgctcagcttcttcctaggacgtacgtttcagtttccactcctcttttgttcttcttttcgcggggacatgcaataagcacgagcccaaattaagttgattatttcgccagattaagcaaaagatcacaaaaaatgtcaagaacaagagaagaatgtcatcgggttcagtacatatatgcatcgatcgatgaattaggccgggaggtaggacggcggcagcggcaggccgacgaccttgccgcagcggagggcgttctccggcatgttgtactcgtcccggagcgacctccccggcgagacgacgctgatgtagagctgctcgccgaggtagtgcctctcccagatgttggacctcacgttccacatcccggcgttgtcgaacgtcagcatgatcgccgtccacgacctcgggtacacctggaccgagtgccggctcaccccgtccagcaggttggacgtttttcttttcttcggcgaccactttcccgggccca

SEQ ID NO: 393107 - DNA, 542 bp, Oryza sativa
ttaaataaattttatcaacttctgttgaataagcaggtgcagagttgaataagaagggggggatacaccaatacttgtctctcaggaaaagttgccaagtccagggggggtaagggaaagaaacataaatatgttgaatcttgaccacctctaaattaatcatcacaaagctaggacttggccctaacgcaacagcgaacacacacaacaaaaacaaattattgctatctatgaagcaatgatacaacagggccggagcaccatgaaattatgggatgctcctggtgaactgttgacaaataggggataatcctgtcatttacagagtcgcaaacagcgtttcttcctttctctttccgttggggagattcctctttctcttgccatattatttcctcttaccggcaccaagggacagcagctccaggctgcggtggaaaggctcgtcgcgggacccttttgcaacggctgctcgggagagagaaggggcccttggctttccaaccgagggattaaccctttgcgtgctggaaggaccgttt

SEQ ID NO: 393108 - DNA, 690 bp, Oryza sativa
  unsure (1)..(690): unsure at all n locations
nnnnnnnnnnnnnnnnnnnnnnnnacccaacagaaatatgccactagtcagatcctttccagtttgaggagattacagaacatagctacactcaaggaatgcacatttctttgcagaatttatccaaagtaacccaaaaaattgttataaacacaccactatacgccctctggttgtttacaccaacaaattaaatcaaaacttaagttagacaccaaatttcaagaccaattaaattaacttattacagcaatgtacagaaataaaactgcccaagacctgggaccttgttatcttctgctatgtttatgcccgagtctttctggataaaagagagcccattagtgggaagaaagatttcttcctccgcagcttccgattcggaacaaggtcctcataactattacctgagaactctttgtagaaagaatccttctgttcaacaattctcttaggtgagctactcaaagggttaactgcccgtttcgcggcttcttgagctttcctgcgctgctcatgatcagctctccatttcctcagttcctgctcagcagttagtttcccttggtttgctctctcagctctctctaatgctctttcaagagcttccttcttctcattcatcctcttggatgcttcacatagtctctctaggctatttgattcagacgcctttgccgactccacctg

SEQ ID NO: 393109 - DNA, 548 bp, Oryza sativa
  unsure (1)..(548): unsure at all n locations
tgttcgtcgtgctcctccgggccggcttcccgttcggcaacgcgctgaccaaggagatcctggacctgccggcgtacgagaagtggttcacgtcgcgcttcacggtggccacgttcgagaacgagatgaagtggtacagcaacgagtgggcccagaacaacgaggactaccgcgtcgccgacgccatgctcaagctcgcccaaaagtacaacatcaagattaggggacacaacgtattctgggacgaccagaactcgcagatgaagtgggtgacgccgctgaacctggaccagctgaaggcggcgatgcagaagcggctcaagtcggtggtgacgcggtacgccgggaaggtgatccactgggacgtggtgaacgagaacctgcacttcaacttcttcgagaccaagctggggccgaacgcgtcgccgatgatctacaaccaggtgggcgcgctggacaagaacgccatcctcttcatgaacgagttnaacacgctggagcagcccggtgaccccaaccccggtgnccagcaagtacgtcgccaaatt

SEQ ID NO: 393110 - DNA, 566 bp, Oryza sativa
cagcagccgccgccggacctggcctcgttcctgtacaagaacaggatcgtctacctcgggatgtgcctcgtgccgtcggtgacggagctcatgctcgccgagttcctctacctccagtacgacgacgccgagaagcccatgtacctctacatcaactccaccggcacaaccaagaatggcgagaaattgggctatgagacagaagctttttgcaatatatgatgctatgaggtatgtcaaagttgcaattttcaccttgtgtgttggcaatgcatggggagaagctgctttactcttggctgctggtgctaaaggtaaccgtgctgcgcttccatcgtcgacgataatgataaagcagccaattggtcgctttcaaggacaggcgacagatgttgacatagcaagaaaagaaatccgaaatgtgaaaatagaaatgattaagctgctgtcaaggcatatcggtaaatcaggagaagagattgctcaggacatcaaacggcccaaatatttcagtccaagtgaagctgtggattatgggatcattgacaaggtgctgtacaatgaga

SEQ ID NO: 393111 - DNA, 393 bp, Oryza sativa
aaattaatgaacatgaaaagtataaacgatgatgattttgtgtgttccaagtaatttcactaacggattttcatttcaagctacatgtgctaaaaaaaattaaaattcctcccttttgactatgaatgacgaattttagtatttactttcaaaattctgtattttgctattcgaacaaaacccaacctatgaggctattaatctgtgatgtattgatgtcaccagagaggtttgccatccttattacatttcgtcactgggtcacgtggaacctgtcatcgtttctcccacggttcgacctgtttaaccgaatccgcctgttttttcttaagggtttcaggtttttcaaagctgaaagggggcggaagttccaagggttttccgtggcccgaa

SEQ ID NO: 393112 - DNA, 545 bp, Oryza sativa
gtccagccttatctcctttccccccaccacctccaagatatttccccacctccgccgccgccgccgccatggagtccggcctcgtcgcaagccaccgcctccgcgtccccttcgccgccggccaccaccgccaccacccggccgcgccgtcgcacctcctccgccagcggcggggcagcgtcgccgccaccccactccggctcgggctccacctccccacgccgaccccgctccgcctccccgctcgcgctcccgctccgcccttccctcccgcctctccgcgccgccgtcgcgtcggcggcggcaccggagccggtggggtcggcctcgcccaagttcctgggcgtggagacgaagacgctgaagaagatcgtgccgctggggctcaatgttcttctgcatcctcttcaactacaccatcctgcgggacaccaaggacgtgctcgtcgtcaccgaccagggcagcagcgcggagatcatgccgttcctcaagacgtgtgtcaacctccccatggccactcggttcatgctgctctacaccaagc

SEQ ID NO: 393113 - DNA, 626 bp, Oryza sativa
ggttgatgttctctccagggacatcagatgaacatatttcaggcgttcagtaccttcaagccacaggaattgatggtgcaataattgtgaccactccccagcaggtctctctaatcgatgtgcggaaggaaataaatttctgcaagaaggttggtgtgccgatcttaggtgttgtggagaacatgagtggcttgcggcaggttctctcagatttcagattcgtgaagcaaggtgagggaggcgagacggatgctacagaatgggcgctgaactatatcaaggagaaagctcctgagcttttgacaatggttgcatgcagcgaggtgtttgatagcagcaagggtggcgcggagaaaatgtgcaacgaaatgggagtacctttccttggcaaggtgcccatggatccacagctttgcaaggcggctgaggaagggaggtcatgcttcgtcgatcagaagtgcagtgctagtgcaccagctcttaaaagcatagtcaagaagctgatcgagaatcaagattgagtgaactttttttaaaaaaaggataattgaagactgagtgaactagtgatgatggtttctgggaacgggatgcggagatatcgaagctcagtgtagatatacctg

SEQ ID NO: 393114 - DNA, 411 bp, Oryza sativa
gcgtaatttgttgggcagcgggtgcgggagcagtagaggaggagaggtagatggatggagcaatcaagccctgctccggccgccgccgccgccgccgccgctgccgccgggcgatccccttaccctcgctctgtgcacccgcaccccgcacttaccccctccatggcgtgatccgatgatagcaacgagagcggtgcttcccctctccctgacggcgtcggcctccggcctgtacggcgcgcgcaccaagaagaggaggaagctgctgctgctgccgcggctgccatgtcgcccaatctggagagccacatcaagagccaggtgccggcgctgctgctgaggcgcttcttcggcggggcggggcggcggcgggtgttcgtgcagacagagactgggtgcgtgctgggcatg

SEQ ID NO: 393115 - DNA, 899 bp, Oryza sativa
ggccactcatggcggcatatggccccctttcacacgcacatcctcctctcctttatttatgaaaggggggttgggttagctgggaagaggaaggaagccgctgctgacatgtgacaccgtgtttggcatcacaccacttgactccactggctcagtggctgcctcactcactcaccaattcaccattgctagtgcaagagctcgcataaataggcagagctgctgctcctctcctctccctctcagcctctggaggaggaagagaagaggaggggtctctgcttcatctttcttcctgagctggcttctttactacagcagccatggctaaagagtatcctgcctcccccaaagctcagcagctgcaagaatccaagaagcagcggctcacctacatcctcgtggtgagcgcgctctgcgtcgccttctacgtcctcggtgcgtggcagaacaccacagtgcccaagccggcggcgagctcggcgatcaccaaggttggctgcgacccggcggcggcggggcagtcctccgccgtgccgtcgttcgggtcggcctcgcaggagtcactcgacttcgaggcgcaccaccagctcagcctcgacgacacggacgccgaggcgggcggtgcagccgttccccggcgtgcccgctcaacttcagcgagtacacgccgtgcgaagacaggaagcgcggccggcggttcgagcgcgcgatgctggtgtaccgggagcggcattgccccggcaaggacgaggagatccggtgcctcatcccggcaccgcccaagtacaggacgccgttcaagtggccgcagagcagggacttcgcctggttcaacaacatcccccacaaggagctcagcatcgagaaagccgtgcagaactggatccaggtggacg

SEQ ID NO: 393116 - DNA, 453 bp, Oryza sativa
cccccacgcccgcggatgatagacattcacggatgggctgtgaggtcggctgagcgcaattgctgaggtcacagggaggatctaggatcttctgcattctgaagcagccatggctaaagagtatccctgcctcccccaaagctcagcagctgcaagaatccaagaagcagcgggctcacctacatcctcgtggtgagcgcgctctgcgtcgccttctacgtcctcggtgcgtggcagaacaccacagtgcccaagccggcggcgagctcggcgatcaccaaggttggctgcgacccggcggcggcggggcagtcctccgccgtgccgtcgttcgggtcggcctcgcagggagtcactcgacttcgaggcgcaccaccagctcagcctcgacgacaccgacgccgaggcggtggtgcatccgttcccggcgtgcccgctcaacttcagcgagta

SEQ ID NO: 393117 - DNA, 460 bp, Oryza sativa
  unsure (1)..(460): unsure at all n locations
nnnnnnnnnnnnnnnnnnnnnnnnnnnnnnnnncatgccctccaaatttccagaggtgagaatggtattcacaaataaccagctaaaaatactgtcaacaaacatcaagctcataaagaaacaaagatcgcgctgattcatcgctgttgtaaaaagaaacatacaaaatctgactaaaaccctgttttcctcaaatacatctgatctctctccttttcttttcatgctgttaatgcacagcatgccctccctcagtgtcaaggacatgtcaaaatcttacattaggtttgtacagccttggtacatcaagcctcatggaatattttcttcgacatgccaaacacaagctaaaccgaatcgttgtgcatttctgctcacttgccgggtttcaaatcaaacacacggacggggctngggctgatttcaactgggataacatggtcncttgtttaacggccaa

SEQ ID NO: 393118 - DNA, 493 bp, Oryza sativa
atcctgagaaaattgaggaaagtgaagcaaagcgagacggagtctagggaaatatcgactccgcccgcggtggtcgtcgcgtcgccgtctcatcacatctcccccccctcctctcttcttcctcccctcccacggcgactcgccgccgccgccgacgccgacgccgatccggtctccgctccaactccggcgagattggatttgggggcggagcgattccgatcggggtccatcgcacggaggaggaggaggagggggtgactcgccgtcgcgcggccagatctgcggcggctgcgcggggggaggcgccatggagggccaacagggacgacgcggtcaagtgcctccgcatcgggaaggccgcggcggacgccggcgacagcgcccgtgccgtcaagttcctttccaaggccaagcgcctggacccgtccctccctatcgaccacctgctggatcctttctaaaccaggacgaccgccttgtcttcgcttgt

SEQ ID NO: 393119 - DNA, 504 bp, Oryza sativa
  unsure (1)..(504): unsure at all n locations
nnnnnnnnnnnnnnnnnnnnnnnnnnnnnnnnnnnnnnnnnnnnnnnnnnnnnnnnnnngctgaaacagtgaaacctgctaccactttattttctgtagaaaattacaagaacgtgttgcctccttttgacatattcgttcgatattcttttattctttccctctctgtgtacagaattacatgtgacaactgccttctgctttgcgtttcccacacctacggaagaatgggtgcccatcttgaattttatatacatgtcgcgccttgttaaaatgaacaattcgtatacacgaaccgaaaaccacaacacaacggccactgccattttgcactttcatcattccaaaatgtgcagcccccatttcgctagttctctacttccttgtaccctttatcatgggggcgggcctgaggagcaagtgcaatgcctagaatgtttggactcacaggggaaactctttctgaagaacgtcagggtgcgtgaatcacatgcagcgatcatg

SEQ ID NO: 393120 - DNA, 531 bp, Oryza sativa
tttttttttttttttgaaataaattaatgatatataccttctgatttgggatggtgggagcagtaatttttggtttttatttaccaaccaacccatcggtatacacaaagctgcatgggattcatttattacacagaattccacacgtgatatatatgattaccgcgcacagtgaaacccaacatatatacgtgaaacccaacgtacggagtgtctactaacgtacctgattcacctcaataatttttcttggaatagatcctcctttagtggcaaaatccataaagtgagcaatcgtggaatggttagcattagctatcttgacggatttgaatcgcttctcctgtcctggctgccgacccatctccgtgtcaaacgccaacatgctgatcaggtttatctcgccgtctccgtcaccatacgctgccaccttcggtgacgcgtctaataagtcatcgtcgtcgtcgtcccacaacaccagttgcagcggcgtcttgttgcccaccgggttgatgcacgtcatgggcacca

SEQ ID NO: 393121 - DNA, 518 bp, Oryza sativa
  unsure (1)..(518): unsure at all n locations
nnnnnnnnnnnnnnnnnnnnnnnnnnnnnnnnnnnngccttcgtggagcacaaaagagatggattgacgattcacggatcacattctttttttgggaacaagaaagatccatgcttgtattggggtcgaacacgccttctctgactgctgctgcttgctcattcattcgtaggggttcctgaagctcttgaggagatcggggatgtcgtaggcgagcatgtcgtcgacgccctgcaccagcttgggcttcagcctctcgaacttgtcgaagttgtaggcgctcagtgtctccctgtactcatccacgctggggaagtcgccggccggcaagtgcagctccttctgaaccttggcgaactgctcgtcgagggggtcgagcagccgctgctgcgccttggccttgcccatcagcgccggcatctccttcttcaggtggctgattatgtgagcatggaccttggctgaccttgaacgcttcacgaattcgttgattcgacggtcacaggtttttttggaat

SEQ ID NO: 393122 - DNA, 565 bp, Oryza sativa
  unsure (1)..(565): unsure at all n locations
atataccagcacggcaggaccagcatatattaccaagtatctttattgtggcatataatgaaatagttggaaagaaagtacatgtttaatgacctcatcataccagctaagaaattgcaacgaagaaatggtaagaacatcaggactgaaacatgaggtcagtatctcaaatatgaaaagtaagccatcgggtctgaaaaagttgaacatcatcgcctcaaagcagacgtacctaaacgacaagtcagatacctttcttcagcttaatccatctctagctgctattttctcagatgtaacacctggaaattcagggtctcaagatagcatctaaagaaatcccaattgcttctaaagctcgctagcatatcttggctggataggtgggggcaaaatcaagcatggtgcctcgggaactgcattttcggcccatatgcacgcacaccatcggtggtctaccatgagaatatatctgggcgctgggatctttcctatcccctgggtagaacggggcaaagaatctcgatggggccatgctaacaaactctaatccatgggggacant

SEQ ID NO: 393123 - DNA, 521 bp, Oryza sativa
  unsure (1)..(521): unsure at all n locations
tttttttttttttttcnggcgtaattccctttttctttttcttagagaaaatgtgaatcacttgtcatctgttgcttctaataatttgtgtggttttattgtaacttggacaacaaaacgtgtagttttgtgaagtttactcttgtatagcctaaacaaagaagcacatctcaaactcatttcatctgtgacactcaatttcgatgttcaatgaaaaaaaagaaggcaatgcgtgcgactcttttcatccctgtttcatttctcggaggaacttcttgaaccaatgggctgaattcttggggtgtctcttcatcccatcatcgtaatccacaaagtttagcccaaaccggagtgtgtagccatccgcccactcaaagttggtcaagcagagaccatgcaaaggaacccccttcacgtttgctccatccctcatagcattttcgcagggcgagaagggtgctttgtgataataattctatcctncgtattataaattcaggggcctccttggagtggcatgg

SEQ ID NO: 393124 - DNA, 668 bp, Oryza sativa
  unsure (1)..(668): unsure at all n locations
gccgatcaaaaaagagatacagtattgatttttattttacaacccaatgagatgtttctcacttaaaacatgcatatacagggtattaataccgacccgtccccttacgttatgtagatatcaaaccgtaattcatttttgaattccctcagttcagatatgcatgccaaaaaacaacaaagatttgaatagaatggaataaacgttttgacactccttgttgccaatgtcccttatgcatatgatataataggctacctggacaaatatccactaaggactagctgattgagtcctccgggacacttgaatcctgaagaacacgatcaggatccagctgaccactgtaatagctagatgggacagcagacagttccaactttccagtccactcctcaccaggcttcaaagtaatcggcttttctatagcagctgcctccacacagaccatgcgtttatattcgtcatccccaaagtctgacatagccttagccttcttgtcccnngggttccnnncnncngcntcnggnnggccncctttcctcnccncnggtgttcttttcttctcntgntccntnntggcggtttttgacggtgtgcccngttatattaagtccccttcngnttcnnnnncnnttgcgtcccctagttatgtgcggncgagtaaa

SEQ ID NO: 393125 - DNA, 1232 bp, Oryza sativa
atggcaggacgcttacctggctctggattgatactcaaaatgttccttaggcaccaagactatctttagttatggacaatataagctatagctttccaggcacatacaaagaggtttttgcatccaaagaaatgaagcttaaatacgtagttgatgatatagctgcatcctctttctttaagcaccctattacaagcatattaaattgtacaagcaccttacttttaccgggcaaattgtcccattgctactttgttgttttcatacgactacttgggacagattattattacttgcctaataggacggatgttagaaatgcatatgttccaataaaataacaaaaggatgcagtagcttgtttggggttcatggtgaaatttctcgagggtttgcaagcagatggagaccattgtcgatatggagagtgaacattgttttatagattggctccttggattcatcttccagtctgaacttgaagaaatgtatcagggtagcagccatgatcttcatctgcctgtgtgcaaattctttccccaagcagatacgtggcccagcattgaaagacacaaacttgaacgggctctcttgctgataaactccattcacaagccatctttcaggcctgaactcctgtgcatcctcaccccaaaggtatgtcatcctccccatgggcataaatcatgtagttaattccatctccttttaccactctatagccatttggtagtacatcatcctcgtctgccatcttagcatccactgggacagcaggatatagccggagtgtctcggaaattgtagcctggaggtagtgcattttgctaattgcaccttcgtccagtcggtttggtgaagctttcaatagtgttatcttccttgctccattcaacaaactctctgatttcaagggcaaccttatcctgcactatggggttcttgcatagcaggtagaagaaccaggtaagggtatttcctgtggtgtctttcccagctatcaggaagttgaggactatgtcacgcaagtagcggtcatccattgttccaggatcttgctcacttgctagtacaaatcttgataggatgtcctctttggttttatagtcagctgcaatcttcatttgctctctcttctgatggatcagtttcatcacaaagctgtcgatgatctgaatgttcctcttgagtttggcttctgatccaatgttaagataccttttcagtttcca

SEQ ID NO: 393126 - DNA, 466 bp, Oryza sativa
aaagggtgaaagctaatatcacaaaattataatctcccttataatatttacagaacttacacaccagttttatagcttcacgttattccttaagcaccattaaggttttgactaaacttgagcaaactactaaagagacattggcaaatctttttttttcttgaaacctatgttacatcaatttgttcttcaaaatgcttgtgaagaaacagttttgacaccagcaacaaatctgttgcatcaataccatgaactagccagtagccaccattttttcagctacgaccatctccaacgacaaaacgatagccaccaacgcttcaatggtgaaaggctaaaaaatccacctttcagccctagcctccctcctaaaacccagtcttctgatcctgctctggattagctgaagacagtaacttcgggtgaggctcgatctttttctcgtcttcatgggatagagcaccat

SEQ ID NO: 393127 - DNA, 703 bp, Oryza sativa
  unsure (1)..(703): unsure at all n locations
gaaatcagcaatggtatcttcttggagttgctcttccaacttctaattgttcatttcaaagaatacaacagttccaaagaacggcatatgcatctatcagaccatcacccgggatttacatccaaaaaacctttttgattctaacccattctgggtatcttgagatgtataaggggtatctatccccaatctgtaccgatgtctcaaaaattacaggggagccgagcttttaccttataagacctaaagtacatctacaatttgtatggaatgaaagaatggctgggattgcttgcagttcgctggtcaaaatcattctgctgctcttggtgacctaagagggaggccttcagcagcagacctgagggggatgccttcagccgcatagccatcttcatcatgtttcggtattcggataggtagagttggtgggagtccatcgaccatatctttcgtcttgtgaagaagaaacgtcccagaaaggatggtaacaaaaccacacatctctgtcacaatttgagttggattttgacgatcccagtccttgaacattatcacactagccaaaatggttagtgatgtaaacattgtataatatataggcgaaacaactgcagtattgaatgtgtcaagagccttgtttagatagttcatctaagttagtatacatgcnncancancaatggtgaacatcagtatctaa

SEQ ID NO: 393128 - DNA, 452 bp, Oryza sativa
atcacgatgatgccaatgacggctttcattaacaaatgaaattctggtacatgtacactgcccaaatacaacactctttacaagatatctatctatatgtacacgttatttacaatatgtacatggcactgcttacggaaggctcaccaaaacgggcaccacccgacgtagttttggcacaagttttcatgcgaagtcgcttgaagtataagcctctgaacctgaaccttcacggataaaccaggttccacctctcgagtgtctcctgaagccagatgctcgttaccatgttgggtggagcttcccgcccccgacaacgatgatccggaagagaaatcgcgccctgtgagcttatgactcattcgtgccatcacagctacggcacgctcattcaaaacctcgttagcatcaccgagttgattgaccgccttgagcagttctctctcccgagc

SEQ ID NO: 393129 - DNA, 406 bp, Oryza sativa
gcagataactacatttatataaatacatgttttttggttggagtgaagtgatggaacaggggcaaaaacatttctgatgctgaaccctatgctgaacggaacaagcaggatgctggcagcataccaattagactaactgaactatcaacaatgaaattttacaacagaaggggatatacaactgggggttaaatgcccccctacacaaataccaagctaacattttgctatattacaattccttttgacttcagacatggcaattctgtacgaaccttgacttgatttttatcaggatccaggaaacctaaacgaatatataaataataatgtacaggtgctattctttgagaacggacttatggcgtggcaggcgtttaagacttccaataaaacaattcccttt

SEQ ID NO: 393130 - DNA, 585 bp, Oryza sativa
  unsure (1)..(585): unsure at all n locations
nnnnnnnnnnnnnnnnnnnnnnnnnggaagacgaatataacaattaacattataaaaaaatttagtgcacttcacacatacaaatacaatgcaagatattagactgccaaatttcaaaatccagaagcaaagaataaaaggggcattagtgcattactccataatttctaggaatcagaaagagagggattagtagagctgattgtcgcaaaaaaaaggggataatatattcagttccaaatgactaaaactgatcccaaattatggttactacatagtcaaaagaaagaaggctgcggaagacggatcgatgatggccatgactgtacttgaaacaggacatataccaccataccggcctgaaaacacacgcagaaccttaaacgagtacctcattttcaaataagtcaggcaacctaaactgactttaagctctccaattacatccataaacagccggccgagaagtactttcatttgcaagaagatccaactattggcataacaatgtcctcaagcaacggtttcaaaaaccaaagaaaccaagctcggttgccctctcttttttgaatgtctcgaagtact

SEQ ID NO: 393131 - DNA, 1159 bp, Oryza sativa
  unsure (1)..(1159): unsure at all n locations
nnnnnnnnnnnnnnnnnnnnncacncacaacgaatattattaactgatgcagggaaactgttttaatgagaatagtacattgttcctctggagggagggatacactcatacacagtgcatgctatgtgatactaacacaaatgataaactgccatgagtactattgttgaaactttaaatggaaaaacaatccctcatgataaataacctcaaaacagtatctgttattgttacatgactcaacagtagagggttacatggatcacggatggaccgacacttgtacatacagatacagatacaaatacagaatgggtcatgtgcagcagacagacgccttggggttgtgaatggcctaaatcaataaattaacgcaataatgaaaaacaaaaacaaatgacacgacaagcaacacatggtcaggccaacaccgcagcaacacaagaggcgggaaacgaggctggctgctacaaaactgacacaggatgaactccagagaactcagaacaatgctgccaccggctttggttttggttggatttctcgtgttccgcatcgccagcactcaaagaataagcggcatgctggtcagaagttcaaaccaagcgaggccagatctgttgacctgctaaaaccacccagcataacttgccatcctggcgcaggccgatctggctggctgtctcatcaacaggttcctgattcaagatccacattttcaccttatgtcatactgatttaagatccacactttcacctcatgtcatagcatgtgggtagagagcacagtaaattgtaaaccgcctcagcttttgggcgctcagatgcaattcctttagtgcactggtagaagagatctatcaacagtcttagtttttctgcatgagcatcagatgtgatacccaactccagcctcgtaattggcttgtctaacgtccagaacgcttctagttcttgagttagtcttggtctttgcttcttcctcattatgagatcatatatttctgaatcaggtaggccctggtagggtatccgaagtgtaagcatctccaataaaaaacagccaaatgaccagatatcaacttccagtccatattggtttttgtctcgcatggcacgaagaacctctggagccatccagcatggtgtaccaacacaa

SEQ ID NO: 393132 - DNA, 429 bp, Oryza sativa
tgactctcagcgtgccaaagccgctcgtcgatttcgggaacaagcccatgatcctgcatcagatcgaagctctgaaagaagttggagttacagaagttgttctggccatcaattaccagcccgaggtcatgcttaactttctcaaggacttcgagagcaagcttggtatcaagatcacctgctcgcaggagacagagccactcggaaccgccgggccgctggcccgggcacgcgacaagctcgctgacggctccggcgaccctttcttcgtcctcaacagcgacgtgatcaagcgagtacccattcgccgagctcatccagttccacaagtcccatggcggcgaggccacgatcatggtcaccaaggttgacgagccttccaagtacggcgtggtggtcatggaggatgagaccgacaaggtggagcgc

SEQ ID NO: 393133 - DNA, 458 bp, Oryza sativa
gcaagaactaccaacaaccacactgttacttcagagaagaaccaaaggtaagtgcccctagtatttacatcgatgctaacatttgagttcctcctatgaaattcaggagggcatgctaaccacagatcacagaatatgtcattgcaaatggtcaccagaatgctggttgaaattagcagagatcgatcgggactcgctctgggttctgagctctttcttgaccctcagagagcttgacaccaagctggcctttgatccctcccccaaaggtatacagtttaccggattccatgagcgcgaacgtatgcgggtatcccatttctgagttgagccaatatgaagaatttgttgggctaatctgtacgccttatatttaacaccttaagtgattctaccaagcttggggtagaaaaaaatcgatatctgctgcttcctcatcctcctggaacctattttca

SEQ ID NO: 393134 - DNA, 416 bp, Oryza sativa
gcttctaagtccttgttattgaatatactgcattggtagtttggtacaaagtgatccttcggtattgccctctgatcttggactgaacaaaaaacaaacctgaataagctgccttctagaggagataatcccaatgaaatcaggatagtttatcacgatgaattcaaccacaccagaagaaaaaattatagactcaaatgcttgtattcctcgatgtactctgctcgattctaaaatcagattagagtttgacaccgcaagagatgaggccacaggttggcctccgccggcgcccggagtgcggagtcaggccgcgcgcttcatcccgccctggcgcccgaatagccccgcctgcaacacccaatcctcgatcatctcctgcgccgcgcggccgttgtccgccggcatgaggtgcc

SEQ ID NO: 393135 - DNA, 464 bp, Oryza sativa
acgcgcccctcgcatctttcgcgaaggcgattcaggcgagaagagagagagagagcgcgaggccggcggttctagaagcttccagacccttcggcgcgagcgagctcacctcccccgtaggagctgttcattagatctgaataagggggattgaagcagtgaggagaagatgagcgtggtgggctttgatctagggaatgagagctgcattgtggccgtcgcgcggcagcgcggcattgcatgtggtcctcaacgaggagtcgaagcgggagactccggctattgtctgcttcggcgacaagcagcggttcatcgggacagcgggcgctgcttcctccacgatgaacccgaagaattctggttctcagatcaagcggctcctcgggcgcaagtactctgctcctgagctccagcgtgcatattgcggccttccccttccgagtctcggaagggcctgatggatt

SEQ ID NO: 393136 - DNA, 533 bp, Oryza sativa
tccccaaaggaaaatggggcagacactaggtctctccatgaacctacactatcctttttctttgtacagggtaagcactaagtggtacaaaaggaaaacactcattaacactcaccatgctgacaaaaagaagaggttgaaaaaaaaaaaggaatacataatcacacaaagagaaaaagaagggcaggagctcgatacacaaggggctttgtttatactatacacatgcacaaacaaatgaaacccaaaaatgcacccctgccaaacaggtattcatacagaacacaaataataacagggcgttgtgttgcacctcaggccattggttagcatcaatcggagcgccagaccttgcttgtgaaatccggtttgcgtagatagttacaaggcgcagctgcgtgctgttaagcccttccaaatacgggacgaatgccttcccaacatgatgagatatccaccagcagaataaacagtctttcaacatcagggctttgttactaaagcatcaacagtgctggcaaaatgtgggcact

SEQ ID NO: 393137 - DNA, 532 bp, Oryza sativa
  unsure (1)..(532): unsure at all n locations
nnnnnnnnnnnnnnnnnnnnnnnnnnncaaaaaattgtattctgaataatgagcataatatccaaactgaatctgttgacagcggaattttccagttaatccgttacaaaactaggaattcggttttactaacataaatcacatcagcatggattacaccatctactctctctttgcctaccaaagaacaagtggccatgatagctgcaattgcctgcaaacagttacagcaaaaacaccactttctctccacatgggtaatcaccaggtcaaactatccacctgaagatgaatgcttcatgttgtagcctgaagaagcccgaacctgaattttctttgagcttgccagaccagagctttagtcggagcacaagcggtttcttcataccagctcctgatccttgaagctcgacagtttcgcattctcccggccacgcttgaacacaaggtacaagggcctgtagaacaggacgcagacgccgaaaggaacaatcatcattgtcagaagtcccctggagagcgcatacgctcc

SEQ ID NO: 393138 - DNA, 516 bp, Oryza sativa
agaacatcagtgaacgatggattttttttaaaaaaaatcaaacagtgcatgtctagataaaaatcaaacagtgcccttgccaatcgaagggtcactcatgttatcatgtatgtacatctcaggttaacaggaaggtttgtattagcgccacacgagcgacgcggccatgctcttcaattccctactgggcaacaccgcaccaccagtttggatttagcgtgtgaaaaaaaaagaatcacattacgaatctcgcacctaaaacgctacatgtcaaccaatcagaacgtcgaggccaagacgaaacgaaatcctcatagtctagtcatcatcctcatcatcgttattgttgttcgcatggtatatcttttgtgcacggtacatatcagcaacttgctcagatgtggttgcctgttctggatttttatcatcacgaacacgtaacatgcgaggaaatcttagggagatgccccttgtcggatcaactataccatttgcagcacgatgcacaggactaat

SEQ ID NO: 393139 - DNA, 466 bp, Oryza sativa
attgggaaattctttccaagatccttccatctcgtgcaatctggcgaccagaagggagcgcagtgaaagatcattcgctcaatatcaatatttctgtgcatttgtgcttcaagcaaaggtgaaacagagaggttcaagtgtacatggaaattctatacgatttaaaggactccaaagaaaggattagtgatagcagaattcagctcggctccagcagtgttcaggacggccttgtcaaccttgtcccttgccaagaacaagaactcgttgccttcaagtttctcaaatccacagagctggagaaactctatgcctccatgcagattgccaaccctctcctgaaatgtagcgttggacagtctgatcttcctgaatttctcctcggcaggatttttagctacattgccaatgtaggtaaggagggtttgaaaagcccttttcactttagcatcgccatccttggtct

SEQ ID NO: 393140 - DNA, 468 bp, Oryza sativa
caaatactaactcccggagttttatatgatttcgctcggaattaattaccgagaaaagaatgctgtacatgacaaaactctttgctcccaccacatctctttgctcccgatttctctctcttcctgaatcagacaaggttatgtaattatcttcacttcatcagatgtaaaactccacattaattaatcttccttccttttaatgcttcgacagcatatgctgatcacttgttcttgcagattctgcttccagtgtcacctcgccggagattagcattgtccggcgatgatatcgccattgccggtcatcagttgcagatttcacctacggaacggtggcggctccttctggaatgttccgggagcaaacaccgggaaggactcgccgccgtgggcccttgtccccgccgtcccctcagactcatgcttgacagctgccttaatcccctcataaaatgctccccccta

SEQ ID NO: 393141 - DNA, 473 bp, Oryza sativa
gaacatgatatgataatatcagagtctgtcctgcagaatccccacaacagatcgcccaaaacgaactattttttctgtttacatactactaactaatataaccccggttctcaatcaactccggttctcaatcacctccaagttagttcattccaacatcaacatcacatcacatctcaccgaagcaagggggggatgctcctgagaccaattaacaatcacacgtaaagggccaaacggccctgcacagacaaaatccattacatcctactactactctccgccgtcaaagacggcgaacggcagccatagcttttgacctgctaatctctgaacatgttagacacgacggggtcgagatgacatcgggcatcacaccagtcactggcatcaggttttgatccagatactccattcatctacctgctggaatcacccaacaaaagatagcctgcattttagcgatcttgggg

SEQ ID NO: 393142 - DNA, 478 bp, Oryza sativa
gtggaaggtaaaaaagaagccatttcattagatatttttctatggtacaaaatgattgcaacgttataaatagctctaaataaaaaagggagacctcctcctgtgactaggcagcctattggtgttacaaatcacaacatggggttgaagtaattcacttagtacacgatgttgtactacagttatgttcagattgctcgaaccccaaaaaggctgatccttcgtccttgcttgccaccctttcatccattactggtttcgtttccattttctctttaatttcgtttcattgctcgttcgcattcattacggaaacagaaccgggcttaccctttggctttttggctttgaatgaaatcatcaagtctaaggggtcttagacccgtattttggctacacggaccttccttcttttcttcttctaaaagttcatgaactggcctatatgctgaagctatacataggttctttaaatcac

SEQ ID NO: 393143 - DNA, 448 bp, Oryza sativa
ggccgcccttttttttttttttgttttttttttttgatcccaatttcatactatttatgaactgccttgatagagtacaatacaagaccccacccatacatatgagaatgaaatggtgttctgaactcgtgagagtcccatctaaaagctggggacacttgcgtcttatttagacagttaattgggaatcatttctagtactagtaccaacagtaattaatagagctccccattgatgacgtcatcgcagattgggttggaggaaggatgggggattctagaacgcacctcgcagtcgcagcaggctgggctcgagcggcggcgggagggacgaggaggaggagatgccgtcgtcgtcgcagtcgaagccgcagccgcactgcggggactcgaggaagttgtcgacggtgaaattcggcggaggcgatgcctacggagaacttcgagg

SEQ ID NO: 393144 - DNA, 650 bp, Oryza sativa
aagagctttctgatgcagctgatcacattaccactcctaagatagtggagtcgctaaagggtgtgtttgtagttcaagcagccattggtggttacttctctgcgtttctatctagagagggtcaggtttacacgatctcgtgggggcgaaccgagaggcttggccatagttcggatccttcagatgttgagcctcgtcttctctctggaccacttgagggtgttcttgttgcacagatttctgctgggaattgctatctccttatgttggcctaccagccaactggaatgtcagtgtattctgtaggctgcggtttaggaggcaagcttggtcacggatgcaaaaacaataagggcacccccaagttgattgaacatttcctgacattgagctttaatccggtttcagttgcggctggcacttggcatgctgcagctctaggtgacgatgggcgtgtctgcacctggggttggggccatactggctgtttgggacatggcgatgaggagtacagggttctccccactgtggttcaaggattgagcaatgtgaaggctgtgcatgtctccaccggtgaatacaccacctttgttgtctccgataacggcgatacatacttctttggatccgctgcatccctgaatataggt

SEQ ID NO: 393145 - DNA, 546 bp, Oryza sativa
tactgttgcttctatggacaccgcaattcatgaggatgattcagaaatagttgcaatgataaaagagttgctggagactcgcattcgaccagctgttcaagatgatggtggcgacattgaatatcgaggatttgatccagaaacagggatcgctcagctaaaaatccatggcgcctgcagtggatgtccaagttcgtcagtcacattgaagtctgggatagaaaacatgctcatgcattatgtccctgaggtatctcttctgtgctttatttctgtttcctcaaaacctccactccttttggctcattatataaggcgttttatctgataagtaaaatgttgaaagaagttgcaattcctattagtttgttcagactgcttaaagcagtaatttatcctttgatctagcgaaattttaatatttcacacttctttggcaggtgaaaggagtagagcaagaacttgatggtgacgaggaagctgaactgactggccagttggaatgacttttctttcggccaaatctcaacatcttcacatgtcgag

SEQ ID NO: 393146 - DNA, 495 bp, Oryza sativa
cgcgctttcatgcacggcaaggtttaatccggaccgcgagagagccgcgccaaagaaaagaaaagaaaagaaaaaccacccccacaccgtaccgtacgaacagtcgtcccatccccggaacccacgcagcttcgccaacacaagagatggtaagctagctaggtatagtacgttcaaggaggagaaaggccggacgcgagagatggacgccgtcgggcagctggcggtggcgccatgctccccgccgccgccaggcggccagccgccgcagccaccgtgcatgacgacggcgccggagcagcaggccgccgccggaggcccgtgatctggccggcggcggcggcggcggaggccaaggagaagatggtcgtcgacgcccggaccatgcagctcttccccacgcgatccgcagacggcgtcgtcgtgtcgccggctccggcgccggcggcggcccaagaacgacgacggccggaagtgcatgtgacgccgtcggtg

SEQ ID NO: 393147 - DNA, 487 bp, Oryza sativa
ttttttttttaaattttaagttgaatgcttataataagatatatcacatgttaatacatcttctcaatttaacatacaagcaacgatgagacatcccctcaagagtttaaaatccaatctcatatataatatcgtgggggtggtacagtttcatgtagatatcttttcatggagtgctactgctagctaggggaacttggtcactgataataataactacagcaggtgatcatgcaagtgcaaaccaagatagatactccctccgtttcatattataagactttctatccattgcccacattcatatagatgctaatgaatctagacatatatatgaatgtgggcaataatagatagtattataatatgaaacggaggaagtatatcttatgcatgtgcaccggcaacaaaccagctaattacactatacatacatgctatgctggctggatcttgctgtttctcattctccagagcccccagaaga

SEQ ID NO: 393148 - DNA, 452 bp, Oryza sativa
tttttttttttttttaatatatggaattaacaagaagctgcattggaagacaggttccagggtcaaaatccctaaagggtacactcagactcaagacatattctcggctaaaaacttcttttttactcctttggaaggcagtagtactaacaaggtgttctctgtctttccaatcaaaatcaacctactgggtgtattgggtcaacaaaaatgtatggaaatgggataatgcacgctaatccttttgacagattttacatggttgtattcgaaaagggccttgctgtttggagctcggattttagattactccaaatgctgattgcagggtggatgtgatgcgggatgtgatcgcattttgagcatgaccttcaaagtaaccccggatattcttcttggcatctttgttgcatctggtgaacccaacaatgtttgccagggttagagtcaag

SEQ ID NO: 393149 - DNA, 488 bp, Oryza sativa
ttttttttttttttatgtatatgcatattgcataatgttaacttgtatcaaagtcccaagagatcacaacctggatgaataaattaggtttaatacaactgtttacaaaattatcctgatgactagctgagtcgacttggagccaacctcggcaaaactttaattatgtattttaatcctatataattgtatttgagccttttttccaatcctcatcagatcaatctgacttgcttgcatacatcttcagttcttggaatgctttccggcaaccttcatcaaacccacctgcaagctgatgttatgcggaaggcaaagcggacaccttggagaagcagttcttcgtcatttgtgaatgggttcggactttcagtggcattcacaacgcggtttcatggaattctcttgctagcttcaatggaagccatctttagtgggctttatggttccagagtccagcatccaattcccaaggggtcttaagatcc

SEQ ID NO: 393150 - DNA, 606 bp, Oryza sativa
ataaaatatttaatcatttgcggggaatcaagcattcaagctaacagatatcaggtgtacaaaatcaacctcgaaataatgaggtgatatgttgatacatgccaaacatttcaacattgaacagagttgtttaggtgtttaaaagtggcacacaactatatcacataacaatagaattaactcatgtaagtttatcagagtgttaatacaaaagaatgatcaaatacaatcaaatagcttgtaaccaaacagatgtctccaactcttcacacatagaacttttttggcttagccctacaaactggaagacttaaatctgatggtcggtgaaacctgatagaggctctggaatgaaatatggctcaagcatacatacgtgttctttcttgcttgatacagcagagtgaataaagttctcaagtcaagggcagaccaatatacaagccccaatcaataaccactcactccatgtcttcatctgctttacagaatatgatggtagaaggcatgcccaagcagggtgcacgtagaacaaaattagggcccattcaataatactgcaggccatgctgttctacgggacccaagtagaccaacgtaataccc

SEQ ID NO: 393151 - DNA, 527 bp, Oryza sativa
aaagaatactgcataaatttcatactggacaagaagaacaaattttgaacgagttaaaagaagttccaggtaaactgaactgaatgctctatgctctctcccaaacatttcattgggagctccacgaaaagggggggggcatttttctgaattacaggtcattttagggggtagctaagcagcagcaagaaatgggggggttgctaaacaaggggcatatacggattataccgaaagaaatgtaattcagcaccccattattgcgcagttataaacgaatacaccagcacgctccttcaccgagagcacttcccagtcagcaccaccattcccatcttcagggcaccaagaatgcagcaatattacttcaccacggggtactctatggccaccaataacaagcaatctatcaccacatgccttgaaagctaggccccaaccattggaagagtcagctctgactggcaatggcttcactatgttccaggtgttatttccttttgcgacttctttacacatttgttgct

SEQ ID NO: 393152 - DNA, 675 bp, Oryza sativa
acatagcaatggattatattcaatactaatatctgtaaaaatcaacagtacagtacgacagttctagtgcaacttatatatacggctattaccatttagcagccaaattacatcattttgtcaaaatatccgacaacagcgtgacgagcacgctggcacctacggatacaaaagttacatgtagctggtatccagattccacccagctatgtaccaaaaaaaggtaggaggagaagaagaggagagaagaaaaattaacccgcgaaaaaagaaaacctcaatggtgctgcagtaagatgatgagccatcagagtgatctgaagctttctattgggtctgattcctcaagcattgaggctgcctggaagcagtcagcagcatcagctagcctgccatcatgcttgtggaccttccctaggtagagccatgccatccggttcgtcggctcgtgccttagggcgtccgagaggaagctccttgcgacggggagatacttggggccttgtttggacaggagggcgccgatggatacctttgatggtacgtgctccacctcggtcgagaccgcattgaagtatgcagccagtgcgtcctgtgtctgctcacgcacctcacgcgtgtaaccttctgcatgaagcgttatggccgagaatgatttgagggctttagccatat

SEQ ID NO: 393153 - DNA, 628 bp, Oryza sativa
  unsure (1)..(628): unsure at all n locations
tttttttttttttttatcaaaacntttcataagtattaggatagcatacaataaacattttttttttttttttaaatcaaactgttgtttatcatagtaaatcttcccggagaatcagatgctcagaattcatagtgttcttcagcatcttacaacttacaagatggcgcagatatacaagcgcaactatcttaaagtaagctgtaggaggaaatggaaccatttctaacaacgggaaaaatataggttatagaaggaaaccatttgaacaaattaatagggaaataaattaggaggatcgtttccgtccgatctcaatagaactggacgtttgatacgtagatggcgtctggcatccagttgaccgggatgacgtctttggcgatgaggctcttgccggactcggtggtgacgcgaatggagaagggtgccttgagtggcgtggcggtgtccatcctccagatggcgccccacgacagcttcatgggcctccacgctggcaatccggcctcctggaggtccatctggatgacgtcaccgtcgtcggcgacgaacttgacgagcacggcgaagtantggggtttgagccctctcgangtggaaagtgaccttctgggccgccggggta

SEQ ID NO: 393154 - DNA, 319 bp, Oryza sativa
ggcaaggaacaggcaggtatcagattttcacattggaccgtctcctctcgaaagcatatgtacatggcgcacgcatgcaggtggcccgggtgtctgcacaaatatttttcacgcccacataccgtacttcaccggtgtgccggtcggtttgatccatggttcggcgcgcacgaagttcttcagggagaacattgccggcctccctttcgctagaaaaaaaaaagtcccctgaccaccatgaaccggcggggggtaaatggggtaatttcctttttgtggttttctgtgttatatttgggagtttatggccccccccccc

SEQ ID NO: 393155 - DNA, 488 bp, Oryza sativa
  unsure (1)..(488): unsure at all n locations
nnnnnnnnnnnnnnnnnnnnnnnnnnnnnnnnnnnnnnnggtttttgtaaagttgtttgacattggacagtgattctaattggcgcgaacagtttctgatggcatcagccagtccagtcgtgtaggaacgagctgtacacacggttcatttaatcttaacatcctattgagaactcccaggtggtaacaaaaatttaacgtccctgtaaaacccgtattacatataaatgaacagaaggctctcctttggtggtcagcgtgccaaaatcttcacgacggaatgacgacacagagctgtactaaccagtgcaaaatcttcgtcaggcaatagtgttgggcatgtatggatcagatgaagggggactgggctttggtgttccttggcatgtgtttgaatagtccagccgcttgttggaacatgatcaagcccagaaggagcaactcccgagcggcaggggaagaggnttgtttctaccatctacttgttt

SEQ ID NO: 393156 - DNA, 453 bp, Oryza sativa
  unsure (1)..(453): unsure at all n locations
ttgccaaatgcaagcctggattggtactaattgctccctaaacagnacaagactcatgatatggatcattgatgccaccagatgccattgcaaaaattttcaagtacagtaaactaaagaagcattatatgaccccgatgactagaaaaaggcagaaacttcagtctcaagattggaataataggaaagcaatcctaccaaaaaagaaaagaaagaaaaatggatgtctatctacagaagcataagcacatggacaatgcactcttttacctacaagaacactatagggaaacaggagaggtccagaggagacatgtacttatttgtattggagatatatgatgcttcaccggccatcagccgaggggaacgattctgcaaacccggcaggccgagctgggatgctgcccttgctgtcctcaaggntcaggatgcttccanctgtcatgctgg

SEQ ID NO: 393157 - DNA, 494 bp, Oryza sativa
tttttttgtttttttttttaactactaataatacctgtcacaatcttccattgatttctgagttgtaagtacaaagagatgagattgcaacacggtaagtagagcacacacacatgcatgcgtactagctagtagactactagtagatcgcctttttcttattacaccaaccagcaaactacgtcgagatcactcactcactcactcaaagctgactgactgactgactgactgactgactgaacaagataattaatttaagtaagttaactagctgctaatgacacactcttaccacattgtaatccaataattaaccaactaattaaagttcggtagtaatccacactgctaaattctgtccgtcatcggatccggccatcgtcgtcgtcttcttcatcagtagcgagaatctgtcgtcgtcgagatcagtcgtcgtcacacggcggcggtgatctcgatcacctccggcttgttctgcagcagctccttgt

SEQ ID NO: 393158 - DNA, 522 bp, Oryza sativa
ggaaaaatgccttttttatcaccagtatatatagatggcctgaatctattaaactaaaatcatccttgcttgcaaaatctgaagtccaaaaagtagaatcctagaagtacaaaatctgaagaagttctcaactaggacaagacatcttattattcatacaaccaaaactagcataacaaaaaagcactccagcagctgccaacagggataataatccaactcaaacctcactttttatcatcttcctgaaccaacgcgttgagtctttagggcaccgcgtgaaagggctccgggctacatagaccattccaaattttgaagtgaacccgagccgccactcgaagttgtcaagcagggaccaagcaaaatatccagtgacccttgcaccatccttgatcgccctcttaagctcatggaggtactgatcaaaatattgtatcctgaagaagtcatacagtgcaccaggtagggtctcattgcctggctggtcaatgccattttctccgatgattataatggggt

SEQ ID NO: 393159 - DNA, 470 bp, Oryza sativa
tttgtttttttttttttttgtggtttttatcaaaaatgctcttttttcccccacaacggaggctccgtgtggcccttgctgttactgcttcaaagtttgacagcactacagcgtggggcacatgaaagaagaaaaaattgaagtagtgcagcccatgaaacaggttccctcctgcggtcttcaggaacgcacacagattatgagaaaaaaaaaagggccttcgatggtccaaatttttacttcttttggctgcgcccaagtcgttctatagcggcaccaacgccgctttgattaccttgttcctccaccaaatctgttggtttcgaacttgccatctcaagattggctttctctgccagcttcaactgtatccaaccaaggggaaagcagactccagcaccaagagctgatccaaccaatacattccttgcacgccacattggtgaacctggcaatataagtccaaatgc

SEQ ID NO: 393160 - DNA, 541 bp, Oryza sativa
gtgttttttgaatataaggggggtttgcaccatttataaatgctagaagtcaaatcaccaaacctcattgacatgagaacatacccaatcatgcacaatttgatggaaacatataacaagtcaaacaagtccattttacaagaaagggcccttttttttcactatggttatgtatcacattgctgttttcttcccactgtgtaacctcagtgcacccaggtaaagaaacttactgaaaattcagcaagttggcaatcactttggcccagctttcccatacgaatcacgcagggtaaccgtcctgttgaacacaatgttctcaggtgtcgagtctgtgtccactgcgaagtagcctagccgctcgaactggaacttgtcaccaagaaccgcagtcgcaagcgatggcacggcgtaggcacccttgatcacctcttttgagttcgggttaagatcacccaggcaatccttcagtttagcaggattctcacagaggaataatttatcaaataatcttacttccaccttaagcggttcaactcca

SEQ ID NO: 393161 - DNA, 451 bp, Oryza sativa
caagaaaaaaacataacagtaatcttcaaaactacaaaagtgatcgcaagccagtacacacctactgggcgttggcgttgccaattttccacaatcaagatggaatacatgaaatcgaaaggtggtacatgtcatatttgcgtgggtcgctaggcctacaaaataattaagtacattgctctctgctaggctgctagcacagaagatttaatatcctctgtatgggcaaacctccagcttatctacactggtgatccgcgggcatcttgctaccgtgggaatgcgttgttcaatgaatcagtagaagatgcagcgatatgccacacatcgcctcacaaggatgtcgaggcatcttgaaatcaaaagtatcttctatcttcttttgactggagttctggatctggaacgcttcttcctgaaatgattagacacagatttaaagacaccacca

SEQ ID NO: 393162 - DNA, 657 bp, Oryza sativa
  unsure (1)..(657): unsure at all n locations
nnnnnnnnnnnnnnnnnnnnnnnnnnnnngtgtgccaatataaatgtaagtcgtgcttttaaaaactcacagatcagctggacggtggttcacccatcacccttcacaaacacgtacgagagatcaataagcagagagcgtatcaattacaacgtgataattcgatatcgagtcggcatatcaagagcgcttcgtgatcggcctcctccccgccgccggcacgagcggcggcggcgaatcacctccctgccacgcccacaccatgtcgccaagcgacggcttaagctcctgcttgtagaagtcccggaaatccggtgagtcgccgccggtcttcctcacctccaccacgtgcacctccggcgccaccttgaagatctccgcctcgatggccagcgcgcccttccgcccgtcctggctcccctccagctcgaccctccctttctccttcagcttgaagctgaacctccccgccttccgcgatctcctccagcttggagacgatcgccgtcgtggtctccctggtggagaaccgcgcctccgacctgcgctcctccgngtcgaacattttggacaggtccagccctctcgaccgccagatgatgtcgaaggcgttcatgctcgagggcctcacgtcgatcacccgcgacgacatgatca

SEQ ID NO: 393163 - DNA, 929 bp, Oryza sativa
  unsure (1)..(929): unsure at all n locations
nnnnnnnnnnnnnnnnnnnnnnnnaaattggaaaaatcagaaccataccattataacttgataaaaagccgataatgaatctgataatgccatcaacattttattctgcaacaacatagtaatggcagttcatgggccggccccgactaataaactctcaatgctcccaagtgcgacggcaaaattcaagagggaattgaaacagcatgtaaagggccttacactgactggttcgttcaaaaaaaaagggccttacactcagaaagcctaaacacggactcctcaagcacaaactacttgaaagcctgccgctttattcaaatccaatatattattgaaactggcattcctatatatatgctcattaaagcaaacgatacttcacagtgacttggccgttgcaatgacattttccactgtcaaaccaagctccttgtatattttcccagcaggcgcactagaaccaaaacggtcaacaccaatagctttacctttttctccgatatatttctcccatccaaatgtgaccccagcctcgacgctgatcctagaagttacttcacttggaaaaacactctccttgtatttctccgactgctcctcaaacaattcccagcaaaccagtgaaactactcgtacagtcttcccatctttcctcagctcatctgcggctttttctacaatctcaagttcagaaccagtgccgatgagaatgatatctggtttgtttcctgatgaattatcagaaataatgtatcctcccttggcaacgccttccgctgatgttcctttcagctgttgaagcttctgcctagaaagggcaaggacagagggcctttgcctattaannnctgcaatcttgtaagctccagaagtctcgtttccatctgcaggtcgaagcattagtatgtttggcatggcgcggaggc

SEQ ID NO: 393164 - DNA, 461 bp, Oryza sativa
gttgttttttaacatgcagaagccatatatgttccgttgaactgcaagctcaattcgagtcagaaaaccaaagaaaagcaggctaattataccgtgtgcgcgtgtgagtcactcgggagtcaggacaccctgaggcactgctgcttgaacattcttgctggttctgctgccccgctggcccgagtccttccacggttgaggccccttgcgcgcccgaagcagatgttgatcagcctcccgttgccgcacccgtgccgccgcgccggcatctccgccgacgcgtcgtcgttcacggacgaccccgagctcgacggctcgcccatggcgtcatcatcgtcgtcgttgttcagcacgatgtccttcagcttgccgaacaccggcgtcgtcatcgagttctcgtcgtccagttccaggcagacgcccttcatcttgccggactgcggcggcggcggggtggagga

SEQ ID NO: 393165 - DNA, 513 bp, Oryza sativa
gttgttagtgtgaagtacgtaagtagtttgtaatcactggctggcttcttccatagccaggtaccataaaacttcaccacagagtggctacttcgtggtccacataattaagaacacctaaaaacacacgtcctcccaaggcaccaagaaggatgacaaatactaatccttctctcccggatgaatcttaaatcatctcgaggagccatcaactcacactcacgtacctcccacacatgaagtaaaacacacaaatcaaaccaagcctttctttcttttactaccactttctgggcctaatcagcggtcaatctctatttcccgccgttgtgtcggcccttccccctcgccggctgggcctgcctggcccgcgcgaacgccttgctgaggaagcgcagccgccggctgttcgtggtgatgacgcccgtggtggacggcgtcttaccgaagacgacctcgtagccgtcgcggtacgagtccatgccgggcaccaggagctgccaagagaggccc

SEQ ID NO: 393166 - DNA, 397 bp, Oryza sativa
  unsure (1)..(397): unsure at all n locations
nnnnnnnnnnnnnnnnnnnnnnnnnnnnnnnnnacaaaaacatgcaaaatcccctttcttccagttactgatgttcggtaagagctccatatgagaattacaagccccccagctatccatactttacacggttacaccttgtttacagtttgtttggaccatgtccaggcaggaagccatatcaattctatatatttcttttctttctttcgcaaacaaatgaaaacccgtttagctacagtacaaaggggcgttggcaggcttgtagaggaacgtcttgacggtgtgagagtttcctgaaggcttgctggatgtgaacttgaccccagagggtgtatcacccctcttagtgcaatgctggtgaaagctgctgatgggccttgccaagcacccacgc

SEQ ID NO: 393167 - DNA, 591 bp, Oryza sativa
ttttttttttttttttagagaacagaagcttttatttatatctgaatagttaagctagcaggcaggcaacagaccaagcttcaacaacccttgaagggcagtaattaactagctcgagtagcccgtgggaaaaacccccaaagaaacgaagcaattaaaccagctagtactcatgtttcctcgcttcgatcgatcgatcatggcgccgcggcgaagccgcggaccatctatggctttgcctccacctccacaggcgggagcttggggaacttgaggaatggattcttcttgatcaatggcagcagcttcttgaacagctcggggtcagcctccgcgtcgtcctgcatcgccaccttcttctcctccgccggcgggtggtagatcggcggcgacggcgtcggcagcggctgcttgtacaccggccgtcgggtgagagtacgccgggcgtcgggtaggagtacaccggcggcgccgggtgcgtgtacgacgcgcggcggcttgtggtacgccgccggcgctgccggcgacgggtccttgtagtggaagaagaagcccctcttgtggaacgggtcgcagaggacccccgacgca

SEQ ID NO: 393168 - DNA, 619 bp, Oryza sativa
  unsure (1)..(619): unsure at all n locations
nnnnnnnnnnnnnnnnnnnnnnnnnnnngcttatcaaattatgctaatgaaataactcgcatgacaaaatactgaagtgtaaaacaattgccttctcatattttattttgatcaggtacatggcatttaggggacatcaagaaagatcaacaccaggattgaagtcgaagtctcagggggagtacaaaggtgagcaaagaatagacagtatcataaaacatctgggagcacatatcacggttttgtaagctaaaaacaatacaaggctacacaatgatgttcatgtaggataatctctactgcctgtcattccaactcaaacaaattgacaacaactgacaactcatgaaaattgggagtagcaaaaattgagttcggatgggcctttgtaataatttgatatacgtgtgacgtcttcgtcacagctcagttaactgctgcctcccttctgtttgagggtgatcttgtcgcctaagctgagggcgattccttgggtcttactccgtattctgatatagccgctcagcttgccatcggcttgcttttcaacgctgatgttcaccaatgcatcctgaccaaaaacactcttggcatagagattagcagcgataaacccaca

SEQ ID NO: 393169 - DNA, 575 bp, Oryza sativa
  unsure (1)..(575): unsure at all n locations
tgctattaatagtcaaatttaaaaatgtttgattatcnaatgtactaaaaatgcttatattttgagacggaggaaataacatatactgcgttacagcagagaaagagtaaagcaaatgatcatataggctaagtcgtcatctcataactattcgatcctctcgcagcatcagagataattcaaacatgaattatcatatccctaaagaaacatatcgaccaatggccatatgcatggaccgctaattaattaccagctcacacaaatactcgatcagatcatcaccctctagcttcaatattaggcgtctcccttgccgaccagatccttgcttttgttccattgcttgctcccggggctccacttggggcacccgggactgaagtacttgccctgcaccctcgcgtcgagcagctcgacgaccgggccagggcgcacgcaccgcggcgccttgtactggccgatgcacgcgccccggctgatcgcgcagcccatgagcttgcccaaggagccctccgccaagacgcgtatctcgagcgggcccatggacccggcgcacgcgccggccctgccgg

SEQ ID NO: 393170 - DNA, 712 bp, Oryza sativa
cggcaacatcccccaacatctttgattgtcaatcaatggttcaaggcatgatcctcatcacaatggcactggtagatcaaaggctacactaacaagaatccaagcatgatcgcgatagcgggttcgcggcatccaccagggaaaaataaagagggaaaaaagagcaaaaaaagaaaaggttcctacatgaatgaacatactgacagcagacatcaaatatccttatcctcctgccagatggctgatgctcttactacagccatatctcttgtgaaacaagcatctatgagaatgacaggcaaagctggagaagcactagcagaagcatcaaagaggttgctgcttctaacatgctgcagcttccacgagaaggccgagtcaacctcgatcatgataccgaatctgcatgttccggtgctggggtcttggccagtgatcgttgcgaggttcgagaacccacaggcgacatcggcttgatcgttcttctggtagtagctgttgaacgcgtacgagatgttgcttctggtgtccagtcccccacaagatgtcttgtaaccaaggctggtgcaatctgccagggagcaggcatagctgatgctatctgaaagccttggatcagtaaggcctatagaaggcttcagcacgcaccacttcctctcaaggtacttcacgttcttcgctttgagaaggccatgtgattgcccaagattca

SEQ ID NO: 393171 - DNA, 453 bp, Oryza sativa
ttgtttttgggtaaatatggggagctgatttataatttggcatgtcaattcacatccagtcagcaggagataactgagctagaggttgcaagatcctttgccagcatactgcatatctacatcacagggagctaacataaagacgatgaaccaagagagttctagttgggcattaatctagccatccaaatctaagcagcctcatgcacatatattacatagcatggccaacattgaccaaacatgttgcatcctatcttgaatctgttagttgaagacaaccagttctctccatcaggccactttcacgtttgtcttcagcctctttgcagcctgcacgaaaccaacgatgacctggcaactcatccaattgctgcgacacaaagtggcctctggacagcatccactaactgctccctggatgggttagggctagcatcgagattgaagtga

SEQ ID NO: 393172 - DNA, 372 bp, Oryza sativa
ttggctttcctttctttttttttttacgtgaagccgtataaattacttgatagcaataacgaaaaacagtttgcaattcaaaaggcagagcgcgtgacagatccgacaataaggcccagtacaaacaacaaaaaacaagaaccaacattttttctcactgctcatcagaaccgatttacaggctctctctctctctcactaccaaatcatctctcatcttgctgttccaaagctttatgcgttccagttatgatgctcttcaggttgaagcagcggcagcgacgacatgatctgctgcatctcgagggtgaagtcgtcgtcggtggtgacgacggacgacggccccggagacggagccgacgacccgccggc

SEQ ID NO: 393173 - DNA, 451 bp, Oryza sativa
  unsure (1)..(451): unsure at all n locations
nnnnnnnnnnagagtcaaatacgcatttaacgcgccaaaccaaagggcttacttccaggtgccacaatttatgccgcattcacaagatcattacaagcaaatcccattcttgctgctacatgaaacaagtactactaaatctatgcaggtgcattattgcatcatactatgtacaatcctcagaaatcagaagatgtactctggtatttccagagggaacgcagccaccgtgacctcaaatggctttccttcaggccggctcaacttccccggaacaaacgtgaaagagccctccacagatccggcactggcacgcacaggcgtgcaactctcatacacaaactcttcctggcctgtagttagtagagggtacttcccaataacaccttccccgttcacatcagaaacaacccggtctctccatcggatgatccagtggcgcgagtaaagc

SEQ ID NO: 393174 - DNA, 537 bp, Oryza sativa
acggacttgcgcggagggtgtttgtttaggaagaaaggggatgtgccatttccccgcaaacatcggtgcgcttacatgatgccggtacatttcaaccaagcatcatgcatactcaaatgtaacacaaatatgtcatttcgggggcaagtcacattggtcagattgcagaacggtattcaggagtgaggggggcagaagccagccacagagcaccagcagacacacacctttacttacaccttggaaaatgcaccctgtcgacatagcgctcccgacatcgccgtctgaacattcctccggaacttttgggggtcagctcggaggacagccgcagcatcatgggtcaagggatcctcggcattgggttggatgaaaagaaggttcaaaccatatacaatgggatggaatattcaagacaggcttccagtcttcacgcagggtattcaggcagacatttccgtccaaggcaatattagggtgataaaccttaggcgggcacttgaccttgggcggctcgtgagggtaagtaggaggaac

SEQ ID NO: 393175 - DNA, 600 bp, Oryza sativa
  unsure (1)..(600): unsure at all n locations
acgcaatcgcgcgcccacactgtacagccactgtaactcatcagaaacgaggtcaatatacaacagtaattttcgccgttccataagtccataaaataccgatttctaatatcccaggagactctagctgcagatttagtaaggaagaacaaagcaagttactcacagtcacaggcaagctacacattgtttgttgcaaaaaaactcgaagtattgaggaactacacagagctgatctgggacagggaaatgagcacactggaaaattacagccggctgttcacttgacgatctctggtatgctgcgctttacaatcagctctccgttttgatcccctgcttctggttctgcttctccttctgtttccgcttcctctcgtttcgcctcttcacccagggcttctcttcctccactggcgcttctgcctctgcgctgacagatcctgtaatctgcgcaaacgactctttggcgccagaggttacgtcgccgaagaagtccttcaccttgtcaaccacagttttgagctcttctttcttggggagntagannagttgagcatgcatgcatgaaaatcgagataaaaagggatgatgaagaag

SEQ ID NO: 393176 - DNA, 624 bp, Oryza sativa
ggaaacaaaacaagcgcagtacgcatttacacatgttttgaatttcagaagagaagcaaaaacagaaacacctcgaacaagacagtagcgtttacctcatgaagaagtaacccatggcacaagtcttttctaggagcttattatactttgtccaactatgtaatgcaaaagataatagaatcatcatatgagctaattcactacaatgttcatgaactcgagtcatgacttatagcctaatacagctttgctccagcaaaaaaataagttctttgcttaactacaattgactgaaggggaacaaaattatccccagcaggggtgcacaatcttaattcatggcttcttggaatggtgccaataatatcatggagccctatcaaatgggcgggtatcattgtagcatatactccatacagcctcaactgcatcttttgcagctgtccctgaacagtgtgggttgttcctgagagacatcagagcccgccgtttaacacattccttcagaaaatgcagaaaatgtcagaacgtacataaatttatgtagggtttagtaagtgtgcacatgttacacaccgcgcttgaaaaaaggagacttatgctcacttaaataaagtttacttt

SEQ ID NO: 393177 - DNA, 500 bp, Oryza sativa
ctttcttttcatgtcaggctctccacagtcctaaacaactgaacaacattggttcaaagacatcaagcaggcctacattatgcgggaaccgatcgatgctattgtacagttgggtgtaaattagagccgcttccgactgataccaaccgagtttcagaggattgcgcatcggcttctttgttctgcgggagatattgtcgcctgttggaacctgtttggatcaaaggtgtccaccccatacttttctctcattctttggctccacgcatcagtttcggatcggacggtagccaaggctgggcaccctagggtcagcaacaggctgcttgcccactcaacggctgccggggtgaagaccttggcgcaatgtactcgccaccactggcatactctgcttgattgcctgactgcactatgagagctacagtgaacagcactgcctcaaatagtacagtttccagtgcaacccactttgcgattcttcaatttttcttcaaaaa

SEQ ID NO: 393178 - DNA, 522 bp, Oryza sativa
attcaggagatcaaattcttaggcctgattctctcagtgatttagtatactagtgccatcgaagttcataatttgaagagagaatgcaagtgctgcccataataacagtcaaaattgacctatacaaaccatgacagctacataaattccatatagagttgccgaactacggaggttacaaggggtaaaagaaacttaaaaaggctaaccaccacttggcagcagtcttttcaagggagcactaacttattttctgatgcaacatggctaagctcagctaaaatccttcagccttctcttcaacacatccaaggacttctttcgagcactttgcactgtacttcggcctgaaaggctccccaaataagctttccggagcatctctaaaacttgtcaccagatgatagacaccttcttatgatccaaggatccaaaattcttctccctgatacagggttatggaagttctctggctggttgctgagcacagatcggtgagctgcctaatttcgccaggcaatc

SEQ ID NO: 393179 - DNA, 569 bp, Oryza sativa
gggaattgtgggctatgccaatatcaaatcttctctggaattggcacaccagttacatctcattggccactggaatgatctgcataatccagcttgcctgaataatctgcatcaaactagagatgttctagaccttccagcgttcctgctattatctcccaattcgagtccgatgcattcctcctcttggtttgtctcctgatgttacactaccaatcatccatacattacctagtgatattataccctccaaagttgaatcatacctttacctacttgattccttagctcagacctgcactcctcagatacccatcaaatgcttctttcacttggcccaattgactcgaaaggttgaagcccttttttcttcgcacttttcactggctcaatgactcaaaggtgaagccttttcttgcagctcaatttggggcttggcatcatcgtccacctcacggagctgcaagggcttgaacaagtagcacctagcgcaatggcgtagtatgccaggttgagcacctggagcagcgcgacgatccagagaagtagtcgagcctgcgcggttgatg

SEQ ID NO: 393180 - DNA, 440 bp, Oryza sativa
ttttttaaaaacagaagcatcggtccctggcattgtctagatgccaagcaatttactaacaaaaaggtgcattctgaaccacaatattttgttcaaaatgccatctgagtcgacaacagtacaatgatatcgaaaaaaacatggtaatgcacctttaccctggcacaaaataacaaatgatggaccaaggtacaaaagcatggtaccaggtatttaggttatgatacaaagtttgcttatttatcagctagttgagtaaaacagggaaatgctgaatccttatcatgagtaacaaaaatcaacggtaaagactctcggactccaagtttgcagcaatctcagtctcccaacgatcgccgttctcaagcaatttttccttgtcgatagcagttcctcatgggtttcagtagcaaactcaaagttaggaccctcaacgatgg

SEQ ID NO: 393181 - DNA, 491 bp, Oryza sativa
  unsure (1)..(491): unsure at all n locations
gttataagccaacgggataactattaataacggctaagaaaattcatgtgtaaagaaaatttaacataattttttatgtacgctagcgagtagccgtgctactgcgcgggactttatttacaaaagcaacctttgaggttaacttgctttggacgggcgtcggcagtcatgagttcactgtgcggttgtacatgcggttggttgaccacgcgcgagctcgtccagccccaccggcgaacacgcgaggatgaagcgtcccaacggctcggcctcgaccgagggcgcgcacggcacccattcccatcgctccacggcgctgcccaccccgtcacgtagctcgtagagcacggctccgattgccgggtcggccgcattgtacacgtaccctccggcggcgttgccgcacaccccgatcgacggggacatctcctcttcgtccttcctatngccgtgcttgtcacgggggaacagcctctcggacatcttccccg

SEQ ID NO: 393182 - DNA, 1065 bp, Oryza sativa
  unsure (1)..(1065): unsure at all n locations
ggacaggagctgaaaatctttataagccatgacgaccatcacatatatatcgccagaggggggggcaagccaaacaaacacagggaccccattggggatcgggggaaagcaacgcggcagcggacggcccggggcaagatcgtagggacccatgccctcttcttcttctaccattttggggggacaccctagcacaggaggagaggctttgtttattacaaggcgaccaaaacctaagcaacactgaatttttgcagccgtgccggccaggagagcgaggttccttgctccgggctcggcggggcacgttggcacggtccgccgcggcggcggcggtggtgcggaacgggcgcgcgctagtggtgcggcaatggcaccggcgactgcgccaacgccggggcgggcttgggacactggtagcacttggcgaagagcccgaacgtgtcgatctgcctgatgaagttgaccatgctggcccagccgccgagcccgaagcccgccgcgagcgcccacaccacgatgaacatgttgagcacgaacatccccgtccagctcggcaggaagaacggtggcttctccgccgcgttcatgcgcgcggaggccgtacggtaggtgaggatgtgggcgagtgccgggatgatgtagacggtgaagctgacgaggagcgcgccgacggcggagttgatggggccgaagaaggggaagatgatggcgaggaaccagatggggacgacgatggggagccgcgcgagcgccctgaggnagatgctcttggtgncgtccattnccaatancntttncccacnccaaagtagagcggcgtgcacgcgaacccgaacgtgatgaactggtggatcagcattagtatcaccgccccgtcgcgccacccggtcttgggcagcagcgagaagncgttggagtgggtcagcagctcgtccccgaacgcccagtacatggccgacgccgacggcagcgtcagcgtgaanacgtacagcgtcgccagcaggtagatgtacttgaacttggccggtttccacattgcgtgcatgatctccactgtgacgg

SEQ ID NO: 393183 - DNA, 557 bp, Oryza sativa
ggcaagcaaaaaatatatcacatagaacacagtaaacatagattaacagagggcttcttattaataagcaccatgttcaaacctaagccagattaatcaagacactgcatcaaactcgacaaacagcaccataacccaaaaaaggcttattccaacgagaaccatcagtcctctagatcctgattaaatagctagctacatcaaaattgcacaccatgtttgcagcttcaaacatacaacgcatgaatctagagcttgaggaaaacgaattcttcaatcgccggaatctccccaatctttgtcagtgtgctctttttaggttcctcatcaacaccaatcgccatgacggcatgcttgcgaggagcgattcttccaacactcatgaaactgacattaacattctcctcaccaaggacacttcctactgcgccgatcataccaggttgatcgacctgcctgcaaaggatcaggcttccttccaagctcacatcaacctggaatgatccaacctttgtcagatgggggatgccatccttcaccttcccctcaacaggatc

SEQ ID NO: 393184 - DNA, 476 bp, Oryza sativa
  unsure (1)..(476): unsure at all n locations
nnnnnnnnnnnnnnnnnnnncaccgtgacaactgacaagcaaaccttgaattaagcatcgtaaccagttaacactagagagtgacaaatgaaattacaaaattgttacaacaatatacgccagccgatcatcagagcaaccaagaaagcccgggttgcttcttcatcgccactccgacaagatcacctggcctctcactaaatgactcccgtatcttacctttcctggaagtcagttcaggatggattgcagagttcttccatcttttgtgttaggatttacgcctgcttcatgctgcagctgctgcagtctggtttccgcctacccagtactgcttcacagcatacagcaccttctcacgcaccatggggccgtcctcgtgatcgaccagcctcgtgttccatttcatgccgagggcgagcctgttcacctttgtcaggatatcgacatcgtccctcattatgacggcgcctttt

SEQ ID NO: 393185 - DNA, 564 bp, Oryza sativa
ccaaccaaaatgaggccgtgaaatatgcatactgatttcatctcaactgagatgagcagattacaccgccaaatcgccaatacaacccatccagcctctctgaagtttgagctatttacaggtgctccccccggtagcacaaccaagcatgcagctgtctgaccattttttcaggctacagctacctatgagaaaagcttttcaacccaccccccaaattatcaactttctcaatgtgcaaaagtttctttgtgaccatgcggtggactttcctcagcctcgcgcctttgtcctcgggttcttgctcttgccagggaatagagttgttggccacttgggaattggcatctatgctgttcacaggctcctcttcctccagggcattgtcaatgatctcggggatgtcaactagactgggccttctccttgatttcgtgcgctttgggtctctagcaatggcatcagcgtgaagaacatcctcgatccgagataaaactgcaaaggctaagctctcaagagtcctggagtagctctccaagatggcatacccaacatccttgttgt

SEQ ID NO: 393186 - DNA, 738 bp, Oryza sativa
  unsure (1)..(738): unsure at all n locations
tttcagattcctcatcagtacgcctttctctcggaggagaggggaaaggaaggcggaggcggggaggatggcgcggagcgtgtcgtacgtgtcggcggcgaagctcctggccatggcgcgcagcaacccccgcgtcgccatcatcgacgtcagggacgaggagaggagctaccaggcgcacatcggggggtcgcaccacttctccagccgcagcttcgcggcgcggctgccggagctcgcgcgtgccaccggcgacaaggacacccgtcgtcttccactgcgccctcagcaaggtgcgaggtccatcgtgtgccaagatgttctccggctatctatctgagaccaaggaagaatcaggaacaaagaacatcatggtgctggaacgtgggttcaatggatgggagctttcgggacaacccgtttgccggtgcactgatgccccttgcaaaggcacatgctcacctgaagaacctgagttgtaactctactcgcttcctgaatgatcagcaatgttggcagtcgatctccaatgctgaatttggtctattttgcctcatgagatcattcgtcacagtgtattggactgaaatgccactttgtggacaatttcatcagatatagcataagttaactaccccactgtagtgtcaggcacaccacggggtactgaattattactgattactaaaaactctttacatcttggctgaagnnnnnnnnnnnnnnnnnnnnnnnnnn

SEQ ID NO: 393187 - DNA, 786 bp, Oryza sativa
tttttttttttttttttttatcggctgagatcatcacagcaggaaacatcatcttccctaacgaaacagtcaccaaatggtgtgaatatgatacatgatgaacaaattcaacagaagtgctatcatagttgatccataacaagaaagaagtcagttcaattgaagttgagcctgggtaagatcatgattcattgacccaagtgttgggaactatagaagcaatcaaatatcagcactacaaagtgccttaggcagcaggaaagctggtggccaacaagggaaagaaacagatcacctccagccatcatttgaagccactatatcagattcaaacttatttaggcagagcagcattcttatcgagtagcttgagctcagctctttccactctcctcctctttcatctttttctcccatctacgtttcttgtagtcaaggagcatctggggcatcttcttcatcagctcaaccgtgttcgcacgcttctcggcggagatgcggtcgcacttgtggcccttccgcttggtgcgcatctcgccgcggggagggtcgtaggtccagtcctcgccggcgaggaggacctccttcctgaggcgcgcccgcttccgggcgctgaggccgagcggcttccatgccccgagctcccagtacccccacacccccttcgtcagctcccccttgtactttgcaagcttctccctccacgggtaaaccctcgccgccgcctccgccgccgtcgccgtcgccgccttcccggccatcgcctccacccgcgctagggttttg

SEQ ID NO: 393188 - DNA, 541 bp, Oryza sativa
  unsure (1)..(541): unsure at all n locations
cttcgagttctctcactcgctataagtgggagcctctatcttatctccacttcttcttcagacttctcaaagaagaagagtcaggctcctcttcctcggcatcctcctcctgaattctccttctcggatcacctcttctcttcacctcctctctctcccatccgctgcaaccgccgctttacaaacgagagtttaaattgggattttagatcttctgcacatccatcgagctcatcatcagattgaaacaaataaagtgaagtatttgatcacttatatggccctcaagacgctgcaagttccatctagctttgcaagggccgatcaaccgcagcttcaatcggttcttcttcttcttcgtcgtcgtcgtctcagtttttctctgcggccaaagcctgcatcggcacggctcgccgcaagtgtcgccggagagaggcgcctcgaatgcaggggcggcagcagcctgcacggctgcgtggacgaaggcgccgcggcggcgtcnaggaggcggcaggagcaggccgtgagatccccatcgtct

SEQ ID NO: 393189 - DNA, 607 bp, Oryza sativa
  unsure (1)..(607): unsure at all n locations
nnnnnnnnnnnnnnnnnnnnnnnnnnnnnnggcaaatcacactaaaatagcatttcatcggtaaaaaaaaaagtattaggaacgacagaaattttcggttaggccaaaaacaatatcttcggtacaagaccagactacatgcaccaccaacatgctcttttcacaagaggtactgcagtggcacacgccattaaaacaacagcacatcattggtcagattgtgcgtcaaagttgacacgagtagcaaaatggtttatcgtattgggtgcagcttttgaagatctaagcattgcaaccttaggactgttcatattgcttccgagataaccaacaccaaatgaaggggaggaataggcagcaacaagttcagcggctcccaatgcagatacctcccctctctgcagaatgttatattgttaaatcaaagattatccatgcaaaacccaaggagacgtatcagcaaagtaccacctttagaacatcagcctgaattagcaacaacccagcgcctgtatcatgagacatctcgctgctgctttgaaaccgcttggcgcagaactttggnacaagcagaagcggggncagattgtatcaatggatggatgag

SEQ ID NO: 393190 - DNA, 489 bp, Oryza sativa
gcggaggaggaggaggccacgaaacggcggcggtacgtgccggtttctgtagttgaagatgaaaggcaagaatctggaaaatctgacgatgaaaataaggcaaatgatggagaaccatcatccgccgaaactgagccatctaatggaaaaactaatattaatgatacaccaatggatgaatctcaggcatcagatgaggcccgatattctggcaaaaatggcggtggaaccgacctaaatttaaacttgggtctgaaggaccctgacggagacaatgatattgatactgaagaacaagatgctgaaaacaacacacacacagaaaataggctgaagaggaaatctgtagctcctgaccttgagatgagaatgtaaccggctgcttcatttattccttggattctttactatctgcctttgggcctattgtgcaaactttcttgacatattgtcatatttagaggcaattcaacacgatagcttacagga

SEQ ID NO: 393191 - DNA, 720 bp, Oryza sativa
ttttggtcactacaaattatgggaatcgattgatccatgagtgtaatcgtcaccatgtcattgttgtagtgttcataaatatacaaatttgggcaaaacaactgtcgcaactgttctacgttttacatctgaaagaagaataaataatgtgggcaaaatatgttgtctacatacatgttttaagtacatttgacacttcttctcacttggtatatatactagactatgaaaaaatcgtgtaatcattgtgagtagtccagtcattgatgacatccaacgtttctaactgttcgtagcaatgggtttcaaaaggtcacaagtttgtttcatcggttgatctgcataactaagtgcgcagtttagacgtcattggcaccacactgcagttagcatctgcagcttcgaaataaattgtggaaggtcatctatgctagaagatcccaggacaatttcgcgcttcagtttcatagtaagcatgtgcaccgtcagcagttccgatctagtggctccaccaatcatgaagtcaaaaattcggaggccgagcctcttagagtcattagatccatgtctcaagacccagcagtcacttgattcactatcatcagagtttcgagactgagcgcaggttggtgtccgccgcgatctcctgcacatgggttgtgcctacgctggtttagtatcgactcccctgtgtgtagaaccttgtacagtgaaacagag

SEQ ID NO: 393192 - DNA, 753 bp, Oryza sativa
ttatttttttttttttaagggaaattatgtgcccctctttattctgaaatctgaatgacaaaaggctacacgcgaaaccgctgtgattggtttgcgacatcgcatcacaatacaaacttacagggaaagggggaaaataattcgcaggaaaagaacggcatcattcaagcctcccgttttcacttccctgcagttgcaaatgcttgttcatgtgctaactgcaaactctttggcgccatactagctacatcccgctgcacaggcactcgtttatgtgactgcagaatagcaaaaggagatgcgaatcgcaggagggaaacgaactcccattggaaagaaacggggaaaatgggaggaaaacaagctacactgggagctcagtcccatgagctcctgttactactcgacgctagcatactgggagtgagatgctgcaagaagtgcagctccgatgccagagccatcgtttgccaacttgacaacaactgatgaggcagcctcctctccaagcaggtctgcaagcgttgcttctaggcaggttctgaacttcttgtaatgctcatagagaccaccatccagagcaatgacagtcctctgcttttgactaccgtcacttggcactctgtccctgcccagcttctttagaatgccatatataccagcagcagctaagcgtgcacctctctctgcaacgaggtcgcagacatgaagggtgatgtatcgtgcttccagggaagtatcagcgacccccag

SEQ ID NO: 393193 - DNA, 527 bp, Oryza sativa
cttggggcctctattgcgcgcgccctctttttttttgggtttttttaggggttggggtgtttttttttcctttttgttttttatggcccatgcccgtagatagattacactccttctccttatattacacaactgtaccttacacttcacccggtttactgaatttgcactatgcaaaacagcagaaatccaagaaaccaggtagtgacaaccttaaaacaagcatgatcaggcgataaatttattccacacgactccgagtcgaaagtactactctttcttggggaaaagatcaatataatcactagggccataaacgtcgaataaatcagcccagaatccgctcttcctcctcggattgcaccccatgtcccggcatagctgatcattgtaccagatgtgaaggattccgatgcaggacccgccaaagtaaccacgcgactagcgcttcatgaacttctcccattctaggacatcattctgcatcacactgatgcttggcaacctgaagccaccatccatgaaat

SEQ ID NO: 393194 - DNA, 553 bp, Oryza sativa
ggtgggctacaaactcaaaggggactttgattcaaaagcaatgtgatacaggagaaatcaatccagagaaaggggaaaaagaaacagcttgtacaaataaacaacacgcacgcacatagagagtgacctccagttctcgtacgagcagaaattaaattactgaatcgaacaggaaactcgagtactcgacacaaatctagcttattcacgaatgttaacaaaccaacgatgaaaaataagtcacgcacgcaaaacaaaaaaatacaaatacaaaaacgaacgaaaaacaatcgatttagcgaatcacttaattatgatatgacgatcatatcgtcctcgtaaaccgggcgcgcgcgagcgggcgatcgatcgatcgatcgatggatcggatcagatcagatcagatcatcacttgggcatgggcccgtggttgtaggtgtcgcagcgccggctgatcttgccggcggcgccggtcttgacgccgaagaggctgagcttgtcgatggcgcgggagaagtcgtcgaagaaggcggaggggttggacgcgtagagc

SEQ ID NO: 393195 - DNA, 708 bp, Oryza sativa
  unsure (1)..(708): unsure at all n locations
ttttttttttttttttaagatagaatgcacaaagtttattgcttatttgctaaagagaaaaaggcagggtaattcatatggaaataataagttcttctagcctaggaaataggatatggtcatatgcaattgttaccaactacaaataacaacagtaggttcctcctctcttgtatcaagaacaaaaattgacaagataaacattacaggggctacttgcgttcttcgaaactcctggtgatgaggactaattttagtacatagtagtggcatatccagcagttttacagcagaaatagcagagaatgaaatataggaagttgaggcataacttgcgcgtttctttgggcggctcaaattggtagcttttctatccaccaaattgatcatccggggtaacttgggcacggatcagctcccgaacgggatctgtagccgacgtgttgttttctacctgttccagtgactggtttgctctgatggcagtttggggagagacttccgttggggcttcctcaccgtgttcgcagcaggcaccttcttcacaccattctgggagncctttcatccaggctcagacgagctgggcggcttgaaggaacggtactttcttcagtgcttactgagcttgtggtctttgagcggccaagctttggtgaccagctctggtgggagggacttttcaactcaaccttgggaggaggtggg

SEQ ID NO: 393196 - DNA, 606 bp, Oryza sativa
  unsure (1)..(606): unsure at all n locations
nnnnnnnnnnnnnnnnnnnnnnnnnnngagcaaagatgatcatctcacccatttctacatctatcaagtgtcaagtattggtgaatattacaccatcttcaattcagtagaagtaacaacaaacaaactgtggtagcaaatagccaaataccaactcgggttgaggcctccaaaacagcaggagaaaatttttttatcgatcaacaaaagatacatccacccacacaactctactactaaatcatctgatcagtaacaaaagataagcaacacaactagctatcgccgccgcaaaatgcatattattcctcaagttcgcctaccgcgcacgcatccaaatggagcattcgcaaacgcctcccaccctccatttagctcatccaatatacactcgcaatctccaaatttcatcgaattagtagcagtagtagcagtcgtagaagagatatcaggatcattaccttccttccggtgggaaaaaaaaaatataaatctaacttgcaaatgttccaagggggcctttcattccgagaagtggaggaggagccatcatttggccatggcgtgagggagaagcgggatccccagagggtttttacccatccg

SEQ ID NO: 393197 - DNA, 489 bp, Oryza sativa
ggcagtcataccaaggtaaatgcaattttactgtaaaggtacataacattacggagagttaatactcactcactggggacagcagtagctacactcttttaacaggggacaaaattgctccgcagaacatactcatgttacaaaaaaaacatccaacacagaagcacggatgttcgccggtcgatttctcgtattgctgtagatgcttggaagtcaggggcaaaactcatttttcgactgctttatgggctgggattttcagaatgccacgatcaaccagcggctgcagctcagcttttgcaagatcccttaccccgcaaccgggcgattcaaggaaggctgcgaccaccttggaactgtgcccatcagcccatgtcgtgcatttgccttcaagagcttttttccataggatggcagcaaatgctggagattcaagtataagtcttctgattagacggctggaatgatagttatcaaaggcatgttcag

SEQ ID NO: 393198 - DNA, 467 bp, Oryza sativa
ttttttttttttttttgcattgggatcgcggttcctcgttaaattgtccaagattacaggattgattgggtgtaaacagttgtgttacagttctacttgaacaaacacggtattgtcagataactcattttacaaacggtagctacagctcaaacaaacaaaagaaacagttacactcttcgttgagtagggggagacgtcaagggctcaaggcgatcacttctcagtgacgccagcagctgcttccacctgattcgtctcatcttccaacgaggagtacgaagaaaaccttctcagggcagatgcactgtacagacaaaagccaagaacggcttctaccgacgggagcaaactcttggtgaaagtgcacgccgggaagcttccaagcaagaatggagttgatccatagcactatcaggggttttggcttgttgaaattctatgcagctcaatctgaaactcatcaa

SEQ ID NO: 393199 - DNA, 453 bp, Oryza sativa
tttttaagtaccataaaactttttgttatttattaccacataggttttgcttgactctgtttgggcgagcgatacttcttattctctatcggtaacttttttttttccaatccctgtattacaatacaacaaccaaaacacaaacccaccctccaagcattattagccccagcctcgataccctagcaacgaagcatagtgactcaatacacaaagtgccataagagatacttcctccgttttacaggtcattctagcatttctcacgttcatgagaaatgctagaataacttacattgtggaacggagggaggactacttatcttctcctaggcactaaacctctctctgtcgtgtggagcgttgtaatcgatgttagggcctgcgggatgatcccgagggatctatggaccgatggcttccatagcagtgcttccctatgtgctccatgtt

SEQ ID NO: 393200 - DNA, 434 bp, Oryza sativa
aggaaaaaaaactcccatccgtttccgtttgggctgattaggactttgtttctggttaggccgaataggacattgggttgaattataccaaggccctatttcgggtagcatcaccaggagaaacaagggcatattttacctacctaggataaaaaatcacagcccataacaaaagaattccatgccgcccttatagcacttagcactgggtaaaagacaaaacaacccataactttcccttagtccaaaggggggcaccgagaggtccgcgcctatgtcgatcccaggtaatccaacaactccgttggatgcattttacatattactctggtggggagttaataatactacatattacctgtagggaggattttgcaccagcagtgtcaaatccttgggggtcccttgatagggtgtccatcagcttgttctgg

SEQ ID NO: 393201 - DNA, 496 bp, Oryza sativa
tgtgttttcgccctttttttttttttttgtgagaataatcttgatggatcacatggtttctcattgatatatatggtagtcatacataaagatagatggtagccattctagactaagtacaagacatggtgttacaaaattggactaccagagagtttatatcgagatactactgtgtgcccttaaaagagaattacaatttttcgaagatccctaatacaaggtctaagcactttctgaaaatttggctggaggattaggtactacagtaggagttgccatggttaaacaataatgacgaccattcctctcatagatataagacagcccgtgtaactctggatcactagcaagtgcaggatcagccatagtactacggctcttatgatcagggtatactggtgctgctgatggccgaggacagaggaagagagcaccgccgctacttgcatcacagcgttgtcgttttcatcacagccgctgtcatcgccgtcgt

SEQ ID NO: 393202 - DNA, 679 bp, Oryza sativa
  unsure (1)..(679): unsure at all n locations
nnnnnnnnnnnnnnnnnnnnnnnnnnnnnnnnnnnnnnnnnnnnnnnnnnnnnnnngcntcgaatnagngattgaattgtncccttttcnagagcttagtcaacgtttgcggacanaanaatatgaagatgaaacctagtgtttgcatgctcaaataatagtatggactaattgttgctgcacaccagctgcaattaatttcttttgcagaagagcaagaatatagcaacaagcaagcaggccttcatcttgatactccaaggaatgccatatcgaccacttcccactagacctctcagcaatggcatgaagcacagcaccagccacccacaggagatgaattcactgataccagggccaccgggcaagccttccgttgtcaccaaaaccaccctccatgctcctacagcgattgcaatgacacttaacattgcaagtgctgtcacgggaatgaacaccgtcgattcgtcgaaggtgaacctccctggctcaggctcatcggtgttggaatcaccatctgatgtgctcttgtctttgcgggtgacctcgaacacagtctcggagaagcctaaggtcttgaggatgacggtaagaaatgccagtagccaagcagaagctgaggtgatccgttgcatcctgtggttgttccagcatgcacgtgcagactgcccacactaaa

SEQ ID NO: 393203 - DNA, 468 bp, Oryza sativa
ggcggtggaggcggaggcggcggggaaggatggcggggaggaggtgagggagtacaagagcgacgcgagcgaagctggaggagctgttcaagaagctgaacccgtcggccgaggagttcgtgccgctggcgcgccgccgcggcggcggggacggcgcgcgccggctgtcggcggacgcgcccgtgttcgtgtcccccgcgatcgacttctactcgcaacacccggtgcagcagccgccgccgatccaggtgctccccgtggtggtgggcggtggcgggggcgcgggattggactccagcagcgacggatccaccaacggccagccgaatcgtcggagaaggagtagctttaaccaagggaggaggaggatgggaggccgaccaaggcgaactgattgggaggatagtgtgcggcgaactgtcttagtatctgacattgatcagcatgggactgaacagaagcttgctg

SEQ ID NO: 393204 - DNA, 601 bp, Oryza sativa
  unsure (1)..(601): unsure at all n locations
tttttttttttttttttttggcaagaatatatgaagattatttaattatatataaatccgtgatactgtactttgtttcagtaaggtcaaatggaactggaatagcaagaagtagtttaattgaacagatccatctatgaaagaataaaaggaattggaagaagtagctatcgctcaggccgcttcagattcagcagcactagcagcattcagatccacagaaagatcaagttccttcccagtgatcttgctgtacaatgcaagcacatccttcaccgttgtctcaaaatgagtagttgcatcgtaactatttgtcacgaagcagttgtcctcgtcagcggtattagtaggttcgtatcggtcatagatgtcaaaaaatgtttcctctacaggtccgagcagatcgatcccaggtttcagctcgatctcaggcttgtcagcctctgcttccgtagaaacaaaggcgatgaacttgccttttggtgcaacgttgtgagcatatgagcaacagaacacgtacatgtctgatttgcgcttcagctgtttctttgggaggatgatctgcacgggaatgagaatcctggtgtcaggaatcggangc

SEQ ID NO: 393205 - DNA, 453 bp, Oryza sativa
ccagtaaaacatcatattactgccatagtgctaataatcatattgttacagattttacaagatgcaagtatgcaacacaggcaatacacatgtattctcatagcctaattgctgatgcacaaaacataaaggcaaagctttggtgatcctcattgcaacgatcatgatttactgctgcgacgcaatcctttcatgccttggatgagaagtgtgaaccggattattttttcatctttgtttctgtattacatggaagaaaacgtagtggacaaaggtactgggaccagaaacctagttccaatagaacttcatatacaagaaaagtatgaacaaataattgatttctaaaacaaatgaaacgtatctgatatttacacaaagcactacgaaaagatctgttggatgccttcctccgcagtcccaccccccctcatatatatacccatgctcttt

SEQ ID NO: 393206 - DNA, 413 bp, Oryza sativa
aaaaactgtttaactttactcactaaaccacatcatatatatctcttgggccccaagcatctcatagcccaggccattacccacaccatactatcatcctatatcagtttttcagtagctacacgtgggcaattcaggcggcccgatgacgagctcttcttcagggaaggcccatggcttgcccgccgccccgggctccgggcacggcaccggcgagacgtcggaggcgacaccctttgacatcggggcagttccatggcagcttcttggcgtccggcgcgagctgcccggtgacgttggacatgcagatgccaggggaggggtcggtgggaatcccctccatcctgccggccatggtgacgttctccgcgaacacgtcgcttgagttgatgccggtgaccttccgcagagcg

SEQ ID NO: 393207 - DNA, 691 bp, Oryza sativa
  unsure (1)..(691): unsure at all n locations
tttttttttttttttgacagaccatcatgaatgatgtatttttctcatttctatataaaagaataagatcatgagaagcgtcaaaatttccacatctcacagggtttgctgttcgtgcatgtctatcttatggcccatctgttcaatctccaaacaggagaaaatacaaaaggcacacatctcaactgtacagcttccgaatgctggcacaaacatgcaaatgatttcggtggcatgtttggaacacccactgggtctactgatctaggggtctgccagaagtcacaagttagaaccaccggcttatgtcagcactagttgaaatggaaaaaagaagggtttgtgtccatcttatggcaaagaatcaatttgagtgccaaactgccaattctatgctatgtgaatcctctgtattcataatctatgaaccgccaccactgttggataccgaagtagatcgtcttgcgactgaaggcattcatagcatagtcgactcggatttgancaagggctgtgttaaagtggattccatatccaaatccaacaccaaatcccggttttccttgtcgagagctggattaccagggncatgaccagcagatcctaagtcactgccgcagtccatgaaaatagaaccctccagangctttgccaaaggaacggatattcacagttagcaattaggcacagt

SEQ ID NO: 393208 - DNA, 591 bp, Oryza sativa
gagaacacaacgcatttctgcgttttttttttggctggaaatggatatattccccaagcgtgacaacaacttttgagtgccagtgtgtgtgtgtgttcccctcccctccctgcttaattacatcatctctaacgtaaatgattcgtgatcttcaacgggaggaaaatgacgctctcttcgacctccagagcggttttcctcccgagacaaaaagcacaaatccaaagctccccaaaaggctgtacaaaatggcaaaaagaagaaaaaaaaaggggagatcgaatgatcccacatcggaatccgacctcgaggcgacggtgtatatgagcgtctgaccgtgctagctccggagcgcgaccgcggcctcgtgcacgagcgagccggtggcctgcgcgacgccgtgcgcggcgctctcggcggccttccgcggcgagccggactcggacatgcggcggacgaaggcgacgaaccggcgccagttgtccgggtgaaagaggtcgggccccatccggaggtaggtaaaggcgaccatccggtcctcctccgcacggtcgtcgacggcgtcggccacctggtcgtgcgccaagcagt

SEQ ID NO: 393209 - DNA, 476 bp, Oryza sativa
aatcaaaaatcaaaaatcgccctaggtatgcttccaaacaaatttttgttagtccatatagttcattgggtccaactcggttccagaaaaaaaagtttgacgagcaaaaaaggacttaatcaaaggaacaatgtcctacattcaatggaatcacaacaaattacaatactaaccagaatgctgagctcgccagatgtcgaggcccactgctcgtcggggacaccgccactgccgctgggcctgaggccgagtctatcgccgctcccgctcctccttgctcgtcgaggacgaagacgatactgttcccgctgctccgacgccactggacagcgtcactcctgttgctagctaaggacgtggatgctgccgctcccgctgcttgtcaaggtagaggacgtcgctcccgctgccccaatgccactggacggtgtcactcctgttgctagttgaggccgaggccaccgtcgctcccgctg

SEQ ID NO: 393210 - DNA, 393 bp, Oryza sativa
acacaagaacggggctgacttacttgcattggtgcattattccgtacatgcattcatgtctaatgtctggagggtacaacaacattgtaaaaggggctaagcaaacacaaattggactgacatcataagagcgacctgttaaacaaagaatcttttaaatagttcatgcacaactaagtgttcttttttcctggtctcaaactaggctatggttgacgaccgagctaaaacccctacctgctaaccagtaaccagcgaaccactaagcacaggatgaacagagccacgttacttgcttgtaaggcagggactgttactcattgatcatttgcctctttttggcaggtggttgcgggcccgctccgccgttgttcatgctcttaactgttctta

SEQ ID NO: 393211 - DNA, 499 bp, Oryza sativa
ctatgcctcttttattcgggccgccctttcttttttttttttgggttctttttctatttctctttattcttgggaaaaacaaatgaaatatgttaaaaatacaaagcctgagtacacgtcaccatttgagccgcaaaatttgattagcaaaaggtcgaatgcaatctctacatacactgcccacataaatacctgctattaacatcagacaaaatttccatctccaaaacaggaattccttccgcctatccagcttcaaggtcacccagcatctataagctaatggcaagctccgtcagcattgttctgcagtacgcactatgccgtgcctgcttttggttacagacttaccctacacactggccggatcgatctcggcatcaaattggagaagccaaaatcagccctttactcggcgcagcatttcgatgttcgaaatgctccaaggtcgtatcttttactcatgcatgtccacagactagagtctcaggatggttcg

SEQ ID NO: 393212 - DNA, 467 bp, Oryza sativa
  unsure (1)..(467): unsure at all n locations
gggtcaccggaggcgaagaagatgaagatgaagatggtgatggagatggcggcttcgtcaccagggcctggggctccctcgcgaagaagctattggaggcgccttcagaagcagcaaacatcttgtagcatggcggcgccacctcccttgccttccccagcagatggccggagaaatggtccccccagatgtcatatgtgaagtctttcttcctcgttgttgtcgtcgtcgcggcgccctcggttctcttcacagccttatctttcatcaggttggatccaggagcgcgagaatgaggcgcgatcggggaaggcgaggacaacaatggcgagacgccatgcattggttggtgcagtaggtgaaggcgatggcgacggcgatggatttcctgatgttactgaaggtggtggagcaggttgctctttagcagtttgcaaccaagaactcttctcaaggntattcctagc

SEQ ID NO: 393213 - DNA, 425 bp, Oryza sativa
ggttccaaggctaaacatctgcattcatgctctgaaactaaatctctttataaatatcaaatagagcactaatacgagtaaagctaaaagccgatatttcttatctacatgatgagactacgactagttcacggttgttgccaaataaggttaatatttacatcacctacgagcaatctcggtcaggctacaaaaggctatggctaaatatttggccaggccgacaataggccttgagtttgttttcacttttcagaaccacgggtgccatgttcggatccatcatgcacaggttcctcgaagataatgccgtttccacgagatccgtgacgcctttttggaaccgactgaggtggctcagatgaattctcctccctcatcagcaagataatggggatttaattgatacgtatgcatgctcaatg

SEQ ID NO: 393214 - DNA, 762 bp, Oryza sativa
ggaggatgaaattgctccatgaaagcttttgatacactaccagaagaacaacattggtgcacagggtgtcaaggatcatgagccacaaaagctatctgtatgctaaattaacaatttacaagtgtaacatgcttctagagggacaagaggaaataaaaatcacttaccccatgaactacatattacaggatctgtaaaaaactcaaaagcaagcacacaagtggtgcataaaaacaaagctatgcggttatcgatgagaatcagctgaacttgatcgaagaacctacacatatatccgagatgctttcttcttcgcgaggtattgtggttttacagccacggaatcgacacagagtccaccttttgtgtgtgtgcaatctatttgaaccattgcaaattggatcttcactagttcattagagctcttcacgacgaaatcgccgacgtggtgattgatccagacaccaggatcagttaagtagcacttggactgagcttgctgtccatcagaagttgatagctggaagcgcactggttttatatcccagccatggatgtgctcggagctataaacccgtcgtcctagtcgcttgagtggcctgcctagatgaagacggaaaaataggctatatgtaccttctgggaagcagaattcaacctcccctctgacctcaaaccaccaaatttgtgagagataagcaaccgcatgaaaccttgactcatcatttggaatgaaattccaatatctcctatcatcaatgt

SEQ ID NO: 393215 - DNA, 422 bp, Oryza sativa
aaggatcagatggttagtttaaccaccaatagcaacaagctgaaacgaatactggttttgctggatttcactggatgttgttgaatatcacaagcttagagcacaacaacgttgcatcaaataaacagaagaaacagaaaacagctaggtacatctatgacctttggaggtcaatttcttattgttgttcgaggcgaatgtgtatattacatggggagaacaaaggagcgcaactgcgaggacgagtatgcatgcaagtcgtcttctgaacccaaccgtcaaagtccacagccacttggggacttaagacaaactagggttgcttgagtttgatggggatggaaacggaaagcaaatgggccagtcaatcttcaaacccaagttcctgtgatcatctgattcatccagggtgatgtgtaacc

SEQ ID NO: 393216 - DNA, 492 bp, Oryza sativa
gcagagggaaatgtaggaattcgtgttatcacaaacagttactatattgtattttgggacaactgtcatgcaaccctgtagaacatctctgctgtctcccccataagaaatgtacaggagaacgaaaaatgttgatgacaaggtggattattgacctgtaatctatagctatgacaatgctgagtttctagatggcaaatctacggcttcagcactaaacgaagacgccaggcaaggtttcctttgtatatcatacctgcatcaccagaaaaacttcacagaagaaattgtcatataaatcgcaggtcacgtactatttctcactgccatccttctcgtctaatgctccattaggcttctcagaccttactggaagaacgctgcgccgctctttgccacctggtttagctgatgcattcccataccatatcatcccaacaacagcagggatcatcccaaggactacctgaaaattcagaccttccttgccaa

SEQ ID NO: 393217 - DNA, 577 bp, Oryza sativa
gcttcaaacaccacagtttgttttattgaaaaaactctgcaatgttacaaattagaacagtaaattgaattgtcaatgctttaaacaccacttttgttcctatgcaatgttacaaattggaatagtcaagcataatctcctccaaatttaccacaaatcatttttttttttaaaaaaggacaagatatataactttcttgttcttccttcttttccttcgattattgctttccttttgttcatcatggacactgctgctatataccagagtggtacgggtaccctcagagctttgatgctgtcttcaagtctttgctcggctcagactggcgctttgcagccatacgttccttcatcttgaaaatgacctcatggacttcatcaaaatgagggcttgcggctttcttcacattctgaacccaactgtggatttttctcatgaggtccaagaatccggacgcggtcactatcacccaggacctccaattgcattattgcacaaacaaggcttagatccttgagaccgcactcagggttgcccaataagaactttgcgttgccctccagcagcatatag

SEQ ID NO: 393218 - DNA, 492 bp, Oryza sativa
tttttttttttttttgattgctgcagatttatcatgcaaggcaaatgtacatacagcgggatctgaatatctgatatttatgttaacgcatgatgggtaatatacatttacttcatgaattcctgatgtagattgaaatctcacctatactcctacatgacatacatacgtgcgcttctattgactcggtttgatttaatctgatctattagtaaatgtatgttgtgcattccctcccttttcaaacccttcacttcatattgtgccatctcaaaccatttccaacctttaatgcttggccatcctggtgaagttaccacacatgtaaatttcaacatctgctaaagggcctcttttcaaaaagtctttttccaggtacaaaaggattcagaaccaaagaagagttcactattcctttctgttacaaattcccatttaagcccattcgtcccagttaaatcaggattttcggggctcaaaattggcctgccc

SEQ ID NO: 393219 - DNA, 514 bp, Oryza sativa
cacaactatttgcatcaaatttgaaaggtaaaggtacacgagagggtatcccatcgtcgatgggaatagaatccactcccgaacagaagaacaaatatactcttaatttaactagagaaaaagccagccgtatgtttctcttaagcaatacagagatatgctatatccaatttttaaaagaaaccaagggataaaatacttcatcttgccaatgcttacagctttcgagttgccccttaggcgtaaagaaaccaagtacataattactcaaaacgtagtccaaaaatccagccttgaaaacggcattcattcaataagcctatccatccaattggaaggtgaggttctgtaacaaaaaaaaggaaaaaccaaacttttcccaccattacggtgggtacgagttcccatgcaaaattgaggcacaaggcatctggagatgaggtgagacagtcggcatatggaagtgctcgtttgcaaattgcaactgcagatagcaaaagctttatgttgttgc

SEQ ID NO: 393220 - DNA, 491 bp, Oryza sativa
tttttttttttttttttttcagaaaaaggtataatgatggaacatgccaagttgaaataagttacaagagattgatgttctatggacaacaataactaatattctgctaaacagtttagttgctgcggtaaaattttacaactcataagcaatccatgcctgccgttggcactctaccagtttttcaatgccattcgcagcatttctaatcgcacaggaggctttctataagacttaaaagcagtgtcattcccagaagatggttacataaagaaaggcctagtcaaaagtgacatggaccctagcagaggctaccactacaaacaaaaatggcaaaagaaaagggatgctgactagggcccgaaatccatctgcatcgtgttgaggcctcacttacctccactttatctcttaactcctttttctcagaccaaatccaagtaacaacaatgggcagcaaccaatgcagcaattgtggatgagtagaagcg

SEQ ID NO: 393221 - DNA, 1019 bp, Oryza sativa
  unsure (1)..(1019): unsure at all n locations
nnnnnnnnnnnnnnnnnnnnnnnnnnncccgaattacccgaattacgttcacacaccaaaattagggggtagaaaaaaagcttgcaacggagcaatgccgagcttgtgtgccagttcaaaagggcgcttcagtaccggattggaagtacagactacagtttggggtataaaaacacacagatgcaactgcaaggcatataagactaacttcaagtttgtaggaattaaaacaagtatcccatctggaattcatcctcaccgatcaacgagtatcgcagttaaacagcagaaccgacaaatacaagtaagctgacaaactatgaaaactgaagtatctgaaatacactaacattcttaaggcataaagcacgagatatgattattcataatgccggtcccaacgaagagtcatctgattgagcacttggaaaatcactcaaaaacggcgagggggaaaccgatccataagcctcccagatgggcactcataagccatgtgaccacgaccaccgcagttgtggcagatcatgaacgcaccggccatgcaatcacggctcatatgaccaacctgattgcaagcacggcagaccacatcactgtatccaccacggaagggaggaggcccacccctctcattgatagcatcagatttggggcactctcgggccaaatgtcctgacacgttgcataggttgcagacgggctcgttagggcagttacgagcaagatggccactcttcctacagttgttgcaggcctttctcattggggcattccggcagcaaaggtgccctggtttgtagcagttgctgcaaagccttcatttcaccttggcagcattggtggagcactgcattctcttgcaatgtgacccgacttgccacagttgcggcatatcccttcatttgggcagctgttagccatgtggccaggttctttgcagttccagcagagatctttggaagaacactctgctgcaatgtgccctggaagcccacatgcatggcaaagagccacat

SEQ ID NO: 393222 - DNA, 866 bp, Oryza sativa
acataaaaaggggagagccttttctatatcagtgacatgtccctacgttcttacacgaagcaagacagcttatagcataacagcagtactatgtttttcatgaggttaaatttttaccagacctactaaagcaccagttaattcagaaaagacactacataaaaaataagagccttttctatattcagtgacatgtcccctacgttcttacacgaagcaagacagcttatagcataacagcagaattatgtttttcacgcggttagattgttaccaggctttttgggacaaaagcactattcttcagcattatcccctttctggaatgtaggagatttaccacgccccattgtaaagccccttgtcccatccggcattctcggtccaggaataggcttgttcacatgatcagaaccagaagtggcaggggatgagacatggccttgcccacttgtattttgctgaatctgacctcttccttgagatttatatcgaccttttcgtcctcctttagcatttactttttggtgttggtgcatgtcctcatgggaaatattagagttcacattctcattgtcgaaagcactctccactgaatcagtaccaccattcttttctgataccatctgctgctctacttttgaaggctggccctggatggcctgattttcttttgaagactggttatgctttcctgatcctacggttcgcttagccagcctgactttcattccagtcctccaattgctcccatcgtttaaggtgatagcagctttctcagctgcctctgctgtttcatattcaacaagagcatgcaccttgttactcagcatgatgtcatggttcttaattgttgcaaattaacc

SEQ ID NO: 393223 - DNA, 443 bp, Oryza sativa
  unsure (1)..(443): unsure at all n locations
gccggagcccggaagctagcgcctcgtcgacttgggcggcggctgaagtcagtggccgaaggagcggggattacttgcccgcctcgaaggctctccgccggcgggcaggcgggatagcgcggcagggcccacgccggcagatcaggtggggagagaagctccgccgtccgtgcctgcgccggtttccacgagagcggcgtcgcctgtgtcctgctgctgctacctttgctgccgcatcctcgccgctctgcatcggtggacgtctgggatggcggacggttcgtttcttgatcggatggtgtctcaactttcggtcgacgtgcaaggtactacactggatatcccaaggatctagggccatcaagaaattataccgttcacgtcanagcgtcaattcgtgcaactttttcaatgaaggccgtccatagtttttgccttnnnnn

SEQ ID NO: 393224 - DNA, 580 bp, Oryza sativa
  unsure (1)..(580): unsure at all n locations
aacgggccaaggagagaggagcagcagcagcgccaccgctcgcaagatctcctactcctcgtcgccgacgagccgcctcctcctcgtcgtcgccggcggcagagcaccggagcagccaccccatggcgtccccggacctcctcttcaacctgcgcaacctcttctacctcggcgcctaccaggccgccatcaacaacagcgacgtcccgggcctcgacgccgacgccgccgccgagcgcgacgccatcgtcttccgctcctacgtcgcgctcggctcctaccagttggtgatcagcgagatcgactcgtccgcggcgacgtcgctgcaggccgtgaagctgctcgcgctgtacctctccggagacaaggaaagtgcgattgtcagtctgaaggaatggttgagtgattcggcggttggaagcaatcctgttctacgattgattgctggaattatatttatgcatgagcaagactacactgaagctctcaagcacacacactctggtggaactcttggacctgcatgcattgaatgtncagatcttcattaagatgaacgttcagatatgccgagaaggaa

SEQ ID NO: 393225 - DNA, 582 bp, Oryza sativa
ggacagcaaatgagaggatatcttacattcagaatccagtaagtatgagtgctgcacgctatcggggatatacagtgcacacgcaggtgacatagggtatatatctatgtacaaaaagagagcgaacataaatacatcattacatcaaacatgcaattaggatgaatccgtcactcagcaacaacacggttccctttgctgtagctgcagagtttcgatcattcagtaacagttgatgttcttcatgaagctagcccgttgtcttgggtttgcgacattgaaccgagggaactagtactggctgcgctgcttaagctagccgtctctcaatcatcctcttcatcctccagatcactgaaggatatgtcttcctcctgccctgctgaattgacgttgcctgttttgctggacacaggagccacatccttcagccagtcctccacctctttatcatcatcgtccgaggtgatatgcagattagccttctcagagtcagaaggtatactcttggtctcatttttcaccaccagctcttcttcaaccacggacttgtctattatttccacctcagcgactgaaatc

SEQ ID NO: 393226 - DNA, 626 bp, Oryza sativa
  unsure (1)..(626): unsure at all n locations
tgggcttgtctttttatagaaatcattctccccatagaaatagttacaatgtgcacatcttaaaaataacgatctcagttatttcaacaacataggagtatataacaataatacccacactggtatgataaaaattcctattcctcgattggaggtgggaacagacacatgcgcacccgtcaaaataaataaaaaaaacagttgtaaggaagtatttgggttgctaacctagaaagatttatttaataggtaaattctggtagtaggatggcaaatcaaaatgtccaacatatagaacgtatccaggggcggatccaacgtgggtgctagggggactcgagtcccccctatcccgctggaccaccattggtagaaggggaaatgaaagggggaaaaatagagagaaaatgaaaagtagagaggactgaacaaggaagaaagagatcacgagtcctccccttaaatcttgttatggatccgccccttaatgtatctaggactttgtgcctaggatctgcgtgatgaggtcgtgtgcgacacccaacatcttccaggcttggtggaacttgttcggcggatagtggacctcttccatatcgcacgaccggatgggggcaagcgctnca

SEQ ID NO: 393227 - DNA, 790 bp, Oryza sativa
  unsure (1)..(790): unsure at all n locations
ttttttttttttttttttgacaacaaattgtaaccatgtataaataagagataatatagccccagtttccagtatcctcactatagtgtcagtaggtacctggaaacactggccatctccatgacattttaaatatctttccagaaacctaacaaacatcaccanttcattatccccaacacacttttgatcctaattaaaacatgataaggcccagactaccacggcactttgacgcctaggaaccttccacactagtaaaaagacagacaggaaggcctcaaagtaccagagcctgtacaaccactgctgctaaaccccactagtcttggatgtcttcttcactgggagcatatgaatgttatgttaaaagctaaaattcgccccaacgagacggctagttcatccctgcatagtgttacaacagtgcatgtacatatgcatatcaggtgggtgctatataaatgacccacagaaaggagattgttggtctatgagattaatctgaagcctaaagtcacaatctgaaggctattttttcctgagcaaatggaactttctccaagctcacacaaccttaccttatgaaggggttatgcatgtctccagatataaaagaattatcatccaaagacaagcacatttaagtcctttaagcattgacaatctacactttttggcatcttgagctaaatcaaccaggaacagactcggaggtgatgtgcccaccatttgcaccgctggcattaaaaccagtcactggcatggttcgctgagcaaaatcaagcag

SEQ ID NO: 393228 - DNA, 531 bp, Oryza sativa
aaaaatgttctcaaaacagagctgtgtgtggctacagtagtcacactgaccacaaacagctcatttcaacttgtattgaaattgttgtgtatcagaggcatgctacccacaccaccttctgtctttacaagcagcaaaattatggagtagaaagaattcgagatctttacatacaagggtcgcattcttcctgtactcagaccgactagctggtaacttcacaaaccagtatattccaggccgattttagatggcgagcattctgtcaagtatagtttgctatgtccacatggaaaagaatcacccagtgagaagatatgttacagtttagggtttctttgtctgtacttttttcaggtatttcttatgaagcttcaaagcaccagcacaagcttttttggcatctaaatttccatttacatcattcagaatcctaataagatcatccagtcctctagcttcctgtaatagcttttctcttttttcttgagaacacttgcaaccatgaaaactgaaaatggaactggacca

SEQ ID NO: 393229 - DNA, 560 bp, Oryza sativa
  unsure (1)..(560): unsure at all n locations
nnnnnnnnnnnnnnnnnnnnnnnnnnnnnnggagtaaatcaattcattaatctcagaaatttaatctagcgcatagccatcataatatacaggtcatggcaagaacatctgaaaaatggcatgtttatggccatagcgtacagtctcacaacataaaaaaaaaaaagatcattcactgaaaacagagctgattttgcgacaataaattccacccacatggcccttgaagatgtcaatagcataatactttacagtatggtagctttttaaggatcttggggagaaaatgccgcctggggttgggaaatgttttcgctattaaaaggaaaacgcttcacttccgaaaagttcccttggtcaaacaaaccatacaaactaattctttggtggcaatgcttttcatgcctttttcttggcttcttgttcagttggtgatattgctcatcatccaattcctgggatgaaattgnactacgttacgggatttnnggactgcctttnaacccttttccnggcaaatttcantcttnttnaataccnggntcttgggggtnaacatt

SEQ ID NO: 393230 - DNA, 417 bp, Oryza sativa
agcacttagaacagatataatttcatcaaagaaaaccaatacaacatataacaatattacaataataataaaaaaaatctccttttcccaaaaaaataaaataaaataaaaatctcccatttggggccacatgccatctctcctatatgggcctcatttcttgatccgaaataattcctcataaaccatactaatatttttccccttttccccatacaccattgtaataattatggcaatggattttctacgtaggcttaatgatcaaccccatcataatcttcgctagtgtcaacgggtttattcaaagaagactggacaaaaagaaatggtgatatgaagaaggaaaaatctgtgtagccatgcatgcgccgaacgtcgctcagaacctcttggaatccggtgcgctggctccgg

SEQ ID NO: 393231 - DNA, 608 bp, Oryza sativa
tttttttttttttttaaaaaccgactcaaatacagatatatatttccaaaagcaaacaaacttaaaaaccgactcatacacggatgacgtaccaaaatatcggtaaaaacaacttaaatttttgtgatagtagagatatatagaagtcattactaactcaaataaaaatatactgctatatgaattatattgttgaaaagctcccctagagcaccaaacgaagtttaatccaatcgaacgtgattgcaagcttcagtgggatcgatcgatcatgcatgacatctcgcgacatcctgctaatccctgcaatcctgttctttctcacatccacgcgtgtacgtgtttgcgggaccgccggggtggaggagctttggtgttccagggatgtcgtcgtggttcatggtcgtgtagccgatttcaattgtcggcggagacgccgacatcctcgacggcggtgaggacgaggagagccaccagggacaggccgacgacgacggtcaggttcaccctagctttcgccatggcgatccgagctaatatagctagcttcacagatgatcgacgggcacctcgatcgctcgatctccttctctttctcctggtttgtg

SEQ ID NO: 393232 - DNA, 473 bp, Oryza sativa
aaacctgtacactataaaggccttgccattaagtgatgtacgcttcatccgtaagcacaccccgacatttggattcgagtacataatcattgttctctcatcaggattggcttttcctccattctatttctacaatggtgggcttcgtgaattgtttgcgacactaaagaagcatgtttttattatcaggtcggacgatgatcctaatgtatttcttgtcaacgactttcaagatcctctacagaaaagtttgtcatcactggagcttcctggtgttgccaccgtagcaaatgccatgtcacgacagaactcactcagtttcactagttcagttgatgaagccagacatgggagtgatgccaaacatggggcatcttctagcatgactgaatatgtctcaaagcaaaaggcacagatcgaatggatccgggtcgggatccttctctattaagctctttttatattttttttgt

SEQ ID NO: 393233 - DNA, 507 bp, Oryza sativa
atgaagttgatagagttggttatgcgacttcaaagtatgaggtgttagatggacttttactgagggtatattgacttctccctatatagtaatttagtaacaccaagcaaactacattaagagaccatggagcaacagcatcactcttgttctacacactttcactgcagcaacaccacaaattaaacctgaatacatcagagttgctactgctccctaattcagtctgttattttggtgtttcgcgttacagcaaaaagcgctcaacttgtgttccacagaacctgcacctttctcctcaagcttattccatggctgatgccaaatagttgtcacagtaaccaggtggctcatagataaagcaagagatcacgtctcgcagtgtcacgacaccaacaaccttcgaagtcaccgtccacgacgtatatccggtgggttattcttgatgcaatgctgtcaatcacgctgccaagagaagcgtcaggcgaacaggggagaggcggcttc

SEQ ID NO: 393234 - DNA, 557 bp, Oryza sativa
  unsure (1)..(557): unsure at all n locations
nnnnnnnnnnnnnnnnnnnnnnnnnnnnnnnncataagttcacgtttgcaattttaaatgtggatggaggttcgtgggcaaatagagaacatctcacattccgtggagaaggcaaccaatcgatcattggcccaatcgagaaaatcgttacatagttacatctgccggccactgttatgtacattcattccgttaagaatcacctaatgttgtgcggactctccctagcaaatgaatatgatgcagcccctcgtattgacaacctgcggtatagagatcaacccgtgcataataactagtcctacaaatcacagattaaaaattatatatatagctacaaatggagcaaatctagatagagccgcataattccatgtgtgcagtgttgctatttatatttgaagatcatccagcgtcagttcatcgactgacatcatcttcagtttcgtgatgaactggggaggatcatccagactagatgaaccaagtatgacttcccgctttagcttggatgtaagcttgtgcacagcacgtaactcccaccgagtggcgccacc

SEQ ID NO: 393235 - DNA, 398 bp, Oryza sativa
  unsure (1)..(398): unsure at all n locations
nnnnnnnnnnnnnnnnnnnnatgaaatccncgaaaagcacagtaaaaacccacagataatccgcaaaccaaagcatggcatgttcacatagtcccaacacagcacaattatttggtttgggtatacttaattactctgcatctggcctgaatgattttattcatacaacctgacaggtttgacaacatatattgcgtaaatggctctacgccgatccaagggaaacgaccccatccaagtcgagaagcgagaccaggccaggtcaattgctgcctggttctcatcagtcagacccatctccttcctcctcttgacggcctcaggtgatgtgttcataaaagcatgcgagcagccagggtagatgtggacttcatgtggcacgccagatgacttgagct

SEQ ID NO: 393236 - DNA, 730 bp, Oryza sativa
  unsure (1)..(730): unsure at all n locations
nnnnnnnnnnnnntttttttttttttcagtctcagatcaaattggattgataagccaagcatcccaaattctcaatgtcacaatgtacaaattggcttacggcacagcagcagtaagcaacctgagcttcggcgagatcctcacgaggccagggtggtggtggggcagttgtcgacgccgcagagggatgtcgcggtagtcgcgggagacggtgaagctgtcgtgcacgctgccgtcgcggctccggacgtactcgaacagcagcgccgtgtggttgaaggccgtcagcttggcgaacccgtagtcccggtcctggacgtggctccaccgcgcccgtacgccggcgtagtccgccaggctcgccccgccgccgcccaccaccacgtgcgtcgtcgccgtgaacgcgccgctgtagtggctcgccgccttcgccacgcacacattctcgtagactgggcaggttctctcgtagccatggacatggccgtacatggcgatgtcgaccttgtacttctgccaaagcggctggaggctctccctggccatgggctcctcgggttgtgccctcctcgacgtagaaagcttagctgaatgagtagccgagaacacggtggggcgagggaagatgagccacgggctgttttctgcccggtcgaacggaggagaaggcatggttcgatgaaacttgtaatggtcggtgcctgggcctccanttcgaagttcngtgttt

SEQ ID NO: 393237 - DNA, 482 bp, Oryza sativa
ttttgttggagttttcaaaatcgtttctccaatacgctaataaaacgccattagaaatctccctgcagcagctctgccgcaaaatcacaccttgccccgtcaagtatctgaacgcatggttaatagtgccacaattttccaaaggtaatcagacctatccatgtgaagcatagtggcatgtacaatcctgatagcaggttaattacaccttaatgatgttaaaagtaaaccttggcacaagtttccctctgatccgtagcttcatacatcgctgtgatcagcgtcatcacccttggcatcagcagcttggttacttcctgggcagcaacatgcaaaggaatctcccaatggtctctctgggacagggattagctttcccacaaatgccaacggccagctaaaaaaggcgagacctattgacaccaaccacaactgccaggtgagtctgggtgtcgagtaaacttgccaagggacttaacaat

SEQ ID NO: 393238 - DNA, 485 bp, Oryza sativa
ctcctctcctcccttccaccacgacgcgaccgacgcggcggagaaacccgcgaagccgcagtccagccagcgaggggccgccagccgaagctgaagcgagagctagggtttgctccaccccttgaacccgcccgcgcccccgccgccacgaggccgatcgagggttctgcttctgaggctgtcaagcctggcggctaattgggatggaccttgtgggatcgctgctggtgaacatgactcacttggttgacacctcggggctccagttcttcggctggctcatcaccgccggctccttcggcctcgccgcgctcatctacgccctcctcaggctgcagagggcggcgtcgctgtactggatcaaggcggctgccagggagaagaaggcggcgtggaagtcgttgcggtgccccagctccggccacacctggaccgaggactacttccgcggcggccagccttcgacgtgctgcgtgtgcctgtcg

SEQ ID NO: 393239 - DNA, 498 bp, Oryza sativa
atccaacaacgcaagttgcagattctacttggtcggagtttcagcctccggcgaactgctccgatcgatcgctcgctcgctcgcggggacgcgacgagtatcatcgcctgccattgtcatcatcgcataggagttcccaactgaagaattgctaccttcctaatttaaggaaggagtttgtattgttgtaggtctcgcattggacaagaccagccacgccttccttgtcgctatatagcgcaaggcttgccagcaagaggacaacttgttccgttgcaaccgagccgccggcttccacaaccgaggaaccagagatggatcttccaaaggagatattcctgaaagaatacaaaaagcctgattacttatttgactcggtcaatttggaatttcaacttggcgaagacaaaacaatagttacatctaaaatagctgtatctccaggaactgaaggtaccttcttttcacttactcttcatgggcgtgatctgaagctgc

SEQ ID NO: 393240 - DNA, 447 bp, Oryza sativa
  unsure (1)..(447): unsure at all n locations
caacgcaagttgcagattctacttggtcggagtttcagcctccgnganactgctccgatcgatcgatcgcccccccccggggcccgccgagagtacatcttgatcggacaatttcccgatatttcagagtgcaaggcttgccagcaagaggacaacttgttccgttgcaaccgagccgccgccttccacaaccgaagaaccagagatggatcttccaaaggagatattcctgaaagaatacaaaaagcctgattacttatttgactcggtcaatttggaatttcaacttggcgaggacataacaatagttacatctaaaatttgctgtatctccaggaactgaaggtaccttctcttcactttactctttcatggggcgtgaatctgaaagctgctattcaatcaaagtcaattggcaagggaccttnaggagtgaagattatatgg

SEQ ID NO: 393241 - DNA, 720 bp, Oryza sativa
  unsure (1)..(720): unsure at all n locations
nnnnnnnnnnnnnnnnnnnngaaccaaaccaaaatagaattgagtcaattgacaagattggtagggatgttctcccgctgttctctggaaaacaaaaacagtattgagttctctacacagtaagcggctcagtctacaactctacagtgcttactcaactagattcatatcaacgtccatccagaacaagtccaacaatgcactacacaagtctgctcacggatgtggcaacttcaaaccttgcaccagtttcggaaacaaaatttcagttctattttctctaaacagttgacaccgttttggcacaagtcgtttacggccttgtcatttcccctttgaatctaggacttactgcgctccagcagcagctgtcccccatgacatgtgtgcatattcacaatattcacgtcctcggtattagcatacaacagccacactgaaaattagctggtttagttgatcttgggctttggccgccttgggcgtagaaagaaaccagagcaggcagaaaaacagccaagaaagcaggaatcgttgtcaagtctagctggcacgtcgacttttctttcacgagtacattgcacagggggtagacttgaaatggggtgagttaacagcattagccaaaatccatgagaagcctcctcgagcattgaagtaagctttacagcatcaccatatcgtcatccncngctcgtgccgaatccctgcagccaaagg

SEQ ID NO: 393242 - DNA, 408 bp, Oryza sativa
  unsure (1)..(408): unsure at all n locations
nnnnnnnnnnnnnnnnnnntagccaacaattaatcttatgtatactgtatagttctcatagatatatatgtacacaagttccctatagtaatgtatcgtactaccgttcatagcttcacgtaatgcacataacacagaatgtataattttttcagtacaattggaacatcaaaatcacagctgacagcatgacatactttacagatggagcttttctttttccatcagaacttgtaacgaagaacaaacacccattgttcattcccatgtctactatttgattgttggaattgctcaaactgcatagaggcggataatctggttaattcttggctcgacaaatggggcatccccatttctttggattctatatccttcaagcaggacatgcaaccagccatgtgacca

SEQ ID NO: 393243 - DNA, 427 bp, Oryza sativa
ctccatatcatactaataatgtttaagcaaataaattcattaacatgcaaatcaagccctgaagaagagctgaactgagcacagtgatccatgacagattaaaccaagacactcactctcaccgacggtgtgaaatttgcaggaacatgtacattactaaggaagagacttaattattttattggcacataaaagatgatggatgtatcgatgtatttcagaggagcctgttgaggtagtcatcgacggtggtgtactggacgtccgggaagagctgggtggccctcaacggcggtggctggatccaacggcgtcgtcgtctcccccctttatgtaccctgcgtgccgcgatcgacagcacgatgttcaacggggatctccgacttctggatttgcttgagcacggcgtccttgggcacgtacaccc

SEQ ID NO: 393244 - DNA, 458 bp, Oryza sativa
  unsure (1)..(458): unsure at all n locations
gaaaacaaccaaatttgttcctaaccgggaacaaggaggagctttgggggtgccaattggaaattggcctttttcaatcccaaactacgcataaccgttacacacgagagtgcttttatttatcacactcccttcctttcacttatacacttatatggtgacatttgaaggaggcaatttattgtagccactagaatattttatttctcagaacgaaaccacgaggagagaaatgccttaagttgtagccttgagcttggcgacgaaatccaggatgcccgtgtggctcgtgccgccgacgccaccgccttggcacctcctcgccgaccttggccgcttctccggacgcggcgtcggcatcatctcttcaccttcccctatctcagcggccggattcntataagttatcgataccgcgacctgagggggccggaccagttgctataggagtgtataaa

SEQ ID NO: 393245 - DNA, 770 bp, Oryza sativa
tttttttttttttttttttcaccaaccaggatccttctaaacaagctctgaataagaggtattgacactggataacaacattatggcaccaaaagtattatatctacaatacacacagtaatctatctaaacaaactgtagcaggtgataatggaagcctggcgaaccttgggcataataatataatcagtagaattgcatactgaataaaatataaatatttacattattcatactgcaaataaggagaagtgcacctgtgccaatcaaagttcccacgcaaacaccaagaaatatagccttgaaggcgtgcccaagcgcattgagcagtgctccagtgctagagagacatcaatccgtggtgtttgtcgaaggcgttcattggcaaagcaaatcccaggagaatgatagatacatccaacccctgaagtataatcttgaagtaaacttgacagatcaagtaacaccatgaggaaataaacgagcatcgctcctctagaaccgccatcagattttggtgatcttgtcagctttcacaagagggattctgtttggcaatctgctccctcccgacctgcttgtaatcaaatgtgcatttgtgtgaatcggcatagcggtgcattgaacagaaggtgcctccgcagcggcacttgaatcctgtcaacccaaccttcttccggcatgataagcaacggttactgggtggctttggtggatcctcctccattacttgtttcccatctgcaactgaaccagaccctccatctgtg

SEQ ID NO: 393246 - DNA, 416 bp, Oryza sativa
caaatccaatttcacttttatgtagctcagcaaaaaattatgctgtgaaatccgcttgttaagataacagcgacaaatgacgaaccatccaggaacacgacctcaatttgcaatgtgctttgaagtaagaactcacaattcctcggtgaaatatttccaccatcaaaaagtctattctaaacaccgaatattttattctgaaatgctctgacctgaggcatggcccgatatataatccattcttctagccacagctgctcaaagtagttaatttacataggcaagatgaggttccttggtatcctgagcctggtcttggatttgcacacttttttgtatgaactattaaatttcaaaattttgcacaaatgtaatggccttctctgatcacaaatcaaatctaacatcccattttt

SEQ ID NO: 393247 - DNA, 782 bp, Oryza sativa
  unsure (1)..(782): unsure at all n locations
acacatacatatttagcacaatcccagatcctgtaacttaattattcttaaacatatatggatattaagaccctacctccatgaagcacggcacgtacgcgcacgcatgctgctggcggatatatatttggngtcgtccaaaagtttaatacagtatatatgtagaggcaagcacacaggcatatatattatatatatattatatatatgctgcacacctatgtatagcatgtacatacatacgtacgtacgtatatatatgcacgcttatctctcgacgtacttattaaacacaaactacagcggaaaccttcccgcatactttaaggatgtcggggattttgaccttcagattgacgagagcattaaccttgatggcttcgcaaaggcagacagcagcgttgtcgctcgggaggctggagaactgcgagcagcacgcctggttcaagagcgggttgccaagaccgacactaatgcacgcgttgagattaattaacgccagcggacacttgggaggcggcgtcggagatggcggattgacaggggcaacggtgggtgaaggtgttggtgccggcgatggcgtcgggactggagttggtgcgggcgtcggtgtcaccaccggggctggtgctggggctggagttccagtcggggttggtgccggtgcttggcatgggtttagttgcccattcacagcagaagccaagaccacaacaaccaatgcagagaacaaggcagagttcattgcctgtttgcttgccattgttgcctatgtgtgtggg

SEQ ID NO: 393248 - DNA, 432 bp, Oryza sativa
gaggcacaacgtatgcacagtatagatgttaacctgcagttttggccacaaaaatacattgcacaatacaacgaaatgtctatcagttaaaagcaaaaaatagccgccctaacgctttacagactcccaaaaatacagactgcctttacgtttgatctttcttcagttcttttacgctctttctctgcagtcaaatgtaagggtgcggcccgtttctaagatctcaagaatgtttacaagcaccagacgggtatatcttgggatgtacaagtttgccaacgcctaaaacatctagtcaactcaaagcctcgatcccttcgggaattcgctgcttctccatgtttttgagctttccacagttaatgaactttctcatcaacaattggacaactcgtgccgtcgatccaacagtatatggtagtatagcaatgg

SEQ ID NO: 393249 - DNA, 494 bp, Oryza sativa
  unsure (1)..(494): unsure at all n locations
nnntttttttttttttttttaacccaaacccttttgatttattaattaattaaccctcttgtggaaggataatacttaattacattttcctcgtggatctcttcactaactctcctcctactaccagataaatgcctgcagtgatggttgagacttgagagcttcagaaaagccatcgacaacattcagaggagtaaaaggaaaagacttacctaactgctaaacacttagctactaccactatatgtacaaaaaagaagctagccccagacaattaatcggcggcggcgacgaggaggacgacgacctcatcgtggctcgatgacggtgatggagacgtcgttgacggacaccggcgaggcggtggagtcggtcttggtggtcatgagcggcggggcgaggaggagcgccctccggagcctggtgaacatgggcggcctggagggctcggggaggttcatgtgggtcgntgatgagggcgaggaggacgttgg

SEQ ID NO: 393250 - DNA, 729 bp, Oryza sativa
  unsure (1)..(729): unsure at all n locations
ttttnnttttttttttacaacaaactacaaactcaagaagcactccgaattgaaatactcgccattgcttgcagtacgtacagagccgaaattgctacactacccttaagtttgcatgccgtcgctagctgcttatcgatcaatctcacatggccacgcatgagctgatacatagcatcggtgtagtttctcaaccgtgatttgatcagtgagacagtgacatatatatagaacagttcagcgactaaattaaacggtggcgccgttgctcttcccgccattggggacgacgtggtgtttgtcggcgtcgtccatgaagcgcttccagaaccagtgctgcttccacaccctctcggtcatctcctcgatggggatgttcttggtctcgggcaggaagaagagcacgaagagcgacatgacgacgacccacgcggagaagaaggcgaagatggcgtacttgaggtggcagagcatggagaggaacgcntgcgcgatgacgaaggtgaagagcaggttgacgcacacggtgacgttntgccccgccgaccggtntccagcgggaacgtctcgctggggatgagccacccgagagggccccangaccacgcgaaggaggacacgaacgtgcacaccatcaccaccaccatgatcgcccacccgtggccgagttgtccgaccgttccgtcaccttgatccccagcacgacggttangcggatcctcaccaagg

SEQ ID NO: 393251 - DNA, 690 bp, Oryza sativa
  unsure (1)..(690): unsure at all n locations
ttttttttttttttttattaatagtctacgtttaatatttataattagtgtccaaacatccaatgtgatagggacttaaaaacagggcccaagcacaccatagaaaaaagacgccccacatcacggttgcagacaaagttgcagattccagcaatgacgcaattaaaaccgaaaattatctctcaaccatccattcgatccatcaactcatgcggtgatcgatcgatcagctggagagaaagttccaggtgacaggttcatcaaaattaagccggcaggcaagcctgaaagctaccgttaacgcattttattttttttcagaacaactgacaccggccgggtatttactccacttaatagaagcacctttgatcaggctgggtgatcttctccgtcagctttttacatcatatctactccgccaagttgcatccacggatgtaagggtgatcatactttatataccttgtccaatattggtctgtacttgggtcattgctaacttccaggccatggcttcatgtttaccgttggaatgaacaaccagcagcattatctatctctgagcgatcaatgcttggggtgtatcctaatccaaggacnatggccacggacttgtcaagggggatgcntcaacttgtagaagggttaagatgccaggtggaagcggtcccaagcttccaaaagaaa

SEQ ID NO: 393252 - DNA, 754 bp, Oryza sativa
  unsure (1)..(754): unsure at all n locations
agcaccatcaaaatcatcagaaaatagcaattgatgaagcattatttacatctaggcaatgaggctccgaaagttgcataactaatatcttttcaacttagccaaaaacaaaaaacatgcataaggatcctcttccatagttccagagtaccgataagctcattggcaaatctaatcattaattaatgaaaatgaagtagaaagtaccaggcaaatgttatgcctcagaactgtcaaaaacttgataggcatcacgatgtttaaattaagattcctaagcctttcaacaaattcaccacctagattgcatagccgccaaaccctgagaccttccaaaccctgatagttccatcagtgtagccagcgaagagggtgctgccatcagcgctccagctcaaacttgtgcagtacagcatctggctcttgaaggcctggacttctggcttgaggtcctgcatgacgagcttggactcgaggtcccagatcttgacggagtcctctgtcgcggcgcagagccagtagcggttgggcgagaagcagagggagtggatgatggcgccggcgtcgagcttgtacagcatcttcccctcggtgagatcccagagcagggtggttccgtccttcccaccggaggcacacaaggagccgtctgggctcacggcgacggcggttgacgtagccgttgtggccctcgagcttggtgcgcacttgcagttcgtgaaggttccagaccttgacgctgngattccacgaa

SEQ ID NO: 393253 - DNA, 502 bp, Oryza sativa
gctgcaacctagaatctgtagataggtttcaagctagttgtgcatggttgcaacacataagtacataattagacaagccaatcacataaatatattatacaggtgactgacccccaaccaaaaccacttcctgtatctttcacctaaccgtcagtctacaaagccctcaactcaaaacatcaactccaaacccaaaccaagtcaaccattccagtgcttacaagtcaataccagcagacaagctaaatacaatacatcagtaatgtacatacaaatgcgagaaactcatagaatagtgctccattaacaggtgattacttggcaataagaccaataaattgaccagaaaaggtactgaatttatcccaaagaaggggattctggttcagaaccactaatggatgtgaaagtggatagcgagtcgtcaccgaagttcaattgagtagctgatagcctccttgaatcactaaagtatctattatagtgaccagaacacgatctg

SEQ ID NO: 393254 - DNA, 516 bp, Oryza sativa
  unsure (1)..(516): unsure at all n locations
nnnnnnnnnnnnnnnnnnnnnnnnataaagttgcagacccatttttttcattggcaactatgatgtctgttaagtcaggtattctccgaaaacttgagataaaaacgacatagatatgcttcgtatacatacacatgattgcatattgatcaatcccctatggaacttgatgaattacatatccatttaagtagctaccgtttgaggcgcctcaacactatcaggaaagtatcaaggcagagtgtgtagtcatcgaaggcacttattccacaaaatttaccacgagtcaaaactaatttgtcccctccaatttgaagcctatcaaaggagcaagcgttggaaacctttacaccatggccaaagttcttgggggcctagctcctctggacatattactgtgctgttgcctcaaatttccggagcatgtcgcaagtgcggngtctcgtaggaaagcccccagtggngacgctgcacctcaaccctacaattctgtgagagtattgagaagtaatcccg

SEQ ID NO: 393255 - DNA, 497 bp, Oryza sativa
acaccaaacagttcatccatccaccattaatttatgaccaagtagtaggcagtattacatggcaccaaaaccgcccaatttttaaaaaaacaaaataaacaaaaaagaaatttaaaaatctaatcgatttacttatgccaatatacaccaacaacaaatggaatgcacgttagctctctctctctctctcagtccaacccaactcgactcaaggcaagtccatacgccatatccttcttcatctctggtgatccaaaaattgaaaaaaaaacatggaggtcatcatcacctgtaatctaatagaccatgtcgtcgcggacaacgctggcgaggggagggtgggcgtaggggcccctgatccaggtgttggcgatgaagcggtagggcgcctcggcgagggggatgcccgcccagctgacctgaggcgtcggaatcctcgcacgtttgtggggccgggaggcccgcccaccgcactcatgttgtagttgtccggcccg

SEQ ID NO: 393256 - DNA, 684 bp, Oryza sativa
ttttttttttttttttgaattaaacaaattgcataatacgaaactgtatcacaggtgaaactccgaatatcccaacttgatttcaaatatgtacgtgatggaactcaataaaccaaatcaaaatgtccaccccgggttattttctgtttcttcttctcagatttgcttcgaggcttacggcacgacccgggcttaatttcatacaatgggttttccatcttcttacaagcaacttcagatttcaaatgttaagtattaacttaaattcccttcatgaggggctacatccttggggtgtgcatttgccgatacgatgagcccctcgggtgatcgattttccggagatgatcttccaacaccaatccattgcccaaatagtctccttgggagcagccgcggggttctgatgtaccatgagattgttgtgaactccaccagtttgtctcacagtccactggcattagtggggatggtgcgaagcgatcccgttcccaggcatagaatcggtttcctcctgcatcatcagtctccatcgagttatggccagatgaacctggtgggaaaaggcaaaatgccgggttctctggtagagggggcggcggtgcagttcgcatgcctcctgatctatgagccccagcaaataagctggatgatgaactctgctggtactgttcactaatgctg

SEQ ID NO: 393257 - DNA, 526 bp, Oryza sativa
  unsure (1)..(526): unsure at all n locations
nnnnnnnnnnnnnnnnnnnnnnnnnnnnncttcacaaaaagaaatatgtggctcacataaatagaagagacttgtttacatacaaacaccaaaggtttcaagtgacaaatcgatatagttttacagaaacaacaaatggaatcgactggcagggtacttgcgaatctgctagagcaaataatgtggttataactggaaaaacaatgccggcaactcatacagctgatatataatcttaaacctttgttcattggatgaaatatatctgcagaatccattgctccctcctggtacttgtcatatgagtcacttgcttccaccattgatcaccaaggcctctggctgtggtggctcagcaatgtccttcaccacctccaccttgggagggcccgaatgccgcctcatcggagaaggcggcgccattccagcttggaaggacagcttcttcttcactgaaccaacagaggctactttctccggtggtgtctctgcaccatcggtcactgcagaaccttggaggcgcaac

SEQ ID NO: 393258 - DNA, 546 bp, Oryza sativa
  unsure (1)..(546): unsure at all n locations
atatagaattgaaaagctgtattaggacagcactgttacttgtgtttaagctggaaacggtttgcatctcggtgcaaaattatacaggattatctaaaaacacatcatcaccttcagggatctctattgctatttcacaatgctaaggcacactggaaaagagttcatgcaaatagcaaatggttcctcctcagcatctgctcctggcttcttggacgcgggcgaggcgggcggctgctcctccccgtagatgacgcggagcgggacgcggagatgggcggggaggcgcggcggcgagggcgaagagctcctcgcgccnacgcccacatggcggaggacatggcggtgtntgcggccggagcgacgccttcctggcctccagctcgtcgatctcgtgctgctgctcccacgaccgccgccccagcccctcgaatgagcccagcagcagcgcgctcgtcaccttctcgtggttcaccttccaccagcttcgctccgatcccgcgcaacgccgccgccatccccgccgccgccgccgcacgatatggt

SEQ ID NO: 393259 - DNA, 552 bp, Oryza sativa
  unsure (1)..(552): unsure at all n locations
ctgtcatattattttggacatanccatgccatgattagcacaaaaagaacacacaagtagttcaaactagacagtttaccagcttatattcatattacaaagagaataaaatacatcttgctccaaatcactgttacaaacatgccatctcagcccttttaatgggacgccattcagaattttgagttcagttcacacattgtgtatattaacatccgcacatactataatggcagcagtgcctgtcagatctctcactggcagctcgtaggcacgtaaataggtaaattccagaaatcctttctcattggtagcacttcagtgtcaagcttctgaaaacggactgctggttggatcataatgaatctcccgctaatggaaccgtcgctacatgaaaagcagacatagttagaaaccagcctatgggtcaacccacaggtccactccaacattggcaaagtactgctcttttccgtctcatgaatatgtaagcatagttgctgaggtccacggacttgccaccatctgtctcaatctgactcagaaaaggag

SEQ ID NO: 393260 - DNA, 553 bp, Oryza sativa
  unsure (1)..(553): unsure at all n locations
acaatacaattaattaacacataacaccttgcagtaataattatttgtttgatggatacaccatgaagataattaaacaaccttttcatggacaaaatacattgaggtcccctttgagcagggtgcctttacattttgtgccattaaggtaaaaaaaaaacagagagaaagggaagaacagggagagcaaaaaagacataattatgggacaggtactactggtacatgttcttggcttctttcttatgtataagacaagatgacacacttaggaacttaatgactgcaacagaacagaaactgaccacaacaccaaaatgactttcactgatcaggaaaggtacagacttggagatgaggacagcaagcgagtatgatacagggatgaggcaaagctgcaattaagaaaagctatagatagattgtggcatctgatgatgatccatccgtttttgatggcgacatgttcttctttctcagcttctgttctngcatttctccattgccctcggtgcaaggccaatagcttctganccctttcattatcctaagg

SEQ ID NO: 393261 - DNA, 416 bp, Oryza sativa
  unsure (1)..(416): unsure at all n locations
nnnnnnnnnnnnnnnnnnnnnnnnnnnnnnnnnnnnnnnnnnnnnnnnnnnnnnactcggcattaacttggactatactgaattatcacaaaaaaggaagatctgatcatggccaactatagcaaagtgcctaagatcagatcctgatcgatgggagaccaacacaaaagtatacaacaatagaacacacaactgaatctacagggtcaactaagtaattcaccggacacaaatcatcacatattgacacacaagaacatctcactaggagcagagatcaaacttggagaggcacaggaaacaaagcttctcacttcctcagaagcccttcccaaggtgaaaatacctgggccttgttaccagccagcaatggcctggagagcaccgggagcccccactgcgacgcgaagatgatg

SEQ ID NO: 393262 - DNA, 731 bp, Oryza sativa
ttttttttttttttttttccgtaacaacacttttgaggctataaaatgagaacccaagtgatcataaatacataaaatgagaacctaagtgatcataaattatacgaccaatggaacatattgtacaaatgaataacaatgagatgtttatgaatcatataaagctacaactgaggaagctacactggttggaatcttatgaatctcccttttttctttctcctatcctacacttgaattgtttccagaagacgacctcaacagttgatgatgattaggggttacagaattgggcatgcctgggttgaacatgatgtttgacgtctgtggggatggctgggtttggatggccgacagcggcagacgaggtccaaatgacagcatctgctgccgctgctgctgttgtaagaatgccatctgggggtgaccatgcccctgcatgttattggcaaatggtgctggcatactggattgaggcatcgagcctggcacgcccatcggtctggggctcatactcatgggattggatgacatggtgctagtactacccccaggtaggctattcccggcgaggccaagcgggtgggacacgattcgggacacggtcagatgcaatcctctgccttattctctccacttggctacgcattctttccaaaagcaaggtccccgacttcgggcaaactgcttcagcttcagttccaacctttttaactgcaagttaattgttg

SEQ ID NO: 393263 - DNA, 419 bp, Oryza sativa
gcaaagaaaaaaaggattcgttgatctcagatcacacattcatatatgggactcgcatacgattcacagcaacttgtcttacattactactactgcagttcgtcttacgcaaaaggcgggaacaataccaaatttcattacaataaaccgaaggcaccaagtgaacgactgaatccaaaggtttgtggaaacacatatttacatcacaggcctagatagccagttcgccccgcattcagtatagcattcaagccaccaggaatagaacatgtttccaatgccaaaagtttcagaatatatgttttaaggagccaaaccatggctggcccacactcaaaatttctcaaaaggttgtggacgagaaggaacaactcgggctgcatcttcctgacgaacttcctcctttgcttaatgcgcaa

SEQ ID NO: 393264 - DNA, 500 bp, Oryza sativa
cgctcgatcaggtggcagcgacaacgagagggagagcgagagctaagttcgccggagaagatggcgatgcggcggtggagagaggatgcggtggcgctgtcgctgcgcgggtgcggattcggcgacggggacgacgaccggccggagaagccgcggcggtacggggtgacggagatgaggagccccttctacgccttccgccccgcccaccacgcgctccaggaaatattggattctctaggtccttttgttgatggtttgaagtttactggtggatctcatagtttgatgggaaaagaactggttagagagattactgatttagcacacaagcatgacatatatgtaagtacaggagattgggcagagcatcttctgcgtcaaggaccttcttttttcaagcaatatgtcgaggagtgcaaggcattaaggatttgacaccatcgagcttgaatcttggatctctcaagctcccggaagaagttcttcctgagattaag

SEQ ID NO: 393265 - DNA, 488 bp, Oryza sativa
catgagcaacgacctacggttcttcactctcagcttaactcatgcatccaagaaacagccttcttggaccaagagaataagatattccaaaggaacttacaaagtcagatgtggaaactccttccagtacaacccccttgagaatgacctgttttcaacactgatggtattcttagaattacacttgaacaccatcgcttttaaaatatctagtgccataaggttgcctaatgaaactgcctataattctagtctattctactggtcatacagttcttgatgtattggcacacttagttggtttaaaacgctcctcagaaatacctgagatgcttataccaacccctctcactttcccatacgattgcacgtatagtatccaccagtttgcccagaattcccaatgacgtgcagtacttctctgcctgctgattcaactgttccaatggaaaagagcttgtaatctttagtatcaactttccttgtaa

SEQ ID NO: 393266 - DNA, 387 bp, Oryza sativa
cttgttaacttattatattctaaactgaaaaagaaggcgaatttgggcatgctgaattcgttccctaaaaaaaggaacctacattccaaacattttcatcaatctgcatcctaaatcttgctaaagttcaaacgtaatcgtcagatgcatcccttcccagcaatagaaggtttctttaaatacaataaaggttaaacaaaccaccacgtatgtaactgtgcagggtctcgcagttcaactccactgttagtcaacagcatcggtttccaccaaaggccccagattcttggtagattcccctaaaaccgaaagaaattacgagcatggaatacataatcggtactaactccatgtcgaaatgagcaaaacaataaaacggaggggatg

SEQ ID NO: 393267 - DNA, 474 bp, Oryza sativa
ttgttttttttttttttaccggaaccagcaattggtatattaactcgagcaaacttaaaatgctcgaaaaagttgttcagcaacgaacaaaaaaaaagctctaagcaaaataaaactaatcacattgttgcccaatggcagataaactttgagcataccaactgacgacggttacaaaatcctaccagctgagagcatcttcctcttgtttattggcccgggggaaaaaagggtaaaatgcggctaactctttcgagtttatgctcagttattagcatcaaagatgctcaaagagttaaaaaaaaaaaaaaaaaaccgcagccgtgtaggcgtgtgtagcttcaagcagcaaccttcttgcagtggttctccagccactccatggtgacactcttcggtctttcgagcggcaggccaagagcacggtcccaaatgagctgagatcctattccaatgctccttgaaactccgaaa

SEQ ID NO: 393268 - DNA, 484 bp, Oryza sativa
gtccaaataatgtgtattcatcaattcagttactaagaaaatagtggttcttttccaatgtacaaacagatgaaatgtgcaggctccaccaagctagctacacacctccagctagccttaaacttcaatataatataaggcatcaagcaagcaaacgaacaaacaaaagaaataataatattgcattagattaactagttcactactagtaaaccctagctatttttgcgttgatgcgacagctcaagtgctcatttctccctccttaaaacatcggaaatggctcttcatgtcgctggagctaaggaccctttcaatctcttcttagtttagcagagagacgaatccataaccctaaaaaaaataggagaaaaaacacgcaaaaaaaagggagaaaaaacaaagcaggtaaatctctcaagtgcaatggcctgatgcagagctttgctgctaagtatgaagaatgctgttgccgtttgcataa

SEQ ID NO: 393269 - DNA, 555 bp, Oryza sativa
  unsure (1)..(555): unsure at all n locations
nnnnnnnnnnnnnnnnnnnnnnnnnncagnccaattggaaccatgtgaaaattaatatagattatcttattcaattccagagcctacaagtaaaatcaacataacatataataatccaaacttgttccccgtaaaagttactcgtaatttagcacatcaagtaacaaacaaaatttgaacaggtacatccctgtgacggtatgacggtcaggctcattagccctggactttcctcacttgaatgtggtgagtagactcctctctccagatcgacttcactccactctgaacaagggtcacgtagtccccttctttcacgaattgggcgttcagcaagctactaattgctctagagaaagtttcctctgcatcatcagaaaacttcatgtaaatgggaaccacaccctggtagagtgccagacgttgcttcactcgttcctcatttgtaaatgcaaaaattgtagaccagggccggtagtggctgagaaggactgccatggagccggttcgtgtaaacacaataattggggtgcaaagggtgttcgccctcgtgcc

SEQ ID NO: 393270 - DNA, 440 bp, Oryza sativa
  unsure (1)..(440): unsure at all n locations
nnnnnnnnnnnnnnnnnnnnnnnnnncagaaaattaagtaattaattaattaattaatcatcttccctgcacattaacaacgttcgtacactcagctcaactcaaccgctaatcactacacctacccccttgctgcactaccaaatcttttgattttcattatgatacagctttaattaattaatcccaacaacatctgcgtccctctcccttcttctcaggcgccggcggcgtcgcgcgcctcgtcgtcggcctgcagcggctcgagcgacgcgacgatgtcccgcatgagcggcctcgccttggggttccggttcaggcagtgggtacgccagcattgccgccttgtgcaccgccctcgccggcagctcgccgcctgcgccggcggcggcggcggacgctgagaggcgggggtcgacgatggacatgaccttgcgctt

SEQ ID NO: 393271 - DNA, 403 bp, Oryza sativa
gggaacccttggacaacagatgggattcttttttcctgggcatcaacgtttattgcaggcagttcaagatcttaattggtactacaagatcaggttcagaatggcagtgcattcttccaggatagtgaccaacttgaacggcaccacagaatgcttattggcaatttgattgatagacagtagcaggtaactagagagcagcaatgcactcgatctcgattctggcgttcagcggcagagctgctacttggtaagttgggcgtgctggtgcaggagctggaaaatatttggcatagatctcattcactttcttgaaatcttgtaggagcagccaacatgattgctgccttgacaactgaagagtagctagcaccacttgctttcaatattcctcagccgaatc

SEQ ID NO: 393272 - DNA, 474 bp, Oryza sativa
tttttgtggttatgaatcgaatagtgtattagaaaatcaatatatcgtcaagacctatatagtatgtagcagatatgattccagtcaaataagaacatgagtagatgtagctcagcaagcaaaaatgcagcacattggctttttctctggttctgacgcagctagttgcagtaccaattttccaccacccatccaaccacaacaataagatcacgtaaattaacaagacctgctgctgtacatcagcatatcggcaaaggaagttttagtaaacatatagccggcaacatttcaacgattcgctaaaagggcaagacaggagatattggaagccctaatctgcatgagaatggttgtaacatattggaagatgatgctaacgagatgctgcaccctcaaaacctccacggttggatggacctaccataaaccaatactcagtgcccaaaaccagcaaataagagtcctagcaat

SEQ ID NO: 393273 - DNA, 707 bp, Oryza sativa
ggtattgaagggagtagcatatggtattgtatgattgtatatgtactactaatctaatcatcttaggcaggagaagaagcattcaaccaccagccagccagccagccagccaaacacaaacaagctcacatgcagtgcagggaaggcaatgcaagcctgtgtgctgtacccagctcactcactgctgagctggcacacacacatacatacaccaacacatacagtacataccaaagaaaattcccttctcaagaatctcaaaaaaaccagccccaattggcttctcaccccaccttttccttgttcttttcttgcttgtaacacatcactgacaaacttaatatcacacaggtgcatggactagagagagaggaagagagagagagagaggaggcaaaaaaggtaaagagaaaaaaaaaacaggttgcaaaagtacccacatctcccttaagtagatacacccaaaccctctgcaggcagtagcagttgttgtttgcagcatcagcagcaatctcaccacaggatttttacacaaggggaaaactggctcagccaattgtctctgtcttcttgtctggatctcaccctcattacatttccttgttttaactcctctcttcacctctggtcctggtggttttctgctcctgatgatgcctctcccatgaacctcaggccaggaacatcttgcctgtccttccacctgg

SEQ ID NO: 393274 - DNA, 711 bp, Oryza sativa
tttttggtttactttactttttatttgtgtaaacatccagatagtgcaacctaacaaacggaggcgcgcgaattcgccacggcatgctaagtcgaaacgtcaaaaaataaagaaattgtttgtttctacggatgtatctctaagcctgcctgtataggaaggatcggatcggagtaaggtctatcccctgagcatttgaagcacctgctgcagcgtgggagcaaatctggtgacgttgagcttgatatcctgctcaatccagtagtacttcatcccgaactgccacccttgcttgtgtatagattccgggtccctgatcgccgggtggtccttgccgtacttgtcgtagagcgtgctctcctcggcggcgatgctgtactcgacgtcgcgcagcctcatctccctggccggaccaccgtagaacaccatggatgggtgttccatgtggccccacggcaccacctgcagcatcaccgcgttggtgcggaggaaagaagaagttggtgagtccggccccgtgcgcgcccatgagcacgtcacatgagtccaccacccgggagaactcctcgatgctcaggtcacgacgcggctccaccgggaccacctcgaaacctgctgccaccaccgccgcggcgatctcctggaagttgacgaatttcctcgtccgcccgcggttgatgagcatggcccgcggcctccgttgcatactgg

SEQ ID NO: 393275 - DNA, 602 bp, Oryza sativa
ttttttttttttttttcccaacagcatccactgcgttatattacttagctgaaataacaggatcttcggtcgtcaaagacatgtttagcgcaccaggaacacagggggtacatccatcatctctatttttggctaaccatatacaaaaagccagctgcataggcatcctcagttttctctgggttgcaaaggttagacggcctgtgcttcaggtaaagagttaaaacctctctgccgggacaaccaccgggctgtggctccacacgcttcctctcagaaagataaggaccccttttaaccgcttcattcaactttccaatgagttcagaaaggcttggctcatgacgaacatgggatgatgataatgccttgctgatcgccagacaacaatcatgccgtgcttccatgccaagttttgtcatctccattttggggtctgtaacacggctgattatgtccaactttgaacaaatttccattaggcaccattctctggcaacaaggccagatattactctgtaaccagttatccttatgtctggatcttgttgtaacaccgacagaagaagagccgaaggtgtcagttttggactgtttcttgc

SEQ ID NO: 393276 - DNA, 523 bp, Oryza sativa
acttcacaatttaatttaatgaaacgagcaacttctcctaaattaagataagttcttaggatctgttatatatttgtattgttaaaaataaaataggggcaaaagtaaactacatcagagtctatttttacaaatctgactaacaatggacagtcttgtatttcttctctcttcagtctgtaacaagcttagccttgaaagcctgtctgtgcctttgaataggttccatataataaaaaaaaacaccatctttctttagtgcactccataaccgtttagaataagagtgtcagctatcaccttccttgcttcagaacataatttctcagcatcattcccttcaattggatggtgaataatgagctttactgaacctgaattaaggatgccttccattccagaaggcatcagtttccctgtcccgagaagagtaataggtatcacaggagcaccggtctttgtagccacactgaatgcacctctcttaaatgcacctagctttccatctttgcttctagtcccc

SEQ ID NO: 393277 - DNA, 512 bp, Oryza sativa
aggaagtcataagaatatgtgcgacgcaattgctcgaatcacttatgttttgtacggttcagtgcattgtacagacggcaagtaggttctccaatcttattagtgctttcgacaattttttccacgataagaaatgaaataatggtactataagggtctcgtctgtcaaacggacggagcagactgcgaaacagggctgctctttgtaagaaccgaactctgctgttggagggatgagtgcacacgctcgacgcgctccagatacagggaggtctgcatttctatgagacgggatatcgccctacggaatgcaaacatctcttcttggccagacaaaattgccactaggcctgtaggagaaggcgctgcaccaacattaccttctgctaaaacatccctcctaagctttgccccttcagcttcaccttcgaactgaaaactctccaagtcaaaaagaggtccttcatcagttccttgaaaagatcatcaatggatgaggcagctagacatac

SEQ ID NO: 393278 - DNA, 400 bp, Oryza sativa
acaacgcaactttaaacaattaatctttgtagcaccagggacaattattccttacatagttacacgtgcactcgtggcaaacaaagaacatggataagaatcggaatgaacttccgatggtctggcactcggggcattaagaaaaatgccgtacaactttgctcaagtaatcaacatatctgtcaaatctacacaaaactcctcttgctgaggatatggcttccccccaaagaattaacctattgtacatatttatcacgccagaataacacgctaattacaaggctcaaacttacaacacaacacatggatatggactactcgttacgaaataagttattatgcagcagctgtagtacacaatacacagcgcattcgagactcgcctgatggggtacct

SEQ ID NO: 393279 - DNA, 660 bp, Oryza sativa
ttttttttttttttttacatgaaacaggcaggtatcagatattcacattggaccgtctcctctcgaaagcatatgtacatggcgcacgcatgcaggtgcccgggtgtctgcacaaatatttttcacgcccacatgccgtacttcaccggcgtgccggtcggcttgatccatggctcggcgtgcaagaagttctgcacggtgaacttggtggcctccttcttgctgatcaccttcttgtaccccggccagctgacgcggccggcggtggcggcgccggcgcccttgttcccgtactccgcgtaccagagcgtcttgagcccgaagtcgccgctccacgggaggtagccggccttgtctacgaaggcggggatgtcggagttcatgatgagcgtgcgcgagtactcgcgccacgggcgtgcgaggtagctgcggacggcggggcgggaggcgtcgccgagcgccgactcggcggcgaagcggtagtgctggagcacgaagccggtggcctcgcggcggtcggcgcggccctgcgccgtggcgatgttctgctggttgtcgagcgggcggcggagcacgatgacgcagttctggaacaccgccgcggcgtcgccgaagatgaagtccccggtgccggagatgacgcagttgcggtagaaagaa

SEQ ID NO: 393280 - DNA, 384 bp, Oryza sativa
ggccgcacttgtggagggtgacacccctgtactttgagctgccgcgggagaagccggtgctctgtcgccggagaacgtgcacgaactcctccttggacaagctcttcatctgcctcatgtcctcctcgtagtcgctcaggttgaagttgatgtcagcctctactcccctgaactggaccgccgccctgtcgtacgcccttgcagctgcgtgagcagtggcgaatccacctaggtagacttgcttgccgcattcccagacgtggcagtcccagcgggcggtgcggcagtaggaggggaccccctcgtattgccagcttggagagcgcggcccgcggcggctattcttggtcgtctgaggctgcggctgttgcggcggcggcggtg

SEQ ID NO: 393281 - DNA, 924 bp, Oryza sativa
  unsure (1)..(924): unsure at all n locations
tctcgctatttacnccagctggcgaaagggggatgtgctgcaagncgattaagttgggtaacgccagggttttcccagtcacgacgttgtaaaacgacggccagtgaattgtaatacgactcactatagggcgaattgggtaccgggccccccctcgagtttttttttttttttttttcagggcaacgacagagaaaattgcaggcgtgattgtacacgggccagaccagaaacttacatcaaccactccaaggagcccactgccattgacaacaccataggtccacagcatgatgcataattgcctatccggctatcccactatcaaaagaaaggcctatatcaaccgagtagactgagcatgccacactccagaacaaaacaagcacaacacatggcacattattggttcagcaacagtaacccgcgaagtcgtcctaatgggatgatgatactggtgaaagatttgaaaacactgaaaatgtgtttattatgaaactcactccgtttgcatctccgccgcaggcaaggggattgaagagcagcagtagtagtaccctctttcatcgaacttgaatcgctgcgaaagatggatctcgggaatgaggtattcgccccagtcatgttccccatattttctgaaaatattccgagcatcgaatgagtcgtttctttggttccatctcttgctcttcctgtgcctcacattcattatggtcacgtgcaacttcaattcttgcctcgcatccctttcaagtactaggcccgacttgacaaaggcatcagttataactttgcaagcacgttgtaggcgtccctcttcaccaacttccagcacaggagcatatactaccctggccctagctggtgagcctttcatgcatgtcagacctctaagttgtatggagattggtcggttttcca

SEQ ID NO: 393282 - DNA, 958 bp, Oryza sativa
gcggcgagggcgatgaggtggaggaggacgaggacgaggtggtggtcgtcgtggtggaggaggacgaggatgatgaagacgaggagggggagggggagggggagaaccaggtggtgccgtgggcggaggaggcggaggccacgccgccgcccgtcgcgagctccacgttgagcagcagccgggaggccgccgccaacggcgcgaaccgccgccgaccgcgtcaaggaggaccagccgtgctcgacgtcgcagccgagcttgtgccggtacgcgtcctcggctcaccatggcggtggtggccggagcgacgaggccacctcctcccggaacggcggtggcgtcggcggccgattccttgcctcccggcataggaagagatcgccctcggatttccgccggtcggggttggcgcagtcggtgagcggcgtgcaggggaggatttgctccaatgcggtcgttggtcgaaatgatgcaagcatgatgtgaaaatatcaagaagtgagcaagaaggggtggtaaaaaggcttttcctgaggcaactgaaacaatgatgtagatgctgatgctaactacattagaaggtcacttttggtgtatccaggcatttggggggagatgtggatcactgcaaagatcaaacctccaccgagcacacacatcttcacatcttttccgtcgacaacttgcagagtcgacttatcacgcggccatcccagaactcggtagtattcataatcgcgacggcttgctggagcttgtatatgtgcccccactactttcatgtgtttaaatccctttttgtccttttggatgaggcgttctggctaacttaagaaatgatataggtttgcatttgcagtgccattcttccatggttcactgtctgaatgcttccattgtgccctatgttcagtctcaaacttgttcagaaatcacaatcttggctgaaaaaaaaaaa

SEQ ID NO: 393283 - DNA, 451 bp, Oryza sativa
cctcgcgggaatcacctcacctagctagcttgcgagtgacacgtcacccacacgcacgcacgcacgtacggcgcggacatggcgaagctcgcgctcggccaccaccgcgaggccaccgaccccggctgcctccgcgccgtcgtcgccgagctcctcctcaccttcctcttcgtcttctccggcgtcggctccgccatggccgccgccaagctgggcggcggcggcgacacgataatggggctgacggcggtggcggcggcgcacgcgctggtggtcgccgtcatggtctccgcggggctgcacgtctccggcggccacatcaactcggccgtcacgctcggcctcgccgccggcggccacatcaccctcttccgctccgcgctctacgccgtcgcccagctgctcggctcctccctcgcctgcctcctcctcgccgacctaccggcggaga

SEQ ID NO: 393284 - DNA, 695 bp, Oryza sativa
  unsure (1)..(695): unsure at all n locations
ccaaccttcaacctaaccccgcaagcaaacgccctgaccgactaaccctcgccaccgagcaaactcgagacccaaagccacgcaactttctttgtgttctttgatttgttcttggcaatcgcatcagagatctattgattgattttgaagcagaggaggagcagagaggtagacgaagagctgcaagattctttgcctgttcaatcgaccgtgctttgtgagagcatacgacggcggcggcggcgagggcgcggcgtctcacctgccccgacggcacggcgaccgaggaggggaggccggcgacgagatgggctccttgccgctgaggagtggtagcagcctgcctccaccgtccttctccaagtcgccggcctcgctgctgctgctgtccaagtcgctcaccctctactgctgagagagctcgagctcgagctcgagagctcatgggcggtgtcacctcgtcgtcggcggggggaggcggaggaggggagaccgcgctgggggacctgccggagagctgcgtggcggaggtgctgcgcaggctggacccgccggagatctngccggatggcgcggctcagccgaccgttccgcggcgccgcgtccggcgacggcgtctgggaagccaagctgccgcgcaactangcgcgcctcctcgccgtcgccgccgacggggaagcgccgcgcttgaagna

SEQ ID NO: 393285 - DNA, 619 bp, Oryza sativa
tgttagagagagagagagagggagggagagggaggcaatggtggcgacgaacctgaaggcggagacggtggggctgatggaccggcgggcggcggtggaggcggagatggacgccatcatcgccgccctctccgtgcccgtcgggccggggatcaccggcggcctcgtggacgcggagggtttccccaggtccgacatcgacatcccggccgtcctcgcccagcgccgcaagctcgccgaattgcggaatgatcacaaggatattacgaacaaaattgagaagaatctggaagttttgcactcaacaaaattgtcaagaaatgaagcgtcaatccctgcaagttctggcacacctgcttcattgcacagtgggttatctcaaaatgatcctatggaagaagatgctgtgaccagacttccttttgccataattgatgaactgacagatggttctcctgctgctgtggatggcttgcagctttgggatgagatagtaaagtttggaaatgtggaagcaggtgatagattgcatgaaaggcttgtctctgaagctctttccaatgaggattgtcaagtatctctagtcatcattcgtcagggatcatcaatgaacttaact

SEQ ID NO: 393286 - DNA, 749 bp, Oryza sativa
  unsure (1)..(749): unsure at all n locations
tctatctcttttctccccttccttccttccgcctcgcctccccttcccctcctcgccgcctcgctcccctccgccgcgccgtcccgtcgaatcccgccatgccgaagggtgccaagaagcgcgccaagctcaagaagaagcagcagggggaccaccccgccggctccgatgacggcggcaacaacaacaacaacaaaaacaacgccgccgaaaacggcagcaatgactccagccgccgccgcgacgccgccagcgacggcaaccaccacctaccgtcgcgaccaaacgttcctcatgtggatgtgagtgaggactccatggagagctccgaggagatggtgaccccgagggccgccgcgtccgaggcggacgaggaggagaggaaggccgccacgtcggaggtgcccgtggaggtggtcgaggccggggaggaggtcatggtggacgccttgccgcccgaagccgccgcacgtgcgcaggagcaacagggtaaggcggaggcgcttgtggtggtgcaggaaccggaggtgaagcgcgaggagttggtggccaaggtgcatccgatgcatgacccggaaccgcaaggcgaggaggtgctcatcgtggaggcggctgcggtatccgcggtgcaagaaccggaggtgaagcgcgatgaggttgtggtatggagacggntgcgccgccttgcggttcaggaatggagacgaaaaagcggtggggtgttggtcaaggatgttgttggaagtttn

SEQ ID NO: 393287 - DNA, 806 bp, Oryza sativa
taggaatctacctccaattctgtggcgacgccacgcctacgtcatgtagccctcaagccgaacagttggtgggcatggacctctcgtcggcggcgggggtgtcgccgtcgtacgccaaggcggtggagacctacaggctacaggagggcggtggccacggctaccacgatgaccgcctacgcggtgctggcgcgcggcatggcgagggagctcgtcgtgccgcacgacctatgcgcggtggtgagctgggccacgacactcgtccacgcccgcctcgggcctcgcccggcggagcgccgcaccgccatcatcaaccgcgtcgatgaggacggccgccacgacagctgtttcgcggacgcccacgcgtacctcgccaccaagatcgatccccgtgccctgggccggttccgcctcagcggcgtcgggggcgggggcgagcgcggccgatggaattcgctgtccatggtgccggctactcgatgtccgacgtcttcgagggcgtggagttcaggtggacttccgtccccgcggaaggcggtgggaggttgcgcgaatcgtggtcgctggagctcagcttcgacgcggagcacacggacatggcgctgggcaggcgcggcggcgggagcgcgagctcaagatctacatgaacgagagctggtcgtggcgcggcatcgtccaccaccaccccgccacgttcgacacggtcggcatggacccggggctgaagcgaaccatcggcggcgacctcgacccggggcagggcgtggaagcgagggtaccttctctacggcccgcccgggacaggc

SEQ ID NO: 393288 - DNA, 385 bp, Oryza sativa
tttgtttttttttcaaggaaagacaattattcccatttatctgaatatttgtatcgagcaaaaaaacatcggttgataacattttaagataatacaatctatgagaaatgcccatacacaaataacacttgaagacattaaatgtcatttcgacaatgcagagcttattctacatcttcctcattatgaacaagcaacttgcctttccgtgaattcggatggcttgatgggttacagctaattgcttggcgcatttttcttacaacaaatgtttcagtttcttcgcatagtgtgaccacaggtccttttcgccctagacggaccgttcggccagatttgtgggcatagtgggttaagtatgttggaagatccagattaatcacaa

SEQ ID NO: 393289 - DNA, 791 bp, Oryza sativa
aattaaagcagcaatcattggatcgttaagcaggttacaacccatgctacttacaaagaatttcgtaggaaaagtttgcagccatatacaatacaaatactattagaggtgtaccaaatttatatttgaacagaactcgtgtgcaggtagaattacacaatatatcatatccaaatcttggagaaaatgcatcttccatagtatcagctgcaaactcccaactcccaacttactcagcagctcaagcacgttattgtgaaattgagagatgcaacccttaccttgcaactttacacatacactatgatacaggttctcttgtcccattaagcacaggaatcagcatggcaaaagctgttagaagtagtgtcatttagttcttcaagaagagtgcatcatcagtatatggctcaacatatctagtctaaccaccagctaaatattgaagatacttctagttctccacaagtcccagcatgtttgcctccttttcaactgcaaccaatcaatctttaaacaaaccaaaggagatcagacaaagagagcaggattttctccgtgcttctattctttgaatcatatttgtgatgattcatattttcatatttgcaaaaacttcacgcttttgactcagctggagctggctgactggtgtcaatgttcatgtgatccttcacaaatgtccgaaggcatccattgattacccgaggagcaccaccatcacagaaccgttttgccaaatccacagcctcgttaatgacaattttgtgaggtgttccttttgatgtcat

SEQ ID NO: 393290 - DNA, 612 bp, Oryza sativa
agccatcagcaaagccgaagagatagttggcaatacttaacagtaagcattcatgccgagagcataattatggggccacatgcaaggcgaactccagtccaacaaaacaaaaacaccaccacctaataagtgctagcgcagggccgcatgcatacagaatttcaccttctatcataaattatacatggactacgacttcttgacacactcgattaaacaggggctagagtagcagcagggcacattataatcgcgcgatttcatactagctacttcatgtattttttttttcagtcaggctttcggctgttgacgatcgtcctgttgacctgaagaagacgatgatccaaccttcttgaaaactctaccaccgaagagatctttcccaaacctccccttgaaggagaactgcttcttaaaacggtttcggaacatcgtgccactgcgttttgccacaagggcagactgatttctcttcaagccatgatcactacgagaaggatttgcgctggtacttccaccagaaccaccaagagagaaactattaccttgattcctacgagcagatctgagggcaacatgtaatggttccgagaatgagacacacccttc

SEQ ID NO: 393291 - DNA, 520 bp, Oryza sativa
ctttgttggccgccgtcctttttttttttttttttgggcagagccaatacatgttagtagatatatttggtaggggcaccagtgacaggagaatccaaaaacccattgcagcaattatggaagctctcagcacatcagcccaacaaggcctcacaactttgatcaaccggcgaatatacaagatgggaactaattcacactgcaacaggaaacctggtataaatctcttatcttacatacagacgtacccaagccagtcgcactactaataattaattagcctagagttatgatgttacgagccaatatatttggtgtcaaaatcctcaagatcatggccttgagactttttcagttttgccactagaacccacatgtttgcaagttcactttccaagaaggcttccttttgcttcgactcctcaattttcctttggagttctgcttccttttgttccttctccataagcacagcttctaatgccttttttttttcgaagcctggcgtgatgcttttttt

SEQ ID NO: 393292 - DNA, 396 bp, Oryza sativa
gaaagaatactatatgcgtctattgaagaataaaactatataccaatatacgtctcatggaaaataatggactagctatacaactctagccattcaaagggcactggagaagtgaaaatttatacacggtcccttaataagggaggtttggacatcatgagcaaaagaagagaaaggcacgttttatcctctggaccaaaccaaatatcacctggtaccttttcgccactgtggacccccccaataacattgacaaatgtttgcttataccacggaacgttccttttttctttttgggtaaggtgccccaaagttgctttggagacacccaagagccgccccctttgtgccccgcatgcttcttgtgcaagccctttctttctgaaagctttacca

SEQ ID NO: 393293 - DNA, 548 bp, Oryza sativa
  unsure (1)..(548): unsure at all n locations
ataaataaaaacatatatagatgataccatcatcaaagttagacgatcgtgcaagatgatctgcagcaagttcagtttgcaggctcgatgtagctggcacatcaccggttgtttcaaaggaaggcgttggattttaccaacgacgagctacaaatcctcagggcactccaatgcaatcgattgagtgcatggtttgtcacgcctagctgcatacagttcattacgtcgtgccagatgagcagacccgttctccaggagtaacactttgtcgtcttgatcgctggcgagcattcatatcatgtatttccacatccggcagagtttgcctttgcaacccctacggcgatcattcatctctagtctctgttcattggttagtgcttgacgtcttgttctctgtcgatcgaccttagcttgcttctgctccggtgtaagagttgcattacgcaacttgacgtctctgttttgggttgtttgaattacgcagctcattggaacttcatttggaccatagtgagctacattgttgatgattagatncacgtccg

SEQ ID NO: 393294 - DNA, 472 bp, Oryza sativa
  unsure (1)..(472): unsure at all n locations
nnnnnnnnnnnnnnnnnnnnnnnactgcaaagacaccaatcgttccagtgcgcttccgtttcgattagaagtttagaactcttgacaccatggttacggctagccggcccagagcatgcatgcacacgcacatacatgttactacgtttctctttttggttggatatgatcagtagtagtacgccgggagccactccttgccgttgatgaagtcgatgttgatgaacttgtcggcctcctcctgggtgagctgccgcgaccacggctcgcgcttcgtcgcttcggagcccggcccggtgcagttnaactccccgagcatcacgtggtcggtggatccggtgtagccgtagctggtccagccggccgggttgatggtcttggagaggtaggtgttcggcgaagatgacgcgcgagtaggcctcgtttggcgnggcccaggtacacctgcccgacgccgtacaccttgcccttg

SEQ ID NO: 393295 - DNA, 706 bp, Oryza sativa
  unsure (1)..(706): unsure at all n locations
gttgcgcaaactgttgggnaggggcgatcgntgcggctttttttgttattaaccccnagctggngaaaggggatgtgntgcaaggcgattaagttgggtaacgccaggnttttcccagtcacgacgttgtaaaacgacggccagtgaattgtaatacgactcactatagggcgaattgggtaccgggccccccctcgaggtttttttttttttttttttttccgggaatctgtatcctagttgtaaattgaactgtatatatcttgaatttgaaaacaaacagctgcccaaattatgttttacactccatcgcattgcactgctgacccaaaaaaaagaactagcaaaatctttctattctagcggggctaaaagaatcgctactttgtcgggggattttgtaccaagaagcggcggtggtgtgatcgatcgatcgatggtcagaagaaggtggttccggcgaagccgcggtggaggaggttgtgggcgatgttgtccctggcgcgcttggcggcctcggagcggacgggggtctccggcgaggtctcgtcgtcgacgagctcgaaccggagctccggctcgagctcctcgccgcgcgtcttgcagatgttgtggaggacgcagcaggcgccgagcacgacggggaggtcctggagcttcacctccgtccgttctggaggcacgcccaccgtgccttgaggcgggc

SEQ ID NO: 393296 - DNA, 644 bp, Oryza sativa
  unsure (1)..(644): unsure at all n locations
nnnnnnnnnnnnnnnnnnnnnnatgagcataatgccatttggtatatgaatttccttttcttgcactgttgatatacattggaactttgtacaaatctataactgggagagagccaccaagacattgcctcttccctacaaccacatggtatattaataaagacttgattttgaaatttgcgccttacaaaaagaattgattttgtcctagcctttgcttttaaaaggataattgcgtttttcctagaatagtaagaggtaggaaattcccaatccccaaaccctaatatgacataccctataaagggattttttacaaaaaaaaactagccttggaaaagaaaaaggaaaatattaacaaaaagaaaagggttacacacattccagcggtaaaaggaattgaaaaaaaatttaacaacaaaatcaagggatattctgacaaggtatctaacggnataaagctctgagatttcacagccctaatcctgtaaaaactggaaggcgggantctcgantagctcctcagctgggttgacatcggtgaagtccttctcctgaattgagttggtgatgtcatcgactgagaacgggatgcctngaattatcatccaacagaaatgaactgcttttcagcgtttattaga

SEQ ID NO: 393297 - DNA, 723 bp, Oryza sativa
tttttttttttttttaggttaactcacttgagtctgaattaccagatgagcaatacatgtatttagtaagttacaaaccaacaaaaaccgccaataaaaaaagattacattcatttccaagcaaagcaaatctcaggaaacacttcaggcgaggcaccaaaactctccaggaactactccaatccaagcatgcaaccttgcctaacaaagaactttatgaatcccagattatttgtaataacagagatctacaacagggtacaaccattccatcagagccacggagacaagatccaaagaacaattggcacagcgtgttaatcccgctaatgcaagagcaggcaacagcgcctggatcacccgacccttttccccctcataaggacctgcttcattgcggggatggccggccagtataatggaaactctcagtgtaacaacggcgtacgatccttgcatcagagccagaagacaaggcccgaagaccagttggcacagtgtttattccgacaatgaacagcagcacctgaatcacccgagccttctaccccttttacttgagttgccaagagctcaacagtacagcctcatccttgcccttcagcttctttgctgttaccatcctaaagagcttgccgcagcatttggatcaggagtcttcagcattttcatacatttgttgatcctatctctttacctgctaactgccacatccaatttatt

SEQ ID NO: 393298 - DNA, 437 bp, Oryza sativa
  unsure (1)..(437): unsure at all n locations
ttttttntttttttttttttagacaatacgcattccaaatcatatttatatattttcacgatgtaatcatgcattacaaataatcgtgcgaataaacaaataagagcaaatagttagagaagctgacagcctgcctaaccactatagtaaccaaatacgaacaccgagcagtataagcaacaacttcgtcacgcgtcaaccgcccgcagtccgcccgcccgcagtccaccgtccccccgcacccgctcgcccgtccggcacccccgccttcccgccggtagttcaacggcccgaggtcgtatgatggcgcccggttgggcgaggcccccgcggtcgggcgccgacgggcgaggcccgggcttcctggngctcgaaccccgctgcggcccagggccttccgggcgtttcgccgccgggtacgcgttaccccgcggggg

SEQ ID NO: 393299 - DNA, 473 bp, Oryza sativa
aaaaacgggcagaggcttccaatgggaatatatatcattcacaaatattcgggttcgaccagtattcataatgctacaactgtacacactgttaaaaacttacaacaacaaattgtcaagaccaccgttaagtatatgtatatatatatataaattcataagtagaaaaaccaacacctgtgtctacaaataaatcataaaccgttacaggccaccgaaaaagaaagaaaaaaaaggggaatgagaaccaaggggtcttcgagcttctttgggattcaagcttcagcaatggcggttaccaattcgtcagcagaaacagagggggagacggtccgttatggaccaaaggaatataataggagaggaatgctggatgttctcatttggaagatgaggctctgctcctgcttggtttggaatctggattgtcactcttgtccgtgtcggagttgttgtccctttgggaatccatt

SEQ ID NO: 393300 - DNA, 718 bp, Oryza sativa
  unsure (1)..(718): unsure at all n locations
nnnnnnnnnnnnnnnnnnnnttttttttttttttttttcagtattccagcaagactttcattaaataagcatctcttgtccgttacaatgtgccttgctcccagtatagacacatatgtacttatgtagtttcgagtctcatgtccgttgaatatatagatatataatatatgacaatatacagaaccaaaaaaaaaagggaaaaagacgaactccggaagctggacgagcaaaatccagtagcttctgcatgtataaacctccttgcctgagaattatttaccgagggaatggatccgagtctcccagtgccgcgaactgccgatgagaactatcgagcctgacattcaaaaaccttccttttctttcccgtttcagagaacagaagaacgcaaaaattgcaagtgaatcgagcttgcctgtaacctatgaatgctttattgagatggcagagaaacaccaccctcgccgagccttctctacagaggccacagctttttattcacattggaggggcctatcataactgtgtcaagtgattgaaaaattgtgctgagatctctcagctcagaaaaatcagcgaccaccgccaggactcgagctaccaccagatgttgtgtagtctgagcacgcatcatggtgtctgctgggnaaaaccctttcggcaatattgatccaanaggtcggatgctgccatggggaaggttactgggtgaaa

SEQ ID NO: 393301 - DNA, 359 bp, Oryza sativa
gaacccaagcccggaaattgtcatttcaattcgatttccatcgatttcagttcaagtaaaacacaacccgtttcttggctctttgtaatgccatgatccaaacagcacctaaactgatcataagcatacacatgctgccgttcttcattcggctgagcgatcgaagtcgattaaagagaaaaattgaacgaaggaacaaagaatttgcagagaagtgaccccttgggaatcctggggattccttaggccgcagccgttttcatgaacttgaggaactcgcggaaatcgaccctgccgttcttgtccgcgtagaaggcgtcgaacatgcgctggcactcgggggggccggcgccggcggt

SEQ ID NO: 393302 - DNA, 657 bp, Oryza sativa
  unsure (1)..(657): unsure at all n locations
ttttttttttttttttttggtaacagtaagtagctcataaggtggcgagcaggaacctcatgctttcacacgattagataggagttcaatcatatcggacaggtgtacacatctgacaacgccttgcactacaattaacagtacactacatgaacgattacacgaactacaaaaacatttactactgtacaagctcttctataattaagaacgatagccattaaatatcttcacgacagcacgatagtcagggtacgctaagtcgcattcagaacttgccagcatcacataagccgctgcactctgagcagagaccaatgctagaagcctagaactcgaaatggcttcaactagatggccagatttctaggatacagtacgtccatagcatactgatgcaaggtaggagattcttggaccatttctccttgacatgttgactagggaaagcagatgttctcagcgtctcttgagtttcatccggacgcgtgggtcgacctcgagggggggcccggtacccaattcgccctatagtgantcgtattacgcgcgctcactggccgtcgttttaaaaagtcgtgactgggaaaaccctggcgttacccaacttaatcgnccttggcagnaaatccccccttatggacagctgggggtaat

SEQ ID NO: 393303 - DNA, 457 bp, Oryza sativa
ggggggaaaaatggagattttattccacaactcgttatttgcacaattacatcttaaccatgggggatacaaacgaaacaccaactaatttgcaatattggccgagttcacatactaatatgtacaatattcttccatggcgagatagctgagccccttgataaataaactttcacctcaacaccaaatattcctatgttttgctaactgactcggtagctcctgacaatggccgatgatcctccaacgatgtttgtgctgaaggaagactagaaaggcccattctggcaggccctttatcctgaagatcttctgtctctttaccatctgaaatacctgatgttctcatgcccctagaaggtatcgaaaaactgcgggatataggcccaggtggtgtcggtaaaggtgatgcagtttggggagcacttggtggtgtttacctcggccgcgaccacgc

SEQ ID NO: 393304 - DNA, 298 bp, Oryza sativa
tttttattataaagctgatctgacagatataatcacatcgatctcaaatcaacaattcccaccttagggtcagcatttccctgaacttgtacattaatcacagcgtaggaaagatgaggaataaaaaacctcaaacctaatcgcatatctttcggaatacaaaaatatctattccattatactcttgcatatctttttgcagggcaagtaatggcataacaaaaaaaaaaaaacacggtggtagcacgaacattgccatggctaaggaaccgcaatagccctctctgcaactgatatc

SEQ ID NO: 393305 - DNA, 448 bp, Oryza sativa
ttggtttttttaaaatttggggttttttttttttttaaaaaaaaggaagttttattaagactcagttaaataccccaagatgatacattccaactgagtccacccccgccctttggatagaatgcacacagccaaaaaactggacaaagaatgcacactttatttaagacccttgcaagaagaaaaacaagagaaataagagggtgaaaagtttatacaagcccctctagcaacaccaaatgcaaatggcatgggttagaacagccataacaaggggaaagaccacataagcttgttgaaacaagaattcaggcaagaataaaggccactctacccttttggatatcccttgcactccttttggccttcttttccccaaggatggttatactttgtaactgtaagaagtacctattccatgacttaatgttgtccaaatttcttttta

SEQ ID NO: 393306 - DNA, 300 bp, Oryza sativa
tttttgttgttttttttttgggaattaacccccttttcttcattacttggggaatttcacagaattttgggggcaatgcataactcaagccacatggcatggaatgtctgccccccttgtcaacaattactggcttaaacaatccaggttgaataaagccaattaactaatgcttctaatcattggcacaaaatggcctcttagctagatgactggcatgtgtgggatttcaaagaagaaaaaaaaaagaaggaaatcccacactgcctcacagcacaagaaatttattctgtagcaatg

SEQ ID NO: 393307 - DNA, 286 bp, Oryza sativa
agttagaaagtttcaagtaaatggattctacacaaacagcaacggcgtttcacataagctcaggaaagttcctccgttcaaaagcatcggataagcacagtacaaatctcccatcaattcagtaaaaaccgtactagttttcagtttatcagcatctcctttatcaattctgtaaccttgggagagtacgtctcctccaaaactcatctatttgcaatatctgcagttcccatttacagaaggaacccaacagatcattctctttttattattttcgcgccttatt

SEQ ID NO: 393308 - DNA, 324 bp, Oryza sativa
agagataatccttctttgtacaccgggagaccgggaataagtggcaatcttcagctaaaccattcttacacaacaaaagttgctctaatagctcaaaatgaactgaactggtattctaatggttacaacgttttaatacttttgaatcgtacaagcaccatactaatgggttcatcatgtcacctttcatccctgctgccctgcaatacagctatttttgctggttcaccgggaggtagtactccttcagctgcaagccagacattgtcaggacgtttgttgccaacaccacataccttttgctgtccaccagcaatgcgggtg

SEQ ID NO: 393309 - DNA, 915 bp, Oryza sativa
ggggaaattaaccaaagctagcttactttggaggaaaaatatatagaaaagggtctatcagcatccagttaaaacctcagtgcaaacatccacaagggaaatctggtacctacagctccttttcacctatatccattttcacatgtcaatctacaggaaagatcaattcagattgcacaacaatgttcagccaagccactcagccccccaaccaagttccaccaactagaccaggattctctagttatttcacgttcggcttgggtgagtagcggaacggggaagcacgggggccatcggacaggctcctcatcggttgctgcccgttccgggcaaatgaaccctgcaccttaagggcatggctcctaccattcatgctgcttgagtgcgccattctctcagcttgcattgtctgatagaagtacgaggagctagccatgtccttgaggttgagcagtgggcttgagaacctctaccacttggctcatcagtggccccggggctttcgggtccccggttgagacaagcacgtgctaactgtgctgccttctggggcacctttgaccgagaagttaccctccaaacgagggtcaattagcttgtagaagcgctgcctttctcctaggagggggcgtgcccactcaacaaggttgtgctcaccatttgggcggttcttgtccattgacctgcgccctgacatcatctcaagtagcaccacaccaaaactatagacatcactctttgatgtcaaatggcctgtcataacatactccggagctgcataaccatatgttcccattactcgagtagacacgtgagttttgtcacctacagggccatctttggcaagcccaaaatctgagagttttgcattgtaatcagcatctagcagtatattagatgttttaaaatcag

SEQ ID NO: 393310 - DNA, 829 bp, Oryza sativa
  unsure (1)..(829): unsure at all n locations
nnntttttttttttttttttttgagcatcaaatgccttattttaccatcacatattgagatgtttatgaagacgtcaggccaaagccataattaagataactcactccacattatttgtttttactggagctgaaagtgaactctaacatttaggaaaaatgggagtagcccattaccaaaaacaaagttcatatttgaagggcatccgcaatcgaaccagcaaggctcaacacctcaaatggaggttgttggttgatggctttcactgtttgagggcaggagtcagtgatccagaaatacgcaaacttgtcagctgacccagcgggaattagtgtgagtgaagcgctccatacgactgcttggggaaaaacagcatgagtcacgtaagcactaacttttgcagcaccatggagcagccaaaactttctgacattctctaagagttcccccagattgcactaaatcatcaacaataaccacatgccggccttcaggattcccctccttaattcgaactaatcctcttgtcaccttcccgaacctttgcggcagacaaccattgggaagttgagcaatagcttgtggaaacggcttccacgccccatcattccggggaagggcaatggtgatattgtcagcatcggggagctgccgggaggctggcagcagggagcggaatnccggtctcgaagcangggaggcgtcgtccccggagtagaactctcctgggagcgcgtnggatgtcgtaaatgacgaggctggtcggggccggcccngggactttgggatcatgggaaaggtttcgcncgaagggtgaaaggcggtggg

SEQ ID NO: 393311 - DNA, 629 bp, Oryza sativa
aaagtgaacttattgttttaagatggagtgtataccgagcacgaaaatacaatgatggcatgaatacctggatataggcatccccttcattctaaaataaacaaattttgtgtatggagggagtagagcctcgtcagattgcaactgggattattataagccgtagctgtaggtgcactgggtgatgggtcaacaccagagaatcaagcataaagaaactgaacatgtggatgatcgagaattacagcagccacagtatcccagaagtccataacatcaggatataacgaccaatgttatctctcggacaccatcctgttcgtgctgataatgtttggacctcacttgataccgcgtcaagggttactaacaaatgggtcaactaccaaactttttacctgcaatgcctaccaaaatctgacgtggaaatgatgcgagggatatcaattgctccagaaaaatgcataaccttgctagctctgattcagacatcatgcagagtaccttgatggttcctgctttaatctagcttattaggaaataagaacttcgctgagcttttaccacctataatgaacagcggaggggtatttttggtggatgacagctgcttttacattccacaactt

SEQ ID NO: 393312 - DNA, 499 bp, Oryza sativa
  unsure (1)..(499): unsure at all n locations
tttttttttttttttttttaccaatgcagatgcatccatcagatcaacgaagtgcattgagtggaacaacaaaatattgtacaacaagcatgggtacagtgaaggagatatcaagcaagtgcactgtgcacagctattggtgcagcattcagtgcgtgctcctcatcagagataccaggaaaactacttacatgagtaagccaatcagggggggggggggggctctgcctatctaaattaccaccaaaataatcattagaaaaggagaaggtctctgcttagtgggtccaagggccaaacttacatgcgcanatnagtattaaagggcaacaccagctgcaagtttgcaacttcactcgttgcccaattttacagatccatcctttataaaccttatgctaaggctgttgaaacgtcctcttgaataatgccgtgacgcctttctccaatctgtgccagtcttcatcattgctacaaatcntcctaactaattttgcca

SEQ ID NO: 393313 - DNA, 502 bp, Oryza sativa
ttgtgtttttttaattttttggttttgacagcgaaaaatgaggagatatattaattacggtgtatcgtttcaaggatgagttcggatgagtgatcgatcactctccacatacttggatcggtctctctcgcacacgtacaacgacaaggggagacggtacaacagcagcggcaacaaacacgcacgtacacgggtagtactacagaacgcgccaacgtcatgggcgattggtgagaaaacacgcacacctactagtactagctttatccttttttagtggtacaccacacggccgtcgacgatctcatcggctagcgcgatcaatggccgtccggccggccagcttcgagcgttatgctttccatcttcccgttggctgtcccgttggccacaaccaggccgacgccgttcgtcccgttggccgccatcgcgcagttgccgttggccttgccgttgctgttgacgttggccttggcttttgcctgattcgtgtggttggcag

SEQ ID NO: 393314 - DNA, 585 bp, Oryza sativa
  unsure (1)..(585): unsure at all n locations
nnnnnnnnnnnnnnnnnnnnnnnnnnnnnnnnnnnnnnnnnaaacagcacagaagctgccattatttnaacaatataaattacataatgcaaaacatatntactttgaacttggccaacagaacgggcacaattttgaactaagctaccgtacagaattcagtcatcttgtaacatacactccccaaagctaaaagaaattaatgtaaaaagaactacagggctcagctctgcaagagacaacctcccccagtaactagaatgataaacagaacaaaatggggaatggcaaaacatcaagaaatggcaataaagcaaataataacttacatgtggagatatactatataacagatatggggctcagcatcagcaggtttgaagaacaaccgggccaacccaagtgctaaacatatcactcaatgccacctgcacttcgcttgaaccatgttcgcaacttatcagaccagcaagaagggggaagaactggccaaggttcttctcgaaagatgagtcaccaaggccactgatagcttgcaaggttgagacaccaagaggtgcccgggctgcaaactctctccgcttt

SEQ ID NO: 393315 - DNA, 513 bp, Oryza sativa
  unsure (1)..(513): unsure at all n locations
caaaaaggagtttaaataaaatcaattgcaaaaacaacagcctttccttgtagcctgcattaaacacttaattcccatggcttgctgagtactcccgtactcacccttgctctatataaataaccccccccagttgctgaagaagatgaagcggatcccgctgacgaggagttcctcccaggagcaagccggcttcgatgagttttaagggtttcggcctagttcccaagtcgcgcctgtgttgtttggtccaagtcttggcttccgtttccctttttgcaatgcagttgtgagcttgggatctgtccgcagcccaacatgactgtacctctactctataataaagagacctttgttgctgtgatattctgtcttcctgtgataccagcactgtttcctgggactggtatcgattaacaggttaatttggagcgtcacgggctagttccggncggtactagttcggggcgtgacagtagtataataattgtttctactcataatagaactcat

SEQ ID NO: 393316 - DNA, 431 bp, Oryza sativa
cagaaaagacaaaccattaataatattgattggtaccatcagagaataaaagtatttcataaataagatgggtaatttcaagaaaacccataacccatagggcacatacaaaagggggggatttctcaaccgggggataacaattgagaaaactattgggtctactacagaacgccaaattggaacgctggatgcaataatatgtcaagattggcaggttcaccgagaatctttggcgtcatcagaaaatttaagctttgccggggcatggaatacttccatattcaaggccatgcttagggtcttctattttttgctgacagggcttttaatttcccggttgcacacctttacacttactttaacaacaaaaataaccggcatgtatgatggaactataataatgggatgggcaatctgacgaccacatg

SEQ ID NO: 393317 - DNA, 462 bp, Oryza sativa
  unsure (1)..(462): unsure at all n locations
atgtatagacaagattatagngaaatacactgagaactacaatgtgaagaaggcaggaagaactgcccaccctatggtcctatcatacatatatcaggaaagtgagctagtaaaaatggagatataaacaaatggtacttttggacttgccaaattggaacactggatgcaataatatgtcaagattgtcaggttcaccgagaatctttgatgtcatcagaaaatttaagctttgccgggtcatatgtaatacttccagattcaagtccatgtttagtgtcttctatttctttctgacagcgctgctcatttcccatttgcacacctgggtggtgatgtttaaacattagtactgaataatctagccttcactccctttttttctttccttccttgccatagtttgtgccttgctgccgtcgtcgccgtactttgccatagcccatgccttccgccgtcgtg

SEQ ID NO: 393318 - DNA, 377 bp, Oryza sativa
  unsure (1)..(377): unsure at all n locations
nnnnnnnnnnnnnnnnnnnnnnnnnnncagcgagcaaagaagcaaggcaacaattgcatttatttgttgaaatatagctaacaaattcaattatgcggttccataaaaagtctccaggatccactaagcaagaatttacagcagaatcaacaaaagcgggatgcttaatcagggtacaggaatccacggacattcgttatgtgcagggtagagactagccttgatgaactagttatcagctgccctcaacactcgcagcagagctaagaagaggttgatcacgtcgaggtagagcgagacagcagcccagacatactcatcgtaagtgtagcgcttgaatgatattgtccgtgtcgtanatgntgtatccagagaag

SEQ ID NO: 393319 - DNA, 407 bp, Oryza sativa
gccgaagtcaactactgtaatcctccatttatccagaaaaaaggacataattacatactttgaaggcatagctgatgagacaacctaaagatatattatgaggggatcctaaagaatggagctaaatacttagtagcaataaacttgaataggcaagttaaaacttcagtattcattggacacaagaatgttctgaagctatgtagcaatagcacaggaaggcatgaaagggcatttttcagttttcatgagaattagcttccttcctgtaccacaaaaaacttgatttgctagagcaatggttcacgtcatctggaaaatctctcgagccttctacggggaatcttctcaaccgatggctccccattccccccagcttggaggtgctgtttatgagaaaaagcatg

SEQ ID NO: 393320 - DNA, 523 bp, Oryza sativa
gctggtcaattattgatcgaatcttattagccaaaaacatgatcgtattataatttatatttctcagcatcagtttgtcacgtacttattagaaaagcaacaataaatcttgtataataactcattgttcattgcgactacaaactattatagatacaaaattcacaggtaaatgatcttctcgatgactttattgaaaaagaaaacatatatctaatcaacactatgagaaaaagtaaagttgtggttccagccaatgtacagttgaacatacgatgattccatccctcaatcagaacccatgcactttcttatttgtcagttgactatggatgatgacttcagaatatcacaagtagatgtagatttgcgcttcggtttaacagcaaaactaggccagatccatgtcatgaatgtaattgccgttcaaactcacaggcatcaagaaccgaaactggcaactagatcaaagtatttgtctctagatttggattgccctccacggcaaactatttcaaacttt

SEQ ID NO: 393321 - DNA, 480 bp, Oryza sativa
  unsure (1)..(480): unsure at all n locations
ctgncgncatgcaactcaacttccacacgcttttgttgtgctcctgatgttagtgccacaaactttctggattttaagggtcatttctggttcgtcctggtgatgctgctgatgtggacctccgttgcctacatgtactggaaaataaagatgagagttgatgaagtagagaagtttctgcaattgcaacaaatgctgaccccaacgagatactcctacaccgacattattgccatcacaagtcatttcagagacaagcttggccaaggaggatatggctccgtctacaaaggtgtgctactccctggtgatgtccgagttgccattaagatgctgaagggtgacgcaaattgcaaagggggaagagttcatcagcgaggtctccaccattggtagggatcccaccatgtcaatgtcggtgcgactcgtcggggttctgctcctgaaggaatgaggaggagcgcttttgtaccagtatat

SEQ ID NO: 393322 - DNA, 278 bp, Oryza sativa
  unsure (1)..(278): unsure at all n locations
nnggnnnnnnntttgtttttttaaagnnanngcgggcngggcccccaaccaaatggaacttaatatgattatatcaacacaggccatcatcaatttacagctttctaagggggcactatcaccggacaatcaaaggcgcctccgagacatagcaacgcaggcacacaaagaaacccatggnggaaggcaaactttcccctacgtgacttattttcaaagaaanntagaaaagaatggttttttggtgccgccccttttccaacattttccaaggaata

SEQ ID NO: 393323 - DNA, 781 bp, Oryza sativa
ttttttttttttttttttatcatcaatcgccatacatattgggaataccacgttaccatttacatttcatataacataaataaataaaataaaacagagcccctactatggccttcgttccttttcctcttctttgatcattttgggcgacaccaacccctattaatttaaataaataaataataaatgcaactcccacaatctcgctgcaatgagcactgaacggttcaaattcgacatccttttattgcctcccgatacagtacaacaacaacagcatctttcggctgggacccattctatgcctcggctgaagaaactttcaactaactataagaaactttgttaccgaagggcagccattgttacttccacagcttgacagagttgtcgtggctcgcggaagccaccatccctgtaattggtgattgcgccaacgccgcgattagaccttcatgagcctgcactgtcatgctctggttctttaccatgttccatagctccagagactggtagcctccaataacaaggagatcggtgtagcccgggtggaacacacaagaatgaaacttgtttccattagagctaacctcatgagtacagtctcctgatgagattgaccagaccttaactaggtcctgactgacagaagcaaggtattgcccactgctggtcccagcacactgattgcacttctggagttatggccctgtagggtaatattttttcccatttgtttcaacatcaaatatggaaccacattctcgggagcagctgcgag

SEQ ID NO: 393324 - DNA, 570 bp, Oryza sativa
aagaatagccagcacacctagagcaaaattttactaacatcagatgcaagaaagtctacatgagttctaaaaaggaaactggggaaaactaatttacaccaattatcactaatagtacactaaatataaacgaccaagaagggctctaggaacccattttgtatctagcacccgaacgttgaacctttctcccgataaaagagggatcaggcgtgcaacagactggctctcacgccagggaaaccacaggtacaaaagaggcagcgaaagaagaaacaaaacttttcctccggggcgaacatatacaacttgagaggaaaaatacacaatggccgagagacaaatcacagtactgtattgatgtgcagtgctttcaacaacgaggtggccatttgtttcaccaatacctgttgaccgccacgttgcccatcccttcgttcttcgatcaggttttgtagcttttgaggaagatcattctcaactatgagctgctttggtcgaggatgatgctcatagacaacctttattaattttagcagtgtcaaacgggcaatagcttctcggtggtca

SEQ ID NO: 393325 - DNA, 544 bp, Oryza sativa
ggactagatgatctgattattcagagtttcaaacaacaaggtagtcgcttattacccacccacacacaacacagaacaggtacaagagatagcctctcaatctttactctcaagcatggacgatcttcaagcgttcagggacctacaatactactacaaactcgacgcaatcaatcgcttccacagtccccacccgccgcattttcgaatttgccatgcagaagaacccaactgacataccagcaccattgattgggaggggccagttagccaaacacacttttcagagcttctacccttgagcctccttccttgagggaccatccatcgacggcacccgaaagttcagccttcaccgctgaccggggggatttcgcatacttgcaggccatgtcttcgatcttgctgtcatggtagtcgatcttggactgtgagaacttcagaccatgagctgtgctgacgactaccgtgcggtcatttggcccgatgatgcgctggtcacggagcttgaacagcgctgcgagggcaaccccagtatgcgggc

SEQ ID NO: 393326 - DNA, 774 bp, Oryza sativa
  unsure (1)..(774): unsure at all n locations
acttcagatttatttattaatgcatacgtgctgattatacagtagcagccaagcagcaagtgctagcggtagcaggaacaacgatgacaacgcgtttttcccgggttcatccatacagtactacgtatgttacgtttacatcatggcaccatctgagatgatggccttcaattactataaacgtacgatacaatgtcacaagtggtgatttatttccaggtggccacgacggggctcctcaccatgtgctggccatcgctccagacgatatctccccacgcgttgtatggcgagttgcttgaccctgccgacaaggtgatcgcatagtcaagcgtcttgcgctgcgcgttgaacgtgagcctcattggtgccaccgtgagcctagtgccaggcggcgcggtgatggtcacgtcgtacacggcgttggtgttcgccccgacgttggtcacggtgcggcgttgcgttacctgaccaccggacctcgcaaacaccatggagaatgccgggtagttcaggtccccgatgggcggccgacgtgagcagtaggtcgtcgtgctgtcccttgtgaaaatcgctatctggtttggtgtgtagccaaggccgcagaggaaggcgatgtagtcgtcggtggtggcgttgtacacaaggccanggtcgagagcgttgtttgggggtcaacgtgaccagaaccgagctcaaatgggcccanccgcccgcccatttcactgacgacatgattgcgttgccgccgtttgtccaactcataaaccgtgg

SEQ ID NO: 393327 - DNA, 505 bp, Oryza sativa
tttttttttttttttttgggaaaaaaatttgtggtgccattaatcatcaaatcaacagaatagacaaatccatgtcttgttggcatggatgatacggtgaaaccacaaaagcacaactagtttctgggctcctgtctgtggaaggcacattcataggaaaaaaagatgaataaacacctacgaaagcgttcttttttctttatcctcacctacgaaagtgttgggtctcggtatctcttgaagagggattcgatgtcatcaagaacttccggtgccaaaggccgtggagcactggtaaatgcatcaatgttctccttcaactgatccatggtcgttgctccgatgattgtgctagctgtgaatggacggtcacgcacaaagcccagtgcaagctggactggagttaggccgtgctttttggcaagcttgacatattcattcgttgcttcctgtcaaaacaaatgcaccaatcagcaagtcaccatttacgggtgagaatgaacag

SEQ ID NO: 393328 - DNA, 396 bp, Oryza sativa
tttgtttgttcatgaaggattttgcatttggtgcaaggtaatacaaatgttcttcacattggctagtcaaaattttctattagatatcacagtagatggacgctacgctgacaacagttgatagggcatgtaataagatgcaagatgaaatagtacatccacctagcatgtgttatagcacaacaatgtttggaatctgttaaaataactgctcacttaatgctcgcattaggaacagaagatctacatggaccagcagatgtagtgaagggtacccctcggtatgttgcaattccatttccatcagtgtgaagatccggtgtgatcttgtcgagctgtttcttcttcggattaagaacatcttctggcttcccatcaaaccctgcaaatgaaata

SEQ ID NO: 393329 - DNA, 566 bp, Oryza sativa
cacgcgcacaaaagcgggtaccctagagttttcgccccctttttttttttttataattttaactattttatcatatgcttccatgtatgcacatttacattctgaaattttaacttagctatatacatattctgtaatatataccatatgctgaatctgaaataacaacatatgttttatgcaaggtattcattaaaaaaaattatgcacaatattgtacaacaataccaagactacccaagcaaaaattaaatgaatttttccttgtccaaatttgactatatcacaaatatacttcatacattaatttcacaggatagataaacactgtacagagccgaaagtacaaatttattccattagtgcttagtgcttaaaaaatccaacttgaaatctcattaaattagtgcagttatgaacagcgaaagcttgattaaaataaacagaaaagcagtggtcagtcgaccttatttcttccccaaaatccatatactgctaaaaaaattcagtagacgattggcaccaaatgaattagctctaatcaattggcaaacttataaacaaag

SEQ ID NO: 393330 - DNA, 709 bp, Oryza sativa
  unsure (1)..(709): unsure at all n locations
attcccacttcaccggnaccatcgccgggccccaaggcacgccctacgagggcggcaccttcgtcatcgacatccgcctcccaggtggttacccctttgagcctcctaagatgcagtttatcaccaaagtatggcaccctaacattagcagccaaaacggagcaatctgcttggacatactgaaggaccaatggagcccagcccttacattgaagacggcactgctttccctccaagctctgctttctgcccctgcacctgatgatcctcaggatgctgtcgttgcacaacagtacttgcgtgactattccacattttctgctactgctcgctactggacggaggcctttgcaaagaattcctccaccggcatggaagaaaaggtgcagaagctggttgagatgggcttccctgaagacatggtgagaagtgttctgaagagtgtcaatggcgacgagaacatggctcttgagaagctctgctctggctgaggccctataagccgatatgaactgtaaattgaatccccattcgttataagacaacagtgcttgctaatgctcctgttctgccatttaagtgtggctttatgacactcttctatataggggattggaccatgggacgttgggactgaactgaacctatcctaacttgacagagttcggtnatttttttnnnnnnnnnnnnnnnnnnnnnnnnnnnnnnn

SEQ ID NO: 393331 - DNA, 523 bp, Oryza sativa
acttgcagtcattccagtaacaggggacacatttccaactcaaatggcttgcattcttattggaaatcttggcgcatcggtcactgaagttgtaagtgatgctgttgtcacagagttcagtagaacgcagaaggccggtgtactacaatcttacgcgttcatagttctggcagctggatctctcttaggaaatttgtctggtggttacgttctgttgagaacacaggaaccaaagactatgttctcagcattctccatcctccttggcctccaactagcactttccttaagtacaaaagagacgcttccaagctctcatagaaactggaacattcgtcatgtcagaacctctctgtctgacaatctccgcaagcaattctcaaacttgaggacagcaatcagcgaggagcaagatcttttaccctcttatgtggataatgacatcatttgcagttgtgcctattctctctgggacaatgcttttggtttcaaacacagcatctgaagcttgatccatcagtca

SEQ ID NO: 393332 - DNA, 494 bp, Oryza sativa
tttttttttttttttaaacagataatgaaataattatccctcaaagtccactgtaaatttagccttcatgccgttcagtcgtagtagtaccacatgtgctcccatacaagaacagaaacaccagcaaaattttgctaaaacacctaggttaacttagactagttagaaattagaaagtacataacacatactagcatcgtcatcaaacaagtgaaaaagtcatcttgcatctttacacctttggtctgccctttttaaagtcagaaaaatcgacatatactcaagcactgaaatacgaatctaaatagttgctgaaggaaacccggtgttgtcctcttttcttttccatgtatttttctgtgttccttttgccgaatgacatctgctttttcaataatagggcactcatctgggaaagaactggcctcaataggtatccgctcactcaaacggatggaccagaatttcttcctggaaaccaagactttctccgg

SEQ ID NO: 393333 - DNA, 600 bp, Oryza sativa
tcgcatataaaaaaaaatccccacccgatttctgtctgttttttttcctcctcttccgcgagctcttcccccctctcttctctctttttctcccctctccccggggaaacgcggcggccgccgatcccgatcccccccaccgccgccgccgcccgatccgaccaaatccccactacgcgtcccaattccgggccaattcgaccccccgagcgaccgccatctactcacctcccgatcgattcggatccccaatctagcgggcgcggggcggggcggggaggcgggattgggctagggttttgtgggggattggtgtattggattaggtgatggcggagaagggatgcctcaagcgcctccagaaggagttccactcgctctgcaaggagccgccgccgcagatcgtggctcgcccgctgcccaacgacatatttggagcggcattttggacttgaaggttgtgctggccacaccattcgaaggtggctattatttacgggaaactctcatttccacctgtgtacccttttaagcctccatgctttcagcctgactcctcctagcggaaggtttgcccctcacaaaaggatatgcccatca

SEQ ID NO: 393334 - DNA, 444 bp, Oryza sativa
ggcaaggtatccattgctactagatattagcaacaatccaattctgtacacggcacagcaaaaatagatgtagcacttctgaacggtgtcactgatctcatctcatcttcaattcttcatctcaagatcacaaaacaacaatgcagcgcgaaacattggagcatcagaatgtacgcttgtttcttgctcagaagagtggcttgtcgaccatggtccgggggaaggcgtagcggaacctggcgttgtaggggagccactcgacggcctgcgctgccttcctccggccgccgccggcgtcgacgcacagccgctggatggcgtcctgggtggcgcgggcgtcggcgttgtcgcgcgcccacgcgaggagctcgtcggcgccggcgaggccggcctcccgggcgtaccgttcgacgaggcgcggcaggaacacctttttggactttc

SEQ ID NO: 393335 - DNA, 655 bp, Oryza sativa
  unsure (1)..(655): unsure at all n locations
acagtccgaataattttgatgctgcggggcaacaaacatacatatattatatgttttggcactcgatatgtgctactcgtaatacagatacggttacatgtaatttcactggatggagcaaaacaaacgcacactggttagtatgacaagcaaacatgaagcatctcgattgttcttcagtttcagctgcagccagcttcgaggctagaggatacatactagtaagtaactgaggcttcaatcccctttattcattgaacgctgacttgtagtgagactcgtcgattgttgagtatatgtgcccaatgtcagcgaggtaatcaatagctaccttgatcttggcctccggtagcctgaagcgcttcacgatttcatcaatgggcacaccatgctcgctctcgacgtttgctggttcgcggaaaacattcagcacttctgtgttcaaatcagtttttgatccatttgttacactgagcactggtgccgggttggatttcanagaggtcggagtggtcatttcactgaagccattggaagatgaggatcccatgggcagaaatatgtttttgcagggntaccaatctgtgatttggtggttctctaaatgcattcgcacgcactgaaatgaaatgcagtgtganctcatataatcagt

SEQ ID NO: 393336 - DNA, 1022 bp, Oryza sativa
  unsure (1)..(1022): unsure at all n locations
attataaattaaattaaattaaataattattttttttttttttttttgnaaggaaagaacacccagaaccatagccattatatatcactccagatgaacacaactgtccactcgaatagttactgctatatagcttgctattagtctacaaaccgcataaacaaggtaatagagatacaacacactaaggattacacaagctttacacccccaaaatcgtggcacggcattgcaaacagaacagaattgaaaagcctagttagttttccagaactatacaaccaaactaacggaattatggacaaggtggggagccccaactgaaagaatgaaccattcaaatgctacctacttgccagcttgctagaatacagttatagctctgaaagaattgcaggaatatagtgtgaaagctcagctgtgagcgactgaaagccattgactagttgagtgtggaattcctggtcttcttcccctatcaatctaaaatgcacacggattgcgcgcttgcagacggccatgaattccagcaatgcagcgatgagctgctgcagttcttgagatcggagcctagttgcgggctcaccagataagaatgcagtgcacacacttaatacaccactatttacctgaacagccacacttccttggagtatcctctgcaggctttggagtcttgggagttggtcaccttccgaactgcgtggttcttctagttcatttcgcaaggcagctgtccttgtctcgatcattccaatcgcattctcaacaggagaaaactctagagattctgatttgatcactaacagacgattcaccaaagcaggaaaggaaccctctgtctggagtactgtgcgcctcttccactgatcttcaaggccaccttgtgtttttccattctttgtgaatggtgtatcaaaaagaaaacggtcgaacacacgggcccggacagtaccagtagataaagagaaaatcctttcccttctactccctaggtcctcatcctccattacaggatcaac

SEQ ID NO: 393337 - DNA, 719 bp, Oryza sativa
  unsure (1)..(719): unsure at all n locations
nnnnnnnnnnaaccaagggagatgcgtgccttttattttactatcacttggaacatgagcttccatgtacaatgttcagttcttaattacactgcactagcatctaatacgcacctatcgcgaaagaattttgctcacccagccgacctagtaacaacaccggagagacattatgttacactcaaatgccctaacgtgagcaactagcggtcgagcaccaatgcaaaactatgatgcatcggaagcgtctatgaagtgaggatattcgtatttaagttttttgtcctgaatcaaatgaaaaacatattgtaccactagtttgcatcatataattgtggattatcatcagctctcactcctgtttgaatctatctcctccatatgatatgtatgtacaggtatacaagagtaacaaactgttctctcttacatttactgctgataacaccagtgatatgagggcttctgtagtatactaatgaacattgccgaatgggcaaatgccagagaaaccaagcttatgacttggacaaatatcctctcatgctttctccaagcactggattgaagggcttttgttgctcaaaacatgtagcagcaagctcttgttgatgtttctagctacaccactnaccacccacagaagatttatctngttccgctgaacagtgccttttcgaattaaagggntttcaattgaaataccatccaactggcca

SEQ ID NO: 393338 - DNA, 730 bp, Oryza sativa
  unsure (1)..(730): unsure at all n locations
agagcaacagaaataataaagcactcatgtacatatgcgcagttcctcagcaatagtaacatattatacttcattactttatctacaaaaatatctcgcattttattcaatggatagcaggtatctcaaattttcaccagcatccatcaaacaatgttctctcatagtatacaccggtcagctatatgcatcagggtactccagttgaacatttttacaattttgagcgccgtatgcattttatcggattgaaagtgccatgctgacgagcaatagaatttatatgcctcccgtttattgatgcagaaggcttgaagtcccagccttctacgttcttggggacgcatacatcgtaaagcatctgacccaacactccatgggggttgttaatgctttccacactgggcatgttgaacaactccggtttcggctcttcgttgctgctttcatgatactccatggaactcggtagcaagacatggtcaatcggatcatctggtgcccttcttagcctgttgtttgaattcgtgccagctttatgcacgtcggaggccaacatgtcgctatgctcacttgtgcctagatcatagctgttaagttgcctcctgctcatgtaaagcattgaagcctttgtgagtagctcagttactgcagctcggtattcctcaggatgatgcttgtagtgacctacatgaggggaattttgccatttaactaaggttcaaatcan

SEQ ID NO: 393339 - DNA, 300 bp, Oryza sativa
aaaagtcaaggggccagccttacataaacaaattagaatcatacaaaaatgtcatgtgaacataataagctgtagattctctggtattattaagaacatcttgcggcaggaacacaacatgcatggatctacctactggctagctacccatgactcaatagaaacggtgtgagcctcagttcttacaaactctgccagggaggcaattgacacatcttaggggctgactaaccaattgcgtgcattgtcaacacaaatcaatcccagtcctttgccatgatacctaaaattatacaaaaa

SEQ ID NO: 393340 - DNA, 590 bp, Oryza sativa
cttcagtaacagaatttaccaccagatgcctgcgaccgacaaatacaacacagcgttttctacatagtaatctttccttctcattcaaaaacctgcaacaccgcaacagtcataagggcaaatgcaccctcgttcaattcattgcagatttggggaatatttacagcactctgcagtttgcactagcaccgcccatgccaaccagaaacatgaatatgaatagtagcaccatcatgaactgataataatcaattcgcgcttactactacgaatagcacctgaggaattcatacatacactactagctctctcgagctgcaaaacggtactgctagtgctatagttaaacagcctcagcccttgttcaacacatggaggtcatgtaatgtcatgcagtgcaatacatttagccagcagcaggaggtccctagtttgcctcaaatacagataggattacctaacgtcatgttcttaacgtctccaataccagcaggcctacttgccatagatgcacatgcccacctcgtagctcaccaagagcattattgctgaaaagaagaagaggcagaagccaccacgcagtactgcgg

SEQ ID NO: 393341 - DNA, 671 bp, Oryza sativa
  unsure (1)..(671): unsure at all n locations
tttttttttttttttgcagcacaccaataccagtattagattttatacaaaactgattgaaaatgtccaattcagcggcaggggtttccttaaaaatcttaattctattattgcgggtgtatatatataattacagatcacaaaccctttttcagttttcgacccagtcctacatgaaacaatcaaccaaaatcaccacttgaagcttgtagatcactttcagataattccatcaagaatgagatcaatgacatacacggccattttcctaacttatcatacaatttttcttttctcctttttcaggcaaactgctctccttcacacggtttgcagagctagcattcgctccatccagtcgatggatgtctgtggcgatctcatcacgctcaggctcaaagagcagatcgtgcaagaacccatcgtacagcctcagatccttgtgcctcgatgaggcctcgttgtagagggcctgtgaagccagggggtcggtcacccggtctgcggttccatggaggaccatgaatgggacggtgaccttcttcaagttggtgcagcaggtagggagggagatgcgtaggatttcatgggccggtccgaactctngatcggcccgggtgtaaaaccagcggatcgggagacttcgntagcaggggcanccgggtcgcggg

SEQ ID NO: 393342 - DNA, 462 bp, Oryza sativa
aaaaacggtgagggtatattcctcattttccccgaataagagggtatattcttttttatgattacttttaagtgcatcctacatgatgctgcacttgactcagttttaacacggaatttatgcaacatccgtgttggtcttcccaaatactgtatcatcagaaaatatcggagtagtcgtgcagggcgctgtcatcttggcagcaaaaccaatcgcagctagtacaatagtacaagactacaacttggatttgctttgcataggcaggcttcccatggccctggccttctcccggagcaagaacttctgcgtcttccccgtcgacgtcttgggcaggtcgccgaacaccaccgtcctcggcgccatgtaacgcggcagccgcgcacggcagaacgcgatgatctcgtgcgccgtcgcgcttgccccgtccttcagcgtgacgaacgcccacgccgttttgcc

SEQ ID NO: 393343 - DNA, 580 bp, Oryza sativa
ggtaagtcaccaagtcagggtaacaatacaactaggtccaatacgagactccagaacaatgtttagcatccaaataatctgcccacagagattctgctctgctgtgtttgcactagcttaccgatttgagtcgatacagtaaggtaaaagagtcgcacaagcacttgaagggtacaagcctgggttccgcaccagaggatataaccaatatttgaaaggaacattctaaatggacaagaaattagaaacctactagagttattacaggactgggttacacagatagtcacacgattcagctccttggagcacagctggccaagtgagtcttgaagttctccagctctgcaagaacttcatcttctggacggtatatcaggtcactcatgcgccatatctgcaatgttccacctccaccagtactctcaccatcatcagacacactcacaatagtccaaggatccgaagaattccagtggaagtctacaatcttatccctatgaccagcatgttgaaagaaaagcccagcaggtgcgctgggatttttcttatttccaaccttctcatgatcccacacatt

SEQ ID NO: 393344 - DNA, 521 bp, Oryza sativa
ttttgttacataatagctaaagcagagataacagtgttcaaacccaataatcatctaaatgaaataaatggctgcaataaagaaaagtaaacctaacagttcacaatattgtggtggcgaacatagggcaaagaaagcagcatcgttatccaaaacttgttaaagatcttttttcaattaagaaatcacagaaaacaattttataatgcccaaaatcgtgcgagtttacatttcctacataacaaacattatgtcaaaaaatgcatataagacagaattatgcggtgtttgtatatgattgcattgcatggaaaggaaacatggtgagatgaaaattgacaataccattctctaggcaccaacataagaggaaaaagaaggcatatttgcaaaaaagtactaatgtctacaggataaagggtattcaagaaaaaaactatcatgcggaattttattttgggagacaaaaggatagcataggaggtaaattgcaaagcattggtaaatcatgcatagcaatg

SEQ ID NO: 393345 - DNA, 592 bp, Oryza sativa
  unsure (1)..(592): unsure at all n locations
gcattgctcaattagccacaggagtctttgaattctccattctgcctttcaataaagacaatacaccatttctacaagaaaaaatcatatagaaacgaaacaacataagcaaagtgccgtgctttctaattgcacccgccaagatggtacactcaaatacaagttgcaaaaaccaaaatccagaatgcacataacagtaagaattcaaaaagagtacgcgctaacagagctaaaccaccatattctgaagggctgactgtactgaagaagccccaagtcatgagcagaaggttaagctatgcgacatcttgtatcctagcctccatatatcatgttgcattggtctatccggtcatgctttcttttgttaggcctggagaaaaagcaaaagtggacccaggtcttctttggcttcattggctctgactttggagttctcttggaagcatcagacatgtattgaacgacagcctgagctccctttaaagctatatcccttggtggcacttgtaaagggttctcttctgcacggagcacacggagatgctttaggtttccaaaagaatccggaagaaccctaatctnattgttg

SEQ ID NO: 393346 - DNA, 471 bp, Oryza sativa
gaaccttgaataaacacccagaattaaatcattccataactcatacgtgcgagcaatgcataagcaactggcacgaggtcatcataccaacgttacgtggggatgcagtcaatgtgtttaacaatgtgcgcttctaccaaacaagacctacgagtctactacacacgccacaccatgcgcaggaattacagcaagtaaccccagcacgctctccaagtcattgtttatttcccgcacatttttgtattggatagtcatcaacggattgagtaaaattctatagaagtcaaatccttccatacaaagtcacgacctgtacactgggactgcacgcaagcttcagaagtcgtaagcttgccatgaatgcagagggaaacggtacttcacatagcactcagccaggagtacagctgcactaaagatgacaccttgtcatgcacgtttatcctttggaaacaacatgcatgtcac

SEQ ID NO: 393347 - DNA, 461 bp, Oryza sativa
aatatatgaaactgaataaaaaccatgattttgacatgtatttcctgctaacagactaaatacaaagcccaagttaaaaggtacagtccattgtgaaagtttgtacatatgtgatctatattttccatcatctttatagtcactaactaaatatcctcagagtttatattctcttctatgaccccgatgcaagatccatctgacttcccagaggacattgcctccgcgagctgtgatctggcctttttatggcgacgcagtgcaggtacagtattcagcacagcccatctcacctgtgaatcagctttcttctgggtgaaacctagacctttgagcaatccatctagttgcccaatgtcagctagtcctccttcagcatatccatacaaaagatactctgttgctactccagccaaggcaatgcatgagaacttgttcaacatcgtggcagatagattcga

SEQ ID NO: 393348 - DNA, 503 bp, Oryza sativa
  unsure (1)..(503): unsure at all n locations
anncnnnnnnnatcagagatgttctgagcaaacatgttcataatttggcagtatatcagagatggtcgggctttctttataactttatacagtgacacaatggttttccgtttatacatacatacatacataattacatcactaagtagactataaacaatcccaattcaagccacacacacaacacaaattcttcattcttcacacgcaccgtgtgatcgggccacgaggctcacatgacggggtagctcggcagcagcgcgatgccgcacagcccggacgccaagccggcgacgtcgcgctgcatgaggatgtagccggcgtcgccccactccgccccccacgagttcttcacgatccagtacttctcgccgcctttcgccgcgccgccgccgtccgtcttcggctcggactcgccgtagcccaccacggtgacgccgtggttgacgtcggcggtgcacggccccgtgtagaccccgctgccgtagagctggaacatgaag

SEQ ID NO: 393349 - DNA, 739 bp, Oryza sativa
  unsure (1)..(739): unsure at all n locations
gcgagctcgtcgttggcgcccgcggcaatggcgtccccccgcgcgctctccctcctcctcgtcctcctgggcatggccctcgcgtcgttcccctccgccgcctccgcctcccgcgacctccgcccccgccgcgcgggcttcgtcgtccgcggccgcgtctggtgcgacacctgcctcgccggcttcgagacccccgcctccacctacatcgccggagcgaaggtaaaggttgagtgcagatcgaaatccactggcgccaagacatgcagcttcgagggccagactgaccacactggcacctacaacatccctgtcaacgatgagcatgagcacgagctctgcgagtctgtccttgtgagcagcccggacgcaaagtgtggcaagattgttgctggacgggagagggctcctgtcttcctcaccaacaacaatggtgtgacatctaatgttcggttggcgaacgctctgggcttccagaaggatgctcctcttgctgcgtgcgcacaaatcctcaagatgtacgaggaagtggacgaccgcgtttgaaggatgtgagttatgtatcaatattcgtacttgttgaaatactctaagaaaanttctatataccttttactganaacaaaatatcagcatcagattttgcgtgcttganaantgtgatataacttaacacttgaatatgttatatgtttgttcgtctgcactgaactgcnaaatcctcatttataaatcaaat

SEQ ID NO: 393350 - DNA, 432 bp, Oryza sativa
  unsure (1)..(432): unsure at all n locations
nnnnnnnnnnnnnnnnnnnnnnnnnnnacgtgaacaatggcttttgcattcaccaactcgtgagataaatatacaggcttatacaaaaggacggctgccaacaacgtggacctcgcggacaaaatatacaaccgggcccacactggggtaacattttgacaacaaaagaaatttgccgttacaagaaccactccctcagcaatctagaatctaaccaagctgagaggtggagccaaaatggcgcggaaataattatctacctggcattgagactacaattagctcaaagtttggggaaatgaagaaaccgctacccgcgccgcttccacagcacgaacacctgtacaggaactttacaaaggggtaagaattttctgcaaaagctaccagcctaatttcaacatcatcctggtcctgaatttgaaggatgag

SEQ ID NO: 393351 - DNA, 426 bp, Oryza sativa
  unsure (1)..(426): unsure at all n locations
gggagcaagaattgattcagaaccgttttattcaacactattgttcctgtacaaggatctgaaacagaaaactgatgcacacatatacaagccatggcgacgactgcagtttatgctcgctatttgtaacagctaacataacataaatggtgaatcttgatcctatgcctaattcccccccaatagtggggtgcaccttatggagtgaacctagtaagcttcagtgacaggctcagtcgaggaaaatcatgaattctctagatctaattctgctcaagtgtatggtggaatgtcttcgagattattggcctaacgtcctccacaccaacaagtgtctccaggaatgggagtaactcgaccaattcctggtctgaggggtcatcaaaccagctccttgtgccgaattcntcagaactgggcccgatc

SEQ ID NO: 393352 - DNA, 430 bp, Oryza sativa
  unsure (1)..(430): unsure at all n locations
gcatcagaaactgatcatgaacaaccatcataagaaactcaaatttgactcctattacaccgaatcaactcaatgtggaaaactcaaaagtaagtgctattacaccctaccaaacttcaaatcggtcaaaagaatcgacgacgacaagcaccatcaggtgctctagtatgtatgcagtacacgtatacgtatatgtatgggtacacaaaaaaaattaaaaatgaaaacccctctaatggcagctaacgctcgcgccaagatttgaataaaaattttattgcttaattcgatcgatcgtcttcctcctcggtgggctcgcgctcgatcagcggtagcagcggtaggccggggtgtacatgcagctctcggcgtacttgacgaggtcgtcggggcgcgggatgcggctggcgangccgagctcgtacgcctt

SEQ ID NO: 393353 - DNA, 481 bp, Oryza sativa
ttgttttgtcacttaataataatagcattatggtttccaagtccaacaagattgtatatgcgtagttttcatagagaaggaatttgagagtaaactgctctaaaactcagctttggaaagaaagaaaaaggtaatgtacaacaatcccccgccccattccatgtgctaaacacgcactttacccatttgagagtatgactgatctatctttactgtatctgcatcaatcatggttgctgcaggcatacattgctgctgacacaaagtagaatgcctgagccaaaatcgtcagaatgaatcaagaattagagaatgtgattctgtccaaatgaagatgcatctgaatctgtacaaattgaatcaaaacagcttgctgaattcggtttcctgggcccgttcaccaagcccagggaagaacggttccctttcgagcatagtctgcaacgagtccattaacctcaccagagacgcccacaagaac

SEQ ID NO: 393354 - DNA, 563 bp, Oryza sativa
tttgttttgcagaaaagtttggggtgtgatttctcagggctggcctaactggggactgaccaaaactcttccagcctgattgtgttgtacattatggagatctatcaggcaatttcaaagttaacacaatatcacagatttcctctttgactgaatatccagtatgaatagaccaaaatgcccctacctacactgctctccaaacatgtgggaattatcaagaagacaaagcaaaaggggacatttttctgatcatgccaccaggaggagcaccaccaagatcgccgaggcggcgggggcccacggaacgcggcggcccgatcggagcggagttgggtaggtaggggtaggagtccggcggcggcatcttgcactcgtcgccgttgaagtagatcttgcgcgggaacgcccagccctggttgaaggggaaggtgttgaactcctttcgcatcagcacctccaactggacgttgccgaacgggcctgccttcatgagcaggccgttgtataacttgagcccgtaaaacatgcccgtgtttttgatgttgccgaaggggaggagg

SEQ ID NO: 393355 - DNA, 446 bp, Oryza sativa
  unsure (1)..(446): unsure at all n locations
ncntcangtnagctatcacactatgctctcgtctagtattatcacaatttggccgcccatgaagcatgtaataattagttgtgcattgcagagcacacacaggttcctaagagcgctatgaactagtactactagtaaaataggctgcacaagtctgcaaaagcagagtgcatactctgttcttccaaccttatacttgctcatccttcatgatatttaccatgtgagaaccaactctcatacaaatccttagtcctcgctcaggttagcaaactttgtcatcgccatacggccacccaatctatcacataaagggagggtatgctagggcgatgagatgaggtcaagtgtctcctcaaagctcggtgcctgctgcggcattctcatcgagaaggctctcctcattggactggggctttggcttcaaatcaataaattgatttgag

SEQ ID NO: 393356 - DNA, 453 bp, Oryza sativa
  unsure (1)..(453): unsure at all n locations
nnnnnnnnnnnnnnnnnnnnnnnnnnnnngatcactttcagcctttggaaagctgacgctgtggcaattatgtagggaaaaatgctttcatcaagttgtgctagtgtcggcataaaagactgcaatagggctagttccgtatcaaaggtgccgcactgacactgaggatgagggtgtatgtacatgcatggggagctcttttggccaatcacacatgagagatgagggcacttctagtaagcctatgcctgcgcaagcccacacacatacatactggcggtatgacatgcctgctggcagttcagcagcacaagcgatgccgcagagatcgactgctgcgttttagcttctaccacttgcagttgcctggctaccaccaccatcagagagggggcctcttggttgtttgccgttgttctgtggggtcaggttgtctggtgcagctctctttgg

SEQ ID NO: 393357 - DNA, 488 bp, Oryza sativa
tttgtttttttttaacttatcaagaataggtaattttaccagaacccaaatacagaaaatcatgtacagtcagtcagtactgccctgtccgtatattggtacacacatgggaaactcttgtacaaaatggaccctgctctggcatccttaagtaacacaggacgtacatgctaataaacccagcaaattctttcttacaaaaaccaaatcagtactccaacacgacacactaaccagaacatcttgaacgtacagtgcaaatctgatcgatgcatgtagtgcacggttcatgcaattggcacatataaatctcttggcaatttcttgtatgtctggccatgcatatctcgatcgatcttagtaccagtgatgggtgatggtgtgtgtcacgaaaagtcacacgtcgatgccgccctgcgcgacgctatcatccggggggctaatggtgatccagaggagagagactgtgatggagatgaggcccgccc

SEQ ID NO: 393358 - DNA, 411 bp, Oryza sativa
cgagtaaatggggatcttgcaagagagcgagatggcaaatccagcatcataattctcaagttagcccgaagaagatcaaggtgcccaagatgctctactcaaggcaagggagaaggggactaagttaacccatctatgttaaaattgccggggatcattaacaacatgaatttggcaaatccatatcaaacttgaatgcccatgtttttgagagacagccattgccattggtccgagggcaccgaaggggccaccaaacggattggaagacccagcctggggggcagggtactgatgctgctgctgctgctgttgggggcatatctgattttgctgataatgggcctgaaaatacatgttatggcgatgttgatgatcctggaaatgatgaggctggtagaattgttgctg

SEQ ID NO: 393359 - DNA, 548 bp, Oryza sativa
tttggttttttttttttttttgaggaaattgttcccttccaacaaaaaaagttaataatctacagccataataccaggatggatcatgttatcgtttcagtatcagccatccaacaaacatagcctacagaatcaatgtattcatgagaatatcaacagcgtcagctgcaagtacatctatctataaagcaccataaatagcagcaaactattacaaaactgctaccatacgaaaactatgttagatggcatagtaaataacaagatgttaaacaactccaaagtgaaaaccacgtcaaaacgagtatgaaactgctgcagcagcacgaccaatgagtgagttgggcaggctttgcctcttgccatgcttccaaccaagtgggctttgcattccatgcacccacagacaggcctcggtgttacagcaacagccaggtgccgcttaatggcaacataatgcaggaggacgggagatccatggagaaacacaagtcttgtagatcaagagctctaatcaggatacagtggccactgggcacagatgattc

SEQ ID NO: 393360 - DNA, 563 bp, Oryza sativa
gcattcggtatatatactgttcccattcactcttcttgataagatgtggtacataaaaaatccaacaggttcagatatcgcgagagatgcccgctctccaactcttcatatagttatgtctatctagctaaatacccaaggagataaaaagaatgaaaggaaaagaaacaatcaaaactgagatgcagctgagagttaagttctcagccctgactaaagctcagatgaaccaaaactgtgactttcaaatatggagcttattgagctcagaactcgccgttgcagcattgcttgtgtcactggtgttcgtgcgagcttcaggttcttcttttctaggcgaggccgagaggatctgaacagcaggttgagctgctccagcactagagttcaccacatttggcctcgctgagcatacagggatagttgttctgattgtaactgaggcagctaaccaaggaggccgttgctggtataacgaactcggcaaatttaccggcattcttgttccaaatcttggtggagcttgtgcacggggagaccggcactcaggtggtgaaaaacac

SEQ ID NO: 393361 - DNA, 471 bp, Oryza sativa
tttggttgtaaacaatttgacttgaattctaattttgcacatgggcaagcccgagttaaaaagaaccaatgaacactttatccacgacccatagcaaatcctgaaagataccgacacgatccgaagcaacctaatcgattacacatttacagggtggatactgaagactaagaacagctctctcatctcatccacagaagacaagagagggggggtcgggctggcttattgctcaggtacaaatctctttttacagaagcttccctcatttagggaatgaggaattgaggatcgaagtcctgggatatccagactcaattctcagaatcctcgggtatcttgaaaaggaactggggcaactaggcgatgcggggaagattcatcagcagatctccgaaggtgcccttcccttgacatggctggtggctgagcgggacctgtagcttttactgtggatgcagccgagctaaa

SEQ ID NO: 393362 - DNA, 387 bp, Oryza sativa
gcggagtccggcaagatcaccttcccgtcctcgctcaagcagccagggccaagggagttcccaatgcaatgtttcattaagcggaataagaagaactctacgttctacctctaccttggtttgacaaatgcaactgtggataaagggaagttcctcatggctgctagaaggtttagacgtggtccccataccgagtacatcgtatcccttgatgctgatgacctttcacaaggaagcaatgcatacatggggaaactgagatctgatttttgggggacaaacttcaaaatatatgatagcaagccaccatatgatggcgctaaaagcatcaagtagtcgatccagtcggcgttttggaagtagaaggataagtccccaagtgtcagc

SEQ ID NO: 393363 - DNA, 432 bp, Oryza sativa
  unsure (1)..(432): unsure at all n locations
nccctcttttttagacaaacatttcacacatcattactatggtatgagtaactagtacaccttaaacagcaaaattcatgcaacataaatttgtagagatgacacaaaatccatacaataggtgcaatggcactgcaggctagtaaattcaagagttgcctactcttgcaaggagatgcgtctaaagatggcctggaaagtctgacctccatttcttgcaaccttctgaccttcttcagtggcggtagacagtagcttgacaactgggtctgctttttgtctcttcctctgggatagcttcgaacagcgggtgtttctccaggcatgaccgcatccattctccgagctcctccacatctgtgattgtatatatgattcctcccactttcatcacataagcatactcatctagcagctgcatgctgatcaccc

SEQ ID NO: 393364 - DNA, 663 bp, Oryza sativa
  unsure (1)..(663): unsure at all n locations
gaaattgtaatacgactcactatagggcgaattgggtaccgggccccccctcgagttttttttttttttttttatcgaagccgtttcgtttgcttttattccattcgattcgattcaattcgttcatctcaacatgcacatcgtccaagctaactccttaccggaatactctctatagaaagtagaaaccaactttggattcctttctgctgcccctcaggccctcgcatacataaaaagaaacagccttttctagagagcgtcgttgccttgttcaaaggttgcaccaatgccgctctacaagactacaactcatccttgaaatttgtaccggaactcctctcccccctcaaattagttgaagctgtgctctgatccttctctgttttcgttgctgacgaatccggccgcttcagtttgaaagggatgctagcgtgcttcttgataaacttgtacatctccaccaccgtacggtccccctcaaaagtaataggctcaaaacttttctttcctgctggataaaagaggatcgttgggaatccatcaggctttgcacgtggatgctcattggtgcatcatttactcttgccaatccgcanccggggacatattctaaangcgcacgngngacccactttgtccttataggtattcactggtttt

SEQ ID NO: 393365 - DNA, 551 bp, Oryza sativa
gatgagaatgagggggtcctaactgccctgaaggaacagtaatctggcccttcgagcaccagagaggggcaaagttcatagatcatcagaaggaatggaagtttcttacaaactagacacaagacttgcacggacaattgcaacttgcaagcaccaagtaaaataccaaaaatagtttgcatcatacagcacaacaatttacagaagaaactacaagcaaggttaagtagacaacttacaggaacttacacaacttacgcttaaaatctaacataattggtacaaataaaaacaaaaaaaaaagagggtgacacataggtataagtaatccccttctcgcaacttagaccattacccttgtggtttagagaatgggaccttacaagtaaaagtgatgtgattgtaggggtcggatattcatattgggttcatcttttgctcagttccgatttttgctcttgtcagtggctcttggagcaaggcccactgcatctgacccctgcataatcctgagcctcctacagctgtgtgtgaacattacccacggaaca

SEQ ID NO: 393366 - DNA, 510 bp, Oryza sativa
ggcggcggcggcagagggaggtggcggcgaggacgagcggcgggcgcgggcgctgtcgtcgtcgtcgtcgtcgctgcggcagcgcgcgatgagcgcgtcgtcgaagctgctccggacgtcgctgagcaggagcagcaagggggcggcggcgcggcagcggagcagcaaggtgatgtcggtgtcgatcgaggacgtgcgcgacgcggaggagatgaagtcggtggacgcgttccggcagacgctggtgctggaggagctcctcccggcgcgccacgacgactaccacatgatgctccgcttcctccgcgcccgcaagttcgacatcgacaagagcaagcagatgtggagcgacatgctgcaatggcgcatggagttacggatctgacaccatcctcgacgacttccagctcgaggagacggaccaggtgctcgagcactacccgcagggccaccatggcgtcgaccgcgacggctcgcccgtctacatcgagaagcttggggcgatcgaca

SEQ ID NO: 393367 - DNA, 616 bp, Oryza sativa
tttttttttttttttaacaaaaagattagtttgaaacaaatgaaagaatacagtgtgtgttccccgtccacccagttacatacatacatcccaaggagttcatcttctccttttttcaagagaactcagaactgcttggtacaaaccagtactagttacatgatcagtagcaatggcgtcgaattgcaggtattgcagatgaaaccacctttgttcttttccccctctagaataaagatggagaaggaagaaaaaaaaagaaatcaatagtaattacctcccagcattaattggcattggtaagaagagattagatgctgattagattaataatcaagctgatctctactccagtgtcgtcgttgatctctagtgtccgtcgagttcggttatgtacagcgtgcaagaaagcggcggcgccggtcatcttgtccgactccggcgatggtgccgatcatcttgtgcgtgtgagagagagtgtaatggcggcggtggtggtgatcagtggcgcgaggaggggctcctcatgccgccggcggagaggctgtcgacgtaggagaacttcttgggggcgaggctgggggccttcttgagcttggcctcgccggccacgtag

SEQ ID NO: 393368 - DNA, 510 bp, Oryza sativa
  unsure (1)..(510): unsure at all n locations
nnnnnnnnnnnnnnnnnnnnnnnnnnnnnggttacaatcaggctcggcgacctgaattatttatattgatcttttattacgaacctggctgctcaaagttacaaaaacataatatccacaacatcttacacggggctctcaaagcacaatagatatactaaaggaaacagttggaatattgtagttgccggggataaaatagtccaaacagataccctattgtgccaggaaaatagtccaggttcccccaaaaagctacattattgatcggttcaaactacaggatcatataagctgggtaaataaatcaagaaagaattgacgtatcacaattataatatacaccgaaccattcgctggttttttgtttgccaaagtagtaattactccaaaacactgtgcttgcctggccacaggtagcaaggaacattaccgtgctcagataaaaattattgggaaggaaacataggggtgagcctcggttttaccttccagaccagttttcaccaa

SEQ ID NO: 393369 - DNA, 730 bp, Oryza sativa
  unsure (1)..(730): unsure at all n locations
nnnnnnnnnnnnnnnnnnttttttttttaggagagacacatagacactggatgctttatttctcattaaaatggaggatttgcaccatttccaaaggaaatcagcagcagctttcctttgtcccaaacagctttgtatggaaaaactcacacagctaagtcaacaaatccttaggtcagtacagaaataacaacagccatcatccacacgacgaaaggccacaatccttagctcagcagaaaatagggttcaggagtcaggactatccagcttatcactttcacattaagtagggtaactgtatatgcttagacaactgacacttttcagcttgcggtagcaccaaccaaccacacaatgtttttcttggagtagtgaacaacgttgagtgaattgaatctttctcatcaagcagccaaaatgcctaatccatcatttcattggcttggggccatgccttgacacctttgaatggaattgggtggttggaagaaacttgagtaaaaagatcttcaaaagangcgaatgcacgcataagctgtaaccgcagttgttagtagcacaggtacagcattaaccgcatcattatccagggatantcattccngaaatcttgggggactgtaggggccccgtttangggncaaccttcttccggaacactgcagtatccactggaactgggagtntngggacccaacacnggatcatcagantgacaagnaaantt

SEQ ID NO: 393370 - DNA, 434 bp, Oryza sativa
atgatccttctttcttttggccatcttctgatccaccccaagaagattttcctggggtcgtacctgaatcccttgttcctccagacgaattccagggatcctcagtcttatttttccaagaccctcctccaccggatccaccaccagtcatgctgtcagcaggagcaccccacggattgtttccattgttttttcctgcctggtcatctccaccagaaggttttggcgctccccagctggactgtcctttgttggcgttccagtcggaagattgggaccagtcaccacctcgaccttgaccgaacggtcttctgtcatcatttcggttccaatttttgcaaccatcctggtccctgtttcccctgccagaaccccaggttctgtcattgttgtcacccgaaccatagttattaccttgattgcgatcacctctg

SEQ ID NO: 393371 - DNA, 622 bp, Oryza sativa
ggagcgagtagggcggcaaggcgcgggtcactgctctgcccggagatgatcaacggcgggaccgacaccacggccaccgccatcgagtgggccatggcgcgcgtcatggacaacccgtccatccaggccaggctccacggcgagatcatgcagcgcgtcggcgacgcccggccggtggacgacagggacaccgaaggcatgccgtacctgaaggccttcgtgaaggagctcctccgcaagcacccgccgacgtacttcgcgctgagccacgccgccgtggagcccgggagcaagctcgccggctacgacgtccccgtcgacgcgaacctggacatcttcctcccgaccatctccgaggaccccaagctgtgggagcggccgacggagttcgacccggacaggttcctcgccggcggtgagacggcggacatcaccgggtcggcgggcgtccggatgatcccgttcagcgccgggcggcggatctgccccggggtgggcatgggcacggcgcacatcgcgctcatggtggcgcggatggtgcacgcgttcgagtggcgcgcccacccgttcgcacccgccgcttcgacttcgaggacaaggtggagttcaccgtggtgatgaa

SEQ ID NO: 393372 - DNA, 751 bp, Oryza sativa
  unsure (1)..(751): unsure at all n locations
aactgccaccatgttgtcctgcctgcattggcttcatccatggatgatttccagaacccgcgcgtacaggcacacgcagcttctgcgattctaaacttcagcgaaaactgcaggcctgatattttgacaccatacttggatgggatagttgggaaactactgtcattgcttcagactggaaaccaaatggtgcaagaaggtgctttaactgctttagcatcagctgcagattcttctcaggaacacttccaaaaatattatgatgcagtcatgccatatctcaagtctatactcatggaatgcagcttgacaaatcaaataggaatgttgcgggccaaatcgatgggatgcattagcttagttgggatggctgttggaaagcaaaaatttaaggatgatgctaagcaggtgatggaagttatgatgacattgcaaggatctcagatggaggctgatgaccctataacaagttacatgctgcaagcatgggcgagattgtgtaaatgccttggtcaggacttcttaccatacatgaatgttgntatgcctcctctgctccagtctgctcagcttaaaccagatgtgagtgtcacatctgctgggccagaagatgaaaatggtgaatctgatgatgagggtgttgagactattacgctaggagacaagagaattggcatccgaaccagtctgctggaggaaaagcaacggcatgtaatatgctatgttgttatgctgaaaagctcaaggaagg

SEQ ID NO: 393373 - DNA, 529 bp, Oryza sativa
gtcctaccaacaatggaggtcgccgccatggagatctctacctcattgctcctcaccaccgtggctctctccgtcatcgtgtgctacgccctggtcttctcccgcgccgggaaggcgcgtgcgccgctgccgctgccgcctggccccaggggatggccggtgctgggcaacctgccgcagctgggcgggaagacgcaccagacgctgcacgagatgaccaaggtgtacggcccgctgatccggctccggttcgggagctccgacgtggtggtcgccggctcggcgccggtggcggcgcagttcctccgcacccacgatgccaacttcagcagccggccacgcaactccggcggcgagcacatggcgtacaacggccgggacgtcgtgttcgggccgtacgggccgcggtggcgcgccatgcggaagatttgcgccgtcaacctcttcttcgcgcgcgcgctcgacgacctgcgcgctttccgggagcgggaggccgtgctgatggttaggtcgctggcggaggcgagcg

SEQ ID NO: 393374 - DNA, 414 bp, Oryza sativa
tttgtttagtttataatcactgtatattttctgtatttggtaaattattgcgcaaacacaaaaggtactggtcctgtatttcactaattaagcaccaagtcctatgactatgagaaaaacctcaaacatgcaaacttcaaagactccaaaatttacaggaagttcacaagctccaaaacgaaaacacacatcattcagctcagagctgcagctgtaactggagccaccttactttcttgaagcgagatcactgtctcgaaggcgccgacgagggccttcaccttgctcttcctcgtctcacaagcttgctcgctgtctcctcgatcacattgttcaacaatccctgctcgttcttcttcttgtccctgacatcctgatgcctcaggatgacaacttcaggtttcgaagagcctg

SEQ ID NO: 393375 - DNA, 360 bp, Oryza sativa
tttgtgtaatgaaacatatagcaacataatattattggatcatttacatgaagcaggtgattacaatacattgaggggggcttcatcaccacatataggtagatgagtcagcaaaagattttcagatttaaagctaaggtacaaaatatgctgatgggggttcttaacaaaacaaagattacatgaacaaaatatgaaatcaacaagagggggggcttgatcgaaatcgatcgatgatcttcatcagctagtcgatgatgcatcaaacgatgaacagaggataaacccccagaaatgactttccatcctcaaggaatttgtgaggcggcgtacttctcggaaaacctgctcgttctaaaa

SEQ ID NO: 393376 - DNA, 434 bp, Oryza sativa
tttgttttttttacgaaagcggcgcatcaccgaagaaaatcaacggcgctaatattgtctattacctttgatatgctagtcaatcaaaacatctataaatcattatcttctgagacgaaaggtttaacatcggctgacagcggactcaaatagttaatgtacaatactcacacattgttagcattagaacagaagaaacggctcgccaatcagtcggacgccggctccgtgcagctcggaaaggaatgccgcattgccgcagcttgcaaccatgtcatttccttggcggaagacatgatgatgataagccatatcatcgtcctaaacaatattccttctattctttgcttgtcacagaagcctcagtccccaattgcaggacgaaagagtaccatctcccggcttaacgtgacgacccccttttgttctacccg

SEQ ID NO: 393377 - DNA, 722 bp, Oryza sativa
  unsure (1)..(722): unsure at all n locations
agctcgctgtgaaaatcatctaactgatttacaagtgtgcacatggccgaagagttcagcagcagcaatgcattccaagccaggtactttcaagttttccagtaattacagaatgcgatacatccaaagatgtgagaatcaccagcatgaaaaatagcaataccagcgacaaaactattaaagcaatttttagattgttccattcagcatatgctagtaaggcctcaagccacccaggcggctttgttatttggcttctgataatcagatcaccgttggttctccctcctccgggcgtatcgggtcctgtcattgtacctaggcctatctgatgctctttgtgggacaggttctacccgcctctgcctctccggggacctctgaacaatctctccattgacgaagagctcagctccatagtccttgtactcagggtcgacataggaatcagggaggacaaacagaacaccaggaagccccttccagcttgttggacgtctcctcatcgatctcgcacccgaaaccaaagtatctctcgcangagacgttgtagatcttcttcttcggcctcctcctcaattccgagggaccttgggngagggtcttggatgtagcagtcaatcatctgctgcttggtggngcctccccggntgggcttgtncatcacgatgagccagtgctcgtantcggaaccggggaanagcgggggcaanatccgtcgg

SEQ ID NO: 393378 - DNA, 619 bp, Oryza sativa
  unsure (1)..(619): unsure at all n locations
nnnnnnnnggttgcaaggcacgccaagtagggttattttgctgtaagtttttttttttcggccatcacagcaaaggacatttgcagttcacacaccgcaccatatgcacctagatcataaccagattggaatgaatcccaacatacacaggtgaggctaaaaatccatgacatagataggacaacaaattaacaggaagtcaattcaaacacagcatccaactactgccagctcaccacaacaaaagcaccagttccctctgtgaaaagaaacctcaactcacttcctgaacaaacacttgacacggtgtgtgtcgatgtctaaatgacatgcaacctaacagcactgcctccaccctggccttggccctagaagaggcccagttgcacggcggcaagtcctgccaggcccagcatagcccatgacctggccctgagcccagctgcaccggcggactgcctggccggccgccccggcaccgttgctggggttgtgggcgtcaaaccgggagcttggtgccaggggacgccgttgtcgctggtgtcgtagatgggagtcgtcggtgtggtggacggggcttttggggctggggctgganaggccgcggcaacgtccacgg

SEQ ID NO: 393379 - DNA, 506 bp, Oryza sativa
agacattagacattttctttcatgtaatatagtagtagaacacacaagaggttcaagcttgaatgattggaaaagcttcttgccatattatccaccatcagttcatgtgtcatgatggataatttttgaactgactaggatttagagaaataagcggacaagagcccgacttgaccttcaatgcaaagaaaagagggggcaacgcacaattgcacgatctgaaaggaacaaattacagacatacaatgcacaggtctgatgaacacattaaactacacagacattgagatatttgggatacttgcgatgaacaattccaaagctgctagatcagttgcctttctcgtccagacgaaggttaatcttatctgctctgccctgactgctctattgatcttggagctattccagcagcatcagatcctctcatgattttcaatttccggcagatagtggtaaacaaatcccaaggaagatcaccaacaagcatccagtcagcatcctta

SEQ ID NO: 393380 - DNA, 473 bp, Oryza sativa
tttgtttttttttttttttttgttaaagcccctgatgataggtttcttttatttgaatcaacacaggaatccaggattatttacaccacaaggcaacgcaaacaggaagacccaactcgcagaagtaacacttcaaggtactacgctaaacggctaccattacaacttggaaaatcgtttgcttcaatattgaagagcgatttgccctacattactggccatccatgcttctaggcaatgtatgtaggcattgatcactcgatggacacctggatcctgtcgccagttgcatcctcacgatcgagcagcaattttcctttctgggactgatctgcaccctgaagtatttccgtcaaattgacaccagccaagcctggcatagcttttgatatcttctctaggattccagcaggtatccctttatttatcttctgcgttccacttttttttgtgatctttaatcgaagtacaat

SEQ ID NO: 393381 - DNA, 632 bp, Oryza sativa
  unsure (1)..(632): unsure at all n locations
atagcagggggttttttgcctcttattttccagcccagacatcaccaaatcgtgcttacataccacctccatgacgccgtccatgaacaaatacatcccaaaaaaaacccaaacaattcgccgacgggagacatcactcacacggttacactgaacaacacaagaacaaatctcgattgcaatttgcaagcacgcggcaacgaaccagctcaccctctcgtcggcagctcagatggctgccggaggcttcatcgccggctcgagcctggccttccagaaccgggcggcctcggcgccgtagcctttcaccaccttcgacgacggacaccgcgtcggcgatcttgaacacgcagaccttggccacaatgccgccgttctcgcctttcacgtacaccggcccggtgcccttcttcccttctctcgttaccatgtacccttccttcttcccggcctcctccactcgggatagcaccgncgccgccggctcgccgacgaanacccgctccttcncccggctcggcgccgaagaggccggagaggtcggagccaggggagcatgcgagtatgtcgaacgccgtcatgtcccgggccatgtcgtcctccttgaactcggtcttgaatttggcctcctc

SEQ ID NO: 393382 - DNA, 428 bp, Oryza sativa
tttgtttaacaaaaatgccgggggactcttaaaccctacagggagttccctgggatgtaaacattctactcactactccaacagtacgcaatttcaacttaagagcgtcggggtaccgctgataacctggatactaaaagggaaccacacactgactacctgggtgcagggaattgctcacatttctttagagatcctggaatatggcgggccaacacatggcatttggcttgcatattgcggtgacagattaatcaccgatctaatgtagaccttaggacaccatgaacggccagatgtgacgacaccccgttagactgagaaactgtcagggtcgcaggccctgcacattatccactctggggtgttggcttgacaatcggtgcttaacctgcagtatgctcagatgactgagcctatacaggctg

SEQ ID NO: 393383 - DNA, 1029 bp, Oryza sativa
  unsure (1)..(1029): unsure at all n locations
nnnnnnnnnnnnnnnnnnnnnnnnnnaggcataaaccagagctttatataataattctctgaatggacttgaacattcataggtcaaacgtccagcaatcacgtacacctttcttctccagactgacatgaagtacaatggaaaggagtagagcataagcagctgaatattacaatgatgtatcattgccaatcacagatattggttccattacgaatgatgaacatgaaaccacctgatcatagcttgatgtgtattgtttccttaaaactcatcatggatcatcaagcagctgcgcagttatgcatgcaaattctttattgcaagtatgatgagattgaacactttctgtttacatctctgacaggttaagtcggcgaaatcgaacattacaacaactaatctccacctagcacaaaattgggctggcatccaaaacttttattaacttaacccagaggaatatttgggctaattactcacaaccgtcgcttcgccattcgcctgttatgtgtatttggcagctatctcacgcatcaggctttcaggagcttcaataccacctgtgaaatgctcaaactgacccatggcttgtctgacaaacatctctacaccgctgacaactttaatcccacattcttctgcttcttcgtagaagccgggtaactttcggggcatataccgcatcaaatacaacatcatagaagcttaatgctttctttgggataggggtgccgtccacattggggtacattcccaatgatgtcgcattagcaaggatcatcccttcttcaggcctgaaagtttcaagctcggctaatctcagggcatgaccacccactgcagcagcaagacttactgctttttcgtaggtacgatttgctactacaactcttgcacccttctcctttgccccataagcaattgccttaccagctccaccagcacctacaacaacaacaagcctgccagcnaaaggtgntgatggcagcggcctttgatcctggcntnttcgagcgagcatcctgc

SEQ ID NO: 393384 - DNA, 479 bp, Oryza sativa
tttgtttttttttttgatgggggcaacgataagtatttgctgctagcaactcccagtacatgagaaatcatatgtacaacaacaggatggatgctacagtgaaacaccagaagttgatagctctgccctaagacctgcaagttgcggttatacctcaccaccgcatcaccaatcacattggtcccaatggtcaagttgcatttaaccgatctgggccaagatacacgcctgtcttctcaaggagagctaaaccttcctccctgccgtaccttgacgaataaagcttcaggtattcgatgtcctgcatgccactgagaatgcgctctagcctagtggacgcaaccggttcatgtgatgaagaaaacacttcaccaggatagaacagaaccccatcgccaggaggaagaccacgtcggaaacaaatctcagcacttggaatcatagccttttcgtagcagttggtaccccaataaaggaat

SEQ ID NO: 393385 - DNA, 474 bp, Oryza sativa
ttttgttagtagtaaagccatgagatttactgctcaaatccgcatttgaaacttctcttttacatatggtattacagtcttcaggatatacatgggaaaaccttgcattatgttgtctacatatagcagctgcatgtttaagaaactgtacacatctatctcaacatcctgggctgcctaaacaaattctcacaacctgggagtttcagcacacaagcatggaaaccttatagttcaagcttgtggaaaaacctcaattggtcggcatgccatgaatcatgagcagaatgcaaagtgaccaggatgctactcaatccgacatttgataggattgcgacgatgactcgctcatcatcgagttcatacaaccatagggtattgagacgctgggctgtccaattgttcagggatgtcattttccgggacctgctcaggggtggcctgaggagggacctgcgcggaggcttgcgactg

SEQ ID NO: 393386 - DNA, 549 bp, Oryza sativa
  unsure (1)..(549): unsure at all n locations
cacaagaatgtatattagactttctcctgagaaattttaccttcagaacaattgatgataaccttcaaaggcaccgattcacacctatttggcacgctatattaaacacagatcctagttgtggcatggcaggccagtcctatttgtggtcaacacggatcctcggccgaatttgtgtgacagcaatcaagtcaatcccaccgcaaccacattacattttcttcggagctaaagttcctatgcaatcaatttatgtttggagctaaagttcctaacaatcatatttacccttttgagagggttcctaagcaattactaaatcttcacaagtcacaacatgtgttgtgaagactgaagacatacattcctgcgttggaagtcacaacatgtgtgtagcagcctagcaggagaacaggtgatcagatgccaatgcatttaaccagatgctgtttactgcagccgccagccaaacataatgctcagcaaaggcaaccaactatccctctttcatctttgtcttctacttcatcagangattcaaccttttgg

SEQ ID NO: 393387 - DNA, 533 bp, Oryza sativa
caaattttaaaatccgatcccctcgaaccaaagaatgcgaggcgcgcaggcgggcacacgccccaaatgcgccggcggacgacgcgcgccgccgcagaagcagcacggcgccgatgagtcgcgcccctccggacgccgccggcgacctcttcgccgccaacctcaagggctccctcctcgccgtcgcctcctccgcgttcatcggggtcagcttcattgtcaagaagaaggggctccgccgcgccggcgccgccggcccccgcgcaggtggtggaggctatggatacctcttggagcctctctgggggggtggaatgattacaatgctcattggtgagattgcaaatttcgtggcttacatgttcgcaccggctgttctggttactcccctcggcgctctcagcataattgttagtgctgttctagcccatttcatcctgaatgagaagctgcaacggatgggagtgctgggctgcgtgctctgtatagtcggatcaacagtgatcatccttcatgctcctgaagaggagaca

SEQ ID NO: 393388 - DNA, 554 bp, Oryza sativa
cacccacatcgaggtctcccatctcccctctctcgcctcgcgttcacgcatcccccccttctccttctgccccccccctccccagccgcgaaatcccctactaaaccctaggattttctcccctcccaatgctggagacggagccgtagcaaggttttcttacctctgggaaatttgggggggaattattctcaacgcccaagctagattacataacatgaatgcaggattcagcccacagatcttggcgcagaagcttttgaagctcaataattcacgacaaagtatagagactttgtcacattggtgtgtctttcattatcgacactgccgacaagttgttgaaacatgggaatctgattttcactcagctcctcgtgagaggagggtatctttgctgtaccttgcaaatgatatcgttcagaacagcaaaaaggactctggtagatatgtaaatgagttctggagggtcatccctgctgccttaacgatgtgtttgcaatgtgatgattttggagggatgtcgtacagagactggttgcatatgggaagac

SEQ ID NO: 393389 - DNA, 441 bp, Oryza sativa
aaacgagtaactcagtgtaaagtttgcattactaaaactgtactctgatcagaatgtacaacatgatttacctgttttctatacagaaagtttgacctaggattacaacaaaaatatgtatgctttactctcagcaacggaaaatgtattttctgtctaccgtgacctccccgccttaccaacaatgaataaaaagaatttccaccttgatggttgtgaaaaagcacatgttaccagagaaaatggagctggaaaaaaatatgaagaattaacaactgggcatgtatttgttaaattttaactgggctcatcgctgccttttgctttgcctcgtaacatatctccaaaaccacccagcattatacgaccaaaccttgtgattctcttgctgagtttgtggggtaggctgagagggggtcgtggcagcagtatcatgttgtt

SEQ ID NO: 393390 - DNA, 509 bp, Oryza sativa
aatataatagggtacgatccggttccttcattctcatacaacaccgcagatgcagatgcagcagattcacagtacaccaccataacattcatattctaatacttagtatgtagaggagttcctaacatagcactgacatatacctcagcatccagcaacatcatttctcaaacaactctctgcctcttacacctacagcaagttagcgcatcgcgttgcattgcatgctaccaagcgcactcacggggattcggggaattccgtcagtcagagatagatatataggtggtgctccttccttccagcaataatacacattactcgcgaatagagttgatgtcgatgtttggagttcttgagtccatctgcctcatcaacccagccgaccatccacccatcgtatgatgcggcatgttgtgatctggcagtgccattgtgggggttttcttcttaccggcaattggctcttcgttattctccgtctcttgctcagctttcgctttattttt

SEQ ID NO: 393391 - DNA, 456 bp, Oryza sativa
tcgctggaagacgaagaggaatttatctgagtagtggagtccaaggaaaggaaccaactgaccttagcttagcttaccttagctcaaccccaagcttgaagcttccactataagaactcacccagccacacggctacttggacgacgaagcagcagcagcagcagtaaacagcatcgctcgctcgtcttcgtcgtcgtcgatcggctccggtgagggtgatcggtcgccggcagaggcttctgatgctggagaggccgccgatcctgaagagataccgcgcaccggggtgggcagtggtggctcgctggaaatgtcgtcgcagcagcagcacgccggtgaggtccccgtctccgtcgtcgtcgctgtccgggcgcggctcatgtggaccgggcagctgcacgagcggtttcgtctcgccgtggcggagctcggcggcgcggacagggcgacgccca

SEQ ID NO: 393392 - DNA, 605 bp, Oryza sativa
tttttttttttttttttatattagcagaaggcaaagcctttttcccgcgctttattaaccaggccagatcgagttcgtgtcacatggtcttaaactcttcaatcttagtacatcaaaccagacacactgtttaaccatcagctcatcatcaccttactcatgagaagaactaatccagagatacggggtaaatcaaacgcccaatgtttcggaagctgcagaggagaagaagtagagagtactatcgctcagattctttggtgctggttcgtcactgcgtcttcttcctggcgtccttggccatgcccctcttgcggatgccgacggacatgttgaggaggagcctgtccacgatgggctccgggaacgcggagatgaggaaccacagcaccgcgtgcggccagtagggcgtgcacctcggctcgtacccgatgtagcgcacggcggcgcgggcgtacgtctccggcgacggcgcgaagaaggacgccttcttgatggacgccatcttcgtcgccgcgtacaggggtacctggcttcgcacgccgctgctaagacaatcttgataaacgccgaacagctgacacacataaatggtgccagataac

SEQ ID NO: 393393 - DNA, 681 bp, Oryza sativa
  unsure (1)..(681): unsure at all n locations
gaacaaattagctagcatgcaacagtttgctgcgcgcgcaagcaaatcaatcatgcgaaagatcgaacaatccacatcaaataccactaaattgttgcccattatcctagctatatagtagctagctacaccatttgctgctcatcttgtcaaccatgcataaccccacaaatctcaacacggctagtagaagagaaggatagggaataatattacttatgcgaaccattggggaagtacatggcgggcggcgggctccctcggccgttattgcttttcctcccctcgccggcggccacggccgcggccatttcctggccctggtacatgagcgtcgagttcatcgtcaggctcaccaagctgtcgtcggcgtcgctcctcgggaagttgccgccgtcgcttccgccggcctcggcggccgccggtggacaggcgcgccgtcgtcacgcgtggtcaccatcaccgccgactgcacgagctcgaggcagagcctgagcttgttgggctcgatgtgcgtcagccccgggcacggcgcccttgaagaggaactcggaggtgaggctgcggagcacgtcgagcggcgtgacgcgtcgagcgtcctggagttcgggtcggcgtggtggtcgaagcagcacggganaccatgttccgggggagaccatctccggcggccaagttgca

SEQ ID NO: 393394 - DNA, 553 bp, Oryza sativa
actcgaaattaagcttataaacaagacaaactgtggatattctcgaagcacatatagaaaaaggagtagtaaattgtctcagcatagcacatacccataactacttagatacttagatatagttaagtagtagatgcctaaggattgtctcagcatagcacatacccataattagttagatatagttaagtagtagatgcccaaggatggatgcacatacttaacatggtggacataaatacagcagaagaatccttcgattgtccctccaatccctttaagcatgatgacattaagcaatcttcaatccagcaagcggcctgctcaagtgagcctccattcctctactttccggtgccatctgttgttttcccttcattttgcttagttcccaactattcgatcccatctccaatccattcttttgcattgctctctcttgtttttccttctgcatcatttcacgtccaatcttttcgattgcactttcttgttttgctgctgcatataaactccgatccgacttgggtgtcgcacctttcaataagaggga

SEQ ID NO: 393395 - DNA, 481 bp, Oryza sativa
gccccacaaataaagaatgactcgtgttaaaaagaatggaagaaataatacattgccaagttgatggaagaattacaacagcagagtacaagaccaagatcaaccgatctgtggtaacaaaatcccacacccacaggctgagcgagcctcagacagatcaatatgccaaaatgatcgtgaaacaactgtagataaactataggagtatatttctatgaacaactgagatcctctggatacacaccattcatgcaaatctctcgtcagctctattcttcgagcccatgcatgccatccccctgaatcaaatggttctcgatgcatcaattccgttgtacttcatacctagcatgaaaatatgatgttggcggatgatgatcaacatgcttaatatttttgccctggaggtgctggtggcaaacggtttggtgtgcctccgctgccagagttaccaccattcacgtccccattttcatagcgt

SEQ ID NO: 393396 - DNA, 445 bp, Oryza sativa
caaccaatcagaatatgatataatcgtattgcccatgtaaaaaccaaattagcattccagaatccacgataacatccacaaaacagctcgactgattgattgttgcatacccaacgtattgcacacacgaaacacacatggttaacagtggccattatttgtcaggacaaggggaatacaatatcaatgtcccacacgagttaactattttacagcgccaaggatcaaaagttgcaaaatgaggggtagggcaaccccaagtacatccaactattgcaaagaacatattcatgatatcacaaaaaaaaaagtttttgagattatacctgttttatgccaaaatttttgcagtccagggagagcgactgaaaaaaccaaccgtgcaacaaattcaaggtccgttgcttcaaagaatgtcacgccctgatgtagccaggcagcaaac

SEQ ID NO: 393397 - DNA, 648 bp, Oryza sativa
atccttcaaaaactcaaagggtgtagaatgctacttgtagtacattagatggaacaatggacaaggacaaaaggatcacatcagtcattacaccatccatgctgcaatccagattagatgatatcatcgcccctcaaaacttatctccagttccgaatggctaactaaaactgataaggttagatgatgaaaatgttacaggaagagaccatacataaagatgaaatagatgggactcccgtctaccaaaaccatcaatcacaaaaacacccgaccatcaacatgcggcagataaagcgcagcagcaatgggcatgcgaacaggtgagcacttggctgattccaaaggttgattccagttcccagtgtaaaagaagacataagccatcgcatcttctaaagatcatcaatatgaagaaaccaatccccacttcacgatttcgaactacatcatttgaagatggagatcagcagcctgtgcgccagctcgttcatcatggcctcatcaaagaacttgttgatgctcacatcctcactcatgcccttccttcgcctagtcttcaccataaactcacgagcaagatgctgtattggtgctggttccagaggccggaggacaatattcttgtctaaagggtcaccaggaaca

SEQ ID NO: 393398 - DNA, 539 bp, Oryza sativa
  unsure (1)..(539): unsure at all n locations
nnnnnnnnnnnnnnnnnnnnnnnnnnnnnnnnnnnnnnnnnnnnnnnnaaacaccttacattagcactttgcattggagatgcgtgcagttaatgaaacaacaatgtagtttcagtacaatacatttaaaacaatcnattgaaaaaaaaataattcctgccctagggccttctgcataaatgcgcattgtcctctatcatgacaatgcattggctcttccgtgatcaccatcaacaagtagacctatacgcacaaacatgcatgctcctcgccctatcgccctctaaatttgcatcgccaccgcttccaaaaatgcttttaattaatacaacttttttatatgtagaacctataggatcacattgaccagaacccggccggccacagatcaagatttcttgagtaagtacgtatgtgtagaagaaaaaataagctcacacaactacaaaataagaatcatctccggctagccgtggatccggtgggggccgggccccgccgctctaggacgggttgtcctacatatatgggatggactc

SEQ ID NO: 393399 - DNA, 432 bp, Oryza sativa
  unsure (1)..(432): unsure at all n locations
tccgctggctagcaagcaaagctaggtagaggccaggccatagatcgagatcgatctgcaggtgcagcgcggtgggcgggcatggcgacgaaagctggggtgaatcgccacgctcctggccctgaacctcctctgcttcaccttctccgacgcgtgcggctgccagtgcggctcatgccctagtcccggcggaggccgcggtggcggtggcggtggcggtggcggtggtggagggcgtggaggtggtggcgggagcggcggaggttcaggtggaggcggcggttcaggtggaggaggaagcggcggcggaggttcaggcggtggaggaagcggaggcggcggaggaggaggaagcggcggcggcgggggaggnggaagatgcccgatcaacntcaacctccccatcaacctcagcctcctcgtcaacttact

SEQ ID NO: 393400 - DNA, 491 bp, Oryza sativa
  unsure (1)..(491): unsure at all n locations
nnnnnnnnnnnnnnnnnnnnnnnnnnnnnnnnnnnnnttttgttttttgacctactgggataaaacgatttctatagcattagcaagctcattgctacaaattattaacagtaagatctcaaaatatagaacataagggagtaaacaaaactgaacaaccaaacaactacagtactgtacatgcctggtatcctacatgaggcgactgatctaggagaatgctgataagcatagatactgggcaagggaagggagcctgggcagtcagactcgcgggaagcgagaaggtcctctcctccgaaggaactcaggaatctcaatcatgctgccttctgcagaggatgggcgtcgaccattgtctccttgcgtttgttggccaccctttgtggtgcgaccttctggttcatcttgaccttccgagccagtggcaatcaaggttatgctcacttggccattgagcgatgggtctatgacagcaccaaatatgagat

SEQ ID NO: 393401 - DNA, 861 bp, Oryza sativa
  unsure (1)..(861): unsure at all n locations
nnnnnnnnnnnnnnnnnnnnnnnatatggtcgacaagtgaacttttggattatcacggaaaaaaaatactaaggacatcatcattataaatatcctacttggaaagttgaactcatatttttgagaataatttaacataacatcagcttggaagacacataaaaaggacgggaggactcaaaatcaggaagctaacgcgcgctctgtaaatgacaaccatcagcttccgccttaacgcataacactttagcattcttgttcaaacgtgcagacatgctccccaacgccatatggaatcaaaagcctcgctgtggtcgctcagctgccacattcactcgaagtgggacggccatccaattcctgtccatcaagggcagaaatagcatcatcgagctcctccttggaggccatggaaacaaaaccaaatccccgagaacgcccagattctctatcgtagacaaccgaagcgttaaccacctctccatgctcgctgaacaattgcagcagcctagagtcatccacttgccatggcaggttgccaacataagccctgaaagcaggagcaaactgccttggaggtctctccacacgagagccccttggagccgccctgtttacgttcagaagccttccgttggatatcatagcgggttaagcaatctcaatggccctgtcggcttcctcaatcgtactcatggtaacgaacccaaatccacgtctgccctgtctctctgttgtaaatgacctcggcgacctcgacgacgccggcctntcgaagagcntgcgaggccctcgctgtcgacgtcgtacggcaggttaccgacgtacaccttggcctcctcgggngccgccgcgaactcc

SEQ ID NO: 393402 - DNA, 467 bp, Oryza sativa
ggattaggaaggagaagacgaaggggaaaggaggagaggagcgaaaccctagggccaggcaggcatctccctcccgggatctcgacgcccagcaaccggaagccatcggcatggctatggcgctgcgctctctcgccgggaagctcaggccgccggtggcagccaccctccgccgggcgccggcgtcgagctccttccaccccgaggagaagctgagcagcatgacatcttctaagactaaaactcctgttgatgacaactgttttgaattgcttggggacaagtattttgaagagcggtctcggatttttgcccaattggttaaggaagatgcacggcgcacggaggagcagatcgctgcatacaagaagctgaagagggcaatggttgcttctagcttgggcgaaggattggaatttttgcccttctcatcagatataacgggtagatatctgatactgttgcta

SEQ ID NO: 393403 - DNA, 441 bp, Oryza sativa
atcaacaaatgagattcaggtgtcaatgtattatttgacctcaagatcatttccatctaatacatttgcataggcaatttacaatccagtaaattcacctgatgacaatccctcactttccttagtatacatgcctcgtggaaaagcatataaattaaacaggtcgggactccgaaggaatacatttgcaatgaactcagcagcacctaataaacaagtagaagagagaattttatatcacaaccagaagatacgtccccgaagagagaaaagggctaactgagaacagcaaaccaagaaaattagacgagcagttgcagcccgagagcctcagttcagccgccttctcttgttccggtgtagtcccacaccatccacatccaaagaacctaaggcatcatttcttcctctcctcctcagggatcttgaagaccctgcatt

SEQ ID NO: 393404 - DNA, 350 bp, Oryza sativa
ttccttcctcctcctcagatcaagaaaccgtgtcctagaaaccatcgagatcgccctctcccccctcggatcgcggcctctcgcgcggatcgatcgctgctcggtttcttgattttttttttatttttttttctccggtgaccggagaggcggtggtgtttggatcgggaggggagagatggtggctgaggcctgatgcgatgcattcagcccgtgccggcgtcggaggtgccgcaccaccggtgcgttgcccagggtgctccagatgtgctcaacgtggcggctgaaggcccgacctggaagaaaaaggattgatttggcatcttttccacttgctaatgttggcgcaa

SEQ ID NO: 393405 - DNA, 744 bp, Oryza sativa
tttttttttttttttttgtgataaaatcaactgttgttgctgttgttgttgcagcagtcttatgaaatacccatctgaagtaaaaggatagttttaacaaataattacagttttacgaagaatgataagcacgggtgcatacctcggccagtttcctcggagaactatagaccttccgttgctaccaaatgaacatttcttgtaaaactgaactgtagatttgcggacaggactgtgcagtactgtgcacccccagtgcctgtcaggatcagagcagccacaaacccataaactcatcgctctattctagtccttccaaatgtacatttttttaatggaaatgtacattcataatactccatcaagatagattacattcaacaagtcatgcgctacggatgtacagcatatatatacaccactagcatgtcggggttgaaatgcaatctacagtttgcaatactcgtcagttgaatcctcttgacgtttggtactggcattcccaacctgctaaacctttgtgggggtgtcatcatgaacgaagtaatcttggaccagaatttgactcaatccatgaaacaattacgtcaacaagtgtattgacatcctttgagatttgtgcccgtagaacgcccgaatccgcacctaaagggctaccgacctccttagcaacagcctcccatggtggccctgttgctagaatttgtcaggagttcacctcctctgtttactgcatcggccatt

SEQ ID NO: 393406 - DNA, 540 bp, Oryza sativa
cactcttctctcctctctccctctcgcagccacagcacagcgcagcacttggccgcctaatctctccgcactctctcccctcgccgctccctccactgccgcttcgtctcggccgacgacctcgtcgtcgtcgtcgtcgtcgtcctcgtgttcgccggtcgccgcgccgacgcggatcgccgtgccgctgtccagtgcgagagcgcaggcaggcaggcaggcgcagtgccagcaatttgcctccctcaccaggggcacatctacatgtggagttcattcccataaaagaggatgcacatggtatacctcacccatgacctctgtaataagctgcggtgatctttatatgcttcaccaactggtgaaaaatgggctcttttctgagaaaacagcccagtttcctcttaattttgttaattctgcaccttggtgctcgtgaagcaagagcactaagttcagatggtgaagcacttcttgccttcaagaggcagttacaacttctgatgggatatttctcaactggcgtgaacaagatgggat

SEQ ID NO: 393407 - DNA, 618 bp, Oryza sativa
gagctggcgaagatcagcaagcccgcaataatcagtgactttatggatcttaaggtcaggagcatgaggaaagaagtggacatagtttcatcctcaacatccacattgctatcttccatcatggcacactcttctcctttgttgtcgcaagagacaacagaagcctccatgacattcaccgcgatatcagatcgtgagtgacccgaggttgaatgcagatacgaagattgcatcgacaaaaggtagtgtaggagaaatgtttcccgggaatctttttgctggtttgatttttttttcgatgtatagatttacttcatttatagcctgaaaagcagcctagagtgaagaaagtccatgatagtatatcttgtttgttcatggaatgtctcctgtttttgaatgtgcaatggacacttcttcagttcttaattgtacacgacaccttgtctgctgcttgggttctgagataaattgccaaaaagaaacctgtctacacgaacaatgttttttccactttcaacttgtaaaatgacagatcatattattgtcttccatgatgatcatctatccctgaaacgcgtgatgttgggaaaaatcttttggtttgctttcctgccc

SEQ ID NO: 393408 - DNA, 425 bp, Oryza sativa
ttggttgttgttttattttggggggaaagaagtgctcctttactatgattaatatttcaattaaaacataagcacttagctattatgtttccctgtttacatggtgattaaacacaacactgatcacggtcacacctaatctaaactttacaacgttttcatctacatttttgtacgctttctgggcataaaaaacaagcgaaagcgaactgataggcagacacgcgcagactgaatacaccaacgctctgaagagcggaagaaaacgccagtaaaaatacatgaagcaaaccaagccgcgtaaaggcaacagaaacaaaagaaatctcgatcagaaatcaagcaacgccttttgatcagaaacattaagcaacgtgaatcagcaagtgcttgggacccaaaacttgcctgcttggtggcttgct

SEQ ID NO: 393409 - DNA, 591 bp, Oryza sativa
  unsure (1)..(591): unsure at all n locations
agaaaagcaaaaaggcaaaaagagttcgtgcgaaaaaaaaaagaaagaagagttcgactgttcgagcgaggagggagaagaagagggggagagagagagccagcagctagccatggcggagacaaggaggaggagtcgttggtggagtcggtgatggacaagatctccgacaagctccacggccgcgggggctcgtcgtcgtcgtcgtcggactccgacggggagaggacggccgacttgaaggccaagatctaccgcctcttcggccgcgagaagcccgtccactccgtcctcggcggcggcaagcctgctgatctctttctatggaggaacaagaaaatctccgttggggtactcgctggcgccacggccatctggctgctgtttgaagtcatggattatcatctcctcaccctgttgtgccactgtatcatcctcaccctggccatgctcttccgctggtccaatgcctcaactttcatcaacaagtcccctcctaacattcctggagtgaagatcccagaggacctggctgtaatgttgctcgctcactgagattngagatcaataggggctttgctaccttgaggg

SEQ ID NO: 393410 - DNA, 596 bp, Oryza sativa
  unsure (1)..(596): unsure at all n locations
nnnnnnnnnnnnnnnnnnnnnnnnnnngacaccaactggattcttgtccttggtaaggtttaatggccaaagcggagaaattttagtttttgccctatgtacagacatatggacactttactgatggaaacctactgggtgaaaacaggatgatgggacgtgttaatttaccctgtgtaccattgtgagatagtcattgtggaatatgaaatttactccgcagactctgccctctcccttacttaaacagctcatattccggtcccgtaaggcataagaactgcttgaactgctggtatgttcctcgctatacgatggaatacaggggctcgattttcatgctattggattcagctactgctacatgaaccgcgcagaggatcacatcatatatcaccagaccaaacatcttctcctcctgaacttgtcgacatcatctgagctcattcgtggcttttcaggaacatccacagtttttgatttcccaactcgactatctaagctctttcgtgagatctgggagcactttggagcttcttggggtttctcagagcttgcaggttctgaatctttactagaagcaccctccttcatcg

SEQ ID NO: 393411 - DNA, 565 bp, Oryza sativa
ttgttgttttttttgatgcgcagtcacaattcacaattgtataccgtcaggacacagttttgagctcccagtttttcccagggttactccagagagcgataatttatgaaactactgctgagcctcaagtcgataaacatcaaatgttcttcctactttaggttcagcaatatataggatatataaaaggataggtttcggcttagccatgcttcgagaggatgctctctgcgacgctacgagcgatgggatgatagaattcatgcgcctctgagaagatcctatgggcaagcatcttctcctccccggagcatcgagccagcgagctgtagagcgggcgaaggtacttcatcctccccacttgcttcaagcatttctcaacctcgttgaagtagcatctgcagccggtgggaattgcaagctggagaaacgcgactttgacctcgtagtcacagctttctgatagcttgtaccgctcatcgagagcagttacctgtgagctttcaacatctgtgggtaagttttccagtaaagttcccattcctgtccactcagctgctaccta

SEQ ID NO: 393412 - DNA, 531 bp, Oryza sativa
cgctcagccgcaccgactccatccggaacgccgccgccatggcgaacgtcagcgccgggagcgtgttgctgagcgcgcacgccaccgtcggcgtcgtggacttgagccccacgaagtagagcacctggttcagcgtcgcgccaaaaatggaggagaagaatatctggacaagtactttcttggtgatcaccatgccactcttcctctcgaagtagtaggcgaagggggcgaggaagacggcggcgatgatgttgcggtaggcgatgaggacgtaggggctcatgccggtgtccagcgccagcttggacaccacattcatgccggcgaagcccagctgcaccatcaccatggccagcgtcggcaagctctccctccccatctccctcttctctactctctcaactctcaactcccttacttctcgaccgtgctgcaagaacttcagttcaattcctcttgagagagagagagagagagatttgtagggcggtggtattgatatgatcaagctaagctatagagagagagaga

SEQ ID NO: 393413 - DNA, 1028 bp, Oryza sativa
  unsure (1)..(1028): unsure at all n locations
gtttaatcaagccaagagtagggctctaggtgatgacaattcatcaatggttagctgggtgacaaaggactcagacacttcagcgatggcctggaggagtaagaagtcgctggcaggaattgccaaggagattgatgaatacttcttgaaagcagcggcgagtgggagtgacatcgtcatacttttggactcttctggtgggcagccagatccctcagagttagaggcaaacagaggtgcaggaaaaaattccaaatccggcaaggttttttccacaatttgcttggagctggtcattcaaatctgcgcaagctaatagacaatcctcaatgcattcaagtgatgcctctggatatggttaccatggcaaaacactagagaaactttatgaagaggagcaaaaactctacaagttagtcaaggatgaagaatttgcaaggctccagtacagaaagaacacctcgttgctacaaagactagaatcaggtgaccatgataaattgcatgcagagaaagtgcgagataatatagaggaattgcaagctcggataatctctttggaggaagctgtcggcttgacatgtgtgtccatatcaaagctcagagatgaggagttatatcctcagattattgaattatctgcagggcttgtgcatatgtggagaaacatgtatgagtgccatcaggttcagaaccacattgcccagcaagccaatcttctaggcaatttaccagggaatgaaccaacaactgacactcattgtcaggcaacatctcagctggaagttgaagtttctgcatggcatagttcattctgcaatctcatcaccttacagcgtgactacgtaaccatccttaaccagtggattaaactcactgattgcctgcctgataacgatggctttatgaaaagttcgtcaggaattcgagtctctgtgcagactccagcgantcttacaggattacctgagaggtagctgcagaggaataaagctttctgcagttatcacactatngtgtcagcagct

SEQ ID NO: 393414 - DNA, 486 bp, Oryza sativa
  unsure (1)..(486): unsure at all n locations
nnnnnnnnnnnnnnnnnnnnnnnngggggagaaatgaaatatcgtctttcccatagcaactggattagagttgaacatggtatcatgtaatttatatgaatagcacgcatccataaacatcttgctgtcaagatactcgtaactcggacccaaaacgttccaactcgtcctactcatggactacatttcgtgttctcgataaaagcgagatccgaacagacctgatccaaaagccaacctgcgactctaagcagaaaccatacacaaacaaataaataataacaagtgaacgcccaataggtaaagatgaccctgacatcttccgactctgcccaaatgttctcaacatagctcatggctaacgacttttaacttccatagacggggaagcactgacaaacttacccttcccaccgagcactagtgttctggaggtaacacactgctggattactctgaggtggcagctgatttggtgtcagtctc

SEQ ID NO: 393415 - DNA, 420 bp, Oryza sativa
  unsure (1)..(420): unsure at all n locations
ntnntnnttncnttcgacancnaaacgatgcaaagttttggatagcacggaccttagcttctcaaataccagacttgatttacaaaagatgcccaataatgtttaagccaaccgagatcacaacctcgacactcagaagaatctggattaagccacatgcataccaaacgcttcctaactggcaaaccaaattatttagcctgcaagaggttcagcgagatattgagcaagcttgtagtgatcttagttctcaggcacattctcaggcaccctcacgtgttcagctttaatcctagctaccttaaccaactcagccaattgatccattttatcattcctgggtatattgggacctaaaatttttttggaggttggaaagcaacctggcgaaaaaacaaaaactttggatttatttggaaa

SEQ ID NO: 393416 - DNA, 387 bp, Oryza sativa
ttttttttttttttttaatctgacgagacaactgataattcacgcatttaaaaattccgtacatatgaattcggtaggttataagtaaacaaaaattgagcagtagagccactgaacaaaaattcagtagaaaattcagccatgctctattgctactcagtttggggctttcctcccagctttccctcgcataccgcctttctggccgccgcccttcttccccttgcccttagctcctttgccacccttcactttgctggccctcttgcccttcttcatacccttatccaccaggatcttccctttgccagccctcacctgaacgcccttctttgggacaacgaactcctttgggggcttttttggaatcgcctttttggaaatcct

SEQ ID NO: 393417 - DNA, 449 bp, Oryza sativa
acaagttacagatctctcgatgtatatacatactatgatcctcgcctaatctcttcaatgtgtgcttcctcttcttactgtatagaagaatgaaataattggccgactagctgcgtttggtttccagtttcttcagcatttacctatgagcccggctacgttttgggcaatatcttttttggcctgcaatgagaccggtgaatcgccaatgtacataccgaacagagccctgcagaggtctttgctcttaacagcaccaatttgtctgccatcaatttctgttattagctggccatcagaagtttggcagaagtcgatctttgtacccccaggaataggaatgtcttcattgaagtaagaaccaaaaagttttcaagcaatgataatcagtggtgggattcatcttctggaggcgcaggccaagtgacttctcaaatacatctcgcact

SEQ ID NO: 393418 - DNA, 630 bp, Oryza sativa
ttttgttcatcacatcacatatatataaatatataatcatcatcatcagcagcatgcatataaatacaactaatcgattaataattagccaatatataataataatgcatcacacacatatatatatatatatatatatataatcgacccatccatgcattcaccgaccgaatcaatggattggaccaattgggaattggggaatttggatggacaatgatgtgatcaccatcatcatcatcgtcagttcatgttgcgggagcagcgggtaatggcggagcacccgcggcggtagggattcgccgcctgctgcgacgcgcagttttggtagtaggtctggcctcgcttgttgcacggcaccttgttcgcgttccagcgccgagtagctgacgtaccggttcgtcggcttcctcgccgccagcgcccgccggagcagcccgccgtcggcccccaccgccgctgagcactgccgccccagcctgccgccgcacgacgaggaggagatggcgccgaggtgggccgtggtgagcagctggctgtagccgaggcccccgccgctgtaggcctcgacagtctacgcgcgcaggcaggagaccaccagcgtgagaaaaaccgccgccgcagccgccg

SEQ ID NO: 393419 - DNA, 627 bp, Oryza sativa
  unsure (1)..(627): unsure at all n locations
cgccgccgcaagtcgggcgccgccctgctggacagcacgacgggcttggacgacgaggacgggagcgagngcttgcggaacggcggccgcgtggtgagctccggcagggtgcgactgtccaccgaccgcctcgacgaagtccggcgacggcgtcgccggcggcagcttccccctcgagcacctcctcgtgtacaggctcctgatcgatgagtcgccctcgtagccaccgccaccgccgcaaccgccatcgacgccgcacttggcgagcctcacgttcaccgacttgcccttcgccaccacgtagatgttgcagtagtccggcgcgcccttcatcaggctggacggcacgtcggcgttcttgaatttcttggtgaatgcatttctgttggatgcgccgagcgcgatgctctggatcttgttcacggtgatgaactctattaaggcctttgacacgtctgcctcttccagtaccaactccgatacatgcaccccattcctggtgcagaatcctctgaaggggacaaagatctccctcatctcggcctccaacgcgccatgcgtcgcctcggccatggcgaatccatggttggcggcaggggggtggacggcgatgtggaggaggatgat

SEQ ID NO: 393420 - DNA, 446 bp, Oryza sativa
gtcatgatcagcagcaaagaggttctttcaagtgaaccggaggaaatcggcaatgatgaaaaagctccggacagcaacagtgatgaaagcccaactgaatctaagaaaaaaggtggaagcaagctttcagcttcagcgcctccattcaatcctggatcactcttatcgatgtcgcacccttacagtacagtggcaatatatgatgctagcgtcgttcttcagccaataccaagtcaaccaatggagattctccctcacgccattgatactagggtaccccgtggtcctcggtccacattgtactaccgtactgggcataccttccaaagaaaacagggttacgcacacagccagagcaccattctgaggggtagcaactcccccccaaccatgaattctcatgctgccgagtttgttgcctggaaaaacttcgcaacaacctgatg

SEQ ID NO: 393421 - DNA, 541 bp, Oryza sativa
  unsure (1)..(541): unsure at all n locations
cttgttcacagtcgcagcagcagcagcaccgggccggtgctttctccctccaaagtgccccctgttttgcttccgctttgaccctcttaaaaacctcaataactccaaattttcccaccgcctaataatccccattaccgtctcctctgaatcgttggatttgatacccccagggattcacagagagagagagagagagagagccaagaaaccctgtagctgctgtaggacgagtaggagtaggagtggttttgcttcctctgttcttgtgttgggattgaggaatgaagagcccgtctcccgtggatcctgagtcgccgagttctcccgattgcaagggagggagcagcagcaagaggaggcggctgccatggcggatgacgatgagcctggcgtaccagagcctcggggtggtgtacggcgacctgagcacgtcgccgctgtacgtntacaaggcggcgttcgcggaggacatccagcactcggagaccaacgaggagatcctcggcgtgctctccttcgtnttctggacgctcaacct

SEQ ID NO: 393422 - DNA, 761 bp, Oryza sativa
caaaagtcaaaacacacagcatttgatcacatataggagaaagtattttacatggacccttcggggttccggacaaacacacaagtagagcgatttgttttcttttacaagaaccgtgttttcagttttccccatgagcaaaacagcaacgtggtgacagcgtatcatacattcgtgctgctacagatcgaaaggcagcacataccctcgacagcgtttttacagtttccggtacacaatacagattacaccatacagacacacgaggtcgtaggggacactcgggacattcaggaatcaggactattcacctgaacctaattaaattctctggacctgaatcttgctgctttcacaactagcagtttactgattcgatccgtagatgtataagagaaatcctttaggagattggtatgacacgtgatttcggtcgttcccccgttccgtctttgatcacggccttgctctcttccaggaagagcccaaccccaagcggattgcctgccacgtccactggtgccacggttacctggttcattattattagatgtaccagcattttggttcaagccagccaagtgatgcctagcattccccttccatgattcctcgaacccagctagttcatcttcatggagattgtgcaatatctgtgtagtgtccacattgccatccgatttcagcttccttgttagtgaatgtcccttgtcatgaattcctcgagagattctatgagtagcctctttagtcgttgtatc

SEQ ID NO: 393423 - DNA, 453 bp, Oryza sativa
gttgcggtggtggagtgtgcgcttttttttttttcgctccgaacttgtcggtgtacgtttttacgttggatcccgtgtctgctctggcttcaccatcaccactatgtgttttttaagtagtatagatagattagtaatccgaacacagcctccgagtcaccccaaggactctctctctctctttctctctctccctgacttgggtggcccactccagaccagagtcgagtcaggctggccatggccatggccatggtatgccttcggctccgtgttcggcgaggccaagccgccggtgacgatacggatgcgacccgtcctcttccacgcccacgcccacgcccatactgatgatgtctcccaactctgcctcctcgccaccgacctccactcccacgcctgggaccgctccctcttcctctccgacatcgacgatctcagagacgacgtcgg

SEQ ID NO: 393424 - DNA, 764 bp, Oryza sativa
tttttttttttttttttttactgaaattcggttattcattagaacaaatctgtcgtctagaccataaaacttttacctgagccaattatgcacctgatatgtaatacactctctcttactgaaatttcagaagagaacataacatcaaattcctttactaattacttctgctcgtacataatattgcaagcacgaagtttccagtgtcttgcggtgagcatataatctcaaaactttctttcatctgtttaatcctgtttctttagtgtgagaatcctctccatttttttttattcaagccacagttaagaagcattctagtgattactctttatatgtttcatccgcttaattaaatgatctctttgacctctctctatatatttctttgctgctacagaattgaagagcagcctgacggtgctacatcatgcagtcgattattcgatcgactaggcagctgcgacgctgagggagaagggcaatggcgcagagtgcggcgaggccgagtagtcgttggccttgagggcttcagatccacagctgtctgcatggtcgtccattagcatctggtggcacctgcactcggagctgcagaaggctttctcccccctgtacatgtagatgtcgagcccatcaagcctcttgtcacacaggaagcaccggctcaagaagtcagccgccggcgccggctcctagtcggcttccacaagccagctcgtcgccaccgtcggcgaacccaaagtacacccgcttcctcacgc

SEQ ID NO: 393425 - DNA, 696 bp, Oryza sativa
  unsure (1)..(696): unsure at all n locations
gttgtctttgggctgaaacttttcggagcagatttaatggctatccctggtctttacagatttgttcaggagaccataaaaaagcaagttgcgagcatgtatttgtggccaaagacattggaagttcccataatggatccctcaaaagcttctaagaagcctgttggaattctacttgtgaaagttttaagagctcaaaacctgcgaaagaaggatctgttgggtaaatcggacccatatgtgaaacttaagatgtcagatgacaagcttccgtccaagaaaacaacagtgaagcgtagcaatctcaatccagagtggaatgaggatttcaaatttgttgtgacagaccctgaaactcaggcactggaaattaatgtctttgattgggaacaggttggcaagcatgagaaaatgggcatgaacaacattctgttgaaagaacttcccgcagatgagactaaagtcatgactgttaacttgcttaagacgatggatcctaatgatgtacaaaatgagaagtcccgtggtcagcttactctggaggtgacatataagcctttcaaggaagaggatatggagaaagaaggcatcgataatgctgatgtggtggagaaagctcctgatggtactccagctggtggangactgccttaatgttgtggtccatgaagctcaagatcttgaangggaagcatc

SEQ ID NO: 393426 - DNA, 1106 bp, Oryza sativa
  unsure (1)..(1106): unsure at all n locations
tatanttctttgcttctcatgttcttaggaggagcttatgagggtgcagttagaaacaacaacacaattaaatcagctgaaagaggttcatggagcttggttgccaccttggttagtgacacacacagctcgtgctaaggaaatgatgttaagtcactggaatgaacatgggaaacctgctgttaacagtttattgcagaaggcatcagagaaatcagttcaggcaaagaaatgggccgagccacatgtagaagctgccaagacgaaatggatacctgttatcaaggaaaaatgggttaccatgaagacaaacgcagagccttatgtgcaaaaggtctcagcaaaatctatagagctctatcaagcatctaaggatgttgtcttacctcatgttgtgaaagcacataagattgctgatccctacttccaggaagccaagaaagtatccaaaccttacattgatcaagttgctaaggccactaagccacatgtcgagaaaattagaatttatttgaagccttatacaaaaagagcagtccatatatatggaaattttcttgagaaggctacagcttatcatcaacaggctcaagcaactgtcttggactacctgcaccaacatgaattgacaaaagaatttgcgactgaagagttggcctggtacctggcttctgctttgctgattatgcccatttatgttttttacaatgtcctggttgaaacattctgctccaagaagaagaagaaagccacacggaatgttaatgctaaccatggccatcggaaacacaaacgccggcatgctgacaaatagaccatatatgttggattttggtcatgtctggtctgccacattgtagttggagaagatctcggatggcatacagagtaggatatcccgggccatcgctaagcattggtttgtattattaacgagttacactagatcacacaagaactatgtatttttgccccccatgtatggacctagttgtaattgcggttctgtaactgtcgatctgcccttcgctgagtaggatttagtggacatggaggctgtatgtgcttattcattttattgggcatgtcttctagtttttggtcaa

SEQ ID NO: 393427 - DNA, 544 bp, Oryza sativa
cctcgccattaaagaaacttgagctcgccaagtggagaaaggagaggtggaggagaggaggggaggggaggggaggtgagggacggagctggtgggtatgacgtccgcggcggcggcggcggggaggacgccgacgtggaaggagagggagaacaacaagaggcgggagcggcggcggcgtgccatcgccgccaagatcttcacggggctccgggcgctcgggaactacaacctccccaagcactgcgacaacaacgaggtgctcaaggcgctctgccgcgaggccggctgggttgtcgaggacgacggcaccacctaccgcaagggatgtaagccgccgccatcgtcggctgggggagcgtcggtggggatgagcccctgctcgtcaacgcagctgctgagcgcgccgtcgtcgtcgttcccgagcccggtgccgtcgtaccacgcgagcccggcgtcgtcgagcttcccgagccccagccggatcgacaacccgagcgcctcctgcctcctcccgttccttcgggggcttcccaaccttccg

SEQ ID NO: 393428 - DNA, 449 bp, Oryza sativa
tcgttgagcgggagaacaacaagcggagggagcggcggcgtcgcgcgatcgccgccaagatcttcgccggcctccgcgcccacggaggctacaagctccccaagcactgcgacaacaacgaggtcctcaaggccctctgcaacgaggccggctgggtcgccgagcccgacggcaccacctaccgcaagggatacaagcctcctgaacgcatggaagtgattgggtgctccgtatcaccaagcccgtgttcctcgtatcaaccaagcccgcggcgcatcatacaatgcgagtcctacttcctcctcattccctagcggcgcatactaccccttacttccttaccctaacaacatggccaatggtgttgatggtaatcctatcctaccatggcttaaaacactgtccaattctccatgatcaaagaaacatccacagcttcccccactatt

SEQ ID NO: 393429 - DNA, 715 bp, Oryza sativa
  unsure (1)..(715): unsure at all n locations
nnnnnnnnnnnnnnnnnnnnnnnnnnnnagctttggtcgattagtacttaatcaaggatgagcctcacgagtcgttaaacgatcaaatttttacacgagaacgaaggagttgcttaccaagggaacatccgatgccgatttaattaaattctcaacaggcgggaaccccatttacaaagaatttgaatatgcaaatgcgggggggccagcttcagaacgataaatatcataaagatcatctggcccacaaaaaaaagggtcatccttcccttccctggcaccatctattcaatcagccatatcagcagccccatcagggtctcccatttctgaatcggcagcagttcgttttttggaccggtgagacctgataaactcttcgatgcgcgacttgggctctgtatccggtatcaacatgtcttgcgtaaggggagaacggttgaacggatcagtactgtcacttagcaagggcctaacaataacgggacgatctattgtcacccgtgatgatggtagtattacaggatccttcatcagagtatactgaattggatcaagaaattcatctggtatggtcaccaagcatagcctcagcatccattgcctcagaagcagcagtttttgacttactgggcaagttgcataaactcctgtatgatttgggggtctcccccnaatcttccacaaaatatttgctggcacntggcaaacaact

SEQ ID NO: 393430 - DNA, 805 bp, Oryza sativa
ggttcatgcaagatggcacaccatggccaggaaacaatactagggaccatcctggaatgattcaggttttccttggtcacagtggtggccttgataccgagggtaatgagcttccccgcctggtctacgtatctcgtgagaagcgtcctgggtttcagcaccacaagaaggctggtgccatgaatgctcttgttcgtgtctcagctgtgcttaccaatggacagtacatgttgaatcttgattgtgatcactacatcaacaacagcaaggctctgcgggaagctatgtgcttccttatggatccaaacctaggaaggagtgtctgttatgttcagttcccacaaaggttcgatggtattgataggaatgatcgatatgcgaacaggaacactgtgtttttcgatattaacttgaggggtcttgatggcatccaaggaccagtttatgtgggaactggttgtgtattcaacagaactgctctatatggttatgaacccccaattaagcagaagaagaagggaagtttcttgtcatcactatgtgggggcaggaagaaggcaagcaagtcaaagaagaagagttcggacaagaagaagtcaaacaagcacgtggacagtgctgtgccagttttcaatcttgaagatatagaggagggtgttgaaggtgctggattcgatgatgagaaatcacttcttatgtctcaaatgagcttggagaagagatttggccagtctgcagcgtttgttgcctccactctcatggaatatggtggtgttcctcaatctgcaaccccagaatctctttt

SEQ ID NO: 393431 - DNA, 391 bp, Oryza sativa
tttttgttttggcaaaccataatggactccatgcatctttattttccatataagtttcaagactgacaactgtacctcagtgccaatggcaatctacatgtatggggctgtgaaattgacttcaaaatggtagcacttaaatttgttgtaagtagtatagaggtcagggttgctatcaatcagctaacccaaagaatagaaggcagctcaattaacccaactgcatcatatattcatatatggtgttattttttagataggtggtactcgaagcatcctagagttctggtgggggcaggcagaactgatagaactgtatcttcaatggcaaatcaaagattactggtgcaataatcccaccagatcatataccctggttgtataaagatct

SEQ ID NO: 393432 - DNA, 665 bp, Oryza sativa
  unsure (1)..(665): unsure at all n locations
gnnnnnnnnngnaattgtaatacgactcactatagggcgaattgggtaccgggccccccctcgagtttttttttttttttttttgtagggataatatatgaacatgtcccattggggcattcaacaatcggcaatgttcgacaagacttgatccatttgcggacttttattcccaacaagaaaagattaaccagaatattcaacaaaagtaacaacactgaaaccatcagatggtagcaattgtacacttgtatgagactctgtttctgctagcagaggaattttacaacgatgcaggagatgtcgtctttgcttttccggttcacggcctgctccgttagatgcttcgcagctgcctgagcatccttgaagtccttgatttcatccaccgcctcttggttggacatcaccttccataatccatcacttgcaagaattagaaaatcagtattctcgtctataggttcctccaccacatctggctctgaactgaagtgctctttaggtccggtctccaatgccttgcaancgcaactgacatcacacncgtaatctccggttattttgaaanaaacnccttttncccatgaatgccgncctnnttggtccctgcaatccgcccccggggatcctattctaaangccccccngngaaccnctttncc

SEQ ID NO: 393433 - DNA, 550 bp, Oryza sativa
  unsure (1)..(550): unsure at all n locations
nnnnnnnnnnnnnnnnnnnnnnnnaatgaaccatccactggaattgtagggataatatatgaacatgtcccattggggcattcaacaatcggcaatgttcgacaagactaaccagaatattcaacaaaagtaacaacactgaaaccatcagatggtagcaattgtacacttgtatgagactctgtttctgctagcagaggaattttacaacgatgcaggagatgtcgtctttgcttttccggttcacggcctgctccgtcagatgcttcgcagctgcctgagcatccttgaagtccttgatttcatccaccgcctcttggttggacatcaccttccataatccatcacttgcaagaattagaaaatcagtattctcgtctataggttcctccaccacatctggctctgagctgaggtgcttctttaggctccggtctccaaatgcccttgcaaccgcaagctgaccatcaacacgcggtacatctcctggtaagtttgaaacaagccaccttttttctcgattgaatgccgctccttgttggttcatgat

SEQ ID NO: 393434 - DNA, 327 bp, Oryza sativa
tttgtgtttttttttaaccacaggaaattgtccttgatgtccatttcacatttataataaagtctcatacacacatgaaatgtccttcttgccctttgattaggtcacctaataacaacacaaaagaagaggcacaaacactttggacacatgtagagagactagagagagagagcttactagagctaacttaatgaagacttgacacgctagctatagctatagtagactagtagtagtagttgcaatgcatgcccatggtggtggcgtcgaggagcggcggcggcagctggggcatcatgaagccggcggcggtgccgacggcgc

SEQ ID NO: 393435 - DNA, 482 bp, Oryza sativa
ggtgtttttttattttgatggtaaaggacaggtgatcattgataaggcacagaatgcctggatggcctgtaggcttttgtccaatgttgacatgattccacacatgaaagatcagtagtacaaagtatgcacactgctatataagctactttgacaaaactgtggccagaactccagacgccaagcgtggaccctgaaacactgggatgcaacattccgattcttttttggcacaaacccacgtttttttttgctgggaattcagacaattgtgactgcatacaccaaccaagggggcacacctaaggcttgccactagctcttgcgcaggtatttgctcacttgggctgcaagcgctacagatttggcattgatgtcgttcatcaggtactccctttcggcgcgacggcgttgctgtcgttctctcttggctctctttggggccaaccttgcttctctctccacataggctagcctgaact

SEQ ID NO: 393436 - DNA, 1073 bp, Oryza sativa
agaaattgggagagaaaaaagaaacccacactagtgaagggagagaggggggatcgaaaccctagggcggcgagctcggcggcgatggcggcggcggcggcgcggatgtcgtacatcgggagcgtgataagcctcacgtcgaagagcgagatccggtacgagggcgtcctctacaccatcaacaccgaggagtccagcatcgggctcaggaacgttcgctcatttggaactgaaggtcgtaagaaggatggtcaacagattccagccagtgacaagatatatgaatacatactatttagaggaagtgatataaaggatttacaagtcaaatcctctccaccagctcagcctactactttacacaacgatccagcgattatccagtcacattatccttgtcctgcctctacgagcttaccggcctccttgcaagcacagcagctgatcctgcctcacacaatggtcagtcaggaattcagatgcctccaccattgccccaatttcaacctggggccagtttaccatcatggaactcatcacctatgccatcatctgcaaatggcgctcctgctagcacaacaacagctgatcctggctcacacaatggtcagtcaggaattcagatgccaccaccgttgccccaatatcaacctggggccagtttaccgtcatggaactcatcacctatgccatcatctgcaaatggtgctggccttactatgccaccaatgtactggccaggattttatacaccaccaagtgggtttcctcatttgcaacaaccgccctttcttcgtccaccacatggcttgacaattccacaggccttgcagcagcccatacagtatcctggacttaatgcacctttaccaccttttcctagaatgccagagtttgctttaccacaacctggtagtggtaataacttgacccagaatctaggtgtatccacatcaatgccggtccctgccttatcaagtactccagcaactgaatcatctgcaaaccagcttccaaatatgctgtcatctgtttctgctagtgtattctctctgggtttaactcccccatct

SEQ ID NO: 393437 - DNA, 473 bp, Oryza sativa
  unsure (1)..(473): unsure at all n locations
ntgagaaataagaaataacatgactggttccatttagcacaggcacatcaaagtataccttttcttcccagctataccactaactggaatgaataccatcgtatgtttcaatcttgtcaagaaacgaataaaaatatcttcatgcggacagggttccaacaatagtaaaaaaggaaaaaagaatacagacgcataattgccaatcctctactttcatctacatagctgtgcaacaaatgcttctctgagctgcaccacattttaaactcaatacggtattctgtgcaggtttgccaaaacaaaaaatgctaatgatctcgccccatcaaccactcaaaggattctgtcgaggtcgctgataaaattggaggctatagatgtcagcttctttccagtttctccagccatattcttgagggaagacagatcttgagatgcctggaatgatatttctgtgatgagatccgcagcac

SEQ ID NO: 393438 - DNA, 638 bp, Oryza sativa
  unsure (1)..(638): unsure at all n locations
aaacaaaggaaagaaattaggaagggcggangagaagaagctagacacgagaggcggggcacggtaggcggcttcccgaagaaatctcctcctcctcctccggtcgccgttcgactccgatcccgaccagtcgccgccgcctccctcctcagcttggatcaaggaaaccaccccttcgattcattgattgatcgattgattgattggctaggcctctccaacaattttggttcccggaccgaggttaattcttgagcgctaggtgggggcgaggcgtcggatccagccatgatggtggttgatacggtcagcgccagcacctccctcgttgcccaccacctgttcgaccaaaggtccaaggcaaaccaccacctccgccggactctccatgtcgtctcctgccgccccctgcccactcacttcgccggtcgccgccttgtggccagggcgcccaggcagcatcaacctcgcctcgcggactggaccgtcaaggcgctcgcatgggggtcaccaaggaggccagccctcacagggagtaccggggatcccggtggaaggcgctgacatgggcgattttgggatcaccaatccaaaacgacgtggtctcccggaacagggcgatgatcccagctgcacaa

SEQ ID NO: 393439 - DNA, 514 bp, Oryza sativa
tcgctccctactacaaaaaaccaaaccatcaccacaaaaagcatcaaggcgagctcgaatcccggcggcggcggcggcggcggaggagagccatggcgtgctgcggcggcggaaggggggagggggcggcggcgacggagtcggaaggcgtacctggagggagaggcggtgagggaggcgcgggagctggtggcggagctgtgccgccacttctacggccaagggtgggtcaccggaacggggggcagcatcaccgtcaaggccaacgacccggcgctccccctcgccgatcagctcatcgtcatgtccccctccggtgtgcagaaggagaggatggtggcagaggacatgtatgtgcttgtcagcagatgggaaggtgctctcctcacctgtatcaaagccatggccaaacaagcctccaaaatgtactgactgtgctcctctgttcatgaaggcttatctgacgagaggagctggggcctgtattcatagccatgggatggaaacttgcatt

SEQ ID NO: 393440 - DNA, 684 bp, Oryza sativa
acagccacaaaaaaaaaatgcaagttacattttagcattacaatggctgcacgtccgcaacaatagtacactccttaaccaatacaaccaggtctaaactagtcattcaacaacccaaccggaacaatagttcacttatgaactaggcacttattttgttttttttttatagaaaccaacatataaatagttttttaactgccaactacagcctcagatcaatggaattgaagcctccaacatgccgacatagcaatgttacttcgggtcggaacggagtttgtgcggagtaatttctgggacaactctgtagatgtgcacttttatgttatccttctggacaagctcgaagacacacacatcaaacttctccagattgttgccaacagcaaatttgccccagccaccactgaaagaaccaacagaacgatcactgtagtagacatagttaacttcccaagccttcccttgtggatcccagagtgtgatccttttgttggtacggggaagacactcacggacaaattcacatgggatattcatgaaaaatccaacatagacatatgactccatcattatttgcacggcaaaaggattcttagatttaaactctcttgccctttgaagagcatggtccctctctgcttcagttaccggacgcctctgtgatattactgttagata

SEQ ID NO: 393441 - DNA, 298 bp, Oryza sativa
aagcaacagatgcaaatgctgaggcagggagcaacttttacatgacggggggtcttttctctggttttacttgggaagtaaaaaagggtctatgggggaagttaaaaatggaatgcaactaacaacagcaacgggtgtgtcagaggtgaaagatctagacacataagccaccacaacaaccacaagtaagaggggctcgctccgcttcctacacgcgcaagcacaacgacaagcttcagaaaacgcaaatgaaaaatcatcaacttggaatatcttggatgcagcaaatatcacggca

SEQ ID NO: 393442 - DNA, 833 bp, Oryza sativa
  unsure (1)..(833): unsure at all n locations
acnaagncaaatactcgtggtcgacccacgcgtccgcaacaagccaaccaagaagaggagaggagaagagaggagtcaagaaacgcaaaaggttatcaacagtaagtactcattgaagtatcacttcttcaggagtagtatgggtattgaaattgtacctcaatccttcaatgaggagctggattctactgttactatcactcctgctagtgacaacatagatgtgtctgatgatacaagtgttcctcatccatcagaagtgcctgccacagtaaatgttgttctagttgagcaatctgataattcaatctctgaacctttggaatctgatggagccaatggagctacagaaaatgttgttcccttggcaagtgagaagtctactgacaacaatgatgctatgaattcagagccagtgaattcagaaccatatgaagcatctcctgctaataatgctgaaaagggagatgtgatgcagcagagtgatgagaacaatggtgataaacaggagaatcaggatctgttgtctccaatggcagaaacagcaggaagtgacagtacctcagtcacatcgatggaagatgttcaagaagcaaaggatgctgctccatcagagacagatgatgctactggccaccctcctgatctgtcaaatgacaaagcttgtgctggaaatggaaatggaaatgtcttccaaaatgcaaagtgtgtcttgacaacttcgacaaagaagatgaagagaagtgcatctgcaactacaaggaagtcacttgcaagctactaatactgacgaagggaatgcttctactctcaccaactcggaatcatcaaat

SEQ ID NO: 393443 - DNA, 558 bp, Oryza sativa
  unsure (1)..(558): unsure at all n locations
tttttttttttttnttttnnnttcagtcaaagattcaataattatttattttcagaaaaactcttgagttttagggcaattgcatcccagtctctgaactcgtagtaatctccaatttaccaagcttgtgggactcaagtgcaaaagcaccaaacatgttagaactttacaccaaacttctattgatttgggcacaattagtaaatatagctttagattatcccaccgaaccagctttgttgaggtggcagcaagcccttatccaaccccggcatgccgagcctcggtgaggtcacttttagctttcatttaaaaatttcaccacatattatttagccttccggtttggttcgttgccagatcaaccaccaggcagccaagcagttgcagtagtagtagcaacagcaagagcacagccatggcgcagaagcctcagccgcaacagcagtagcagcaagcagttcgtccggaaaaccacctcaaaagagagaaatggcagagcagtagctagtagtccggcaccacagtcacaccatatctcaatagtagcagccatag

SEQ ID NO: 393444 - DNA, 459 bp, Oryza sativa
aacaggacagagctatattctgcatgcgctgaataacatgttcaagatgacagacccacatgaaaaatgtcagctcagtacgggctggaacacaacggaccaatttacaccagatgcccaccatgctaatgactagtggtccttggcttgtcagccacaatgtatcaccaccatcaccacaacttttatcggtttacttcgcttttcaaaattttatctgtacagggattgcaagaatgttgcccaaacttacagcagctactgagagagagagcacgctactgaagatggttatcacttgtaggtcagcagcaccgagttgattacgtgcatgatcaaacggatgttggtcgcttccgaggaactgcttgctggcagtgaccgttggtggttcaaaacgccatagacctgctcgaatatcggcctcacatgcacagggatcataggatctgtggactg

SEQ ID NO: 393445 - DNA, 569 bp, Oryza sativa
  unsure (1)..(569): unsure at all n locations
agaggagaggagggcgcacgcaccacaccaccaccaccgtcacaagcaccgcaatctctttctccctttttcttcttctttctttctttctttcttccccttatccccaagaaccgcgtctctcaagaggtggggagaggaggaggaggaggagaaaaagaaatccaatctttttcttttttcttcttgtgtcaagatgtcttccccgagcaagcgccgcgagatggacttgatgaagctgatgatgagcgactacaaggtggagatggtgaacgatgggatgcaggagttcttcgtggaattccgggggcctactgaaagtatttatcaaggtggtgtctggaaggttagagtagaattgcctgatgcatatccttacaaatctccgtcgattggtttcgttaacaagatttatcatcctaatgtggatgaaatgtctggttctgtgtgtttggatgccattaaccagccgtggagccaatgtttgatctagttaatgtgtcgaagtcttcctccacaacttctattgacccaaatcttctgacccattaaatggagaggttntnaac

SEQ ID NO: 393446 - DNA, 462 bp, Oryza sativa
  unsure (1)..(462): unsure at all n locations
gcaagaacatggggttccacaacaccgccggcgcggacggcaccaggcggtggcgctgcgcatcaacggcgacctcggggccttctacaactgccggttcgacgcgttccaggacaccctgtacgtgcacgcccggcgccagttcttccgcaactgcgtcatctccggcaccatcgacttcgtcttcggcaactccgccgccgtcttccagaactgcctcatcatcacccgccgccccatggacaaccagcagaactcggtgacggcgcacggccgcaccgaccccaacatgaagtccggcctcgtcatccagaactgccgcctcgtgcccgaccagaagctcttcccgggacaggttcaagatcccctcctacctcgggccgcccatggaaggagtactcccgccttcgtcattcatggagagcaccatcgccgacttcatcaangccggaagggctaaat

SEQ ID NO: 393447 - DNA, 544 bp, Oryza sativa
caggaggaagcgtgcaaggggctttttaccaggaacaataaaccaaagctgacattattacaaataatcaaacaaataatcaaagcatatttgtccttcagtttacagaagaaaacctgtagttgcagaatactcctgggtcgcagtacagcaattgcaggaatttgggatgacgggatgttagactttttacaaactatatatatcccagaatttttgttgagcttttttcacatgaaaaccaagcaacctacctacaaagaaatccgtggttaagatttacatttctgtactcaccagtttgaaggaacaatttgcaagggcacattggggatccctggactgatctaatggattggatggtactgtgggatcccccgtttaggtggtaggttccttaatatgaacagcaccaaagctgaaggttcaatctcaaccaacaagtagtagaagaagtttaggattggatggttcagaacatcaagatcggctttttttataaacgcatttaagcacatcattacgcatttgatcaagaagccag

SEQ ID NO: 393448 - DNA, 448 bp, Oryza sativa
tgtttttttttttttttgggagctgaaaaactcagtttctctatattctcaaaagctaactactaagtactaaccaacagattccaagaatctgtagtgggctactttctacatagtacaggactacaggtacagcacatgagaattgaacagggcacacctgcacattttttcatccacggcatcatccagttctacctcaaattgtgcaacacacgcccaaaaccaaccacaatatcaggtacattttgacatgatgagttctcaagttcttcggcgaaatctagaaaagaattatgggacgctattgatcgtcctaaaagaatatagcaacagatggatcagactcagataagctgccttcaaagtttaccttgcagctaccaggaaattgcagcccagcttgctcacagctctgccttgtgacctgagggcatgaccgaacatc

SEQ ID NO: 393449 - DNA, 700 bp, Oryza sativa
  unsure (1)..(700): unsure at all n locations
ttgtttttttaattgcacgggaacaacacgctttgatcgctgcaaacgttgatgtacgatgcggccaatgctagtagcttttaccatgcatacactatttagcccgttccatacaggacgtattagcaaggggaacttaaccaactttatgtagccagccagcgcgcagcacagcatgcatcatcatcacaaaccctgtacaactgccaaaaagaaaaacttcacagcttcatgtcctttttcaccacctaagctgcttcacccccttcttcctgacgaccgcgtcgaggctgccgtcgaccaggctgatctggtccatcagcgaccgccggatgtggcccggcggcgtctcggtgatgccggcgaggtacacgtcggaggagaggtcgaacttgagtgtggccagaggggtgttgggcttcttgatcaggtcatcttccagcagaatctctgctaccctggacagtatgctgaatgccaccccaacaagaacccttgagtaggcctccacaatggcatgccccacgtccacattgtattggatctttacaacttctataaaagttggaggaangctcgggaatctggattttcagaagctgcataagtgttcaaacctttctatgcacatgggaaatcttatcgagttntgatgaactatccttcatgaaattccagggaatgnctttcctggggaatt

SEQ ID NO: 393450 - DNA, 615 bp, Oryza sativa
tttttttttttttttatgtcacgcattcagcatgaattaaatctcataatttcattatgatatccagttatccacatatatggacaaagcggacaaatgccggcatttcatccgctaatgggaagaaaaggaatgaagatatatggtatatagctatcagggaaaaagatacaaaaaaatgtacatttgttgatttatggtcagcactatgcaaccatggtgatctcaaggcgcaagtatatatcatgtctgtaaatatatctttttcaaaaaagtttttacatctctataggcagtgagatgcatgctaccaaggcttcaggtcgcccaccggtccagcagtccagttcagggccctctccccgggcttcaagaagacgttttcgccatgtggaagcttgcgagcgagaccattcagtatctgatggaatgcatctcctgcctgagcaggctgggggaacagcatggcctgcttcatcgacgggttcgcgagaagcctctgcttcctcaggataacatctgttggtatggatgtcaggatactgtccagcttcggaacatcctcctcggcgacaaacacgccaatctcctcccaggggatagcatcagcaaagg

SEQ ID NO: 393451 - DNA, 617 bp, Oryza sativa
tgccgccgcccccccggcggtggccgcgggggaatcggatccgaggaacgaggtggaggaggacggcgaggagttcgcggtgtactgccggaggggaaaggggaggagaagggtggagatggaggaccggcatgtggccaaggtcgccctcggcggagaccccaaagtggccttttttggtgtattcgatggccacggcgggaagagcgcggcggagttcgtcgccgagaacatgcccaagttcatggccgaggagatgtgcaaggtggacggcggcgacagtggcgagactgaacaggcagtgaagcggtgctacctgaagacggacgaggaattcctcaagagggaggagagcgggggcgcctgctgcgtcaccgctttgctgcagaaaggtggcctcgttgtgtctaatgccggagattgccgtgccgtgctcagccgcgccgggaaggcagaggcgctcacctctgatcaccgggcctcgcgcgaggatgagagggaagaattgagaatcttgggttgattcgtggtgaattacccagggacatgggcgagttcagggatccttagcagtttcaagaggcatcggtgattcacacctcaagaattggttgtgt

SEQ ID NO: 393452 - DNA, 798 bp, Oryza sativa
  unsure (1)..(798): unsure at all n locations
nnnnnnnnnnnnnnnnnnnnnnnnnnnnnnnnnnnnntttttttttttttttacttaacaatctttttcaaattaataatcaataatcattacacagcgtaaacataatcgagctagattgcaaaaaatacgagcatgcaatcaaatcaactacaggtgattaaattaacgaactgcttattttgttacgacgtcgatcaatcgcctccaaacggtagccagttactgttgtaaaacacacaattaaatgagcttagagttcgtcgtggtggcggtgctcctcgtcatcatcatcttcgtcgtcgtcggtgaccttcttgatcttcttgggcgccgggttcggcgaggtcttgatggggtaggatgcttccatggcgatgccgcagagtccctccttggcggacacgtcgcgcttcatccggatgtagcccttctcaccccagtctgcgccccacgagttcctgacgatccagtacttggtgccgtccaccgtcgtgccgtagcccaccgccgccacgccatggtcgagctccgtcccgcatttcccggcgaacaccccctccgagtagaactgggaagtgcgaagccccccgcctcgatcgccaccgacaccgggctgggttcgccaccggccttcttcaagcgccgactccggagttcgccggcaacgtccttcgtagccgtcgaatggtgacggcggggggcgacggccgcggagctcttgcaggagtnctggtgagcgcggtacgggtaggcggagcnatgcgcgacgccgccgtgctctcgngtncagcgtcc

SEQ ID NO: 393453 - DNA, 477 bp, Oryza sativa
gtgtgttcttctgcaattaatttaccttgtctttctccatttatatcacctatgtcaagtgggctacctgctccgataaaagtagctgctacagctaaaggtccctttgttcctcctgagaacctactaagatttcagcctgagactggctggaaaggctcagcagccacaagtgcatttcgtcctgcagaaccaaggaaaatttttgagatgactctcagcgcacctggcattccagtttctgatgctgcagataaacaccgcccagcacttgacattgacttaaaatgtagcagatgagcaatttcttgacggaagatatcttctcaggagttctgttcaggacaactggttcggaatctggcaacactagaagaagcaatggtcctgtacgaagtgttggtattgaacttgatttgaacagagctgatgaagttgcagagaaccattttgtgtcgacactcccacagggtcgaa

SEQ ID NO: 393454 - DNA, 727 bp, Oryza sativa
tttgtttcttacaatggaaatggcaccacttaaggcatatataattaaaaaaccagatcagcaaaatttgtgtgcctcggtgtacaatacagatcaacagcttacaaaatctggcatgcaaatctaagctctcaccacgctatgaaaaatatcccctttgcaactgtaagctaggaaagaatatgaccacaacaggggaagaatttgggagccattcactgtccatttgttgtttattcaagccgtttctttgaatatacggggaagcacttcgtggatgctaatgtccaggagctcaggactcctgcataatactcgtcccttttcagttgtgctagggacaaaccatatcttccgcagaattggtgactcaaattgcacaaagaaaccatcactctggtcaagcttccattttcttgatccctgtcctttccagacctgagggtacgagatggcgctcttaggtgctaccatacaagcagcctttgagaaagactcctcggaatattgccgcaaaaatgtgaagcaactgctgtgagtgtggggtgagtcaaaggccttgtcaatgttaaccactggggcatgtttttcagtatcagtcttctggtcatcaagaagaaaattaactcttgcatctacttttccggtgtcatgccagacctttatagctgattcaatcacattaacaacaaaagtgaagatactttgccccagttcggcatctgca

SEQ ID NO: 393455 - DNA, 707 bp, Oryza sativa
  unsure (1)..(707): unsure at all n locations
nnnnnnnnnnnnnnnnnnnnnnnnnnnngggcttggacttaccgaaaatagcaacttcttgatcttattactattaaaatagtcctgccttaggttatccaaatctattggaggtaaggttgacaatttctttgtagctcactgattcacgtggtcctggctcatttctttgaggctgtggaggtggttggatgactggtggttgaggctggattattggtatcatcctaggctctgatggtcttggcttctcaggctattagatccgagatggctattcatgttcttcttcgtgaatagtttgaaactgtttgtaatccttgccttttgccaagcgaagtgccagttcttcttggaaagaaagacctcgctttatatgagattttgaagcttcattaagttgctaggactaatagacaggccgttctgtaaaagaagcgcttagatttatcttcggctattcggcattgcttctgatttatatgaaggattaggtaagaggaggtggaggtgggggaggaggcaggttgaataccggtggaggaggtggtacagcagaaatactaggggcaggtgctggaggaggaatgtttgttggcacaactcttttttggtctggaagttgctgcgatgagatgcccaaggcctcactcatacgaggtggtggagctacagctccgttattttcagcaggtttgaaaactgat

SEQ ID NO: 393456 - DNA, 514 bp, Oryza sativa
  unsure (1)..(514): unsure at all n locations
nnnnnnnnnnnnnnnnnnnnnntttgtttgtgactttctgaataatttcttcatactaatataaaggaatacatacactccacggtttagtccatctcatcgccggcatgatctgttctaattaacagatcccaagatgaatttcgccctcggcagaaaaactatttacaaggctcttccgtctctcacaggctactaaacaaaaacacagaggaccaaaacatcggagagaaatatccatcaaagaagaaaataagagagaaactacaaagtcgtcagctaacccatcctgagctagttctctaccggcggcggccggttcagatccagatcgaaagctgccgccttgttcgccgtaaccgctggaggtgacggcgcgagatcaaccaccgacgaggagtcggagtcactttgtgcaaccgccgccacggtgaccggcggtgcaagcttcatcatacggtatccagcctcagctgcggcagccgctgcagcctgctcatagaaaaagtaagga

SEQ ID NO: 393457 - DNA, 641 bp, Oryza sativa
  unsure (1)..(641): unsure at all n locations
ttttttttttttttttgttcagntggcattccaacttagcttaaggtgtcaactgtcaacaacccattgcataaagctgttctacaatatataactgctacattttagtcaacctatactacagaagtatcagagtgagacatcagctgctgattatgtacacgtttcaggcatccagtacaacagtagcctgatttccagtaccagtgcagtctagatataaaaggtttgtgtgcaaaagaactcctaggttatacagaacattatccaccattcatcctgcacttgatgtctggtagcgttctccaatactgattcaaagattggggcagtactgcagccaaagtaccccacgattcaggcagaatgctcaagatctcttcctcttttcgctctttcgcagacgtcctcttcttcctttacggggcgtatcatgtatttgcagcttagcagcagcagtcacagcaactgagccaacattttcctgagaaataaggcctgtgggacatgtgacatttttatttggtataacgttctcagagaatgtattgtcttgnaacctcgccctcttgtagaccttttttgttgaagcactagttggaattacgatcactttgccaattccgtaatcgcctgactgt

SEQ ID NO: 393458 - DNA, 517 bp, Oryza sativa
ggtacatggagatgccatctcaattctcaagctaggatggtaaaaaaatccacaatacagttcaacacaacagggccaacagctaacaaagaagcaagacatgattcatgcgaaacatacagttcaacacaacagctagcaaacaagcacgactaactcattacatttatataataccatgatgatacacgaaggatgcatagaaccggacggaatttctcctgtcctcaaagagatgaataaggcggtaggtgccccttctcccgtaggcatatcagtgtgttgtacaaactttcttttatgggggtgaatgtgaggcccaagtctctcagcctttgattagagaacttgaaaggttggaccatctgcttgctgtcttcacacttgttacaggtgattggatactgtggaaagagttctctgatcatctgaataagctcggaccggtgaagcacactagcaatgcagagataacgcccatgcgccttggggtcttcatacaccagtgcatgtgcac

SEQ ID NO: 393459 - DNA, 763 bp, Oryza sativa
  unsure (1)..(763): unsure at all n locations
nnnnnnnnnnnnnnnnnnnnnnnnnnnnnnnnnnnnngacaacaganttagaccatcgtcatgaattaatcaaggtacaaaccaatggttgctggtacatcagtagcaaatggctgtagcactagcgtgcccatatttatattccaagcctccaaggtatacaatacatatttgatgtaccgaacaactgaaaaaggcgcttggtttggaagcgcactatttttaaatttataggataacttctgacagcctttcttctaaatgaacttttggcaaccgctctgaagccgtgtaacacaatccaacaaagcaatttgcagtcaaaatttcgggcatgtgccgttctagttagaatttaggatgtgactcactaagtaattgtgattgtttctctatgcaaacaccagccaacagtattgatttcatcatgcataatctggcatgaccttcttgaggaatttaattggttgggattcctcaggcgcaacctcatcaaagggaacatagtatctatccttgtcgtaaacatggcatttagtcagtattgtcttcatcaagcgccagttccagctggcttcattgatgtacttgccccagttctggtttatggaatcataggcagcacgaaggttataacttggaattctnggagaaatatggtgtggaacatgtacatttatgtcatgacaaagtatctttatccacccgaggataggtcacagtgaactggtgcccgtttaattgngcctgtgcagcattncac

SEQ ID NO: 393460 - DNA, 463 bp, Oryza sativa
ttttggggttttttaaaaaattgtttttttttttttttttttttttgatgataacatattcatctaagattatgccaaatcaaaatctccaatggtacagcacaatacattgctaaatgagggaactactcttgtttcttgcagatctcatcttgtacccagtacacaacagacctaaccctaaacactatagcaagcacaaaaccaaaccagactgaacattctgaaacaagaactactttcctttttcaccacccaaagtgtagctgattccacattccagtaaataatatataagagattcagacagagccttagcaccaccaattgtggtctttttgtacaggcaaaggggcaaaggctcccagttcttcactatctcaaaactggaacctgctaggttgagtcttggtcatccatgccataccaaacggctcgtcggtttcgatcctcctggcgttgc

SEQ ID NO: 393461 - DNA, 631 bp, Oryza sativa
gcggccgctgtttttttgtttttttttttaacgagggaatggcatcatcatcatcatatatgtagcaaataaacatggaacatgctattgttctttattcagacaccgaacaattaactaatcatgtataatatagaagtttgctaaattaacatagacactctataagggaatctctcagtcagcagagcccaacacttccaagctccaaacccagaaacatacaaaagcttcttctgacttctgcaacttccctggtaagagtaatatgcagcagcacaagaacagagtcttcaggatcattctttccagccacaacatcgcagtccttacttcagcttgtggatggtctccatgtccacggcctcgttgagggtgcctttctcgacgtgatcccaccagcccatgaggaagttgtcaacaaccagccggaaccagggagacagcttcaggccttcctctccggcgtccgctttgcggatgagctccttcagctgctcacggctcacgtatttcacatcggccacttcgtccgggttcgggactaccttcacgtcgcggacgatgaacagcaggtagtcaagctcgtgttcaccccattttccatcagatggggccttgtaaaccatta

SEQ ID NO: 393462 - DNA, 625 bp, Oryza sativa
gagaataaaagcatgtgtggattatctgcagggtaatgctagttctacagcatataaatctgaaatctcacttgattttgcaatctacagcagttctcagtttatgtatcaatcagggaagtaatatgaatgacaggtgaacttgtggtggctaccacagggtaatgagctcctctgggaaggtaaccatgccacgaccgagcatacactatgctgtagcctgtagggtcgtccggtgttagattgcacagtgaaggatgatgaaatcatccatagccactcatcccaagcaatcatccagctaagttagccaatcatatcagatgcaaccgtcacggccagccaatctcggaggtggagaacatggcagtgacaggcctgcacatcagattgaagagtgtagatcatcaaaatctacccactttctctcctgcagtaccctgggagaaggtatctgtaccgatcaacattctgtagcagatagctaggaagatgaacagcagaaaatgtgcttggaatcggccccaacttggcaatgatctcttggaacgtgtactcttcaggaagcatgtcaaaaagatccgcccccctgcatataacatcttgaatcctttcagggatcaag

SEQ ID NO: 393463 - DNA, 429 bp, Oryza sativa
cagcaataatggccacaatttcaacgggattttttaacatagcaccacatttaaccaggcccaagcctcacaaaggcccacatggtcaacaacaacacattacatgtccatcaaaagcaagagctttcacaggcccacgtagaatctctcaacctgaaactgaaggccacctttccctacttacggagtataaggtgggcatatataaccagccggctagaaaacgggcggcgaatcacaccaacacgaagatttacccgatgacccgatgtaataaattaaactccaagggcccccatcggcttcatatagagaaatgatgggcatctttctgtttcttccccactgtaattgcacggggaggggggaaactggggaaggtatatacagtgttcgaaaacttaagaaacgaagtcccatgaaaataaa

SEQ ID NO: 393464 - DNA, 611 bp, Oryza sativa
  unsure (1)..(611): unsure at all n locations
cactaacgtgcactctcaacattcatcatgcatacaccaaattgaaaaggggacgtgactctcaaaaagatggaaagggagcgtgcaccaacaccatctctgaccagagagtgtcggtagaactgggcaattccctcgtgttcatacttcgtgtagtaactttgcagaggatgaattcaaagcgcgtgaactagctagactctgatgtttatctggtacatcattgagtaattacattgctgagcaaatgccataaaacaactcagataatacagcaaatggatgataccctactagttgatcaagattattcgttcaggtagatggttatccttgctctagagtttcttggcagattctgcacatctgaaactatcctccaaaaccatgtttttgcattaggtgcattattatactgagatgtgctgattctactagggaactctgatgcatgcatgtactcacttgattagaaagtttgttcttcttggagccatgcttggccttgaccatctggttcagtgcctcacggcaacggggaatcactcccatcgactcttccccccgtctggggggnttatcaccagggncaacgtcgcgccaccagcagc

SEQ ID NO: 393465 - DNA, 492 bp, Oryza sativa
  unsure (1)..(492): unsure at all n locations
ttngggtgaggcttctgcacgagcggtaggccgtcctcccagcagaccagccgtgctccgcgcggcaggatgcttgggcggccttgccgccgtggctgcgtagcgtatgagcagctttggaccggtgtatgctcgcaggacccccgccctcgtgcggccgactgccggctcccgggccccgtcactccacggccgtccacgcgccgtgccgccccaggcttcaagagatgcttgcgcgctgctacccgtcccacgggcagaggtgctcgcacacgtccgccgcgccgcgggcgccccaccgggcgtcccgcggcggctcgacggcgcgagcggcgtggcctcgcggcgcccggcacccaagcgtgccggcgctgccaaggccacctcgcgcgtgccattggtcccggatgccgcccacgatacaggctcacggcggccccgccccgtgcctacccataagcgagatgctctcggaagacgacagcccgcccg

SEQ ID NO: 393466 - DNA, 621 bp, Oryza sativa
gctttggaaaacccaattacagcagaggagaggacagcaagacaacaaatagtatatcaagctaaacagatgggtaggcgaagtataagcaatgccaaaacctttgcagtcatgggcctgattttctctgccgctgaatgtgtcatagagaaggctcgcgcaaagcatgacactaccaattcagcggtggctggctgtgtcacaggaggggctttagctgcaaaaggtggtcctaaagctacatgtgttggatgtggtggggtttgccaccttctcggttagcaaccaagaggtggattcagcacccaaaacaacctttagtccattttaagacattcactcattgacatgtcttctgaggtcttgcagaccaagattttgttattttacgagtgttacccaacatcgtaggcataactggagtaactgcgaggtctacagaaatcgacctttaatacgaggcaatggttttgagttctgcaatatgttgtatcattctcactatacggctgctatatttatcttcgcaatccgtatccaatttgctgttatcttgtctcacgttactccaattctttatttctactgatctattgtttgacaaaaaaaaaaaaaaaaaaa

SEQ ID NO: 393467 - DNA, 522 bp, Oryza sativa
  unsure (1)..(522): unsure at all n locations
tttttatagtatggataaaggtgataatacacaggtgacataaaaattggacagaacagtgtcgatggagcatcaacttcagtcaaatgatacctctgagccaccatgttctactacagaaacaaccaaggtcaaatatgtcagaggagttgctgtgccattaggaaaaacaaagtctcttgttgagagatgggaaaagagagaggctactaatgttgagtgctcaccaccaactggttcttgtggtgaccgtgcagtgagatctgatggtccttcctccttttcagcagaaccaagtcaggcatatgagaaggacttgtcaacaattgatgaggcgatgattccaatcaatttgatgcagaaccatgatgaatttataaatgccggaaaatctcggctgacaaagttagagatgatgcgtcatgtcttttgaccaaaatggtatcaaaggagcgattgctgcagtggcaaagttgcctgacaatgctgttctagctgatgttgttagtactctgaaggggn

SEQ ID NO: 393468 - DNA, 372 bp, Oryza sativa
  unsure (1)..(372): unsure at all n locations
ccggcagcagcgagtggcagaccctgatggagtggtgcggcttcgagcccgtgccgctcagcaactatgccaggagccaggctgancttttgctctggaactatgattccaagtacaagtattcacttgttgagttgccaccggcgttcttgtccttggcatgggagaaacggccattgcttactgtgtctgcttggaggtgagggtagtttttttgggagtatttgggggaatgcgtggccttgtgatagatcctgggacgaattagctaggagaaggaagttggcagcttctgctgtagtttcctccaaaactgtgtttaggatgattggtataattgggaaattttagctgntttaaaaaaaaaaaaaa

SEQ ID NO: 393469 - DNA, 433 bp, Oryza sativa
accatataacctactaaattcgtatatccattaagcctcctcaagcagccttggtatgtatttacatgtacctgattttcactcatagctagctccgatcgaactcgatcttcctcgcccactagagtaaatcccaaccaacaacatagccgaaagatcagatgtctcactatacatgcttcagctaaggccccacccccatatccgatgtacacatgatatcaggaactggaattgattcaatgcccgtaatttcatctaagcaaattcaattccctgaggatcctactctagtgtacccgattgagccgcacaaacttactgagcatggaagcaagaaccttcatccattgcagatggcattgaggagcacatgccccagcatgaggtccacgaaatactggtgcccgaccttgccatcccgccataacaa

SEQ ID NO: 393470 - DNA, 458 bp, Oryza sativa
gatatgatgatatcggaattaataacatatatgtatatatatccgggtagaatataacaacacgagggaatgattagggaagaattaatgggtataggagtagctagctcggaggcggttctggacgaaggaacggtagaaggtgttgggcgtccagttgagggggatgacgtcgggtgccaccaacgtcttgccggagtcgctccggatgcggatggagaatggcgcccgcaggcggtggttggagtccagcctccacaccgacccccacgactcccgcatcggcgtccaccttcctcctccggcgccggcctccttgaggtccacctgcgccacgtctccgtcgccgttctcgtactccaccagcaccgccaggtacacggggctggacccttcctccacgtggaatcccaccttgaaggcccgggaactcgcacggcacgcgcgcgaactgcacg

SEQ ID NO: 393471 - DNA, 456 bp, Oryza sativa
agagaactcatttcaaatagagtgaataggggtcgaatcctcatgtcattacttcttaggaatcaacacgatacctatcaagcacaagttcacagctaaggaaaacgttcttcattcccctgagaatccttattttgctgagaggccaagaccggaaacagattattgagaacagcctctaaatggaatctgggactgaaattattgaggcaaaataaacggatcaactgcaaaaaatgggaatccttagtttccagctcttttcagactcccagcacgcccagatatatacatacaggcttagcacaaatgtatgtacagatatttctgaagccacaacgttagaacagctcaaaaccacactatgttagttggtgcccagaatcattctgttccagccctacctagacttctcattgtgcacctcgattgtacctaaatcaacctatttctaaa

SEQ ID NO: 393472 - DNA, 689 bp, Oryza sativa
  unsure (1)..(689): unsure at all n locations
ggaccaacaaangtnngttttccctaattcatatcatcagagccatcataaaggatagaatttattactgtgtttcacccatagttttccagtgacatggatgaaaatggatttctaacattacaatgcggaggcaacatcaaatacactaggtttacaacatgcaagagcagtatatggtccttttggttcagggatgtaaatctaatctaccatatccaaactgttgcttcaatcaatcaaagtcagtataagcttcctgagcgacgtgggttcgattctggcctgatgggttcaccggtgtagggatcaaacttgtatggttcccctgtgaatggatcaaaccttacttgttggcgcgcagtagagtattcagcagatgacctggagctgaattctgggactatgtttgtgttgtaccttgaagcagataagtatcctccttccctagatgaaaaagctacttgagctgatctctcaatattcgaattccgttcttgnacgtaccctagattgagatgccttccagtatcctgtcttggttcatgtgcaaatcttggttctggatatctttcaatgcggactatttcctnttgccgtgatcttgantgnnggatatnttaaaagatcaggacngggttcntnntacattanattcgcncgggggancngaccagttttagagcgcc

SEQ ID NO: 393473 - DNA, 559 bp, Oryza sativa
tttgtttcaagggagaagtatgtgagttttattatatatctattaatatagcgcagcagaagtctctccaactgttttcagtaaaaaaaaaaagtatccgagttttagatgcatggactcagcacaatctttttattatcaatctaccatacgtagcaagtggttctcactagcacaaattgagtgaaataatccaggctagtctgacatgtacagcaacaacattacagggcaaattatgatttaccattcaccaaaatacacagtaaatctgaatatctccgtgcaagacgagcatcagggcggcaggaaacttgaagaaagcagcaacccaaccactgactactgactgagcctagcattgtccatacatcagtgtattcgaagatagttggctcgaattataggctcactgatccaacagttccaacaaaccacccaaagaaggaactttgggagaaaggttgtttcctactccctccctccatggacagagaagttgccattatttgccttgaagcatcgttggctggccgtatcacaaaccgggtagtcatga

SEQ ID NO: 393474 - DNA, 707 bp, Oryza sativa
  unsure (1)..(707): unsure at all n locations
tataaagaaaattataaaaagcggaggcggctggagtgaagtgggcgagggcgcaaaccagagagaggtcacgagattatcgccggccatggccgccgcatcgtcgtcgcgtgttctgctcgccgccgtcgccgtcctggccgccgccctcgcgggctgcggtgcgggggcggcgctggacgacccggcggggctcctgcggcgtgcgaaggaggcggagttcgcgggctggatggtggggctgcgccgccggatccacgagaacccggagctcgggtacgaggagttcgccaccagcgagctcgtgcgcagggagctcgacgcgctggggatcccctacaggcaccccttcgccgtcaccgggtcgtcgccaccgtcggcaccggcggccctcccttcgtcgcgctccgggcggacatggacgcgctcccgatgcaggaaagtgtggaatgggagcacaagagtaaagtgcctggaaagatgcatgggtgtggtcacgatgcacatgttgctatgcttgttgggttctgccaggatacttcaggaacaccgtgatgagctgaagggtaccgtagtacttgttttccaaccagctgaggaaggtngtngtggggcaaagaaaatgatagatgatggagcttttggaaaatatagaggccattttttggggttcatgtttctgatgtttgtacctatttggtgttggt

SEQ ID NO: 393475 - DNA, 548 bp, Oryza sativa
ttatgaactgttcgaggtggtttaaagccatcacaagtcacctccaccaaggatagtagatccgatgcttctcatagtccaaacacaccaaaacgtacagctgatcgagaaaatcaatggaagtacatcatggacggggtctgaagagtcgatctcaccaaacccgtcgcagagagatgcacaaagtgaatatggaagactagagagttctacagaagataatgaccaatctataagtgggtctggaactgttgtactgcgctcgccaagagcatcgcaggtgtaccctgcagctactaaccacagttccaagcctcccagtagattctcctcgtatgaagacacgtctatcagtgggacagtcgttcggaatcaaattgaagaaccagaaactccacgatcttcaaggtcgagactgggaatccaagaaaagtcaccaaatgcttcactggaggacagtgcaactaaccttgcagaggcaaaggctgctctccaggctgcgtttaaaaagggtaatgctcgtgaaagacatgttatcaacaaacatg

SEQ ID NO: 393476 - DNA, 435 bp, Oryza sativa
  unsure (1)..(435): unsure at all n locations
ctcatcacttcaccacgtcgccttcgtcttcctcctccccaacacaaacaaacacaaaaaaaccttcgccgactctcgctcaactcacctcaccaccggaggcagcttagcttccttccttcctcctccatccatggcggaggagcagtccaaggcccaggcgggggcgaaggccctgtcggagccggtgcgggtcggggggtccgcggcggaggccacgctctccggcggggagctcgcggggcgccccacgggaggcggcgggggaggaggggaggcggnngaggttgagctggagtccgaggtgctcggggtccgggtggacgggagggcgctcagggtcgcgaccttcgcgaggggcgacgacgcggcggcggcggcggcgcggccggcgacgtgcgggggcggtgagaggaggagggagagggaaaggga

SEQ ID NO: 393477 - DNA, 785 bp, Oryza sativa
  unsure (1)..(785): unsure at all n locations
tttttttttttttttttcgagtaataatctctccaaaatcaaaattatttatgaagatcacaggtttgaaaatgcaagttgttccttcttactaagatttagcngtggagtaagagaagatataaagngggggaacaaacgtataacacctactactcatatagcagagcgaaaagagggtagcatacaggctatacatgaatagcgtccaaaaatacacgggactccgacccataaacccagtcactatccgacaccaatcaagcgcgacatcagggacactcgaacacccaagaatcggggcaggactcatgactaacagaacaaaaaaaaacatatggtcttttttttcgccaggaataggcggtattatggggggcaaggtgaatgtggaggactgggaagccaacaccctcacttgcacttgaagccatggcacacggacaggatgatgatgaggatgagcgcgatgatgatgcccaggacgatcagcttgatcttcatgttttgtaaccacatctttcgccgcacctttgtaccctgctgtctgaaatcttgtgcctgagatctcaggttttcagtcttgtcgacaagcagttcaatcttctcaccacggtcaagaaccttctcaatgttttccatcataactcctttgacctctgaggacttgtgctttgacctttgcaagcttgctgatttcctcagggtggtccanacaatactgcatgtgctccttaagttttganccgaattctcggttgaggctgtttgctgcagcagtagct

SEQ ID NO: 393478 - DNA, 594 bp, Oryza sativa
  unsure (1)..(594): unsure at all n locations
tttttttttttttttttcaaacaactttgtttcttcgatctcatgcaaagagacagaattacatttcttctgttgaacaaaagggatatatatttatggatattgctaccacaaggcatgaatcatgaatatgaccttgtcgtacagtttgctcatgtgcacatcagcacatacatatgtaactatctagaagaaccaagaaagtatatattggatgcatacaaaaaaaaattgaaggggattaatcgcaatgcgcatgcactttagccgctagagaagtgtttacatacatgcatgccagattctttagctttatggatcacttctcattgatgacgacgtcgtcgtcgtcgttaatctctccatggagcttagtatccttggaactgaggtggtggaggtgaggcgtactggtgcgccatcaccggcggtaagagtacagtagtgtcgaacgccggtggagcttcagcttccattgctggtgggaggtttagantcctttgcaggtggagcttcagcttcctttgctggtggcggcaatgactcctgtttcggtggggggaaggagacctgcggaactgggtgggggaaana

SEQ ID NO: 393479 - DNA, 511 bp, Oryza sativa
attaacagatctcgaaagagaatggatgtttctgccttggacatgctgcagttccattggtgggattatgcaaaccctggatatctggatgcactaaaacacatcacagacctaaaggaggaaggtaagataaagacagtagctctgacaaacttcgatacagacaggctgcagataattctagaaaatggtatcccaattgtcagcaaccaggttcaacattctattgttgacatgcgtccgcagcgaagaatggcagaactttgccagcttactggagtaaaacttataacgtatggcacagttatgggtggtctgctgtctgagaagtttctttgacaccaatgtatctataccttttgctggacctcctctgaataccccatctttgcaggaagtataagcgggatggtggatgcctggggtggctggagcctgttccgggctttgcttcagacgttgaggaaagtatcattgaagcatggtgtttctatcttaactgctgctgtga

SEQ ID NO: 393480 - DNA, 796 bp, Oryza sativa
ggataaatccatcatagttgcaaagtagtttgaacattatacaaaggagtatatacactaaaacatatgttccatgtttcgagcagctaaacgttttcaggattttaggttccagatttccaatcaacagggttttccgttatcacgtattcaattctacaaaaaaacaggctgaatagagcagctgaaataccgtataaaacagaaaactttggcaagaacacaagacgcgccacattatgaagcctggatttggtatgaaacaacatggattcgtgaccaacgaaaacattccatacacagctcctttctccaccacccacggggatactggactggatcagtttacaaagtaaaccaacaaactcccctgatctaaagagtccaatacttcacgcaaaatgaaaagcggcttgctggtcaagccagtttatgatatccagttgataccgaagcaccaggcccacagctaaacagtagttgcattgttcaaatacacagatcgcctcgggcaagcctctcacgttttccttgcgctccagatgcattacctcagttttctttctgcacatcaggggcatcatgatacacaggttcatcctcaggcacagtgtgcagctcatctgttggccctgctgcctccccgtcggcacctgcagcatcatcggggtaacgaacaaccacaaccgggtagacacagtgatgcacgcactaatcactaacacttccaagcctccccttcccgcccttccgcgaggcacccaaaccgcggctttccatgatcatagcggacaag

SEQ ID NO: 393481 - DNA, 341 bp, Oryza sativa
  unsure (1)..(341): unsure at all n locations
nnnnnnnnnnnnnnnnnnnnnnnnnnnnnnggacattaaaaatccaaatacctgtatatttacagatatgagatagcccagtagcaaaagttttatgtcaaccacatagccttagagcactggtctgaactctattaacaatgcaccggagcattcaaccatggcagcagcttgatcctaggagaaagctactcatagnntagaacacttttgttgagaagccatctttcggaattccncattttctttttgggccttctcgnggcgctttttgagcttgcggatctcctaatttantcgnagccttgnttcagctgccaacctctctgtttctagncttt

SEQ ID NO: 393482 - DNA, 666 bp, Oryza sativa
  unsure (1)..(666): unsure at all n locations
agctcgccgccggtgccccgacactgcggcggacggagactgcgggagcgaggtggccgcgcgcgangaggctttcctctacctccgccgcatccacccctcctcctcttcctcctccacgatcacctcctccccaccctgcccagttcggctggtcctctcccgcccgccggcttcttggttcctcttcaagaaacaatcccggccatcgatcgccgattccttcgagggctctggacacctgctacaccttgaaatacctaagttgctctgctgtatttctcaatggagcatctttccgaggaactgatcatagagattctcaagaggattacaaggacaagtgatctgaattctgtctctcttgtgtcgaacgcagctctacgccatcgatgcggggcaaagggctactatttgcattggttgtggactttcaacagaagatttctcagcactttgttcccggtttcctaatttgctcaaagtagagatcgattactctggttcgacacctggcaatgggaaccatattgacaaccaaggtctctttgttcttacatctttgtgtactttgcttaatgatattaccttaagcttttgctcaaaaatcaatgatgctggtattgcttgcctaacttactgcaagaagtgatgtctctgaagctg

SEQ ID NO: 393483 - DNA, 682 bp, Oryza sativa
  unsure (1)..(682): unsure at all n locations
nntttttttttttttttttcggatcaactcctgaaatttctaatatattgaagggatgatatttgaacattacaagctcttggcacactaaccaccacacacttcccacaatggcatgttactttctgaatcacaaaagaaagcaacagaaacagccatacatagcttcaggtagctttagcctaagctcacaatctcacattactcaacctaatagaaacttcaagcttactaccaaaactagtggcctcctcatacttacagaagaggtttatatatctttcgaccacaatcactaagagattcagaacaacatcagactgacaatgctaacaatgccaagcagcagcccaatacttgccttcaacccagcagctccatccaagccccagacgcgcacatcatcgattcactggcccacagagcgagctgtggtcgtcgcttctcgtgttgtaatacacactgtagaacgctacccgcgtcctctcagctcgtgctgtgaatgtcacattcgcagcctggcttgtggcattacccatgggcgagtagtgggaagttctggggcctggtcacctgcgaatgcgcatgacagccattggtgggctgggcaggaatcccctggctgagccccaatggggaatgtcaggctgtaactcttttctgagggggtgtctcgaccanc

SEQ ID NO: 393484 - DNA, 456 bp, Oryza sativa
gttcaatcatatcatgtgcattagagaatatagtaaaagataatcggtgttcattgtcaatgccgtagcttcgccatgacaactccaatcatagggcagccaaaaatgaacaaagggcagtaggtattgaaattgttgcacccagaaagaatagttcccaagtacgagacaaccagtatgacaagggtgcttcttaagcaggagttgcctgcctcctagaagaggcaatcagatctcgtaattccacgtgctctccgctattagctttggcgctttgctttggtcagacagatcaaatgacgctgcgaccttgaaggaggcaccgatcttggagtccctggtccagtcgagggcgaggagcttggtggaggcttggtaggaggccttgatggcatcccctccttgaaacttgcgggtgaaggaaaagttccaggcgttgttagcggtgtcgaagca

SEQ ID NO: 393485 - DNA, 453 bp, Oryza sativa
  unsure (1)..(453): unsure at all n locations
tttttggttttttttggttttgcggttttttttttcttttcaggggcatacattgcccattcttgattaatttacccaaagtcgtccatcttagccttatactacgatcgagagcacacacgctaactaaatttctgagaccaaagccaaacattccgcatcggcatatgcggggcaaattttagggcgacacgtcgctcgaacttgtggtccttgacgaaccggccccggttccagtggcgcgcgaggacgctggcccatggcctcgagcggcacgcccttggtctccccccctaatgccacttttaaacgccgtatgattaccagccacaacccttttaacaggaagggcccctacttgaagcaacacaccatggttaggaagcactgnncactaagaaaattttggcccaggttggggggnaacagaccccctgccccgcggtcctgacc

SEQ ID NO: 393486 - DNA, 415 bp, Oryza sativa
tatgaccgcgcgtaacccaccgcggcggcggacgctctataactactggatcccccgggctgcatgaattcggcactagctcgtctcccacacgggcaaagagattctccatttctcccggcttcctcttctcctcctcctatacataggcgtcgccgcgtacgccattgccagcctcgtcccaatcccaccacctgcgccacgcgcgcgcgcgtccttcgggcaccctcgcaccgcaccgtccgttggcgcgcggttggtggggcggtggtggtggtggtgccttggctaatttggccggctctcctccgggaaaggatggacggaacgatacgaagaacaaagattctccgggtttcaagttctcaaaaacccctgtgggttccgggggcggggggtctgaaccctaattttc

SEQ ID NO: 393487 - DNA, 678 bp, Oryza sativa
  unsure (1)..(678): unsure at all n locations
ttaagcatattgtggcaagcatggcattgagcaaagaaaggctgacttactacaattacatggacctggggaggtcaagaacatgaaacagatgagggttgacttggaagtattacgccttatttgtgagagagttgtgaaaagagaaaagttgaagaaagacttggttgtatgtggacatgatacacttgctgcaagaaggaattctattgcctattcaacccggacttcatattgtggatctggacctggagcaagttcagaatctgcaacaacttctgtcaataactcatatagtgggttaatgcaaagaacagatgatgtcgcggttgacagtattatttccaggaaacctactgttaggttttctctcaataacagcgatgctgataggaacacagctgacagttcaacatcgtcaatatcgtacaagcagaagctggatgaccgggaatcacttgctgataagaatcttccgagaaaccagctactgcatgagatatcagagagggtgagcaaatcatcggtaaaaagaccacgcctcaaagagtatcgctatactcgcgtagcgcttgtcaaagagnattggtagattagaggcctggtggtagagcaccaggtggtctcgtggtaccaagttttagatctcatgtggagccatcagcacgcggcaagtga

SEQ ID NO: 393488 - DNA, 581 bp, Oryza sativa
cacaacagctcatatcatcatctgttacagtcagttgcaactatcatcaacacactcgctctattcaggaaaattggcaacacagcaaagaaaaaacccgagtcaacagacctccaacgctccaatgaaataacaaacttacttcactgttccttgatctatacctcatcatccccccccccccttcaccgaaaatggccaaggcaaacaaatctacatcgtctgcaagctgggcgccgaggctttttcggcgagcacttactcaagtaaacaggtggccctgttcggtggtctctagctctcttccaagctgcatgtgcacaaatttcctgtgcttctgcttgttgatcctggcgcttaaccttctcacctgtgattgaacccagaaaatctttgcagagaaccattgccaccaatcatatgtgactcaatccttctttcttggcctaaatgcattctttcaggccaaacagaattcaacctccttgcgaagtcctccacttctctgtcaagctgcttctgcattgcaggatcaagtccatcatcaaggtcagcatcttcaaaggggtactcaacatcat

SEQ ID NO: 393489 - DNA, 489 bp, Oryza sativa
cagcccatcatattatattcatttatattagtatcaaataacaagtgtgctaagcccatataggcccaacattcaaacacattaacaacccatatagcacaacccgacaaacatccaatacaacacaaatcttacaaccaaactaggttcagtcgggtgagcaaaacataacagtaccaccatatccctagatagcaaaacaaagttctacatcactgaccatatctacaaagttccaatcatatcttgcccttcttgtgcaggattatcaatgaacttccatctcagcaataacattctttacaggctcattaaaactcgtattgctgttgcaatggcacatcttgaaaagatcaaatgcagtgggtggagcatccttatacttagtttgcttcttttcttttttagcatcagcagatacagtttctttcatctggctagctgtttctgtggccatggaagaagtgtgaggcagaatgagcttatcag

SEQ ID NO: 393490 - DNA, 508 bp, Oryza sativa
ctagatcgcgagctgccgtcctttttttttttttttttttttagccacagaaagaaacaattcattccatgacattcattagacgttctggcttacatcaacttctgtagaatacaaccaccatctcatactaaataaagagagatgtgaaggaaggacagggaaaaaaacaaccagagacccatcatgataaccctaaacaaagagcaacagcaattcagaactcttaatctttcacctaaagttagttttgaccggagactatcaccaaccaaaagcacactggactgctaaaatcagaataaaatcactctcaattgccagagaagaaacccttcttcctcgctgggctccgataaattagtatcgctataagagaaagaacagcaccaccaccatgagcccttaccatgtggttgggcgccggatgagaaacacccctcctggttctttcaccaggcaccgacataaaaaaacgccaggtgttactaacaactacctactacca

SEQ ID NO: 393491 - DNA, 436 bp, Oryza sativa
ctgatcacatcaaagaatctttattgttatagcttattggagtatctgtccggctgtcggctcataaatcctagtattctagatcaagaaaaccatatcagcatccttactagttgttacccatgggacatcgcatactagaatcaaatcgagctgtcagcaagaggcgcacatgctgacgccacactagaacttccagtagaggggaggactggctggagaatggtaggcgcagctgatgatggtttgctgtcgaattcgcggcattgctgggttagacgctctcgttctgcacctggaaccatgcaagccccggttggccgcagcgtcttgattcaggcatgggtacaattggccccaagaatatgcgccacaggtcgaggattattggtacaagcacccctgcacccaaggcgtcgacggccactctggaaag

SEQ ID NO: 393492 - DNA, 738 bp, Oryza sativa
aagaaaatagttaatatgtatatcccatcgcaacgggaccccgttttgtagcagccctcgtgattattcatgattccagggaatacataatatactggatataaccttagccagcggcccgtttaggcccgcgatatacaggcccattggcccggcccagatacattgcgtgggggacaattccggcatcgacgggatagattcgccggtccagccgccgccgccggcacaacccgcagccgccgccagcgagcgagcgagcgagagagacagagagagagagatggcgctgaccaacttcgtgctgacggtggcggcggtgggcgcggcggcgctcctcttcaccaccgacatccgcaagtccggcgcgatgttccgccgcaacgcccgccagattcgtgcctggctcgaggaggaatccgcctccgccgcgtccaggtaaatccacggctcttgctctcagctttcgataggcgccgctgatgcgggggagtagacgatctcgatggataatattaatactggttttatcattcctgaggcaatcgttgattcatgggagaaattgttcggttggtggatttgaagtgtgatgggaattgggataggggccaagtcgaattaaggttcgatttcacttggtcccttcgaagtatcggtgtttgcttggagccttggatacaaagtcatgggtttagtagttagggttaggattctgaacccccgacttttgcagat

SEQ ID NO: 393493 - DNA, 269 bp, Oryza sativa
tcgtggtagagtactcggcttttaagtgcgactatgatcttttacacatttggatgaagcataaaattcgtccagactcttggtagagtctataagaccgcgactgatcctcaagggtaatgaatggaaaaaatagcatgtcgtaataaaatcaatttcttattttgcgattcttggaacggaatacacacattctgattccctgcctctaatgaataattggatagagcctggctccaattctggtaaaacaaaaagcaaaaaaaaaa

SEQ ID NO: 393494 - DNA, 657 bp, Oryza sativa
  unsure (1)..(657): unsure at all n locations
gaattgtaatacgactcactatagggcgaattgggtaccgggccccccctcgagtttttttttcttcctttttgaacaaggttacagccctcatatttggtatataaaataaggggggtggggggtaaatttcagtcatcagctacataggcacatctatgtcatttctcctagccggaccagttaactttaatcccatggcaacatctgcatctgatacacatcaagcctttttgcatccacatcaacaagagacaatgcaatgcaatgcaaggtaaatcgatcatcaggtttagcaaagcaaacatgcgttgagctaagctacaacgctacatgcaggcagttcttgatgatgatgatgtctcagcccagtctttgccggattctcccttggaagcagcatgatgcctccttgtggccactcccggctccaccagagagactgctgcttgctccttggtatctggacagcgcccgccacccagtcttccagcttgggcacagctccagaccccggaaaggcctcccccaattaacttaaccccngnanacctttttttacccgaanttaaaaaatgccgntttttttttgcggaaaccttnccnggggggggaaggggtttttcccccccccggattttttccccccacccccgg

SEQ ID NO: 393495 - DNA, 479 bp, Oryza sativa
  unsure (1)..(479): unsure at all n locations
ttaaaaantattttnattnttannntnaacaacatgatcatttgaagttcaattgctgcaataaacgaagcaaaaatacaacattacatgaagtttgacaggctcagcaacctgaaacaagaaacgctctggaacaaagctggaaaactgtggcagggaaccataatctcccagacccacacagctctctcccaacatctctctacttctcacctactccatctcactacacaaacctagaatggaaccacatatggcaactgatagacatgaaggtctggtaaatgaatcgccctaggctgcaatgagaactgctctgctggattgagaagtaagcggatcaacaatttctctgcagttgccaatgccagcatcaggtttcctcgtactatcaagcagccaatcctggtccccgagatccatatcatccatttccatagacggaggatcccaggtaacaaataaaatctttgaacttt

SEQ ID NO: 393496 - DNA, 497 bp, Oryza sativa
tttatcccatccactccagagctccccgcggcacttggcaccaccaccaccaccaccggcatccggcggcgcgggcggtgatggcgaccatcaccacgcagctccggtcggccctcctctcgccggcggcctcgccgagccgccgtgccaggcgcgccccgtcgtccgtgcggtgcgactcctcggcagcgtcgtccctgtccgcctccgcgtcgctcgacgccgacttcgacaagaagcagttccgccacaacctcacccgcagcgacaactacaaccgcaagggcttcggccacaagaaggagacgctcgagctcatgagccaggagtacactcagcgacgtgatcaagacgctcaaggagaacgggaaccaccacacgtggggccccgtgacggtgaagctggcggaggcgtacggcttctgtggggcgtcgagcgcgccgtgcagatcgcctacgaggcgcgcaagcagttccccgacgatcgcatctggctc

SEQ ID NO: 393497 - DNA, 807 bp, Oryza sativa
  unsure (1)..(807): unsure at all n locations
tttgttttgatataaccaaggggatctactaccatgatggcattaatgaacaatcaggaattcagaatactgttctgtagacaggatacaatggcacacctggtcctacaatatatcaagcaacacctgtgattatgtactgatgaaactgactttcttttctatttctccttccattcttctctccaataggcgataggcgaacaaaataaatacaatttgagatgtaacaggaaaagctaggggtgtagtttttgtcatatgaaatcttgttcttggtcgtctgttcggcgcgacgaagtatctccgtcgagcattctcttcgtcatgttggccctctggacaagacgaaccaatgcttgcaccacctctgacattggtggcctgaattctggttcagggctggacacacaaagcgagcacgtcggcaaaccgggagagagacttggcagggtacagacccttcagcgcaggatcgaccattctgtccaatgcatcgatgtcatggagctgtggagtcgcccaccggcacaagtgactgctctgacctcggtctagtgctatcgaaaggtctgcgtcccgtcaaaagctctagcatgactactccaaagctgtagacatcgctcttcagtgtgtactgaccagtcatgtccacctcatggggcatgcacccagcactctgttgcgctgcctgggaatctggcatcagaaataaagcttgcaagtccagcatctgaaaggtgtgggattggaatctggaatcccagtagaanggtgggatgacttgnaaatcctaagggatgaagg

SEQ ID NO: 393498 - DNA, 390 bp, Oryza sativa
agcatcaaaacagtacgcactggtgatggtttaccagatcatctgtatttttttttagaaaataatactactatatcatctatattagtgtaggaaaactggtagcacagctaacatttgatttcaagacagcatcccgaatacattaacaattgacaacatttttttttgttatttctaaacaacaatcctcaagcaaatattggtgtttgcaacctttttcttctcatcattcgtcatcactgtcaaaaacgactgcctttccgacgatgaactgcctgttgttttcttggaggagaattcatcatccgagtcgatctccttgcgcctttgggctggcactggcacccccaagattctctcctccgttttggttccttgatttttttc

SEQ ID NO: 393499 - DNA, 648 bp, Oryza sativa
  unsure (1)..(648): unsure at all n locations
cgcccccgtccgtagcctggagaccctttttacgggccgcccttttttttttttggggaccacaaacgtcaccattcaagattctacattatatttgtttatacagcaggggttcagagtacaagattggccgggtagtatatcaccatttgagcaaaacagactgagcaaatgcaacataattttcgctgtgttaaggcactcaaaatggaacatgggggatcaattgtgttatctgcaatctggcaagcgttttccgcggacgtgttcaagcgacggcttggagagctctctcgaagttatcttctgctgatacggcacgctttactagcacatgatcggggtgtgatagtttcagctggctgaggtatcttgatgacggtttgccaaggtggagattacacacaataagattagcaagagtttcaggatcttttgcatccttgttcaatgcttcgagtaaaagagtctcagcctcatcaaagctccccatgtgcatacagcaaactgccttgccatttagaaccattcctgtcatcgggtatttttcagcaaagccttggaatatgaggtaagcttcacggatctttagagccaccaacagcaatgtccagccatgngtttgcaagttgtgtnagtgtatgggcc

SEQ ID NO: 393500 - DNA, 663 bp, Oryza sativa
ttttttttttttttttgtaacaacaatccagcagaatataacaaaatgtcgatgctgaccacaaacgtcaccattcaagattctacattatatttgtttatacagcaggggttcagagtacaagattggccgggtagtatatcaccatttgagcaaaacagactgagcaaatgcaacataattttcgctgtgttaaggcactcaaaatggaacatgggggatcaattgtgttatctgcaatctggcaagcgttttccgcggacgtgttcaagcgacggcttggagagctctctcgaagttatcttctgctggatacggcacgctttacgtagcacatgatcggggtgtgatagtttcagctggctggaggtatcttgatgacggtttgccaaggtggagattacacacaataaggttagcaagagtttcaggatcttttgcatccttgttcaatgcttcgagtaaaagagtctcagcctcatccggacgcgtgggtcgacctcgagggggggcccggtacccaattcgccctatagtgagtcgtattacgcgcgctcactggccgtcgttttacaacgtcgtgactgggaaaaccctggcgttacccaacttaatcgccttgcagcacatccccctttcgccagctggcgtaatagcgaagat

SEQ ID NO: 393501 - DNA, 467 bp, Oryza sativa
atttaaatacacattactaaaaaatcatttttaatttcacgcggtttgagtcgcatgtttgcaccaaaaagtctgcgaaaatagtgattttatcatgcgggtggagcatccgtatgcaaaaatccaatttatgcatacggtgcttatatcgatcacatacaaacattggaaaataataaaggggaaaatagcaagaaaaaaccaaaccctagaccctagctccggggcccacccactttttcgccggcgctagctgccggaggccgagcccaccgtcgcccacgccagatccgccgccgcctggtgctgtgcctcccattggcgccagatccgctgcgtcgttgccaaatccatgcaggagggaggcggtggagccacccagcggtggaggaggtggagcccaagggcgtcgaaccggccggtgctcgccaccgtggcagatctgccgtgccgaaattggatccacg

SEQ ID NO: 393502 - DNA, 563 bp, Oryza sativa
tctttgtagagagcattgtgattggtatgccacacagaggtaggctgaatgtcttgggaaatgtcgtgaggaagcccttgcgacagatcttcagtgagtttagtggtggtaccaagcctgccgaagaaggggagggcttgtattcagggactggagatgtcaactaccatctaggatcttcatacgataggcctaccagaggtggaaaagcatatcccatctgtctctgggtgcaaacccaagtcatttgggagcagtcgatcctgtctcttgctgggaagaccagagcaaaacagtactattctaatgatcttgacaggaccaagaatttaggagtcttgttgcatcggtgatggcagcttctcagggcagggtctagtctaggaaaccctgcatctcagtgctcattcccaaacctacacttactgcgttgggacaactttcacattgtggtcaataatcaggttgctttcactactgatccaagggcagggaggtctttgcagcattgcacagatgttgctaaagcattggatgctccaatttttccatgtgaatggtga

SEQ ID NO: 393503 - DNA, 624 bp, Oryza sativa
acgcaccaagagagaaaatttaatccaaacagattaatccacatagtaaagtctcaggttttactacaataatgccaatcacggcaagtagcttagcatagtcaagctgacaacatcggtaagatgcatctccatcctccaatccaagcagagtggatgacgagttggttgtgcagcagatgagtgaaaaattctagcatatgaacttcagcatgggcagtcagttgtcccggtaaaaaaaatagctatggctcctcaagggactccttgatcagcttctccgtgagggatttcgggagtcccattacactgtcgatggtgccaacaatagcttccacaagaggtgaagtcagcgggtgctctaccagcaggccaccggcaacatagaagacatcgccctcctcaatcaaactctcaacaacttcatcgggtatcttatggaaataaacttcagctttgtcccatccttcctttctggctccacttttcacattagtaacaagaacagatccaattgtcgctgcatggctttcggagtatcctttgatgaactttcgtgcctcttctggggtgctaggtttttctctaatcactccatcatgaaccacaacctccatcagaaag

SEQ ID NO: 393504 - DNA, 526 bp, Oryza sativa
catccttacataccagtagttctacttttatttttctttttctagtttttgcgatgagcttgtacaaataattggcctatagtttatatggatctgcctgatccttattattatccactttgcatcatttgctacaaattgtgcaatacatcatgggtctgttccatatagcagtatatatttgtttcaaaaagaacaaagtacaaggctgatcctcttcttttataggaaaaagagtttcttctggtccttttggtgcagggtttgagaactttactggatggtccaaatgaaggtacacatcaaatatggcccactgaatctctcatttgagaagccagttcttcaagaatggcgggtacacacatgctaggtaaacatcttggaaggatcacaggtataaactaaagatactgcattaaaagaacttgagtatacctttacataaaaggagggttagttcacatgacaatcttaggcttcaggatgcttgacttgatctctttgtgcgggtagaacaacaccg

SEQ ID NO: 393505 - DNA, 522 bp, Oryza sativa
  unsure (1)..(522): unsure at all n locations
nnnnnnnnnnnnnnnnnnnnnnnnnnnnnnnnnnnnnnnnnnnnnnnnnnnnnttttttttttttttttccaaattcactgttttacatggataaatggaaggaacaggcaaagaattattctgcatattacagtcaggctagctacctaagcaaagttataacagcacagctattgtacatgaccagcaactagactacaagtcacaccaaagtcaagcacaacaactaggtgtgtgtggctatcaaattgttaacaaccttgtactacccccaggtcaccagttcattgttgcggtgccctcattgtacagacccaacacagcccaaacggcaatgttgggctagaaagtcctgcatccataacactaacacaagcgaccatcacatctggtccgctgaattacttctcgtcaccatcagcatcttcctttgaattttcctccttagcatttttgtctttgtcatcttcagcattgtcttcctcaccttcctcatcatcagacatactatttattacttc

SEQ ID NO: 393506 - DNA, 281 bp, Oryza sativa
  unsure (1)..(281): unsure at all n locations
nnnnnnnnnnnnnnnnnnnnnggaagttaaagagtaaatattttatttgcacaattgataccagtttagtacatttgaagagagacaatctatcttaacaagaggtttgaagcatggacatgtacgggctgtgcagggaacaacccaacagttttcagcattgtgagcctccagcaatgaagatacatatttctagcctggactcgttgttccgtttttgcttgatcattatgaatttgtaaggttttaacgaagaaatcctgcattaaccgttcttagaa

SEQ ID NO: 393507 - DNA, 599 bp, Oryza sativa
  unsure (1)..(599): unsure at all n locations
nnnnnnnnnnnnnnnnnnnnggcaaccaaaaatcgatttcagatttattgacaataatacaggtatgagagtctgaaatcatttctaaccacttacaacacttacaacagcggctaattacatgcgcaacttattcgaagactcactgaaaattcacatttttcctaatccaaacatggcaagtcggatatctgacgtactcactgaggatttggtgggcggctatttgcagcagaaactctggagccccactcaagaagctccttacttgtgtcatccttgtgtacaatcacctctatgaagcacaagcaatccttcttangtccctgagcttcttcaattgcttccttcagtcctcctcngttcngaactttgccgtgttaccacttccccccnccantatngaacgcctcccccacaccggtgttttcccaatccttganaaaattgttaggacgtcctggtttnccccnccangggttccccccctgtttaaaagnaaaaaaacntttctgccccaaaaaaatttcaaactctttttccgcccnnaaactccntcccaagaacaaaacctttctttnnccttttttcccaattnn

SEQ ID NO: 393508 - DNA, 712 bp, Oryza sativa
  unsure (1)..(712): unsure at all n locations
aaaatacgacttcactatngggcgaattggttaccgggccccccctcgagttcgacccacgcgtccgcgccgccgccaagacgagtcgcggctgccgatctccatctggcgaggagagtaggggaggggatcctgttaaaagcttccatccaggaatggcaatggcattgagaagagtactgaaacatggtgtaatcccaagagatgcagctcaagtagttggcataagaggatttgcaattgcaagcaaggcaaagaagggcggaaagggtgcggccgatgctgctaaaacccctgtgctcagcaaagaacttaagagtacaacagtgtttggggcaaatatcctcaaggaggggtctgatccgaaactccagccagattctgaataccctgagtggctgtggcacctgctcgacaagcgcctatgctgagtgagctccggaggaaagatgccaagacgctcccctatgaagacctgaaacggttcgtcaagctggtgacccgagctcggatcaaggagcagaatgccctcactgcaaagaactgatctggatactctctggaggttccatcatctgtttttcactacatgatttactgttgaaatatgctaagctgtgcactgtaataatgtagtgacctggaacattagaatatttaagagatgcttcctaatttttgttntctggcnnnnnnnnnnnnnnnnnnnnnn

SEQ ID NO: 393509 - DNA, 577 bp, Oryza sativa
  unsure (1)..(577): unsure at all n locations
ttgttttacagactaaaaggggattattttttcagtttttacacaactccgttgcagctgagcttgctgccgttacaacgatcggtagccctatacaacaaatcgatccgtaatacgcctacgtcgccatacgttacgtacaccggacacgtactctgagtgcattctactctcgtcgaacacgagcagagaagctgctgattttgctgcttaattcgatccactacacgacggccttcgctggcggtatcacgatcgggctcctcacgacgtgctcgtcggagacccacttgaggtttcccctcgacgccggcgacggccggctgccctgcccaccgcacggtcaccgtgaagctctgcttctcgtacgccctggagaagcgcagcaatggcgggtgcacggtgaccgcgacgttcttgggcatgtccaccacggcggtgtacacggagttggccttcccgacgttggtcacgatgcggtggacggtgatcggctgggacagcagcttcaccaccagcgacgggtagttgantccgcctcggtgatggccttgagcttggcgcaggagnacgcggn

SEQ ID NO: 393510 - DNA, 472 bp, Oryza sativa
ggagccacacgaatctaatggccaccgctttccacaccatcgccgccgcccgcccccgccttcctctcgctgcgttcgcttgcctctgccccggcccccgccccgccaccagaaagcttagcctcacctccacggcggtctccaccatagactccgcgcccgctagttcgtcggacgccaagaagacgaccaccgtcttcgtggccggctcgacgggccgcaccggcaagcgggtcgtggagaagcttctggagaggggcttcggcgtggtcgccgggcacgacagacgtgggccgcgcccgcagaagcctgccccaggacccaaacctccagctcgtgagggctgacgtcatggagggcacagacaagtttggtcgatgcgatccgttggcgccgacgccgttcgtctgtgcgaaggggtttccggcggtcgtttcgatcccttttgcttccatgggaaggtggacaactt

SEQ ID NO: 393511 - DNA, 392 bp, Oryza sativa
acgcctcgtcgccgccgccgccgccgccgccgccgcgcgacgtcctagcttcccggaccgcctccgcgtggttggatccggcgagaggggagaactgttgtgttccttggaagcgggagctggatgaaagctgggaggaagaacctacggcgggcgtgcagcgagggcgccgtcacgctgggggagggcgagagcatcatgcaggtcctcgcgctgcgcggctccaacgtcatcgaggtgatggacgccaagggagtgaagtctctggccttgttcccggccaagttccagaagagcttttggatcaagaatgggaatttgggggttgttggatgctagtggcccgggatcaggcgctcgaatcagggagcaagatagcctgtgttgtgtcc

SEQ ID NO: 393512 - DNA, 682 bp, Oryza sativa
ttttttttttttttttataataccaatttcagtactttattcgtcaccatttcagtattcaaacaatgtggtggcctattgcctatgttcatacaatgatgtgtagcaaatacgtaagaactaaaaagtaatttacatgtaattgaccgcactgttttctcgactctattatgtacttttcaagaatctgaaatctagcgaataccattaattctttgaaggacggagattccatggagaagaaacagcgaatgtgattatggacgcgacattgaggtatatacttttcttcatgacttcatttcaatggatttttcttgctccccatccgccatgtacatcggaagagaagaagaatgctaatttcaagatcaaaacactgggatcgatcaataggctcggttgttgaatgagtccgacttttgcagcctaaattgctcgtaaaatttcgggatgaactcctcggcctgcatgtcgatcggattcgggctgcatccaccggcctccctttccggagaattcttttcttcttcctcggctttttttccatggccattgacgttgacaagctcctgcaggtcctgggcggacgagaaactgctggacatgctcatgccctcgctcctgaccggcgacggcgggtagtactccaagtggccgacgaggcggagcgggcccatgc

SEQ ID NO: 393513 - DNA, 515 bp, Oryza sativa
  unsure (1)..(515): unsure at all n locations
acagtccaaaaaagttgagctctttgatttgccgtttactaattcagtgtcattgtacagttcgaacacgtaccatcgaacttattaatataccttagtgctcccattggccaattgatatacatcgaactggaacagtttttccctgtgccattcaaatgtttttggcagacggagattgggttttatcgcagtaatggaacgcatgccctttcaatctattccatttagtttcctatcatggtgaaaaatggtggcgtgaattggatcatccgtattgtccgtctccaaatctgataggcatcaccatagaatgactgaaatttgatctatagccagtaagcctgtgccaaccgttccaaacagagtatctccacctcactggtgtttttgagcttttgatcgagatgcattcttcctcatcgtccaaaatgctgcgcggtaccgattctgcatcattgatttcatatttgcagngtatgtggtatctatcattttctccacctccatcacaa

SEQ ID NO: 393514 - DNA, 637 bp, Oryza sativa
  unsure (1)..(637): unsure at all n locations
cccatttaatcatctcctcgcgcccgcgcggcggtaggccactagcccaccactaccactacgcgctggtagttacccgcccctatnaccccgngcntcggcctcgctcgctttcccctacttccagcgatttcatcaagaaccacctagcgagagcgatgaccgagcgagagagagagagcacggcggcgatggcgtaccagaggggggagacgtcgtcggtggtggaggcgttcacgctgtcgccgctgccgtacccggtgatcctgatcctgctcatggtgatgctgctgctgggggtgtcgtggttcttcacgtacgaggacttcatggaggaggcggcggacagctcagctgggcgctgctgctcgtccccgtcgcgctcgtcctcctcatccgctggatctcctccgtcgacaccttcgacggctacttcagcttctacccaaccgagcgccgctggaaccgctacgacccgggccccgccgaggggagctccccatgggggcgtcgccatggtcgtcctgctcctcctcgtcctcgcctccttccactccaccttccaggacatgtggaagccctgatcagtgattctactgctactcgtcgtctttgatatccgcacgcctatatgcgt

SEQ ID NO: 393515 - DNA, 713 bp, Oryza sativa
  unsure (1)..(713): unsure at all n locations
aagaattgtgtcccagcagcgcctagaccaggtgttncaagagagctgaagtggggttcgttttgaaagtgatttagagctattagattcacctggcatttttgccaatgcgaataagtgaccagacagctgcaatcaaacttgctatatgtgatgatataggagaaaggtcgtatgactttgctgatgtggcagcgattctcgtacaggtgttagtgagacatccagctgtaggccctgaagcgtttcgaagacgctataggcttgacatggacagcgattgtggtaaaatgtttgtgacaaagctctctgttcacttgttcaatggagatgccagccaagcagccttccgcatcttgtctgactaccggaaaggcaaatttggctgcgtggccctggagagacccccaacatgagcaatggagatctcagatattcttagatgttaatagctgctctttgttcatagtaccacacacaacaattacagtgccctttgtagcaaccgtcacagcacgaactttcagatgtaggaggatgcaaaatgaattggcaatatggccccctctgtctagaggaaatgtagtgtggtagtaggtagttatttgaatgtaaatgaactgagctgatttgtaccaagatctttgtaggttgctacaatttcatgtgtggatctctagtttagagcgtccttgacttttttttttttaaaa

SEQ ID NO: 393516 - DNA, 732 bp, Oryza sativa
ggctgtgacctagctagtcgatcggtcatgtcgtcgcagcaatggcttggtgacggcacggcgcggaggtggagggagctccatggtgagagcgactgggacggcctcctggacccgttcgacctcgacctccgccgcaccgtcatccgctacggcgagatggcgcaggcgacgtacgacgccttcaaccacgagaagctctcgccgcacgcgggcctctcgaggttcgccgcgcgccgcttcttcgagcgggcgcagtgccgggccactccgcggcgtaccgcgtcgccaggttcgtgtacgcgacgtcgtgcgtcgccgtgccggagccgctcatcctccggtccgcgtcgcgcgcgcgcaggtgcagggagagcaactggatcgggtacgtcgcggtggccaccgacgaagggaaggctgcgctcgggcgccgcgacatcgtcgtcgcgtggcgcggcacggtgcagtcgctggagtggatcaaggacatgcacttcgtcatggtgccacccaagggcctcctccgggacaaagcttccgacgccatggtgcatcgagggtggctgtccatgtacacctccagggactctgagtccagccacaacaaggacagtgctcgagatcaggtgttgagcgaggtggcgatgctggtgcgcatgtaccacgaccaggaactgagcatcacggcgacgggacacagactcggtgccgtactcgcgacgctgaacg

SEQ ID NO: 393517 - DNA, 660 bp, Oryza sativa
  unsure (1)..(660): unsure at all n locations
gcaggagcccttccttttcgcggccaccatccacgacgacatcgcgtacgggcgcgagggggcgacggaggcggaggtggtggaggcggcgacggcggccaacgcgcacaagttcatatcggcgctgccggaggggtacgggacgttggtcggggagcgcggggtgcagctgtcgggcgggcagcgccagcggatcgccatcgcgcgggcgctggtgaagcaggcgcccatcctgctgctggacgaggccaccagcgcgctggacgccgagtcggagcggagcgtgcaggaggcgctcgcctccccctctgggctcccggccgcaccaccatccgtggtggcccaccgtctggccaccgtccgcaacgcccacaccatcgccgtcatcgacgacggcaaggtggcggagcagggctcgcactcccacctgctcaaccaccaccccgatggctgtacgcgcgcatgctgcagctccagcgcctctcccactcccacgttgcgccgggcccctcctcctcaacaacaacacacggcacctagtattcgttttgatacaacaacatgttcttcttttgctgtgtgttcttgctgctgctgctgctagatgttctaagaatgaattaatgaaatgaattactatnnnnnnnnnnnnnnnnnnnn

SEQ ID NO: 393518 - DNA, 500 bp, Oryza sativa
ggttaaaatcatgttttatttccacaagggttcaaatgcagaaaagaatcaaagatgggggggggtcgttgaacacgttgacataaccttgctgatctagaacctaaaataatcagagagacagaatggggaaatgcagatgaaagcataagaaagcttcgatctatgcttcgatctgcatgttccaaggcatggtgaagctcttgcccagcggcaatgccagccctcccacctccaccatcacgctcttcttgtgtccctccacgtcgcggtgcccgtgcaggtccgcctcggcacctgcaaagtacggcctcgacgttgcaatggcggtgcgttcgcgccatcgacatggacggcgaggtccctgcctgttccctccagtccgagcacggacagcttctcgatgaggagccccttctgcaagctgtagctgcctagctccacctccgacctcaccgtcaccgccttgccgcgcaccgtcgcgtagaagcggacgtacg

SEQ ID NO: 393519 - DNA, 478 bp, Oryza sativa
ttggttttttgatgttggggggtgtttgtttaacgatgtttccacaacaccagtatacagtatttgagttacttaaacaaaaggtagcacaacaatggtatacagaagtgtgcattcaaattgatgcacagaagtaataaacaactagatacttagaatgctaacgctttggctaatttattcattcaccctatatttacaattgttaatcccaaaacagaacttctttagagcacttcgagctaatttcttcagtgttgatgtcatatggattcagagaactaactggcagcatagaaatacaaatggctgcactgctgcggcatacataaaagtctagtccacttcattggatactgatgccatatactcagatttgtcactctctttaaactgtaacagctaaaaacagacatttgatagctgatattagcatgcaaacactagcatacatcatttcgattgaagaaacgaacag

SEQ ID NO: 393520 - DNA, 726 bp, Oryza sativa
  unsure (1)..(726): unsure at all n locations
nnnnnnnnnnnnnttggtttagttactactataaagacaaactatcgattaggggaattgtaaactgtacagaccgaccatgcggtaaattgttgaatgtttacaaggtcagcagtccaacgactccaaccatccatccagacatcgaatgcgaaaagtagattatttatccaagtcatcaacaaaaagaaaagtatctgatcactgtacagtttgcgcaaccaccattgcataaccatggcacgcctggacaagagagctgaagaacagtgccatcttgtgtgaggaagcgttgttaccattaaaaagcattgatcccaaattgcatccgcacagctccagaaaatattcacatcacaagatcctttggatattgtcccacagcacactgcactcaatcagatccataaatgctgatggttgtctgcctaagtacttcagaagtcctgtcaaggctgtgagatgccaccaggatatgtgagggctgcgtatctttcttggcttagatacaaaggctttcctctgtgcatgtcatgatcctcctcaccgaaggcgtcaaggtagggagatgggcaaaaggcgagacgaatagatcgctggcaacagtattgttgttttcctaacccaaaaggaatatgccaacgccagcacccacattgnggacgcatgattaaggnactttccagtcctngcagcatggtttccaactagggggaacatagcttg

SEQ ID NO: 393521 - DNA, 674 bp, Oryza sativa
  unsure (1)..(674): unsure at all n locations
ttggtttttggaaggggaggggatattattccaataatgaatctataagtgtttcttaattaactcgttgatcaccaactttacaaacatcgactgacgggtcctccttgggacgacccaatgcattcctccggcacaacaatgtcgaatccactcagcggccactctgcctccgcatacttgctgacgtatatctccggtccgacgtccagcgacgaccacctcctcttcgccggtggcgtgcccggatcctggtagaagtagagcgcctgcgacaatgctccgacgtcgagctcccatgtcctggggtcaccgatccacccctggcctttcgccgtggggtagccgaactcaccccacaccgggtgcggcacgagctgcaggatctcctgcggctgcgggttgctgtacgcgtcgcagtaggtggtcggctcctcggcgtcgcgcgcgttcccgggagagcagtagacgtggtacgccgcgtaggggaagcgggccgcgtcggtgcggtgcacgcgggtgccgttccggaacgtgtgccacggcgggcactcctcgatncgcctccgcgtgcaccacgacggcgtctccgggttgatgatcatctcgctgtaccgcgtcacgtccgtcgcggtgtcgccgtcgcacggccggccgtcgttcttccagcagct

SEQ ID NO: 393522 - DNA, 449 bp, Oryza sativa
gattgtagtttacatgcatctatatatggcttgaattttgcttatgttttccctttacatttgtgcaaaagaaagcaataatttgaaaactgggttaattaagctcagtgtaagaacaaccatgtagatgatcatcagttaataattaattgagcactgcacaattgcgacgaatgttgccttgcgacccggtcttgaccccaacccggcccaacttggtcatagccgtgacgaaggcctggttgaaggcggcgctgctctgggcccaagaatccacgatgggcctggaccgtgggtccgagtacagcacctggtcagagcccagaaggcccatcccgttctgcaggttcttgaagtactggttgtcgaaggcccgcggcgtcaccgggtccatggtcacggggatccgcgggtccacgttgggtgggcacgacctctgtagctgggct

SEQ ID NO: 393523 - DNA, 535 bp, Oryza sativa
ttcgtgtcaccgacaggaggcgcgtctcctccctcctcacctccatctccataaacacagcaggctcacgcacacgcctccgccccggaggaaggaaggaaggaaggcaaggaagccaagcccgcgaccccgacctacccccaccaattcaaccctccctcctcagatccaccaccaccgagcgcccgcgatgacggccaagggcggcgccgcgccgccgccgggcggcgcggcgcggcctcccgaacggccgcttcttcaccgtggggctcgccaccgcctggtactcctccaacatcggcgtcctcctcctcaacaagtacctcctcagcaactacggcttcaagtacccaatcttcctcaccatgtgccacatgtccgcctgcgccctcctctcctacgccggcatcgcctggctccgcgtcgtccccatgcagatcgtccgttcccgcgtacagctcgccaagatcgccggcctaagcctcgtcttctgcggctccgcggttccggcaacgtcttgctccgctacctcccg

SEQ ID NO: 393524 - DNA, 617 bp, Oryza sativa
  unsure (1)..(617): unsure at all n locations
tccccgtctgttataacggtggcgtcgtcgttggaagggggcacattcgaatctcaccaaaaaccagcggaggcggagcagaaaacagcagccaaggaatcatccatccatggccaacgggctccccaaccccctcctcaccgccgacgccgcccgatccctcgtcgactccgtcgacgccttcctcttcgactgcgacggggtgatttggaagggggatcagctaatcgaaggggtccctgagactttggacctcctgcggaaaatgggcaagaaattagtttttgtaacgaacaactctagaaagtcgagaagacagtatgcgaagaagttcagagcacttggacttgaagttacagaggaagagatctttacatcatcatttgcagcagccatgttcttgaagttaaataatttctctccagaaaagaaggtttatgttgtcggtgaggatggtattttggaagagctcagattagccggttttgaatgtttaggtggcccggaggattggcacgaaaaacatattgctggaggcaaacttctactttgaacatgacaaaaagtgttggagctgtcattgttggactngatcagnacttcaactactncaaaat

SEQ ID NO: 393525 - DNA, 865 bp, Oryza sativa
  unsure (1)..(865): unsure at all n locations
cccccccatcccaacccgacctcctcactcgccctcccctcgcgcttcgcttcgctccgatccgaccgccgccgccgccgccgccacagcgagaagagagagagggagatggcgggcggggagaaggtggactacgtgttcaaggtggtgctgatcggggactccgccgtcggcaagtcccagatcctcgcccgcttcgcccgcaacgagttctccatcgactccaaggccaccatcggcgtcgagttccagacccgcaccctcctcatcgaccacaagtccgtcaaggcccagatctgggacaccgccggccaggagaggtatagagctgtcacgagtgcatactacaagaggagcattgggagctctcctagtctacgatatcaccaagcgccagagctttgatcacatccctcgctggctggaggagctccgtggccatgcggacaagaacatagtcatcatgctggttggcaacaagagcgatcttgaagacgagcgggccgtgagcaccgaggatgccaaggagtttgctgagaaggagaacctcttcttcctggagacctccgctctgcaggccaccaacgtcgagaacgccttccagaccgtcctgtcagagatattcaaaattcacagcaagaagaacatggcagcggacccaaaagcaaacggcgctgccccatcgctagcagggaagaaggtcgtcgtcccgggcccagcgcaggagatccccaagagcaagtgctgcagttccatgtgatcttactctactcagattcagctgtatttgtgtncctctttttnagaattttcacgngatctttctngacgtacatccctctcaaaagctcngggttccagtatt

SEQ ID NO: 393526 - DNA, 366 bp, Oryza sativa
tttttgtggggttttttggttttggaaactaaaagaaggaacctttctattgcatagtagcatatgaacttttgataacatagctcggtacaggtattggcataaaaccggacaactgaaatcagccattcaatcttattttacaagcatgggctcttcagcaagatcaaaaatgaaagatggccatgttgccaactattttttatgatagcaattgagtagattctattctaaatatctaatctttttcaggcttagtgttttttgtagtctgcctcttcacagaccggagctgcaccgagttgttgaagctgtgctcgaatccgaagtgcggaaaacgctcataccaggtgttctgtggaacgt

SEQ ID NO: 393527 - DNA, 531 bp, Oryza sativa
ccgtctcgtcgtcgcctccgctccttgcgccatctcgcggcgccgatctccttctggcgagccgagcagagcagaccagggcaggggagcggaggggatcctaggtgttgcagtttcttttctcgtggacggtctaaaggtggtgaagaggctgtacagatcacgatcccgcaagtgaggtttgaggatgatgaactaaagggcttgtccgagctactgcggcaggagatctgataaaaccagtcaagaggcgagtctcagaggtgctaggacgagatggatgaagttgctgagattgctgatgctatggggtacgggttgggcatttgataaatggggccaaagccgggaaagttggtttgtcggaacgagagtttagaggagcgaggagaagagcatgatgtgcaggctgatggggcgcactcgggtgagagtgaggtgatcaaccccgcttaggaggtgggtggagaagccacctcacaggcagaagacgtaaagccgcgtgtttcaagggaagcaaagtcattcccc

SEQ ID NO: 393528 - DNA, 646 bp, Oryza sativa
  unsure (1)..(646): unsure at all n locations
gtgctgcccatcgcgtccagctagcgcctggcgcggctgcagatgcagctgctgagctgcaggtgcatgcacctttcccacccccacctccctctctccccttcgtcttcctctatagcccgcgccgcgcctccctgtccccgagtccgaagcccgaatccgaagcgaagtgaccgcaagagctcacccccgagtccccccctcgccggatcgcgcgggccgcctacctcctcccgtcgcaccagctaccgcgggaatgcgaagatcttgcgatggaagctagtcaaatctgatttcgtttaagtacaagtaacaacaatggcaccaaacaaaatttcctcaatggatgctggagcagcttttgatgacgaagatgctagttccagcaattcactgcaggagttgtggccagttggcgagatagatcctaagagagcaagatttccttgttgcattgtttggactcctcttcctattgtctcgtggcttgctccttacatagggcatgctggaatctgtcgagaggatgggactggcttggattttgctggttcaaatctggtgagcatggataattntgcatatggttctattgcgagatatctccagcttgacaagaaagaagtgttgntttcctggtaatctc

SEQ ID NO: 393529 - DNA, 460 bp, Oryza sativa
gttctcggccccggctacccgcacctcgagcgcatctgcctcaagcgcatgaccgcctacaacgacgacctcgcgctcagtcgccaagtcattcccgctgttcagggagctgtcgctggtgtgctgcgatgggttcagcacgctaggcctcgccgccatcgccgagcggtgccggcatctccgtgcgctggatctgattgaagactatatcgaccaggaggaggatgagctagtggattggatctccaagctcccggagtccaacacgtcgctggagtcacttgtgtttgattgtgttagcgtcccattcaactctgaggccctgcaggcgcttgttgcacgctcaccagctatgcgccggttgcgactgaatcaccgtgtgacagtagagcaagtgcgccgtctaatggcacgggctccccagctcacacaccttggtactggggcattcccgtctgag

SEQ ID NO: 393530 - DNA, 946 bp, Oryza sativa
  unsure (1)..(946): unsure at all n locations
cggacgggactgtcgaagcggcccagcagcctcgagctgaactgaagcaggggaggggaggagaggagaggagagagcaacgcgttcaccgttgagagaagagaaggaagtaagacgagcgcaatgcgtcgcgtcacggtgctcgttctgctcctcgcctgcgcggcggcgcgcgccgcgcgncgttccggtcaccgacgggctgttgccgaacgcaatttcgaggagggcccacccaagtcggacctggtgaacggcacggtggtgcgcggcggaacgccatcccgcggtgggagacgtccgggttcgtggagtacatcgagtccgggcacaagcagggggacatgctgcttggtggtgccgcaggcgcgcacgccgtggccttcggcaacgaggttccatccggcagcggctcgccgtgaccaggggcgcctactacgccgtcacgtttagcgcggcgcgcacctgcgcccaggcggagcagctcaacgtgtcggtgagccccgagtggggggtgctccccatgcagaccatctacggcagcaacgggtgggactcgtacgcgtgggcgttcaaggcgaagatggacgaggtggcgctcgtcatccacaacccgggcgtggaggaggacccggcgtgcggcccgctcatcgacggcgtcgccatcagggcgctgtacccgccgacgctggccaaggggaacatgctcaagaacggcgggttcgaggagggcccctacttcctccccaacgcgtcgtggggggtgctcgtcccgcccaacatcgaggacgaccactcgccgctcccggcgtggatgatcatgtcgtccaaggccgtcaagtacgtcgacgccgcgcacttcgccgtgccgcagggcgcccgcgccgtggagctggtggggggcaaggagtcggcgctggtgcaggatgtgcgcaccgtgcccggg

SEQ ID NO: 393531 - DNA, 851 bp, Oryza sativa
  unsure (1)..(851): unsure at all n locations
ttttatgtgctggtttagcagagtggtaacctgacttgtgtatcaaaattttggcttcgatctgtattatgtgattgcccagtagtagatctagagttcgacacaattagtggctagggatttggttattggcccttgaccagaagtttaatgattgccagtggaatgtcagtagatctagattgggttcttgtgtcaaaccctggctcgcttcatttatcaggtagcaaaccatccatccgttactattgttgccaattactattttttctcagagctctgattcccagacattaagctagacaagttgattcccatattagtctacattgtgtgatttggtccataagagtaatttaatttctataatagagatttaattttcttggattagtcctagcttataatatttattttacatctaaatgatttgtttcttgtttcagccttctaagacaattatgtcaggaccaactaattttcctccctctggccattttgtgaagacctaatgttgtggcaccacaggccatagtttgaatctaaagtgctgcagttaaatatctacagaatgttgcacatcatgaaaatcagggtatgcttctcattcaggccatagcttgaatctaaagtgtatgcagttaattcagaatgttacccaaggttgaagcaccacagaacacggactgttggaagacaattttcttgtacatgtgtttgatgaattgtaactgaacacatttaattttcctatggaccatttgtatatttctnaatccgatttgaatgaatttgttggtnctgnnnnnnnnnnnnnnnnnnnnnnnnnnnnnnnnnnnnnnnnnnnnnnn

SEQ ID NO: 393532 - DNA, 630 bp, Oryza sativa
gaggatcccaaatacaccaatcgtgtcttggattttcccaaacacagcgcgcactctcgcccttcacctctcctccctctcacccttccattacatggatcagggagggaggaaggaggcctgaagtggcgcagagtaggcgcttgtaaacaaatccccccatttgcttcttttgcactgaagaatccctgaagaatccagcaggatggagaagaaggcgtccatcctcatgaaccggtatgagctcggccgcatgctcgggcaaggcaccttcgccaaggtgtaccatgcacggaaccttgcatccaaccagagcgtcgccatcaaggtcattgacaaggaaaaggtattgcgtgtcggcatgattgaccagatcaagcgagagatctccatcatgcgcctcgttcgccaccccaacatcgtccagctgcacgaggtcatggccagcaagagcaagatatattttgcaatggagtatgtccggggtggtgagctcttcagcagggtagccagggggcgactcaaggaggatgctgcgaggaagtacttccagcagttgataggggctgtggacttctgtcacagccgcggtgtctaccaccgagaccttaagccagagaacctcctcgt

SEQ ID NO: 393533 - DNA, 450 bp, Oryza sativa
tgatagaaccatcgactataaccccaaaagaaccagatttcgtaaacaacatagaggaagaatgaagggaaaatcctaccgagggcaattgtatttgttttggtagatatgctcttcaagcacttgaacccacttggattacggcgagggcagatagaagcaggacgaagagcaatgacacgatatgcacgtcgtggtggaaaaatctgggtacgtatatttcccgacaaaccggttacaataagaccgaccgaaacacgtatgggttcgggaaagggatcccccgaatattgggtagccgttgttaaaccaggtcgaatactttatgaaatgggcggagtatccgaaactgtagctagagcagctatttccatagctgccagcaaaatgcccatacgaagtcaatttcttcggttagaaatataacccccccaaaaaagtagtattgaa

SEQ ID NO: 393534 - DNA, 577 bp, Oryza sativa
tgtgctttttctgatcaagacaatggccgatgggcggggagccttgatagtgctgaccttgcaagatgaggagaagagatatgttcagggtgttaagaaaacttttgacagcgaaaacatatctgagtacttccaacaggccttcctccagcaaggcctacttgataatatccggctgcttttcatagatgatatagaggagaaattcaatatgcctgatgacgaagaggaacctaagggttacatttcggaggattacaacaggttgatggcgcaggccttacaagatttggagtacaaattcaaccaacagactgcatggattctcaagcgttatgacctacccgagcacatcaggctggatctccaggagcaactctacaacaactacaaggtgcctgacaatctccggatcaagttcataaatgctgttttcaatggaaatccccggatacttgatcacaagagggagctcaaggtccaggctcgcaaagaagcagaaaagttttggatcgaggcggcggcgacagcaagaagggcacaagcactacaagatttggaagagagatacaagcaa

SEQ ID NO: 393535 - DNA, 462 bp, Oryza sativa
gccgctacgagggaggaagaagcatctggaggcgcacgcacctcaccctccctcctcccatggcgccgcccttggccgccgccgccgccgccgccgcggccgtatcctcctcctcccctctcttttcctcctcttcgtcccgccccctcccccgccgccatctgcccccgagctccgtctccctccggccgcggcgccgctcgatcgccgcggcctccgctgctgtcgagtccgccgggaggccgcttctcgaggcgcgcgatctcgtcgcctgcgtgaaggagaacgggcaggagatcctcagcggcgtcaacctcaccattcgggagggcgagattcatgcgctcatgggtcaaaatggctccggcaagagcactctcatgaaggttctggctgggcatccagagtatgaggtaactggtggtaccgtgctctttaaggtgagaatttgattgatatgga

SEQ ID NO: 393536 - DNA, 892 bp, Oryza sativa
  unsure (1)..(892): unsure at all n locations
aagctcccgttcctctcccaatctttntccccnnnccanccccccctttnccngcgtctcncncgctaccncctncntncccgcaggccacggcggcgtttccccgggttgagggttancgtgtccccgtaggttatgggccgtctctgccgtgctcccggggagnccgatttcggacgcggggtctgcgccggcggaaagcccttttgatctaaattcttcccaaagacgaagcttacttggttcaattttacatgcaatgcatgtggcgaaaggcccaagcggtttgataaatagggttgcctatgaaagaggnacaatattttcttccagtgtgcagggtgcccggtgtaccacaaatttgttgataatcttggtctagttgttgagtatgatctacgagaagaaaatgggatgaacnccgatactgaaacttgatctgttatgagaaagcattttggtaggcaatttgtcttctaaaagtcatggtttttgcaacagtgatggtttgcacattgtagcatgtttagattgaataatactttactttgaaactgctacatatgaaaccttactatgtattttgtgataatagaaatagtatcacaagttctttccctagagtacattattattccaaaaatgatcttttactagtagtcaaaacgatacatctgacagaatttgatgcactaattatatgctatgcacactgtttaagcatcattatttgcttgcatcttggggatcttgattctctgggacatcatttttcttcatcatccctttctctgtttcttctgccttcaccacctgctccacatttttagctttgccttccttgccaacatctttctttcttttgaggaactgaataaggccttcaagggca

SEQ ID NO: 393537 - DNA, 385 bp, Oryza sativa
tttgttttttggttacagaattgaattggctttttgttttagataaacaacttgagcattttacaaatggttacattcaatttcaacgtaaataaactattgcatgttacattcaatttcaaagtaaataaactatgacatgccacaaagcgtaatgctccatttggcggtacagtacacacttccacaggttcaccggcgacggaatttaggacgaacagagaacacaccaggccgcagctcatcaaatcggtacccattttcaatgaggaagcccctgactgcaacaggtagtgaggcctgccctttgctgtgcttgccaatccctgtgatcacctctaagatagcctggttgggacgaacaaacaccacctttcctgggccg

SEQ ID NO: 393538 - DNA, 373 bp, Oryza sativa
tttttttttttttttttttaatgagaaacgttgaacagattaactttcatgccacctaaattagagattggcgcattacactgctacttgtaaagataatgacaaagatacatgcagatagccaccatacaggtcagcacccaggtcacagatgaggcatgtaaactactgcaaagggacaggacatgcctaaaacctacacctaaaaggattctgcagtttgtaatctagagtacatacagacaattactcagaccaaacagctgcagagcaacctacaaagccaacaaattttagaatttcattgtcttttaccttatggtaacaaacttgtttggtccatgcttcgcccaaaagggttttaggtcaattg

SEQ ID NO: 393539 - DNA, 557 bp, Oryza sativa
ctgggggggaagcaacatcacttcggggcaggattcattgtactcatgagtgaacagggtgaaaaaaaatatcacaatatcacgtccagtttgcgcgatgtatcgcaagcaaaaggagccaatgcaaccaagtcatgcattacaacccaactagacaggcctacgagcttaggtgtgttttcgtatgacaaaacttattacaacgcgcaaggtcctagtatcccggtctcttccaaaaaactactagctgctatctctaaaagcagggcaactgttagcacatgcggtttcacttcttgacctcctcgtactcagcctctggagcctgctcgcctccgccctgagatcctcctgtctctgaaccgcctgcgccaccaccaccaccagacatatgctgcccaatctttgaaacagccttgttggccgcttcgatattggccttgatcttctcgatgtcatctgaggtcatcacagagcggagatcggcgattgctgtctcaatctcagtggcaacctctgcaggaatcttgtccctgtactctcccagacttttctca

SEQ ID NO: 393540 - DNA, 440 bp, Oryza sativa
ggttaaatcttcacttgtatcagaaaactttgtttaatgtaactatataggattacacatcaaaagctactagtacaacttgactaaactgtagatcccctgaagcatccggggataagagagcagcctaattaccaatttatcatgacctgattaacaaattaactcttatacatgctagtagtatctcgagcaagcacgttaatgacactgcattcatgcaagtgcaagtgtaattaagctctagtcgatcttgacggaggagtagatgagcctggtgaaccagaagcaggcgtagaagccgattgtgccggtgaggaccaagaaggcggcggaggcgatgagcatgtagccgaagtagagcacgccggagacgaccttggtgatgtcgagcttggtgaagaagtagaaggcggcgtaaaggaagaggtagagcgccc

SEQ ID NO: 393541 - DNA, 412 bp, Oryza sativa
  unsure (1)..(412): unsure at all n locations
nnnnnnnnnnnnnnnnnnnnnngacacaccttctatcaaatgtagatttatagatgaggtcactattacaaccattcagaaatttgggctcactaaactgatatcttctacatagaggccaactcaagttcacatgggcaatgaccattttaacaacaaacagcccattgctacacaaaggttaatttggtttggcctatgggggtcctaacttctcccctcaagtacttctcctaggactaggtaagcagacacttcaatagatgtgctgccagctgactgacatcggaaactactgaattggttttcccctagcaccggatttcagcgaggagtccgaacctccaatggtaacattggagatgtagcgctagtgcttgtgccgctcagttgatctgatgctgctgacttt

SEQ ID NO: 393542 - DNA, 581 bp, Oryza sativa
  unsure (1)..(581): unsure at all n locations
nnnnnnnnnnnnnnnnnnnnnnnnnaaatnttactatcagggagaaaaatgatagtattaattttattgtagccgcgtacacagcctgatagtctatagcatttatgtgtgtaattcagcatctatttacagcgtacctagctatatatactaacaaataaaaaaaagtagctactgtttctccttgtgaatatcaagttgcttgtaaggttggatcatctggctcccttcacaatcctaaattggtcctggactgccgacgtgttcgagtttacaaactgaaccaacatatcagttttcgtcgcatgtaccctggcatatccaaactctgaaatccttgataagctccagctatgcagaccaatcttagggaagccatccaagttgaacccccctgctccaacaacggcatgaacaggtgcggcgtagttgctgttatcgtaggtatcaactccttttgnggccttctttggcatgccttngcaattgccctggtataccgnacacgttctctcgtagtgtgtaaatggccaaagaagaccaaatcgaccttggtgggttagcaagagtnggctcaacag

SEQ ID NO: 393543 - DNA, 419 bp, Oryza sativa
atggaacttccagttcacaagttccagtgcatgccaacatatatgaccaaaagaaccgaacttccagttcacaagttccagcgcatgccaacagggcaacatatatgaccaaagggcaacaggcagccaacctaaggcaacagacacagcgaacatctactagagttccatggggcctaaagttcaggtaaacctacataattaacaaaagactacttagggggacaaccacaaccaacagctatccaagttcatggccatgaccatccaggtcagtttagttacaaaatatatccatagttttaggaatgtacaactagtccgctgtcatgctaaaagttgacaatggccccagatgcagcaccaaccccacatggtggggcctgagtttccattcggggcacaaggtccagcggagt

SEQ ID NO: 393544 - DNA, 717 bp, Oryza sativa
tttgggtggttagctaggttgctatgagcctctgatgatcatgccaccatctgctcctgctccggccactgcgcgaatatgtcgccggcggcgtggccgtccttgacaagagagttcacccatgacacgtccggctccgccgccgcggcgtgcgtcgccaccggcatggcggattggccgcggaacgcgaacgacgccgacttgcggagcttgtgcagctcgtcgccctggacgccccagtccagcttgccgtccggcgagccccagtccgagagaatggacggcgcgccggtcgtcgccggcgacatgagcgaacgcgccgccggggcgcggcctccgcggtcgatgaagctctggctgcgcttggcgaacgccgaggcgcgggagctcatgatcgccttcgccatggagtggtccagcccgaacgcggtgttcgcgccgcccaccatcggcgaggtcggcatgtgcatctgcgtggtgtccgccatggagctgtacgcgggcatgtcgccggcctgcttgagggacagcgcgtggagctgggacagcatggccgggtcgacggagccgagcaggtcggtgtagtccggcacggccctcgccggcgacgcggtggcgaggccgttcgccgcggcgccccagctcgccctcggcgacggcgcgccggacaccttgtcgaacagcttctgctggtactggtccagcgcgagcatctcg

SEQ ID NO: 393545 - DNA, 500 bp, Oryza sativa
aaaaaaattaaaagctaggaatttccatatttatatggttaagatgaaagtaccacacagatattcactagctaagcataaaacttttaacttaattagtacatatcacatggttcaaaatacatataaaatagataaacatgcaaatagctgcttattctgcggcagcgctgcagacagctgagaaggcacaaaatcctgtttgtgctggctttgctgctgaaggctaaagccccaactgaacagggcgatgatcggctattaataagtgatccgaacgagactttcgatgaacggcatggcactgaacaattccgacttccgtgccccctccccctggtacctcgtgcgatccaatctacatagtatcttgagcttagaagtcgccagatcatagcgacatatattattacctcgcaacaagatgatttcatcgctgaaaggaggaagagccatcacagagcaaagactccaggggtaatcgatgcagtaacgccatt

SEQ ID NO: 393546 - DNA, 387 bp, Oryza sativa
  unsure (1)..(387): unsure at all n locations
tttagctgaaactagtccgcttattcatattaagattgggtttagttcaacaaatattggaccccccgaaatgaaccaatagcattattatacatcgcatctggagattcattattgtacccaaggaagatttttcaggccggcggaccttggtgccgcattctagattttggttgatcgctttgccacccacttatgtaaagaacctgagctagttcctatttggatcactggcgtgacactaatgcacacccacagacccacttatnttggatagagttataggggatacccacagccctggctgcatcagggaattttttcagggccattgccacgtcaactagaactattttaactctgggaccacggatgccatagcaatag

SEQ ID NO: 393547 - DNA, 550 bp, Oryza sativa
  unsure (1)..(550): unsure at all n locations
nnnnnnnnnnnnnnnaaaacaacagttgactcatatttgtactccatcacatagcttcaccacatatatatggtgtcaattaaactcctatttacatcatccataatttggtcctggcagtaaacaaaattcaaaacaaaaaccaatacgagattatacgaagatcacccattgcatcgatctgtgtcatctagaaatcgaagccaccgccgtcgtcgaaccctgcgtcgtagccggcgtcatacgccgacgcgtcggagatggcgtctccgatgaggaggccgccgagcgcgccgccgagcagcccggctccgagtcccatcccgaagttgttcttcttcgccggcttcacggcctgctgctggtagccgccgtacccagcctgcggcgggtagccgtagccgccgccgtagccggcttgcggcggcgggggtgggtagccgtagccggcttgcggcggcggcggntggggccgggtanccgtagccgtantncggcggtggngccgtggccgtatggcgcggcgggttgntcgggcccggggggggtt

SEQ ID NO: 393548 - DNA, 407 bp, Oryza sativa
  unsure (1)..(407): unsure at all n locations
tttttttttttagatcaaaggctttcgccagctttactaacaaagcataaaggttgttcgatacaggcagaaaacaaaaacagcaggaagaaataaaacgatgttggggtttccaacttaaccagaagtacaaaaatctgatcacaagctaacagagacacctaaccatttaggtgcccaaatttgatcataatctcgtaagcatcaacatctcaaaaagaaggggaactctatgacagtaaagatggctcggaacaaaaaaactggagaaatttcctgacaactgttctgctggtattagtttggtgatggaaggagcttcctcagggtaattgaagttcttatctgctgctcaagctccctgccaccccattgctgagcacctggnttncggtttatctcatgtt

SEQ ID NO: 393549 - DNA, 665 bp, Oryza sativa
  unsure (1)..(665): unsure at all n locations
ngacggtnggnccatngcaacaccaacctgcagcctgcactcgctgcagcagggaccgcatgcagaagccgcttgattctgccactgtagtccagctctgcagcttcatttctctcgtcggtttcctgattatttgtgacagaagaagccatagcacagcttgatacagtcactctgactcactgccatgctgttccagggctggaagttcagtgcactttcctgtctcantcagcctgtgaaaatgttctgatgaacaaaaatcaggaattcaggattcaggtactttcttgagacatcaacaaaatcctgaattttctgatgcagtagcaaagcctaaagattacacgtctcacagtgtcacacactacatgccatagcattatttatgttacagaggggtgctgataattgtgttctccaatggtccatggcacgcacactcactcacacacacactgacagagaggaaagaatcatcaaactaggagcaaccgaggtaattaaaacggaaattaccaccctaatggtgctggtaattaatcatcaacggccctctgataggcgggcccacccaacgccgacgagccgaggcgtcggctcacggcgagccgagccggacctccgactcgcgccgcgcggcggcntggcgccacacacgtacg

SEQ ID NO: 393550 - DNA, 826 bp, Oryza sativa
  unsure (1)..(826): unsure at all n locations
nnnnnnnnnnnnnnnnnnnnnnnnnnnnnnnnnnnnacccagtgtaaatattcagcctggtatatactccatttgacttaccggctgccctttacataaccactcataccaggcaacgggatgtgaaaacagtttgtgttcagggaaaaaaaaaagacaaacatagcctctttcaagaacccctcaaaatcgggtagtttcacttatatttgtaaaatgtttgatcaaccgcatttcgaacaaattacaataaaacaaaaccgtatcaaaattgaaaaactccctgggcagcttgaacatcggtgtgtcagaatagaacttctcaacccggcaaatccaagtctgagtaacgtgaaaattttatggatgctaccccagtagcccagatgccaccattaacttttcatttttgccgattggtggacaggcttgaggggcttccgcaagcttaacgattttatggtatcttcaagatgctcttcaacttaacaacaagtttccagtcatccattgacaaatcgtctctatagttttctttgagaagatcaatagatcgccttgtgatgcgactaacaagttcatcttccatgtcaaaatgcctaccaaaactcttctgctgctcatcaggattgctcccaataatctttatagccaccttctgcccttttgtggccatgtcaacttgcttatgattaatttcaatagatgcaatcttcccaatatcaatatattctttagtgggtatgcataggaggtgtgcccaccttggctattccttcaaggacatcaacacctaaaacaattggatccttcttgttaaaaacac

SEQ ID NO: 393551 - DNA, 389 bp, Oryza sativa
atgctttttttaatttttttgatacggatgtacataggacttctacggtacaatttattagcgggcattgcttaattaccacaccaacggcaaaatcaattattcactgaagcatatatatagagaagctaccaccatgctacattatacatattgggtccgattctcaggtctccactctctccgccagcttgatacccgatgactccaagatctccaacgctggaatgtaaatttcaggttccagaggcctgatcactcctttcttttggatcttgttctggagcaacagcagagctcctattgctgctggtattccgaccgtgagagccatggcagtggtaggcctgccattttcaacctttccaaactcaagtagggctcgtgcc

SEQ ID NO: 393552 - DNA, 653 bp, Oryza sativa
  unsure (1)..(653): unsure at all n locations
nnnnnnnnnnnnnnnnnnnnnnnnnnnnatcaaaatttcttggtaaaccagtgccatcatacatgcttttacccatacaagctgaatgtcgctaataaaaaataagtcttaaaattaaggaaaggattccaaatttctaatttgagtctcatttgcgaatcatttcggatttccatgaaacaagcatggcaatcatatgaaggagatccgctaccataataagaaaaatgagcaaccaacagcatgacgggaatcaaatcattacctatagcaaccagaaaagacacatgctaaaccagccacacaaggagtacctgctaagaaagaaatgtataacccgaacactgtctcaagtgggagtggcctatagcagcacaaggccaagctctgatggcttgattccattgcggatgcgatagttataaaggtaatagtggacggacgcgtgggtcgacctcgagggggggcccggnacccaattcgccctatagtgagtcgtattacgcgcgctcactggccgtcgttttacaacgtcgtgactgggaaaaccctggcgttacccaacttaatcgccttgcagcacatccccctttcgccagctggcgtaatagcggaagaggcccgcaccggtcgcccttcccaacagttgcgca

SEQ ID NO: 393553 - DNA, 451 bp, Oryza sativa
tttttttttttttttggtaaatgtacacagcaggtcagattatttatgcttttcagtgcaagattcaagatccatgagaagccttattcatctcagactgagctggttctctgaatacatccttgtttgcaattattacagacatggaagcctcaaggtcaacagattacacaaacgtcagtatgttgaactggcactaatcgttcttcgctttgatgaacttcttgatgatgcccatcatctcacttccagggaaacgtccaaggcagccccttgcagcggcaatctcgttgaattcaaagacagaatcgccactgaaagctttgcgctgatcagacttgcgatcagctacatctatgttttctgccacatcttctccaggtttaactgaaggaagcaggaaatcgtccagggggaaagttgattacattgtccttccccatagctacta

SEQ ID NO: 393554 - DNA, 788 bp, Oryza sativa
cgcctcgccgccgccgccgccgcacgcccgacggaagcgagcgcctctctctctctctctcaccggcgaccgcaccgacggcggcgggggcggggatggcgggctggctgaaggcgctgtgctacggcgcggggggcatggcggtggtggggctcgcggcgctcgtggcgctgcaggagcgcctcgtctacgtgcccgtgctcccggggatcgcgcgggcgtaccccatcacccccgaccgcctccgcctcatctacgaggacgtctggctccgcgccgccgacggggtccgcctccactcctggttcatccgccactcccccacctggccgaggtccaactattctgttcttccaagaaaatgctggcaatattgcacatcgtttggactttgttcgactaatgatgcaacgactacagtgcaatgtatttatgctttccttacagagggtatggtgagagtgatggttatccttctcagaagggcatcataaatgatgcacaggctgcacttgatcatctagttcaaaggaaggatattgacacatccaggatagttgtttttgggagatcgttaggaggtgctgttggagcagtgcttgcgaaaaacaatcctggcaaggtgtcagctctaatactggaaaacacctttacacctatattggatatggctggtatcatgctacccttcttacgatggttcgtaggtggcagttcttcaaaaggtccaaaacttctgaactgtgttgttcgctccccatggagtacctgcccgggcggccgctcga

SEQ ID NO: 393555 - DNA, 457 bp, Oryza sativa
gttatatccacgagagtacgagagacgcgcgcgggcgcgagctgaggttgctgctgcagcgcaggcaaagaggggcaagctagcgcaagcgacgctaagcccgcgcgcgcctgcgtgcgtgcgttcgtcggagagcgcgggcgccaaacggcgccgcggacggagtacgtcgagcgtcgcgtggacgttggcagcggcaaggtttcctctggatacaccgttcttgagtttgagttgggcaaggaggttgtgaacgtagcctgaacctgacctgagattgtgaacgtaattttggggggataggttgttctgtactgtctcttcaatctgtgagttcgtgacaggttcttgcaaaaaccaaaacatcatcagtgaaaaattgtttcgtagcattttagctctagtatagattcgatcaatcgatcgttcggtcgttcgatcgttcgaggacgagaga

SEQ ID NO: 393556 - DNA, 516 bp, Oryza sativa
attccctgctcttttatttcttcttccacttctcgattttctctcctcgtcaaatccgcgcctcgtagagggaggcaagaatcgaggggtccggtgttttttctgcgggatcgtgggggaatttttcctcggacctttccgtgctcgtttccgccgcgggcggcgttcgcagagtgtttgagaaataatacgagtcaatgaaattccgcaaagggacaaaggtggaggtgttgcacaaggggggtgcgccattgggttcctggaggcctgctgagattgtttctggcaatggacacacctatcttgtaagctatggctcatgtccaactcagggtagtgtggctgcggaaagggtgccaaggaaggcaatgagacctttgcgcccacccttggatggtattgtatgctgggtcaaaggtgagattgcagaagtctttgacagctacacatggaaggttgcggaagtggtgagattgcttggttttagttactatctcgtcaggctccttggatcct

SEQ ID NO: 393557 - DNA, 886 bp, Oryza sativa
gttaccagggtgataccaagagtttccttgtttgcaagatgaaaatggctacttctccggagatgctaagctgtttctgtccacctccattcaaacaagtttcttgaagttgtcacaaatatgaaatttgatgaagagccaaattacgccaaactgatttctctctttgatagtttgattgaggtacctgcctcaagacctatcagaattgatggcgctcttaaggttgggcagaaacgtggaagaaaccatgaagaagatgagcaacccaagaagaaagttagattaggtagcccagcagctcaatggatttctgtttataacgccaggcgggccatgaagcaaaggtaccactataacgtggctgacaacaggcttcagcagcatatagagaagggtaatgaagatggtctatcattagttgtgtggcgtcttcagcaaatctttgggccctcataatggatgcaggaactggtttcctttctcaagttcatgagctctcaccagtttttctgcataaggactggataatggatcagtgggagaagaatttctacataacagcaatagctggatcagctaacggaagttctttagttgtgatgtccaaaggaacaccttactcccaacagtcatacaaggttagtgagtcattccccttcaagtggatcaataaaaagtggaaagaaggttttcatgtgacatctatggccaccgctggaaatcgctggggtgtagttatgtcaaggaactcaggttactctgaacaggttgtagaattggatttcctatatccaagtgaaggcatccatcggcgatgggagactggttacagaataacctcaatagcagcaacaaatgaccaggctgcttttatcttgagcat

SEQ ID NO: 393558 - DNA, 522 bp, Oryza sativa
  unsure (1)..(522): unsure at all n locations
gggccgggccggaacgggtcgacttacttgaccggccctccttgccgcctcccaaactccgcctcctcctcctccgctgcacccccgcaaaaaccctagcgcaccgacttcgcgatctccgcgccgcagccatgaagggcaaggccgacgcctccaagaagggcgagggcaggctcaaggccgccggcggcgccgggaagcggaagaaggccgccgctagcggcaagccgaagcgcccgccgtctgctttcttcgtcttcatgtctgagttcaggcaggagtaccaggcagcgcatcctgacaacaagagtgtcgccgccgtgagcaaggctgcaggggagaagtggcgagctatgtctgagcaagagaaggcaccttatgtgggacaaggctggccaaaagaagcaggactacgagaaggaccaaggccaactttcgataagaaggagagcacaaagctcaaaaggaaagcttangaccccttgattgatggaggaaggttttgacaagtccaagtcttna

SEQ ID NO: 393559 - DNA, 629 bp, Oryza sativa
tccaccaccaccacccatggcggccaccacccacgccgcctccctctccttccccctctctcacccccaccccacctcccccaaccctaaccctaacctccccctccgccgcgccccccaccgcgtccgctgcgccaccgacgccgccgccaccaggcaccggcgcgcggccgacgagaacatccgggaggaggcggcgaggcaccgcgccccgaaccacaacttctccgcgtggtacgcgcccttcccgcccgcccccaacggcgaccccgacgagcgctactccctggacgagatcgtctaccgctccagctcgggcggccccctcgacgtgcgccacgacatggacgcgctcgcccgcttcccgggctcctactggcgcgacctcttcgactcccgcgtcggccgcaccacctggcccttcggctccggcgtctggtccaagaaggagttcgtcctccccgagatcgaccccgaccacatcgtctccctcttcgagggcaacttcaacctcttctgggcggagcgcctcggccgcgaccacctcgccgggatgaacgacctctgggtcaagcactgcggcattttccacaccggatcgttcaggattctcgcatgacggtgctcgt

SEQ ID NO: 393560 - DNA, 577 bp, Oryza sativa
gcacggggaggacgtgaagagggaggtggccatcatgcggcgcatgtcgtcggcgtcgtcgtcgcgcgggggcggcgccgcgtcgtccgccgccgtggtgcggctccgcgaggcatgcgaggacgccgccgacggctccgtccacctcgtcatggagctctgcgagggcggcgagctgttcgaccgcatcgtggcgcgcggacactactccgagcgcgccgccgccaacatcttccgcaccatcgtcgacgtcgtccagctgtgccactcgaacggggtgatacaccgcgatctgaagccggagaacttcctgttcgcgaacaaatcggaggactcgccgctcaaggtcatcgacttcggcctctcggtgttcttcaagccaggcgaccggttcacgggaggtggtggggagcgcgtactacatggcgccggaggtattgcggcggagctaacgggccggaggtgggacgtgtggagcgccggcgtcatcctctaacatcctcctctggcggcgtccctccattctggggagacaacgacgagaagatcgcgcaggcgatcctccgcggcgccatcg

SEQ ID NO: 393561 - DNA, 435 bp, Oryza sativa
  unsure (1)..(435): unsure at all n locations
tgtacgcccaagctcagcgcaacctctctcgaggtgctaatggcggcggcggcggcggacttcgcggcgagcaagcgggccatggcctacgcgctctgcaagcacctcagcctcgatccgaatacaatatccagtacaggtattgaagagagtgatatcgccaccctggtcttcacatattgtgaaatcgagtgaagatgaggtactgaaatgggttgaattttccagcaattttgttggaaaatgtggagaacagcatgtattgcttggtaatctgaatcaagacttgtcccagaaatcagttctgttgggtaatggttttaaaccatcagttgctgatattgttgtgtttgcaaccatacangtttttgtgagtcatcttggtgaaaacgagttgcagaaatatccacatgtattgcggtggatggactatat

SEQ ID NO: 393562 - DNA, 583 bp, Oryza sativa
  unsure (1)..(583): unsure at all n locations
atccattcccccaccgccaacatccctctcctcctcaatccatcgcgccgcccccagccacctcttcgcctttccccgtgtcgctcccccggccagggaaggacggtggcgagcggattcgccgcctcccgtcctcgggagtgacggcggcgcatgaatccagtggcctccgtactcgggagcggcctggcgtgagcgggagcaccggcaacacacggatccacccacctccgccctccggagcggcggcggcgggcttaggtaggcgggagcgagcggctacggcggcggcggctgcggcgacgacagctacagtggctgcaacgacggcgacgacagcggcgcacgctagctgcgacgatgacgatgacgatgaccagcggcggccggcgacttgcaatcgagaggtcggagcaggtggngcgggtcgcgggggcacgcggcacggtggtcaanggtgcaggggcagcaggccagcggcgcgtcgggatctggaatgtgactataggaatgagggcctcgggactgcaagatccggtggcgctggtgaagcatcggcgggtggagncccaaccagggcacg

SEQ ID NO: 393563 - DNA, 623 bp, Oryza sativa
  unsure (1)..(623): unsure at all n locations
ttctcccccaaccgaaaccggaaagaaaccctagacctccgtctccggcgaccctcccctcacctcctcgccgcggctccccccgcctgacctccgcgcgccccccgtcgactcccccccgcgaatccggatcccgcgcgcgcgaggaaggagggggggaggaggagcgggagatggggtcgtcgtccaaggtggtgcggccggaggaggtgctggattcgctcgccaacgacggcaccatcgacgcgctccgcatgaagatcatcgcccagctcaaggccaacgaggatatgaagaaaaatactatgatgatggcggagcaaagcagagttctaaacactcctggagctgagaagaagaccaagagggagctgcctgatgcccttcggcaggaattggaaaatccagcccttgagaaagcttcaagggaagtctgggatctgatacttgagaatggtggactggggaaagagattactgacactattgagagtntcttctgccgcctcagggtatcgacatgatgccacctncaccttcaacatctattccttctcaccaagagagagaaagaaacatggcttcagattggggttagaagagcaaggagatttataccccng

SEQ ID NO: 393564 - DNA, 440 bp, Oryza sativa
tcgtatgaattaaaaaatcgatcctccaagaaaccacaggatgctgaccaacccatgggaaaaagggcctccagtccccagacaggatctgagaaagacacaaaagacaaatcagcgaaagacaaagacaaagacaaatcaggccagcaagacaaagacgcaaaagaggggtcctctgtgcaggttgctggttcttctggtgaaattactgcaggttaccttttgaagaaaagtgcaaaaacaaatggatggagtagggggtgtgtttgtcctcaatgagaaaagcggaaagcttggctacacggaggaaacaagaggtgagacatctccgcggtgtcatcactcttgaggagtgtaaccttgaaaaagtagaggaggaagaacctcctaaagtttgaaggaattaaaaaaggcaaatgggccagagaaaggcccaagtc

SEQ ID NO: 393565 - DNA, 787 bp, Oryza sativa
  unsure (1)..(787): unsure at all n locations
caggaaacaggaaccatttttactcatcatcagaaaacagttattttggatgctgatgctggcaatcataagaggaaaataattgcttttgttggtggcctcgatttatgcggtgggcgatatgatacacctagccatcctctatttaggtctcttcagactgtgcacaaggaggattattacaatccaaattttgctacagttgatgctcgtggcccaagggaaccatggcacgacttgcattccaagattgatggtccagcggcatatgatgttttgcaaaattttcaggagcgttggttaaaggcatccaaacgccatgggattaaaaagttaggaaaatcatatgatgatgccctcctcagtattgaaagaatacctgattttataagcattaatgacgcaatatattttagtgacaatgatccagagacgtggcatgttcaggtgtttcgttctattgattcaaattctgccaaaggatttccaaaggatccacgggaagcaacccgcaagaatcttgtttgtgggaagaatgtactgattgatatgagcatacatactgcatatgtcaatgctattcgtggagcgcanactttcatttatattgagaaccagtatttcattggatcttcgtttaattgggattcaaacaaagatattggggctaataatttaataccaatcgaaattgctctcaaaattgcaaacaagataaaggcaaaaggngngattctctgcatatatagtaattcccatgtggcctgggggtaatccaccaggtgct

SEQ ID NO: 393566 - DNA, 407 bp, Oryza sativa
tggacgcgtgggcactaagctcaaattaagcaaaggattacaagcaaaaccaaaccaaaccaaagcaaagactagtgtagagtagaagagaagagtccaccaagaaaccaagaagctagaagcatcatggggaaggattgcggcaagcacggcgacgacgacttccggcagggatgccggcgattcatcaccgtcctcgtcgtcctcgccatcctcgtcggcatcatcgccctcatcgtctacctcgtcctccgccccacccaccctcgcttctacctccaggacgccaccctccgccagctcgacctctccaactcctcctccaccgccggcggcgtcctctccaccaccatccaggtcaccgtcgcctcccgcaaccccaacgaccgcgtcggcgtctactacga

SEQ ID NO: 393567 - DNA, 574 bp, Oryza sativa
  unsure (1)..(574): unsure at all n locations
gtaagcgagccaatctattcatacaggtacggagtaaatgtccagccaaaagtaaaaaaggtatcatcacttcatcaagaacttatgtacaacagactgccttctgctttcacttaaaaagcaaaagttttacaacacaatttccttctcggagctaaatccatttggtaaaatggtacatttcccgcacaagaacaggatatgaatagtaccttgatatccagagtaaaaaggaaagaaatgaaagaagaaaaatgccgggaacaaccacaacggcatgcatccacaaccacaaccagatggcaatatgaggacatcaaactatgttgctattcacaagctagcttggtaccaaagctgctgaggctgatagcaaaggcttgaaacgctgagagtggctgccggtaatccatcgtgaagatattgtcatcgaccttaccaaactgcaacagaactgtttcctcatccttcgagctagcaggatcattgggatcagcagcagcaactagttggaaattcttgacagatgcaactgtcacccgcccntggaagttcaagcaccagcactgcaagt

SEQ ID NO: 393568 - DNA, 687 bp, Oryza sativa
  unsure (1)..(687): unsure at all n locations
acggggggggttttgagggggttaaanaagtttcacttccggcagcggggggaaaaggnggggncccgnaaaaaaatttgtcnaaatttccggctttnttggtttttggggttgncccaaaaaacccaaacncaacnggnaattggggggtttctttttnttgggngaaggggttaaacacggaaggaccttttttcggggggcaccgcaccgaccggccggcgtcgctgtaacgcggcgaccaaggaggccggcgaggccatcgcccacgcgtacaaccacatctacggcctctccatcaccggcctccgcttctttcaccgtgtacgggccgtggggccgccccgacatggcctacttctccttcgcccgcagcatcgtcgccggcgagcccatcacgctgttccgcgccgccgacggcgccgacgcgcgccgcgacttcacctacatcgacgacgtcgtcaagggctgcctcggcgcgctcgacaccgccggcgagagcaccggctcctccaagtccggcaagaagcccggcccggcgccgctccgcgtctacaacctcggcaacacctcgccggtgccggtcaaccgcatggtcgccatccttcgagaagtcctcggcaagaaggccaacaagcggatcgtcgcatgcccagcaatggcgaagtggcctttcaaccaaggcca

SEQ ID NO: 393569 - DNA, 578 bp, Oryza sativa
  unsure (1)..(578): unsure at all n locations
ttacaacttcaacgcctactacgacccggagctgaagcgcgcgcggcagaggctcctcgccggccgcggcgtgctcgtgctcgacgccgacatcaacgacgcgctcctgctcgagaagctgttcgacctggtgccgttcacccacgtgctgcacctcgccgcgcaggccggcgtgcgctacgccatggaggcgccgcagacgtacgtggcgtccaacgtggccgggctcgtgaccgtcttcgaggtcgccgccaagcacgccgacccgcagccggccatcgtctgggcctcctcctcctccgtctacggcctcaacgccgacgcgcccttctccgaggagcgaccgcaccgaccggccggcgtcgctgtacgccgcgaccaagaaggccggcgaggtcatcacccacacgtacaaccacatctacggcctctccatcaccggactccgcttcttcaccgtgtacgggccatgggggcggccggacatggcttacttctccttcacccgcaacatcctgcaggggaagnccatcacggtgtaccgnggcaagaaccggttcgaccttgnccgcgacttt

SEQ ID NO: 393570 - DNA, 636 bp, Oryza sativa
catccagcgtgtagtgtgtagcgtgtagtgtgtcgtcacgatgtcgcgcgccatggcggcctccaggcgggtctcggtgttcgtcgccgcgttggtctgctgctcactcgtgcggctctcccggtgcggcggcggcggcggcgggcagagggcgcagaactacacctcgatgttcagcttcggcgactcgctgacggacaccggcaacctcgtcgtgtccagcccgctctccttcagcatcgtcggcaagtacccctacggcatgacatacttccaccgccccaccggccgctgctccgacggccgcctcgtcgtcgacttcctcgcgcaagcgttcgggctgccgctgctgcagccgtacctgtcgcgcggcgaggacgtcacgcggggcgtcaacttcgccgtcggggcgcgacggccatggatccgccgttcttcgaggagatcggcgcgtccgacaagctctggaccaacctgtcgctcagcgtccagctcggctggttcgagcagctcaagccctcactctgcagctcacccaaagattgcaaggagttcttcagcaagtcactcttcctcgtcggggagattgggggaaacgactacaactacgccttcttcagggcaagagcttggacg

SEQ ID NO: 393571 - DNA, 880 bp, Oryza sativa
  unsure (1)..(880): unsure at all n locations
tcggttaattggcaagtattttgaagagatcagccaagatactgggaaatatggatatggggttgatgacactcttaaagctcttgagatgggtgctgttgagactgtaatagtgtgggagaaccttgaaaccaacagatatgtgcttaagaacagagcatctggtgaaactgcgatcaaacattttaacaaagagcaggacgctgaccagagtaatttccgtgatccggctagtaatgctgagttggaagttcaggaaaaaatgtctcttctggaatggtttgctaatgaatacaagaagtttggttgctcgcttgagtttgtcactaataaatctcaagagggatctcagttttgtagaggattcggtggcattggtggtatcttgcgttaccagctagatatccggtcatttgatgagctttctgacgatgagggattgtatgaagactctgattagcaatcagccaatcacatgactgtgctggcccagggaaggacgccgcagctgcaacgagtctgattcgctctacttacgcaggaacacttcgaaagcagctatccagaaattgatgggcgtgggccagcctcatcctatgctggaagggattaaggcgaaaggattactgagtcacatcatcatgatagtaatgtgtcaagaagttatcgaacttaaaaggcatgctgttgccaaggtcgtactggttgtctattgtctgctttttgcaactatattcgcaagttctgaattctagtgtctgcttgaaattgagcacgctggacgcgctcgtgactatatggtgtaatctgctacttttgcagtttttgcaatgaagttactgttatgctagtttgctcctcttnnnnnnnnnnnnnnnnn

SEQ ID NO: 393572 - DNA, 647 bp, Oryza sativa
tggtaccaccttgctggtttcaatgccttttggtgggcccatcacctactggtgattgcatatatcctcttggtgctgcactcctacttcatatttctcaccaagcagtggtacaatcgaacgacgtggatgttcttggcagttccagtcctcttttactcctgcgagagaactatcagaagagttcgcgagagcagttatggggtgaccgtcatcaaggcagcaatttaccctggaaatgtgctctctattcacatgaataaaccatcaagtttcaagtacaaaagtgggatgtatatgtttgtaaaatgcccagatgtttcgccttttgaatggcatcccttctccataacttctgcacctggagatgactacttgagtgttcatatccgtacattaggtgactggacaacagaacttagaaacctatttgggaaggcttgtgaggcacaagtaagttccaagaaggctacacttgcacgacttgaaaccactatcatagcagatggtctgaaagaggagacttgctttcccaaagtctttatagatggtcctttcggcgcaccagctcaaaattacaagaaatatgacattcttttgcttatcgggcttggaattggagcaacgcctttcatcagcatactgaa

SEQ ID NO: 393573 - DNA, 921 bp, Oryza sativa
  unsure (1)..(921): unsure at all n locations
ggaaggaagctcccgaaaatatctcttgctcgatataaacgggccgggtcaggcgcgaacctaaaactttcggaagagaatatctgcagcttgatcagttccaaaactgagatatatctgcagcttgatcagttccaaaactttagctgggcacgcactaccggcagcagttcaaggacaaaccaatttgaaggcggctagcgccagcacaggcatgccgatctcgcatgagctgggcgagcctgacgaaagcttctacaatctatggaaggaagagtgtgaagaactgtgggaggaagaggacgaactgtggggggacgaagatgttgaggaggagctgtcgctgcgtcaccctggattcaacaagtggaccgtccagcagggtgctgcaggcggggaccatattcgcgccaaggacaagaacttttactgctttgaggtccaagttcacttcactggagaactagttgacggtacgcagttcgtgtcaagccgagaaaatgacattccagagaggtttatactggggcaagaggatgtgacgcatggtttcaacttagctgtcagttcgatgcaaccaggggagaaagctatattcactatcccttcagcgttaaccatgacaaaagctggctcccctgctagcatcccgtcaaacatacctcccaaccaaacactacggtttgagattgagctcatcgccatgtttactataattgacattttcaaagatgaaggcatattgaaaaagattgtcaagaacgcagaacccgacagaaaacaatctcactcaagtgattttgtatttgtgaaatacgacgcatgcctgatggatggaacttcaatgtccaaatctgaaggtgttgaattcagccttaccgacggcttcttttgtctgcatttgcacatgctgngcatact

SEQ ID NO: 393574 - DNA, 511 bp, Oryza sativa
  unsure (1)..(511): unsure at all n locations
tcttccttcagatcgcccggaatcccgccgccgcgagcccaccgctccctcgcctcgcctcgcctctgattcaggcccccgcccccgccgatcctccacaccgcgcgcctagggtttcgactgctcatccatccgctcctgggggaaggagaggagccaccgccgcgcgattcggggcttgtatgtgtatgtagggttattagattcgtcgacctactgattctactctctcggatgacctagatttcacgtaggatcctctacttccaaccgattcgccttctgcttacttgttacatttacctctacacctctccactcttcctgctcctgcacctgcacctgctgttgctgttgaagatgagctccgagcccccagagccagagcccgccaagcgcaacatgaggatcagttactccagggactttatgatctccgttggagagaccgaccgctgcaagaagctgccccaggctttgatgcctcacctctcagtgatctgcangagat

SEQ ID NO: 393575 - DNA, 604 bp, Oryza sativa
  unsure (1)..(604): unsure at all n locations
actgtcgacacctaagcatgggcgctcctgctcaagaactacgaccgcctcaacgttcgcaccggtcactacacaatgctgcgattcggccacttgccggtcaagcgccccatcgccgaggacctccgctacggcgtcatcaacctcgacaagccctccaacccctcctcgcacgaggtcgtcgcctggatcaagcgcctcctccgcgtcgacaagaccggccacagcggcacgctcgaccccaaggtcaccggcaacctcatcgtctgcgtcgaccgcgccacccgcctcgtcaagtcgcagcagggcgccggcaaggagtacgtctgcgtcgcgcgcttccacgccgccgtccccgacaccgcccgcgtcgcccgcgcgctcgaggcgctcaccggcgccgtgttccagcggcccccgctcatctccgccgtcaagcgccagctcagggtgaggaccatctacgagagcaagctgctcgagcacgacgccgaccggcacctcgccgtgttctggatctcctgcgaggcccggacctatgtcaggacgctctgcgtccaccttggcctgctgctcggcgtcngcgcgcatatgcaggagctgc

SEQ ID NO: 393576 - DNA, 949 bp, Oryza sativa
tcaaagtcagtatcatcgttggggaatccaggagctttgcctccaaagctcaactatagccaatcctttgcttgtattccttatacagctgatgcatactatggtggggtcttgactggatattcttcacatgcaattgttcatccccagcaaaatggtacagctaactcccgggtgccgttgcctgttgagcctgcagcagaagagccaatatttgtaaacgcaaagcagtaccatgcaattcttaggaggagacagatacgagctaaattggaggcccaaaataagttggtgaaaggtcggaagccatacctccatgaatctcggcatcgccatgccatgaagcgagctcgtggatctggagggcgcttcctcaacacaaagcagctcgaggagcagaagcagcaacaggaggaggaggccgcatccggtggcgcgagctctggcaataggacatgccttcagaatggcaccggtagcgcgccttcagcttcctctccctctgaaatcgcgagcgtctcaaccagcagagaattccttggtaaccatgagcagagccacttcccctcagctggcttccttcccacaatgagcttcagagcgcagaatggcggagatgggaagctggtcgcgcacgccattcaccagcgcgtttccatgatgaggtgaggtgaagaggggtgaagtgggttcacctcagcaccatcactttggctctctccctgctggtggcaattcatccttggcttatgaaaataccttatgggaaaaaaaaaagtagtttcatcctcaaatggaccaaacatgtgtggctccattttaagttttcctgtaactaaaagcactgcaatgatcaactgactgttggttctgtttgtggatgcttatatctgtacttgctgtatctaatactgaactctaagttgaaaccctgaaaaaaaaaaaaaaa

SEQ ID NO: 393577 - DNA, 962 bp, Oryza sativa
atcctgggcgataagacgagggaaattactaattaagggatgggattaaccggtcatggcctctggagctggagagctttgctataaaagagctccaatggcgtcccttacacctccccgcccaccattcccactttcgcccacacacacacccagatccacagccatcctcccaccgccgccgccaccatctccaagcccacgaacacccacagccaccgtgagctcgagcgaggtaagaaaagctttagatctgagcgacttcgagcgtcttcaaggtaaagttttctcgaaaccctcttcttcttcttcctcctctggctcccccacctgttcttctacggtttcttggttaggttgcttgcagagagcgagagacccagggccttttagatccagggctcccagatctgctgtttttctttcatcttctttgtgttctagtgttaggttggtagccaagaggggttctttttccacacctcacttgctagatctaccaccaaaaagccatctgtttttttactgtggctgtcgatttctccctccttcctgcctgttcttgattttggattcggaaccaggcaaatctttgttactactgttttagtatcagaaaaaaaaatcccaaaaaaaagagtgagtagatggctgcagctatagatctgtcaggggaggagctgatgagagcactcgaggccttttatccgagatgcctccgggtcggctccggtttgttcccagtttagtcccacctcgccattctccttcccgcacgcgttcgcgtacggtggcgggctggcccagcagccagagctcagcccggcccagatgcactacatccaggcccgcctccacctccagcggcaggcggcgcaggccggcccgctcggcccgcgcgcgcagccgatgaaggcgtcgtcgtcctcggcttcgtcggcggccccggcggcgacgccgcc

SEQ ID NO: 393578 - DNA, 692 bp, Oryza sativa
attggcttagtgtttgccttataatagtcctaggcttgcttcctcggtttctttgcaaagtaatctatcagaccttttggccatctgatattcaaatagcaagagaagctgagttattaaaaaagctaccccggcagttgggttcaaggcctgcaagtgatatcagctgacaacaatggttcggcgcagttgctctgtgatcccaggttgcgggttatgttgattcaattgttgagctgatttttgcccatttttttgaagaggctgaaagatgagatgaggcggctgtggaaaaaggtactgactgtgaatgggtaggcaccagacagcgtcgtccttcgggggccaagtaatcaagaaatgacaaatgtacagatatgggaaagggatacatacactctgtattttaaggtagattttgtggttaggaaataaataggtacatagatacaaaattctttttgccaatcttttgtattacttgattatatgttaaccatttttctttttcttccctcctcgtcaaggttttagatggagacttagtggtgtgtccaaatggaattttacgctttacacggtcacaagattgatctcctttcgtgacctatattcatactcttgctaaatttgacaccagtgagccatttgaactttgaccggcgaagctgttaattgaaatctcttcttac

SEQ ID NO: 393579 - DNA, 219 bp, Oryza sativa
ttctgtttcaacgacggctgctcggaattcggagggagggaggaaggaatcggagtgctcggtaagcttcgcgaagcgggatggaggcgccgcgcctccgcctcccgttcctcctactggcggcccttgttcgtcgccttgcctccggtggtctcctctgctgccccctgctgtccaccccgtcgccaggtccccttccctcccttctctcttctctct

SEQ ID NO: 393580 - DNA, 495 bp, Oryza sativa
tcggcgagggcgcgccgccgctgatgtcgcagcagcagcaggcgccggcgcccccgtacccgccgtaccggcaggtgagggcggcgaccccgcacagccgcgccgtctcgtgcgtgaggttctccccatgcgggcgcctcctcgcgacggcgtccctcgacggcacggtcgcgctgctctccccgtcgtcgctcgccgccatcgccaccctgcgggggcacgccgacggcgtgtccgacatctcctggtccacggactcgttctacctctgctgcgcctacgacgaccgcacccttcgcatctgggacgtgcgccccgtcctcgtcggcctcaacccctgcagcggcggcggcggctggtggttcccattccgtcgaccccaactgcgaccgttgcattcgcgtgctcaagggccacaccaacttttggtttagcgccaactttaacccgcagacgaacagcactgtcgcggtcggggggttcgactgcaccgtg

SEQ ID NO: 393581 - DNA, 423 bp, Oryza sativa
  unsure (1)..(423): unsure at all n locations
cttagtcagaggtcacacagctcatcgtctcgagctacctagctggaagaagaagaggaagaagaggaggaggagctcgtcggagtttagttggtgagttcgccggagagatcgatcatggagaatctgaaggcgacggagctgaggctcgggctgccggggacggaggaggaggcggcgccgccgccttctgacgcccagggccggaagcaagcgcgccctcgccggcgagcctgatcaggccttgatcaagcccgccgccgccgccaaggcgcaggtggggggatggccgccggtgaggtcgtacaggaaagagcttccttcagccgacgacgacgacgacgaagagcaagcngccgccggtttccgcggnggggaagacgaagcagaaggaggatttttgcccgcgccgttggnttttng

SEQ ID NO: 393582 - DNA, 598 bp, Oryza sativa
ttctttaaatcatcaattggagatgttttcttgtatctgcttcacaagggtgatgtatatccttgcacctcatgcaagaaggatgtttccttcagggatatcataaaatgcagctcttgtcaaggtaattgtcataaagagtgcacattaaggtctgttggtagcaaagagggcaatgctgcttccagtttaacatgcaagttgtgccttcagaagcgtagtcttatgcttacaaattacaatacaaacgcaagtttcatcctacctcaacagaagagtaatgtccatcacgcagtggcagctcccaaaataatctttaaggttggttcttcccattccgctgaaccagccacaaaggttgaagctccgccaatcgtgaaggtagaagcccagccagtggtcaagatggaaacctggccagttgtgaagatggaaacccagcccactgcaaatgtagaagcacagccaactgcaaaagtggaagcctttccaatttcgaatttggcaactcagaataatgcaggggcgcaagtccagcctaagacaaaatctaaaaaacccaagccagaaaaaccgagaaaatccaagaagactgaag

SEQ ID NO: 393583 - DNA, 551 bp, Oryza sativa
ttataatcctccccttccttgcttgcaatcctagcaagctccaagatcgcggcaagctagcctcgagggaggcccgcctgcccgggcctcgggctccgggggcccggttcttgaggtttcttggtcgtggggtcgaggaggtggtgggtggtggtggctgcggcttggcgcgatgaacaaccacgcggcgggcgggagcacgagcaacggcggatccggggtcgacggggatggcggcggcggtggcggcgcggccaggaggaacaccaagatgcccaagtattccaagttcacgcagcaggagctgccggcttgtaaaccaattctaactccaaaatgggttgtatcggtgtttttccttgtcggcgtcatcttcgtaccagttggtgttgtttcgctgctagctgcacaaaatgttgttgagatagttgatcggtatgatgatgcatgcgtgccagccaacatgactgataacaagcttgcttacatgcaaaacccaaacatatccaaagagtgcacaaggactctgacaattacagaggatatgaatc

SEQ ID NO: 393584 - DNA, 573 bp, Oryza sativa
tttttttttttttttggcgggtcaacactcaagagaacaatcacattcatttcacaggagctggagccattgatctcatcaaaatttgctacagtgaaaaatgatgtgacaaacattgcttctgtgtatatatctttctcggcacatctgcaattagtgcagtatagatttcaagtgccgtgcaaatgaaaaatggtacaacacagagaaaaccaaacccttttggtgcttccagtgacagcttcaatataatcttccatgtgacgaaaattttccctcaccaagcaaatggacattttccttccagagagacgtggcaccagccccggtctcgaaccaatgggcaatgtttgccggtaacacaccgaactgggtaccaactttcaaccatattaaagtggctgcagtacttctctgaatcatgtattcttagctgatattctagtttgtatgatctaagtgattcatactgccaaaccagttgtatctactacgttctgcagaaagcgtgccttggcagaagggtccgtcaaaaactgacccagaactgcaatcgttgcagtgctactcctg

SEQ ID NO: 393585 - DNA, 570 bp, Oryza sativa
  unsure (1)..(570): unsure at all n locations
aaggcgcgcaaaaagagaaggtttcatcagtttttagtaatgctcacgatcgatgacacaacgacatcaaattcaggcaggcatttttgctcccagaaaaaaacttccacgctcacattccagcgtgtctaattaaataaacgagttatgaggtcatggcaaacaacccccagttactcctcgagtcgagccgtccaagttactcctcaagccgtccgagtatgtcgtgctcttctgaaaagaaggtactctttctcaagcaagcttcacttcagttcctccatactcaggtagcagaacggtgtcaccttctttcaaaagatacagggatcagtttgccatccctgtcacgttcgccaggaccaacagccactacttttgcagaattcagctgcttggtggtctccgggaggaggatgccgccggcgctcttgttgggctgcagcagcttctccaccagcacccggttcatcgacgggatcagcctcctcgccgccattgcccgccgcnacgagntcttcctcttctctcttcttgaggagcaagttgatgggcgtagtgggancgtcn

SEQ ID NO: 393586 - DNA, 794 bp, Oryza sativa
tggacatgtaacacaccccagcaatcatttaaaacagaagtacagagttggcttgttttaacaacatgaaatggtgttagttcagaaaataaaaatagttagctgaaaacagaaaaaaaaaatctatgtttgagattacacaaaatgtgagtgagaacagacacgaatggccacggcacagacgaccttctcaataattaagatacaaagctaatggtcaaaagccaatctaacttgttaaattggtgttacaagtttgcctgtacctgactaatcgactagagtagtagtacacactacacagctgctaactgcatgatcggatcaaaacggagaaaggtttgcagcaacaagtacaatattaacagtcacagttgttgaagcttcatgagataacttcagttgtttctgcaagattttgcatccatggggtctccctgccctcttggtgaatgtacagatgaagcatgcatcactctttggtttttagcagcagcctggtggttatcattatgtgactttagtgaagccgcttcatcaacagctccagtgacatgctctgatggctgatggaaaagcaacagagctatggaccgatcaattggatttgtctgtgtctcgatgctcccaggatcaacaaacctacaaaacaggaatatcaaagtggaaaggcaacatatagacaaagcggccttcttacctgtgttaaaattttaagtaatgtaaacaacaaataatcttctatctgaataatagaagggtaacatctaataaggcaataacctagatctcac

SEQ ID NO: 393587 - DNA, 1221 bp, Oryza sativa
  unsure (1)..(1221): unsure at all n locations
nnnnnnnnnnnnnnnnnnnnnnnnnnnnnnnnnnnnnnnaaaaaaaaaatctatgtttgagattacacaaaatgtgagtgagaacagacacgaatggccacggcacagacgaccttctcaataattaagatacaaagctaatggtcaaaagccaatctaacttgttaaattggtgttacaagtttgcctgtacctgactaatcgactagagtagtagtacacactacacagctgctaactgcatgatcggatcaaaacggagaaaggtttgcagcaacaagtacaatattaacagtcacagttgttgaagcttcatgagataacttcagttgtttctgcaagattttgcatccatggggtctccctgccctcttggtgaatgtacagatgaagcatgcatcactctttggtttttagcagcagcctggtggttatcattatgtgactttagtgaagccgcttcatcaacagctccagtgacatgctctgatggctgatggaaaagcaacagagctatggaccgatcaattggatttgtctgtgtctcgatgctcccaggatcaacaaactttcccgaagtttctgcattttgcatgtcctttacattgtggctatctccattgttgttcattgtatttgggaagacttgcctattctgcgcacttcttgccaggcggtataacccatctcgaatgcacatttttgttttcacatccaactgactaactgcatcctgaagctgccgaaagctgttctcttcaactgagttatcagaagaaatagacgatacgaaggacccatcaactaccattgaggtgcccattgcaacatcagaatgacccaaacctctttttcctaaggacctctttccaatttcatgattctcacaaggatatgaagcccttcttgtcaatgtttgatgaccaggatgtccagtcacattatcactgataagttgtcctgatgccgaactggccactttcttctgcaccttcaagtttctctctgcaaaggaagccccagatggaatgatctggcaatttctttctggataggactcagaagttatgttacttggtgaagttgaatccaagtggttcttttggttcaataaattctgagaagagcttagttgagaacctgaagctatagaaaacttctgatcttcaggctgttccatggcattttccgatgaatatcgatttccacccacgagataaa

SEQ ID NO: 393588 - DNA, 540 bp, Oryza sativa
ttttgttttttttttggtccaacgttgctcgagcgttaattcccggggcccatcatcaggctgttccccacaacgaatatatactcaattcttaaaaaacaaaagacgatgtgcgtcatattctttcatacagcgcttcccgttttacattgccttccaacagttcacatcttcgttgaaaagaattgagcaatggctctcagattcttatgcatgcagttatacaacaaggtaaagtatgccacaataaacgccctacaagagttacaagacctaaacctcagcaatcccagatttctgacagttgcaaaactatggaatgcagcgcatccctattccctccgaatatgactagtctctcatcatgataaaaagttgaaaaccatggtcataatttaaaggtgttcattcactcgtatgggttcctgaagttcttgaggagttctggaatgtcgtatccaagcatatcattcaccggctgcaccatcttgggcttgattttctcaaacttgtcaatgctatacccacccaggacatctc

SEQ ID NO: 393589 - DNA, 755 bp, Oryza sativa
gcatgtgatggaacactgtaaaaagcttaatcctctctatgttgtcttaaatccaaagcatttttacagttaagagggggagttcctggctagaaaaaaaagctaggcagcctgaagagttacagctacagcatacaacatcaaggcagtaagcatacagagccatgtacaccaacaattagcgtgcagagccaacaaaagatcatctaaaaatacaccaggcaccagctttgcgatgtgatacaaaacaatcccaacaaaatacagtcgaaatgcatgtccagctaacagtccaacgatggatcccagaatatttttcccaagctaattcatggaaattctctgtgatagaacaaattagtcatgccaagtcgattaggtagttcagcccgttgaagatcccatcaaatagagcctagtgcacactaatctccatctctcatcaccttcacgagctaaccatgttgaactggaacctagacagctgctgcggaatggtggaaatgactggcccatatcgctgaacgttgtcatagagttcaaacagtggaacagcaagcagcttcaggttcctcggaacagcaaaatactctctttcagataggtgaacaatgaaaagcttcttggcactccttgggcttggttatatgtggagggcagtaaggatacatcacagtctcaaagtttggcctccaccatacagcaacacactctccaacctgccagttaggtggaaaggaaggcgagttcactgc

SEQ ID NO: 393590 - DNA, 744 bp, Oryza sativa
tttttttttttttttgccaagaaaccaaattcagattactgcttgcaaaccagcaagaatttcagccacagagtacaagaaatcctgcagtgccattctgcaagatgataaattcaggcaattcatcactacccagcagattactactgtttcttcccccaactaatctctgagaaaggcagcacactcatcgactcatcgtggggttggttattgaatctatcttctccaatcccggttgacggattaaccaaagcgaaaaaccgaaagaaattcagtgcatgaagtacaacagggagatgatcagatgactgacgagatcatgcttcccatcctctgagaacggtggcgcgagcgacacggttgacaccgagggtgaaggcgcccatgcggaggtcgcagtggtggctcctgcacatctccttcacatccctgaacccacgggtcatgtaggtcttcagctcattgttcaccttctcctcgtcccacatgaaaccctgaatgttctgaacccactcgaagtagctctctgtcacaccaccggagttcgcgaggatgtctggaagaatgagaacgcctttcttggacaggatctcatctgcctcagggtctgtggggtggtttgcagcctcaatgatgtactttgctttgatctcatctgcgttgtccttgtttatgactccaccaagtgctgccgggatgaggacatcacattcttcagtaagcagtgagcgtgggtcgatt

SEQ ID NO: 393591 - DNA, 519 bp, Oryza sativa
ttttttttttttttttgcgcatgtaaaatggtgataactagcttcaaaatttggttactcatagtactacagtatgcagtagtagcatggtcaactgatgaatacaagtccttttttctgactgcctgctaaaaattgtgttagttctatgtcacttctgttactattaggctccactgtacccgatgttggctgcattttcccctacaataacaaaccaagccggagcgcttcttccccgctcagactgctaggcacataaactccataggaatattatgggaaaaagaagagaaaaaatctgtgtgcaataacgtccaaataacatcaccataataaattttaagtctctccatcggcttctttagcttcagtaggacgatcatacccgctttggagtcgacctgattatacgagttctgcttatcacgaataaaagcactgggatcatcaggaatccttttagcaacagaacagctggatgagatccttgtcgcggagtccataatggagtaacag

SEQ ID NO: 393592 - DNA, 1051 bp, Oryza sativa
  unsure (1)..(1051): unsure at all n locations
aattgggcaggagcattccccgaacgcggtggaacaggtgcatcaccgantccgggtacggggacgacgccgagttcgtgttcaagctcggcatcatctgcaccggcgcgcagccggcgacgaggccgacaatgagggacgttctgcagattctggtgaggtgcgagcaggcgctccagaacaccgtggacgggaaggtggcggagtacgacggcgacggcgcgccgtttctgccgatcaggggtggcagccgccggaagcagctttcggacaccaaaggcatcgacgacggcaacggcagcttggacagcatagtatgagaacaatggtcaataagaagtataacctgatccaatggttaccatctaggagagatggcacgctagttaggagagcaggtagataccagacaaatacattcgccatccttcagttatttgcatgtaatgagtattgtaactttgtaaatgcatctataaaattttgggacagtgagagtgcagtcacatacataaatgagatcaaacaagagcaattagattatgtccccttctttattacgaagagaaaatacagagcaaaaaaatcttggttctcaacatcaattaagggggaaaagaatctgacagaacaggaatggaaattgcctgtgcctccatttccctgttagtctgctactgccatccaacgttttatgccattagaaaacctccaaactcattggcgctatactagctatatcccgctgcagaggcacttatgtttgccctcagaatagccaaaaaaagatggtaagatttcaaggggggagccaggagtattatgtggattttgaagggggaaatgagaacctacaaacggagtttgattcatcattcatcaagatcatccttaaagctagtcgatctcgggcatactgggagtgcgaggctgcgagaagagcagctccaatgccagaaccatcgttggccagcttggtaaccaccgaagacgggacatcatccccaagaaggtctgttagagttgattctaagcaantgctgaacttctg

SEQ ID NO: 393593 - DNA, 483 bp, Oryza sativa
  unsure (1)..(483): unsure at all n locations
aaagtcaaaaagaggcattttttttctctctttctttcttcggtcactcaaggaagaagggtcccctcggccctcgcacgcactacaacagctagtgaccgggcatctatcaagcctagtttagaaactactatcaccctctcaccggttcaggttacaagactttataccatctgtctgggttcatataaatgccaatgaaggagcgcacatatatatcaaaattcattagaacgtggacaatgctgagaaagtcttataatatgaaatggaggaagtatttcctagttccggccctacctgcgcgccatacaacttggccgagtgaattccctagctctttacatcgttttaatcactctgtttccaaaattggtcctttcatcatgtatgcccatgcaagcattgaaaacgaagctgccaaggaccagccattgggggagattnaacgccaagaattgctcgtggctggaatgtctgaac

SEQ ID NO: 393594 - DNA, 561 bp, Oryza sativa
gctgaagcaacaacaattcataatttaggtcaaaaaagtagaagtgacaaagctcagctccagatacaaattttccactagtacagtacaaatggatgccatatttttatacatacaaagtgctaaacacgctaagaaaacaaaccgaagttttctcatgatgctatctagtagttttctggaattcatccagtctcctcctacagttattaacacctgaaaaaggctgtgaattttcattctacacctgcaacagctttgtagccgtgtcgagatcatgacaaggctatccaaccatcagcctttctacttggaaggaaacaattctatgttatgcgaggaaggtgtttgaaggtactaatcgagattgaaaataaatacctccataacacccgcataccgattccgcacatactgccccctacacaatctggacgcaggctggtgtgtcggaccttggacctgcgatcgtccgggagacgtacagtttcttaacaggtgtttcatccggaagcgaattcaaggtgcatgacctttcaggatcgttcatgatctccacac

SEQ ID NO: 393595 - DNA, 639 bp, Oryza sativa
  unsure (1)..(639): unsure at all n locations
tcgcgatcctcctacaccaccatgggcaaggaggttgtgccgatcggttgggacggctgggaagtccagaaacccgagcatagcgggatatactacggagagtacaagtgcagtgggcccggggcgctgcctagcaagaggatcgggtggtcgctggtgctgagcgacatccaggccaagcccttcaccggatcacacttcgtctacggcgactcctggatcctgccgcctcccaagagcatgtaattctgcctgggctgggctagctaaccacaacatgtgttgtgtagggccgtgattttttccagcccattgggccgacaccctcttgactggttgcagttaagcagaggttggttttattatttgtttggcaactatgatttgaagatcatatccaagcatgcatgcacatactttgcattattggggggagcatgatgttctgaggagcggctgatgagaatctggaatgagtagttctacaagcttacggcttcttttgtattcggattctgataatctgagtgagaaatctgtgttgtttgagaagctgaatattttgaatgaagagctctcttaaggagtgccttagttcggttgtgcttnnnnnnnnnnnnnnnnnnnnnnnnnnnnnnn

SEQ ID NO: 393596 - DNA, 796 bp, Oryza sativa
  unsure (1)..(796): unsure at all n locations
ccagctgatgaaccataacttggtagtacatgaagcacacactctttccacatgcctaatctagtgtcctttttttttcagcacactaattctgtgcttctctccttttgttatcaacaacaattaagtaacacataaatgatactgttcctcacaacatcatgaactagtatacaacaaaaggacttacatatgtacccaaagcttggccaagcaactcacttcagttgaacttattgatgctgatgctgatgctgatgatataagaacagtactagcagtaacatgagtaggcaagatggctcttcttggacacgtattgtggagaccgaacttctgaaagccagagctgaactgctggacactggagcaggaactatgatgtttgtcangcctgcagcgatcctcttaccggcgacatgtccgtagaacaggccggggatggcagggacgaacacgtcgctctccgagcagattttgaggtccagtgctcttgcaaggtatgaatccccggaatttcaggaactcgcctttgttagcggccggcattatatcatccttggtataagtgtttggaaatgcctccttcagagtatccaggcttttgtgccaccatgtctccgtcaagtagatggttgtatcagcagagaagccaaccttcttcagaaagtgcacaacttcctgagggtaataacagcctcttcttcttgcacctccattcgtcttacagatcttcttttccagcaattcggtctgtaaatccccagctataaccatcccatcggatttctcgaat

SEQ ID NO: 393597 - DNA, 600 bp, Oryza sativa
  unsure (1)..(600): unsure at all n locations
cccttgantgaaaaatttcatcccaatattttgtttaggaaacattaagacacatcagagtatcaacttagaccttgttccgattaactccttacaaacaattgctgtagtcaaaattttgtaaggattttttattggtgtagtaaaaattttggaagagttatttaaagttcgtatagcatcctaaaaaatattaagtaccgaatgtttgtaattaaacataagttgtcggcggggccgcaggcgcagtgtcgacgacaggagctgatccggctgccgaagaggtctccttctcggcggctgatccggccgctggataggtgttcttatcggcggttgatccggccaccgcagaggtctccttgtcggcggttgattcggctgctggagaggtctccttatcggcggttgatccggctgccgcagaggtcgccgtgtcggcggttgattcagccgctggagaggtctccttatcagcggttgatccggctgccgcagaggtcgccgtgtcggcggttggttcggccgctggagaggtctccttatcggcagttgatccggctgccgcagaggttgccgtgtcggcggttggttccgccg

SEQ ID NO: 393598 - DNA, 646 bp, Oryza sativa
gacgcagagcaaagatgatgctgacgatatgattttgtagtttactgtacaattatacaacaagagctcttttcgagctgtgagagtgtgagctactgagcttagtggttccgtagatttatatgccctctgatttcaaggaaaaccccatgaaaccccactgaaacttgtaaggggccaaggaaaagccgaaaaggagagtatatatatgtatgttactactcagttgttgcattttgcttctcttttttttttgtggtcagcattcacaacgaaatgcagagctagggaaacatctattgtcgggtgctatctttctaacattaatctcgttcattgcccggatcatttgtggggataggtgtatcctgtccatcaggtctaccttcggggcatcaagcattgccttgggtggagaacgtgcccattgcattgcccaaatggcgagaggccgcatgtagatgagcgacctgtagtgcccgtctatggtccagccttccggtgtttggaaccaatacccatatccttcttctgaccaaccagcaataaaaattccttcggcagtggtgaatccttgatgctccattccatggagcagcatgtttgcagcaacaccgcatgtagatgagcgacctgtagtgaaaaa

SEQ ID NO: 393599 - DNA, 730 bp, Oryza sativa
acaatgcgattttatattcaaagttttgaaataacatacatcaatttgatttgtcaatagcagcatgaaagcataatacaacgccactaatttataacctcaaacgccaaacatgaccatttcaacaccacctttaaatgttgggattaattgcaaataagaaatacacaagttatatgggctccaaactgggtacatcccgtcaatcaactggcatgttctgtacaaccaaccgttcaaatcttaccaaactcttttgttgagcagaagtataacttctggcagagcaatgaagatactctacgaatcaaaacgctcctcacatcaccctgagaggagaggtcagtcacggtgatgatggcagcggcggcgacgccgttggttagcatgagccgcctcggcgctatatttataaacacatttcttatgtctctgagagaagaggtcggtgatggtgatgatgacggcagcggcgacaccgttggtcagcacgagccgtctcggcactgaccctgaacccactgagcgatgaccctgaacccaccgttcacttgctcgctctaagacgatgacgacgcttgcttgaacgacggttgtgtgtggcgaaggtgctgtacagtcttaaatgaagcttaatcgctcaatccatgccttgctgctatcttgttatcagtttatcacctaatagtatgatatattaccaatgtgcagttagtgccattaaacaagg

SEQ ID NO: 393600 - DNA, 505 bp, Oryza sativa
  unsure (1)..(505): unsure at all n locations
atactgcagtataattaggagggaaatcagataaatttacaccgtcagatcaaatatactggtagtatatactagcagtagaatgtaccataaaaaaactcagcatcaaacccttcaccgagcgtacagcaagtaatgaaacctctgacactgatagtagtcatgagccaaaatctgactggcttgacacagtaagggggactgctacatctatctattcctgtacagcaagaaactagtcatgcccaagacattaaaccaaacaaaatcccctgggatacattcaagcaagatgggcatatcacacaaatccatatcaagtgtctccctgcggccctgctgtatctggatctggtggtcagaaactgatgaaatcgtccttttgttccttcctgtcctgctgagatgaggtgccgcccttcttgccaaatatcatgtcgtcaagatcctgaagcaactcatcagcaccagaacctgctcgctttcctacagngccaactttagt

SEQ ID NO: 393601 - DNA, 579 bp, Oryza sativa
gttttccccaccttctctccacgactccacctgaagcgcctctcgccgccgccggagaagacgcgcagcggcagcagcggcggaagcggcggggagccatggcgccggagccggaagacgacatcatgaacgagaagaacccccgcccgctcgacgaggacgacatcgctctcctcaagacctacgggcttgggccatactccacaagcattaagaaggtggagaaagaaataaaagaaatggctaagaagatcaatgacctttgtgggattaaggagtctgacactgggctggcaccacccagccaatgggatctagtatcggataagcagatgatgcaagaagagcaaccgctgcaagtggctaggtgtaccaagattataagtcctaatactgatgatgctaaatatgtgattaatgtaaaacaaattgcacagtctgtggctggcctaggggataaagcttctccaactgacattgaggaagggatgagagtgggtgttgatcggaacaagtaccagattcaaattcctttgccacccaaattgacccaagtgtaccatgatgacagtgaggaaa

SEQ ID NO: 393602 - DNA, 776 bp, Oryza sativa
  unsure (1)..(776): unsure at all n locations
ncagaaattgatgcacngctggaagaaatgtggatttcctgcacttttaaancggctaagtgcgcaatccagctagggtgctacatgcaagcatcgtgctattacagcgaggtgctgaactacgatgtggctaatgtgcaagcccagcagcagcaaacgttgttgcaggaattncctgatggttcctcaagagacccggacgcaatgcagcgaggctttgagcaattcccaccagagtacgagtcagaattgcagctcaatgcaactttcactcctgcagctttttcaccgagacggaaaggtgagcatccgtatcgtggcgaaattattggcttccctgatgttcaggcaaacagcagccagcctgcttctactcctagtactgctcccagtactcccaaccctgctacaccacagacgaacgccctcgctactggcactagtggcaccccgagcggcagcgctgctcaaagctcaggaacaatcaacacgaaccgcgggtttctattcagatgcttcgggccatcgcccacgagctgaaggatccatcaagcttatatcgtctcaatcgttgtcgccgccgcagctaattactacttagtaatatcatatcatacttggaattgcagtatgctggtaatgtctacattttcaaatggatccacattaaataaaagttgtgattgattttgtactgccacaataaaaaaagaaaaaaaaaaaccaaaaaaaataaaaacaacaaatctacaagaatatatgccaactttggccgc

SEQ ID NO: 393603 - DNA, 580 bp, Oryza sativa
cccgaaccgcgagtccgcgacgccgcccggacgcccgaagcatcgacgccgaacggccgaggcgccgacccctcgacacgctgtccccggtcgcgcctcgcgggctcgcggcggaagggtggcaggcggaggctggagccccgagcaccgagctccgggtggtcagcccttgaaacccatcccctccacggaccacgccgccagccgcagcaaaatattttgtccatcacaattgcccatggactctgccgttgatggcccgagacaacctccggctagggcggggagccgcctctgcacacgcttgcggcgagcggaaggccgacctcaagcgcaccaaaaccttagagcagatatgcagggaatgcttctatgtcgtctttgaggatgagatccatcagactatagttgacaataatttgcttaaacctggtgatcgtgtggccattggagcttctggtggaaaagattaaaccgtgctcgcatatgagctatcagagctaaatcgtcggaacagatattgacttgatttgattctcttatctgcggatgaaggaattactgggtatagagacgactc

SEQ ID NO: 393604 - DNA, 603 bp, Oryza sativa
ttttgtgctattcaacgcaacgcagaactttgatggtgcaaatttcagcagtggggagattcttgcaattcattggcaatttcctttatctgttcgccacgagcacctttcttggagttgctgctggacttctcagtgcttatatcataaaaaagctgtacttcagcaggcattccactgatcgtgaagtttctattatgatgctcatggcttacttgtcttacatgcttgctgaattgcttgatttgagtggtattcttacagtgttcttctgtggtattgtaatgtcgcactatacctggcataatggaacagagagttccagggtcacaaccaagcacgccttcgccacattgtcatttatcgccgagacatttctatttctttatgttggtatggatgcattggatatggagaagtggaagattgtcggcgaaacattcatcccaatgaaatctattgctctgagctccactattttgttcttggtgccggtcgcatgacctgcttctgtctcctcactatctttcttggcaaatttcgacccctaaatctgtcgatggaacgatctcctatttaaccagatagttatcattttggtgt

SEQ ID NO: 393605 - DNA, 503 bp, Oryza sativa
tcttgttatctcctttgctcttctactgctcatcctcctcttctactactcgtcctctttgctctattcacagctagcaacaagaaggaggcttacacatgcatgtgcacggtctctgccggacgcatatgaatcaggcatgaatagggggcacatcagcagctcggagctcatcgacgccaagctcgaggaacgccggatctccacggccaagcactgccccagctgcggcaacaagctcgactgcaaaccggattgggtggggctaccggcaggagtcaagttcgatccgacggaccaggagttgatcgagcacctcgaggccaaagtgagggaagaaggctcaagatctcatcctctcatcgatgagttcatacccacgatagaaggggaggacggcatatgctacacccaccctgagaaacttccaggtgtgaccagggacggcctgagcaagcacttctttcaccggccgtcgaaggcgtacacgacggggacgagga

SEQ ID NO: 393606 - DNA, 669 bp, Oryza sativa
  unsure (1)..(669): unsure at all n locations
nnnnnnttttttttttttttttttcagactaaattctcattcgcccttgttattggagttgttgattgtcttaacatagcacaaacaccagtcacgtgatatatgtatctaattggataccactggatgacatcaactcaaatatgagtagttagggttcaggatcagagcaaaatgttgaaaacccccctcactaaagcatcttgatctataaggctatacaagaatctcatctatcaacaaaagctttgtagcagaacaccagcgttgtcttgacaagtttcactggctgaaacccaatctgaatccgtagagaagatcagcaagctcgaagcatctgcatttatcaagtgcagtgagcggcattattagctgcaggcagtgctcaccacaattatgttgacaaagaatgtgttcagtataccgcagaagcatgatttctggcttgcatcgtggtcacaacagcatcaagaaaagcctttgcagcgtcacctcggcttctgcggcctctgcagcccttgctgcttcttcagcttcagcaatggctgcttctgcctcgggcaactgccctagcagcaaaggatggctgcctcttccttactcangctttttnacttatccagttcagcatccacttggcggcttactcagctggtctaaacattatga

SEQ ID NO: 393607 - DNA, 490 bp, Oryza sativa
  unsure (1)..(490): unsure at all n locations
nnnnnnnnnnnnnnnnnnnnnnnnnnttttttttttttttaggactatcaaattccactccatctcgagcttattgttattatcaaataaaagaggtaggtgatgctaacaaccaaagaaccgaattaaatctaacgactgacatgatctaaataaaaggaaggaagctgaatctgctgatgctgctaggtgggcaggtgctggagatggaggatggatattgtccatcaaatcgaattcgaattgggggcgaagaagatctcggagtcgagcctcttggagcggaagaggttctccatctccggggtggtgttgaaggaggcctggtagcacggcgggggagatggccttccagacggaggtcctcccggcgaggtgggagaagatggggttgggagtggtgatgatggagaaccactcccatgccggtgtcgtcggcgntctttgggagacgacgaagaacctggggacgatgaaagaggcagccacc

SEQ ID NO: 393608 - DNA, 506 bp, Oryza sativa
  unsure (1)..(506): unsure at all n locations
ttgagttttttttttgngaggggaacaacacgtattcaactctcttgggtgcagtaagcacaattctggtgtcgcaatatgtttattccacagcaagactttcatgtctttagtcttagtacaaaggtcagggacttcaatcaaatacaagttacagcccgatcagattttgcctgtaaagcatgataaacatgtctacagtagaggcaccatcattcttctttaaacacaatatatccatcatgacccacaatagtataaacctttgtttttaatagggcccgaaacaccatgtctctcaagctcacattttgcaccctaccagaatggaaagagctttggatccacagtccaagattatccaagaaattattcaaggctaaaccattcgctccccgatagaggtagggtacttgatactgcttccgtggcccaatgcagacactgctttgcagtgccgctgtggatgcaaccatgcaagaacttcgaagtgcttcgaagtggat

SEQ ID NO: 393609 - DNA, 568 bp, Oryza sativa
  unsure (1)..(568): unsure at all n locations
nnnnnnnnnnnnnnnnnnnnnnnnnnnnnnnnnnnnncagaaatatctgatatacggtaccagtgaatttcatatctcagctaccaagacaattgaaatagctatgagtgaacattgaatatctcttaccaggagcatcactgcatcacaatacttccaggcttccagcactgtgtatgatcacataagaagtaactataattctgtttgtctgacaaaattttggaccaaacactactcttataatggcaagagcaccatatacaaatggaactcaaaggagttcatacagcatggaacaagggattcagttaaaaaaaaaaaaagaatggatgcactacaattaaggaccgattatttaatcatatagtagaaactgacgttggaacggctctgctttattcaaattagagttccaaatcaaaaatcctgccaggaagggaaggtggcaacaaaaaggcaggcatcttggagtacccccctggctcctggatccagatcagcatacaatacaatttgcggaagctggaagctagtggaccataatgctactgatcgatctaagcac

SEQ ID NO: 393610 - DNA, 579 bp, Oryza sativa
  unsure (1)..(579): unsure at all n locations
aaaaatgcctgcaaaacaagccaaggaagcgcctgctccccgagcagaggtttctcccaaagatgagtcccgcgtgaaagcaatagctaagccatctaaggctaaatcctctctggatgctgatgatgactatgaggccgagtctcccaaggagaagccaaagcctaaagaggttgatgtagctaagttgaaagagatcaagagacaggaggagatggagaagaatagacttgccctggaaaggaagaagaagctggccgagaaagcaagcagcgaaggcagcagcccgtgcacaaaaggaggcagagaagaaactcaagagagaggagatgagggccaggaggagggctggggcagctgacaccgaggcgtccactgaatcggacaacaggtctgatggagcagcggaggcacaagcagaggacgactccgctcctgcttctgctccggtgatgagagaacagagggaagagtgtccggtaacagcagaacgtcgtgaccaagagcaaggcccgctgcngaggatcctgaggaggagaagccagtcgactngtctgggtggcctgtgtgagtggcgcg

SEQ ID NO: 393611 - DNA, 551 bp, Oryza sativa
cgttcgagccatcgagccgacaaggcgacaacagccacaacgcctcactccccccaccccacgcgctccgacgagctccgatccgccgcccacctcgccgcccgccggcgatgagcaccgcctccggcgacggcggggacggcggcggcggcggggatggcgcctcgtcggccgcggggggcggcgggaggcggatcccgcccgcctcgtccatgccgtgggtccgcaacctccgccgcttcgtcggcacgggcgccggcctcggatccgaggccttgatggaactggaaacaaaaaggatactgcttgagattttcaaggagcgccaacggaagagtatggaagctggtgccattccaagtttttataagaagaaacctgaagatggatccattagcaatagagttcagaaattggcaaagtacaggtttctaaagaaacaatctgaacttctgcttaatgctgatgatcttgatgccatgtgggtttggctcagagaaactggcgtattgatgatgctacacgtgcttgatagatgaattatgaagact

SEQ ID NO: 393612 - DNA, 428 bp, Oryza sativa
  unsure (1)..(428): unsure at all n locations
acaggtagaatctataatttgttttgttattagcatctttacaggcgaaatatgtaaaattttggccgttcttcttaaacacggcatcagttattcttgaagcactaggctgcgtttatttttatggacgatatagaagaaaatctgttccataactctaaatttttttatgctgaggatatacaactgcaaaaagcctgcattctgccaacagaagacagggtgcacgatgctgattttttaagaatcaaaagaattatttattgggcccttcttcccagcaaaatcgaagatcactcttggagtgctctaacatgggaactcatctctctgacttgattctcaagccgtcctgggtggcagaagaaatcgacaaatactcctctttcctgctgcacattgcgcgaangttgttntncntctnggnc

SEQ ID NO: 393613 - DNA, 442 bp, Oryza sativa
gaagcaaagggataggactaagcatccaaacatcagtcgacatgctgcagaataacacataattcggttcacttttaaactaaacaggaggttttatgtcatcttaacaaactactaactactacagagatccggtataacaactggagaggcaaggggttacatcccttataggcatatcaaaagtctaccgcttactgaatgaacatcccaaggggattcaaccgcctacttcatataagcggcagcatcatgaggcaaaacatagtcttcaactagatcattgctgtcaataatgaggtacaaacctcaagcggtccattgtccaccatatccagcaggctgcggtgacaccccctttgcaacagcaggctgtgggtttgcaggaggtgcagcatagccactctgagctggtggctgggcagactgatcataagctggt

SEQ ID NO: 393614 - DNA, 467 bp, Oryza sativa
aggactatacatgcacacacacttcatttatgtatgaatataatatttcaaggtgatatggatacttccaaggctgaagaatgtcattgtttcttcaaaccttcaattggggggagttgatgctgatgcctaccttgaattttcatcgatttggcacccgtggaccttgatcttacataccttgattacatggaccattacacagggattcgggatgttaccacttgggtctcctgataacacaggtattcgggatgttcccaaaatatacatataatcttatttggtggggcgacacacccgtgacatgctaacgagcatccatatattcacaaattcatccttctgatgatcctagaacaatgctgtcatcttcagatggcaaatcagcttagacatcagcaacttccgcttggtattatactgtttcgcggaagcgactggtgccttcaattaatttttagaat

SEQ ID NO: 393615 - DNA, 495 bp, Oryza sativa
ggtggacgcgctggaggagagcggcgtggcggtgtacctccccaggcttctcgccggcgtcatctccggcgctctcaccggcctcttcgctctcgctggggccttgaccggagcggggaccggcgcgctggccggaagggcttcagacagcggcgtgctccggggagctggattgggggcgttcgccggagctgtgctctccattgaggccctcgaggcttctcgtgctcattggtgctcggaccggctgggctctcatggcacatcctccatggcagattccatagagcagctcctccaagcgcggttcgtgcaagagcaaattgtaccttcaggatatgcaacgcatcgttggcaggtcagcatttcagattgtggtcatgatgatcctgtatgatacttttggagggtgttcatccaaagggctttcacgggagtcactgaataaaataccacactatgtggacaatgaccaaacacggaactcgtttggtg

SEQ ID NO: 393616 - DNA, 644 bp, Oryza sativa
  unsure (1)..(644): unsure at all n locations
ctgatgaataagatggaaattaattagtagtactccagtagtagctgtcaaagttgacaggatcggccaactagtcaaggagtgctacattcttcacatcttgaccaacagaacacaggtcaaaccaaggtgatggatctttattgatcttagctatttactgacatactgtacatgctgaagttgcaaaaaattactacgcggccgtggctgggatgatgatggggctcctcacgatgtgttcgtccgagacccacttcaggttgccctcggcgccggcgacgttcggctggccggcccaccgcaccgtcacggtgaagctctgcatctccttcagctccgtgaaccgaagcatcggcggctgcacgatcacggacacgtccttgggcatgtcgacgacggccgtgtacacggaactgggcttcccgacgttggtcaccgtccggttcaccgtgatcggctgcgccagcaggttgacgacgagggatgggtanttgagctctgcctcggtgatggtcttgacgtcggagcaggtgaccggccggtgggctatctccttcangccgtcgtctccgatccccagnccgcagaggtaggggatgtaatcgtcggcgtggaagtcgtagataggccggggtcgaang

SEQ ID NO: 393617 - DNA, 673 bp, Oryza sativa
acagaaccggagagagtattaatcaagtcgattacatcataaatacaagaggggcaaacaaaaaatgttcagcaacatagagcctttctcatggcaaaactgttgtataagtgcacgcaatgctttatttccgaggtatacaagcatcgtgagagatgtggcacattgcatctccctatctatacggctatatatggggccaccagattctacaaacatgcaggttagtagtggcacccagcaccaatgaccaaacacatcggtgtgttggatttggataccatgcaacggatgtggggcaaatttacaatttacaggttgccccaaaaatgccgccagctccagcctccttaagctatagtattatgttgtgaattgagttactgcatgctattccagagagcagagaatttatgccctcaatgatgcattggccggctgtcaagttgccccgctcattttcctgaacttcagagggaggaaattgcttgaatcggcgttcctcttcttgccaaaactgctaggtgtgacaccagtcggtgagaccaaggaagtggtggtgtttcgccgaaacctccccatgttccaatatgagaatccatcatgttggcttccagaactaggagaacgcatagcaaaatttcttggtatcacactttgctgtcggtcatgg

SEQ ID NO: 393618 - DNA, 471 bp, Oryza sativa
  unsure (1)..(471): unsure at all n locations
nnnnnnnnnnnnnnnnnnnnnnnggggggacatcaaataccaatcatatcaataacataaattaccagtagcaaacagagcgtgtactccaacatgctttgagaattcaacaatctatccagtggaaacaagatgttggcgattgctggcgggacatgcagttcaatgaatgtgttagttgctctggaacataaaccctggaaggtttcttcatcaccaaagaataatagttttgacagttttactttggcacgattcacggcaattgatcttactgtagaactaaacagtatcggtcggcttctggagtcttcattttaaggacaggaaagtccaaacttcaaagtatagtacagcattggtttgttttctttgcctgcttgaagaacatctgtgaagcagcactcaggtctgaactcttctcaaccaagctatccaatctttcccctctttggagcacactctcaatag

SEQ ID NO: 393619 - DNA, 474 bp, Oryza sativa
aggaggtaaaactgccgccacataatttccttccctagaggcaacaacaatatccacctcatcattgggggtaaaagcagaccaccaactgcatatccagggaagtataaccaaccatccatctccaaacaacgggcaaaccgcctaccactgcatgtatgtcttgtccatttttttccctctcttctgaacaaaaaaaaaagctaggtgtcccctacgagaaatgcagcttgcccagcgcccctaatccgaaccaaaggcaaacaaaactaaaacagaaaagggatgtgcataggaggaggcagctaattacaaaatctgacagaagatgaccccccattcgttcgttgacgctttctgaaattatttgagctcgagatgcctgatgatgtcctccacttcttcagcatccaccgggagatgatcatccttggcgtcagcgttgacggcgttggcggacttaactgggttttc

SEQ ID NO: 393620 - DNA, 520 bp, Oryza sativa
gggcagaaatccacctcggctgcctctgaataccagaataataacagcgtaattgtaaactgactagtagcacatagaaatgaacggagcattttaaacattattgctgaatgcccaacctgaatagcttcttttgtatgtaattttgcttcaacaaggcaggtatgtaagtgtgtaaagcaaacatagacataagaagcaacctatttcttagcctatagaaaccttctctatatttctcttgcacagatgaaaacttgttaagagctaactgtggaaaccatttcatattcacttgccttcctgttcttcgaacaaatgaagaaagcgcctccaaaccgctgctgaaggaacagaagaaccgacagcagtattgctccacatggtatggcaatgtcccatgcgaggctgaagagatcatcgcgagggtttgcatacctgtaaaatggtcttaagctgggcacaaaatgcttagccctgaacacatcatacacatgaggtagcgcacgaatcatggggc

SEQ ID NO: 393621 - DNA, 757 bp, Oryza sativa
  unsure (1)..(757): unsure at all n locations
aagaatgcctaaagaaaccttaatatatcattagcttaaggactagcaaaactgacatttgtttgctaattaacaagtcaagagatagtgacacgtcaatgaagtagacaaaatagaactaagattaacattcataagattccaatcctactcgcctgctcggtaaggcaatagccgcaaaaggtaagcaaacactactagttcattacatcgctaaggctaatttattatctcatcgtcatgtcatatatattttggcagaaggacaaccagcacatgtattagatgggcacaaaatgaagctaacagaagaacctaatcgagcaattcagacattgcgttcttcctgttgaatggatcggtagcagcaagcaaagacgccacagccctattggggaaaatgtcatcagccttcatcctctccttgaatccataaggtggggtctttgcattcagatatgcctcaagaagcagctgatactgtctaatcctcccagtataacccatctgccgcaccttgctgaacaatttctctgcattatggacgtctcctttcttggaataactatcaagcagcatcaagtatgtggtgtacataggcttaatcttgttcttatatgatagcttatgcaatatggaatcagctttctccacctctcctgcatccgaatagagcttcacaagtgaatccaatgtatagggccctagtctgcaaccatcatcacccantncctttgctagctccttcctctaaatg

SEQ ID NO: 393622 - DNA, 570 bp, Oryza sativa
gcatcaatggcatcacaactatgttcaatggcaacaatcgctgcttggtacagtttaagcttatgtttccaaatagtttctgcccattgcaacaaatgagataggataaagcacaacccttaatcaaacctagggctgccagctagaaaaccctattttccgccaacagaagcagcatcatttagttccttggaaacaatagcatctgattcatcgttttctctcggagcgtaataattccgtctaattttgagatatacacaaacatcgaggaagatatcctttacaagaatggcggcatcctctgaggatgcatggaatgatatccactatctgggtggctctgcggcattcgctccccggtgggtcttcgagtaaagcctccatgtgtatggttctgcatgggattgaaggtgccccaccagtgagattcaccgtcagctgggatccagggaaatggggtagagccctcctggcccctcccatatggccgatctccaggtctagaaccagcctcaccatccgaggaatcgctcctgttcacaggaggagcaaagccatgatgtactc

SEQ ID NO: 393623 - DNA, 716 bp, Oryza sativa
  unsure (1)..(716): unsure at all n locations
ttttttcttaaaattaacagacgttcatcaagggctcctttagaattcgagaacttgtttaggtaaggtgctactgtaacagtagtaaaagtaaataccaaaatccgtatgttcagaatccacaaatttatacagccattttgactcccctattattggacaacttcatcatgctgacttcttgccaccgaaaaggagattccaaccgtacgcattgcctttctttgctgctacatccagccgctttgcaccaaccttgtccataagccagagaccaaccgtcggcatgtattgcaccaagtacataacccctagcacaggctgatatgatatccatgccttctttaagtccgtgagttgctgcaacaattgtcagttcagcgcatctttcaactggaacacgtttctcagaagatggtttttgtgatgaagaggttgcaccagaagattggggtgcttcgatcggcccaggacagacaacagtaaccttaatgccttttgtacataactcagagcgcagagaagaaaaatagccattgagggcatgtttggaggctgaataaagagcctggccaggtgatggaacctttccagctgcactactcatcacaacaaaatgggccatcccctctatccatcattganggtgnaagaaaggcgagntagagtatagtaccaaagaccattgacatccaaaagtagccttaagacctggt

SEQ ID NO: 393624 - DNA, 656 bp, Oryza sativa
  unsure (1)..(656): unsure at all n locations
tttttttttttttttttttaatcgtactcagacagtcgattttactggtatccaaatacccaactgcaaaactttgccagttgataagtatcacgtgacataatattatatatttacgcagtgaagccaaacataggcgtctaaaagacaatccatttccattaagcaaaaaaaagagacttgtgttaactattgttgggttcatcgagaactgatatttcaacgtacatatatacaacagccagatttcattattttgatcaccttcataatttatatataccaacgtaccaagcacccaatggaattatggaaaccagtgcaatgctttctatggcagttgtcgtatgaggtgaccactgaatcgccggtatctcacatgacctcgtcttcttgtacgtagaggccaccgtccgtctcgatgggcatagaaggcggggttccaggaggaatgcaggcagccccgttagggcctgcctgatcacataatgcctccgcgtcctgaattgcccggtcaagatttatctcgccactgagctcattgatgaacttgagaagggtgtcgaaatccatctgctctcctattatccgcgaccggtaccttttcaggatcgcgacgcataagnagaaggtgggaaatgttcctgacccaagaa

SEQ ID NO: 393625 - DNA, 390 bp, Oryza sativa
ggttagcttccatcaacccagtgttgttgaaggtgacacttaaaaaattcagatacacacttagaatttacatacattaatatcgaccacgtcggtaaattaaacaaacatgattgaggctgtatatttttgtgtgcctactatatttgcttcaattgacttcgatcgcttcaattgacttggatcgagagagatgcagggttactgattacggtcgtacaaactcagatatcttgcattgcgattgatggaagccaacacgtagtgtatgaacggaattgatggtttttgagcgaaacgtatcgctcctaacaagtcataagttgatcatatcttgcttagccatgagggttggcaacttgccatgatgcatgcaacacgaaccaaaac

SEQ ID NO: 393626 - DNA, 846 bp, Oryza sativa
acatggttgtttaaatttcttattaatttttgtcacataaaaaataccgctgtttccattagaatttctgaatgccatacatgtgtgattggttgggctaaccatatcacaatttaatcaatgtcgtcagttagcccttccaaaagtaactgaaaagattgtttgtacaattgcacatctcaaaattgctttcttttcctgtaaatggacgcttaatgacaaatcgatcgtgtataacttccatcaaaagacgaatctatgaaatttcaaaatgggaaagtccctgttaaccggatatgctcaagggtgcgctttagaccatactggaagaacagctcggttgccagctctaaaaccatcgccataggccattgaggtatctgactcaatttggtgcttgaaaaaatcaccaagctttcgctcaaactgagatcttcccccctttttcgatgatgtggatgctgatgaggatgaagacgttgaagcaccattactgcctgatcctgcaatgatctctgactcaatccacatgtgagcaagaacttggcatatgccctcttctacgtctggactaagtgtgcgatatcctttaagtcgcaaccacgcatgcatcatctcatgagctaaaattgaacctgtcaacaatcttgggagaccataaagaatgagaattgcagtcacttcacatcgacgagtcgccctatatggctccgttatcattcccgtatctttatttccagccattcttggtctcctcaatatcgtgctgacagtttgctcttctgataagcataaacctcttgtttctggaacatggtggtgaccagtcttctctccttccaaaga

SEQ ID NO: 393627 - DNA, 711 bp, Oryza sativa
  unsure (1)..(711): unsure at all n locations
nnnnnnnnnnnnnnnnnnnnnnnnnnnnnnnnnnnnnnnnnnnnnnnnnnnacanannaccnttggatnncaaatcaacaccaacnccttttcacatgcaaaacaatgactaaatacaaaactcaaagaataccaagaaaacgaatataatgcacaacttaggcatgcttcctaaccaacccactgatcaatcgacgtaatttaggtacaacagcaccgcagatgttaggtcatatatctacaggcaaatcttatctaaatcctgtcacaacctgtcgtcactcattagcaatgtcaaccagttaacacacaatggcccaatgtcgtggatagtcttcactaccatccttcttgctgagaagtctctcatccctaaccagaaatgcagcatttggaaatcaggattatcagaacctcaaaagatcaactgtgacattctcgaaaatgtccaatcgaacgatgggatctcagtgcaaaaccaaaggagaatcaggttctgagccgctgatggaggcaaaggatgacatactatcctccttcgaaaccgttgagaagttcagtggtgcagcagccagcctcctgttctctttgaagtaattattgtaccgtccagaatatgagcgtggagttagaagctcaggggtggnactgcctgcagaaactctacggggcaccggggtcatgaacccagtccatttccattcgggtgat

SEQ ID NO: 393628 - DNA, 513 bp, Oryza sativa
ttaaagagtcaaataatactactaaacattgaacaaggaacattattacaaaattgtgtgtccgatcctaatcaaaatggagaagtttacatatccgtgctggccaattgagctgagctttcgcagaagtgatacccctcagatatgcaataaaattcttagtcccaagatgttataatatgttcctcgaactaacagctatcctgcttttatttgtcatttgttctgtgctcattgctaaacagaataagagcagcaaactgtagaatttggaacaatatcggcctatactagagtgtgagtttcgcaacctggtatcagacatatacactcaaaccgaaggatagaggggaattactgagtgagggtaatctgatctcattcctgcaagtgagtaatatgcaagaatctgtgcctgaccgtccgggcaaacttcatcttgattcggggcaataatctcaatgttccagaagggtcgcaccattgccattagatcagtgccattgggagatg

SEQ ID NO: 393629 - DNA, 474 bp, Oryza sativa
cagggggcccaaaaaaatgtataatataaggtcctaggggatttagttaattaacaaatgttaatttgcatgatacaaacataccccttagggcttaggccatcgatatcagtatgtagtatgctaatttacatccaacacagtggccccaatcattttgcaggcccagacaaacaccatcaaactcccccccttatttattcacaatccagaaggaccctagcagccccagtaaaacatcaagaatcctccgctactctggcgttttctgatctttgagacgacatgaggatcttggcctatgcagacggcgcaaatccatcattgaaaatgacctcacaggcacagatgatgttttaggatcacaggatcctaattgtagtgctggagcattataaaccgcagaattttcatcattagcaagcgacggaggagaatgaagctgctcagtgagctcggtttcttcgatgctga

SEQ ID NO: 393630 - DNA, 528 bp, Oryza sativa
  unsure (1)..(528): unsure at all n locations
gatctcntttcacccccctcaactctctctatcgatcgatcgatcgatctgtgcctccatccccgttgcccccatcaagatctcatcatcaggatcatctccctgccgccgccgccgagtgaaatcaactagtgtatgcctctcactgtggctgagatcaagtgaccgaggaagaagacgaaggagacggcggccggcggtgtaaagctgtatagctagctctctagctctgcgtgtgctcggtccccgcgccgcagtgctgtgcctgtgcctgtgcctgtgcgctatctagctgtggagatggaggcgcggctgcggctgctcgtcgtcgtcgtcgttgttgccgggcactgcgccgccgtcgcgtccgccgccggtaactcgtcggtggtggggtaccacggggacccgacgttcaacgtcaggaactacggcgctaaggggaacggccaaaccgacgacagcaaggcgctgatgactgcgtggaaggcggcgtgcgcggcgaccggggcggtgacgcttgtgctc

SEQ ID NO: 393631 - DNA, 603 bp, Oryza sativa
  unsure (1)..(603): unsure at all n locations
attcccggttcgtttacttgtccgactttagataccatcctccnccgtcgcccccccctgggccggcgtcccccgccgggcgccaccgttcttcccccccccttcccggccgaggcgatcgatcgatccacgcgcccgcgcgccaccgccgctgatcataacaagcaccagcagcctcccttctccgcgcgcgcggttagctcgcggctcgccatggcgcccaagacgacgacggacccttccacgtccaccccgccgccgccgggcgcgttcaggcgctgcagcgggcgcgtgcgcggcgccggcatctcgtgcgcgggctgcttcggcgacgcggagtccaagcggcggcggcgggtggcggtctacaaggcgtacgccgtggagggcaaggtgaaggcctcgctccgccgcggcatccgctggttcaagcgcaagtgctccgacatcttccgcgcctagcgctgatccctccaagaacaacgccgccaatgccaacgcatacgcgcctcgcctcccctctcctcctcagtcgaagtaaatttttgaaggaaaaaaaagagaaggaaaaaggaaaacacagggccttatttaataatgcag

SEQ ID NO: 393632 - DNA, 620 bp, Oryza sativa
  unsure (1)..(620): unsure at all n locations
ctcaagccgcgcgagagcaacacaagcaagcgggcggtagggtaccccgagacggcgagcgcccccgcggcggagagctacacgatggagngagctcgcgcccgggacccccacaaccccgacagcctcaacgacctcgagggctgcggcaacgagcaggagtccaaccaaacagataacttggatgcaaatcttaggctgcttcgactggaccaggtcgaaccagaaagngagagtgtgcagattgtatctcgcatactgattaaggctctcatggcaatgccaggcccggacttcagcctatgcttattcttaattccagagcatgtgcaaatggaggaacagttcaagacgttgatagttctctctcactacctgggagactgctaggttccgtcaattttggggatgaggcgtcgaagaaccgcaacatattggatgttgttccaggttttgagcaggcaatccaattcctatgcgatacatgtgcnctncttgacatacagaaagttctaaggctgttcttgccgaaggccannncaccatgaagggtcntgcnattgnncangttcctngnnnnncnantatggcaanncnccggttnggttagntngagaagg

SEQ ID NO: 393633 - DNA, 564 bp, Oryza sativa
  unsure (1)..(564): unsure at all n locations
attcataggacacccctcttaagttattcccccatgacaactcttattctttaatttgcttggccgtttctccccgttcgcctagaagttatcctggaacacatcctcattgtgcacagcgttagaactcacaaggcattggtttttcctgttctttttgttcattctttagtgaagatagatttctttaatacgcttgtaatgccagtatttaaggtgaggtagacctttgaaggaagggatgacttccataccagcatgagatgatagtgagagagatgaagaaattttagctgttcttctcctgtctttgttagcttaggaccatcatttgctgtttcagctggctcttttcctgtcgaagaggttcacctctgctgcttgatctttcctttgtgctgctttctggtgagaggagactaaattgactagcatcaatgctactgtttggaagaaaaagacttctcgctgtgttgggaagtttgttgtacgattctttcgcttctcactccaactcagtgtgcttcaagcagccctgatagtttaaatcagagctacangatt

SEQ ID NO: 393634 - DNA, 571 bp, Oryza sativa
gaccggccggaattctgtttgatccacgcggcgatcccttagttatctgcatctcttgctagtgatgacaaatccatcatatgctttccaccttcaaaatctgtactttgcgtgctgctgatcaactaaaaaaggaatctttgcgcatctttgatacttcactatgttattctcattaggtagaaggcacaaatccagtcgtgtatgtgctgaatgttagggatacttcactaagaacatacttaattgtgaactttgataagtgggatgttaagtttgtcaattttaggcttttcctgaacattagatatcaagttatctaatgtgtgtgggaataggaaatattttccactggtagttgcacactgagatgtttcctattatattctaccttgcattttcatggcatatccttggtgatttcttgctgatgtcgtgcacgtcaggagttccaagtaggtatttacattgttctacctgctagtaagttttttacaatctgacaaatctcatggtgctaattgacttgagggttattggccaagccctggacaggtcacaaatatgtatg

SEQ ID NO: 393635 - DNA, 682 bp, Oryza sativa
tcttttgacgctagctgcattgtagtgagagagagaggcggccatggcgctggcgtcgctgccgaaggtggtgatggggtcggtggcgttcggtgtgttctggatgctggcggtgttcccgtcggtgccgttcctgccgatcgggcggacggcgggggcgctgctgggcgcggtgctgatgatcgtgttccacgtgatcagcgccgacgacgcctacgcctccatcgacctccccatcctgggcctcctcttcgccaccatggtcgtcggcggctacctccggaacgccggcatgttcaggcacctgggccggctgctggcgtggcggagccagggcgggcgcgacctcatgtgccgcgtctgcgtcgtcaccgccctcgccagcgccctcttcaccaacgacacctgctgcgtcgtcctcaccgagttcgtcctcgagctcgccgccgagcgcaacctccccgccaagcccttcctactcgccctcgcctccagcgccaacatcggctccggcgccacccccatcggcaacccccagaacctggtcatcggctttaatagcaagatcaccttacccaaggtcctcatgggaattctcccgggcatgcctcgccggatggccgtcaacatggtcatgctgctctgcatgaactggaaggagctgggcgggagggccgagctc

SEQ ID NO: 393636 - DNA, 543 bp, Oryza sativa
caggatcaactgaaagttcgacgagagcatctttacaactcctttgtggaagtaccaggtgtttttcaattggcaacttcaattacatcaaatgacctcgaggagatacaaaaatttcttgacacagctgtcaactccagttgtgaagggttgattatcaagacattggataaggatgctacatatgagccagcaaaacgatcgaacaattggttgaaattgaagaaagactacatggacagcattggagactctttggatttggtgccaattgctgcctttcatgggagaggaaaacgtacaggtgtatatggatcattcctcctggcatgttacgatgagcagaacgaagaataccaaacaatctgcaacataggcactggattttctgagcaacagcttgaggagcgttctgtgagccttcgaactaaagcaataccaaaaccaaaggcatactataggtttgctgacacaatggacccagatgtgtggtttgagccttcagaggtttgggaggtgaaagctgctgatttgagcattagt

SEQ ID NO: 393637 - DNA, 551 bp, Oryza sativa
tttttttttttttttttactagcaggagagatttccaatactttcacccaccccactgctgctgcctttttttttcctctgcgatctttttcttttttttcagttgcattctaaatcaggcaaaacgccaagaacggtgataaattacacaaggaaggaagaacgtgtcatcatgaattgaggggaagaaggaaaataaaaaagacgaagaagcaagcaagcagcaaaaataagcagaagtgagaaaagaagagaggaaaagaaaaaagtgattgagcctattgtgccaatatcttactacatccacaagtggacagcacacctcaggacaaggagaaatcagagctccccacgcaccctgacaccgtcttcttcttcttctttctccccttcttcatcatcttcatcatcctcctcttcttcttgcaatgccatagcttccgaacagcagcagcagcaagcagggcacctccttgtacgcttggcacaaaatggagaaggagaaagaagtggccagggtgggacaatgcatagggggcaagggtggtggt

SEQ ID NO: 393638 - DNA, 715 bp, Oryza sativa
  unsure (1)..(715): unsure at all n locations
nnnnnnnnnnnnnnnnnnnnnnnnnnnncaccataagaacagcatgctccattgatcaatccaaatgttcagacataggttcaattaccatcatccatgcattaaaatgctatagacataacaaggggaccaccctcacacggttttattattggggttttgattctttcacaagccttttacataacaagtatcatcagcaacagccgcaagcaaagattcttcaggtttctcgaatgcgccatcttggaagtgtgacttgacgccattcttgttggaaaaatttcattctcagaagctctgtcaaaatcgtacttggcgcgataaatgaagtagccactgcactcccaggcagaaagacaacatccagtagccagatttttcacctgtggaaacaagaaaacctttgtgccattgttggagatcagcaggctgtacgcagtattattgtcatgcagagttaaagatacttcactgacaaaattggcaagcgtgtttacgtccttgccagttaacacaagagccttcataggataatcaattatttcatacaggtgaacggctgatgtgccttgcccggggtaaattgcaacagttgatgcagactccactggcaangggtttgcgaagtaacaagcctgaaaaaacatgtggtctggcatcgtggatgtgcaactatcaaagnaaacccggaatgctgcactatttncttcag

SEQ ID NO: 393639 - DNA, 627 bp, Oryza sativa
  unsure (1)..(627): unsure at all n locations
nnnnnnnnnnnnnnnnnnnnnnnnnnnnnnnnnnnnnnnnnnnnnnnnnccgacaatcagattataattcagtagtttaatcatcacatgacaactcccacgattgaaaagctaaaattgaacagttgatctgttccacaggcaaatgctgaagtagcgttgagaggatccaggaagcacaatcaatatttctggtatttcggagtagtttggagtgcattggtttttacaagacaccggaaatcacactgtttgtttacaccaagtgtaatagagctgcaaacaacaagccaaatgaattgggtgtgattttccatctcagtatgaggtccaaaaaggaactagtctacttctgtgcagtcgcaactgttagcttctgaaacgtaatagcctttgccaagggaaaccatcacatgaacatcatcaattttcatagtcaacagtacaaattgcaactgcccacttcattaccaagtctctgccagcatcaactaatctcgataattctcatgtgatgtgcacattttctggcgtcggcgaataactattaagcaggcaactcaagcttcacattgttcttccaacttaagaaatagtagtagaagaaatccgcataaagagctgttt

SEQ ID NO: 393640 - DNA, 460 bp, Oryza sativa
gacgatctgttaatcagtgtactaatttagattcttcaacggcatatttcctgtaatgttgctgaaaattacacattcagcatgatatcagataaacataccagtaggggacctaccagattgatcaatagatctaacagtttcttaatccatcatcgcaatcacagattgagaaccttaaaacagaatggtattccttattgaacttcctcaaggactagcagagtcaaaatgtagcctgcaaagtttagctgcaatttgcaaaaagattgccggttgccaaaagttgagtcactcgtcgagttctgtatcacagatgatcactagtgcaactacagagaggaccaagtgttcctcacattgtctggtagactgacatctgctaataacctagaacatggtgcgagaatgacttcatttcttcgacttgtttgccacggtgagctgctggagattgagc

SEQ ID NO: 393641 - DNA, 686 bp, Oryza sativa
gattgatataacttcatctattttttattgcatgtcctagtcaaatccttgatttttaaaggaattgatgatgtggttccaaatcaatcaaaaattgttatatgccttgttttcaaatgatggggtgcgagtgcaacaacacatgtatccaacggaaaaccaagcttacatgtactatcatcatagaattaatcaaattccgttgagctttccatggcgtgaaagccaaaaacaaaaaggtcaaaaaaggggtgaccctcttcatcagatttagccatttgcaacgatttcatggatcttgtcactgatctcaggatcatctgatctgactgctagcttcatggccacttccttcggtccgctaagtccgaatgacagcctcactaaaactttcacattgccgataaacacaccagatagcaggcaagtgtgtgacctcgaattgcttgggaccacatcagttccctcgcagggctgcatgccaaggatgcctatgacagcactcacagcctcagccaggctttccctggcgccaagcccatactcatcaacccgctcgctttctggatccatgctttcccaagcatttctgaagttagaaactccaaccttcaacatataatcagcagaagtaatttccagatcttcaagctggtactcatcctcaacgccatcatcatcagctt

SEQ ID NO: 393642 - DNA, 509 bp, Oryza sativa
agtagttctatccagatttcgtgcaggggaaagaaacacatgaaagaaagcaaaaaaaaacaccaccaactaatttcattggaattttgtgggaggtggagggagcagattggtctctttgactctccttgtgcgagagattgacttgggatttgttgagttggcaactttgcttggctctgcacggaccaacgccgacgacgaccgccggagccgccgcatctagctcgccgccccgccatgcagccgctgctcaaggtgtacgccgaccgccggtcgcagcccagccgggccataatcatcttctgcagagtgaaccggatcgatttcgaggaggtcacggtggatctgttcaagcgcgagcacctgtcccctgaattcaagaagataaacccaatgggacaggtgccagcaatcgttgatgggcgattcagattgtttgagagccatgccattctgaggtatcttgcaacggtgctccctggagttgcagatcacttggtatcctg

SEQ ID NO: 393643 - DNA, 540 bp, Oryza sativa
tcgttcacgcgtccgcaacgccgccgccccgctccgcgccgtcgtgcacctgctccgcctcgcctcatcgtgtccgcggccggcgagcagatcggcggcgcggtgagcacggtcccctcttcttcctgaactcgccctagcctgcttcaggcttccaccccgtgcggcctcctcgcgcgcacggccggcctccatcgctgctcgaatcgaactaaggaactggtatcaggctgttggtgagaatggaaccaaagcattcagctgaaatgtccaagcatttggacaagcaaaatcaagccctaatggaaacttaccgagcaatgtcccacgagttgcataaagttcaggtggcagaagaaacaatcatgcgcaagttatatgagctgatgtctgcagaaggacttcttccgaagcgcaagatagaaagtcaagcacagaaaactggggaatcaactcaggaaaacaaagagcttgaaccgtaggatgtaaactgtgaatatcgatacgatactcaatttgatgcaattaaacgagttgagc

SEQ ID NO: 393644 - DNA, 678 bp, Oryza sativa
gtttaccaagagaacaaccgttgagtgttgatgagtggagatccttcttagatcctgaaggcagagttatggattcgaaggcgctgaggaaaaaggctctctatggagggattgaccatgttctgagacaagaggtctggaaattcctgttggggtatcatgaatacgattcaacatatgccgagagggaatatcttgctgtcatgaaaagaacagaatatgaagccataaaatcccagtggaagagtatttcgtccacacaagctaaaagatttaccaagtttagggaaagaaaaggccttatcgacaaagatgtggtgaggacagatagatcagttccatattatgaaggagatgacaatcaaaatgttcttgtgctacgggatatcctgttgacgtattccttctataatttcgaccttggctattgccaaggaatgagtgattttctggcacctatactttatgtgatggaggatgagtctgagtcattttggtgctttgcaattttggatgggacgactaggagccaattttaaccgtgatcagaatggcatgcatgctcagttacttgcattatccaagctcgtggagcttcttgatcctcagttacataactattttcggaggacggctgcttaaactactttttctgtttcgttgggtctatacaatcaa

SEQ ID NO: 393645 - DNA, 581 bp, Oryza sativa
  unsure (1)..(581): unsure at all n locations
gaaacaaatgatggggacatcagttttgacggaacagtttgcatacaacagcattgcaacccaaatccttttatccgaagaacacaacgacgacagcaaccagccgagtgcagaggcaaaagaggagctcacatcctgctcttcttgacggggccgagctccttggccttggtcctcagctcgtgcttcttgatcttccccgtcgccgtcttgggcagcggcccgaacaccaccgacttgggcacccagtaccccggcatcctctccctgcagaaccgcatgatgtcgccggccaccgccgcctcgtcggagctgtcggcgccttccttgagcgtcacgaacgcgcacggcgactccccccactgctcgtccgccctcgccaccaccgacgcctccagcaccgccgggtgcgcgtacagcaccttctccacctccaggctgctgatgttctccccgccggagatgatgatgtccttcatccggtccttcacctcgatgtacccgtcggggtgcttcaccccaaggtcgccggagtggtaccaccncagaagcggcctccgcgttcgccttggggttcttca

SEQ ID NO: 393646 - DNA, 550 bp, Oryza sativa
gtcaatcaactagaaataaatatataaatatatattattatatctctctctcacacacacacacacccctgtttagaagaaatataaatggtgcacatgtagagttaaggcaaatttcacaggatgttaaaagccagctactcatgttttaaaggaactggcaatgagacctgactgttatatttacatgataatcatatatacaaagtttctaaaccgaaccaatcatatgaacaacagactgtttaattgatggtaactattttcacaaggattagctgcagagcaggatgaggctgatgaacagccaacaagctaaagggcgcgcaatgcaatcaatttgaaagttaacgttagaagagtgcatctggagagaaaaggagatgaagtggcgttgcaatttggacctaactgaggtcaatttcaacacgctccggtgtccccctctcgctttcctgcgcgacgggttcggtacctagctgccctttggtcccctgcaccaaacgcatagagtttttcctgaatctgtcagtgcaaatgtatgggcatt

SEQ ID NO: 393647 - DNA, 756 bp, Oryza sativa
  unsure (1)..(756): unsure at all n locations
tgcttagcctgctgcactcctcaccggctgctgattgtgactgtgagtcatgttggcctccactggctgctccgccccgccgccctcctcctcctccccgtcaatcccgacccacctcgccactctctgctgctgcttcaggcctcccgctcgcccaccttggcctcgctctcttcttcttcttggtgccttcccaccgccgacccgccccctcccccgcgcctccgtctcgtcatcgaccgccccagcgaaagactacgagtttacctgatggtggcggagaggtggagctgaggctggacataggaaagctcggcattgagaattcaagagatgtatttgttgacgtcgatgatacgtctctgttggtcagagccaagtcggatgggacactgcggactttgatcaatgttaaacaactctttgataggattaagtcttctgagactatatggttcattgatgaggatcaattggtagtgaatctaaagaaagttgagcaagagctgaaatggcccgacattgatgaatcttgggaatcccttacttctggaatcactcagcttttgacagggattagtgttcatattgttggtgattccacagatataaacgaggcagttgctaaagaaatagctgagggaattggttaccttccagtctgcacaagtgagctgctagaaagtgccaccgaaaagtctattgacaaatggttngcttcggaaggagtggntcggtagcagaagctgaatgtnt

SEQ ID NO: 393648 - DNA, 215 bp, Oryza sativa
ctaggtgagaactcgcatttttattgaaaaatactagctgctactgtacaagacgggcgttggtgatccaccccaacccattcggccaaacatggcacataattacattgaatatacatatatatcctcttatattggtgtttctgttggtcttcgtttatccctttctggcacgaaactacttgggagactggcagtgaatgtcttgaaaccac

SEQ ID NO: 393649 - DNA, 506 bp, Oryza sativa
  unsure (1)..(506): unsure at all n locations
ttttggcctcgtctcctcctcctccgcctgcggctccgccttgtagggtttcgccgccgccgctgccgccggcgatggagccaccggcgggaggctcctccgatcatcgccggggtgccgggaccggcgcgggcgccggtggggccgccgcgccgtcgggcctccgccgctacggcttcagattctccgcctccagcctcctgcaggccccgctcgccgcgctgctcgagtactccggcgtcgtcccctccggccccggcgccccgcaggcggggccgccctcggcgctgtcgtcctcgccgtcttcttcgtcgtcgtcgtcggaggccgatgggctgctctccgcgcccgcggctggggaccgggaggtctcgatccggatccagggcggccccggggaggccgacgcggcgggcgtcccgggggcgggctcgccggggaggactcgatcgaggcgaccgncgccggngacgttgacccggcctcgctgccgcgggaggggtggc

SEQ ID NO: 393650 - DNA, 1048 bp, Oryza sativa
gaagcgtataacgattgaggatatggaggcttcagtttttaaggccttactccattttatgtactgggatgagttgcctgatatcgaagagcttactggcctaaatacaacttgggtatccactttgatggctcagcatttacttgcagctgcggatcgttatgcattggagagactaaagttgctctgtgagctcaagctttgtgaagatgttgcaataaacacagttgcaaacactttggcactggctgaacagcaccactgttatcagctaaaaactgtttgcctgagatttgtggctttgcctgagaatttaaaagctgtcatgcaaaccgatgggtttgattatttgcagcaaagctgcccatccttgctgaccgagcttctggagtatgtggccaaggtaggggagcattcggtgagcccctgcttgtattcgaacgaagtccttgatggtggcgatgccaatggaagacgtgtgaaaccgcggatttaacggcagccctgataaaaacctagctggatttccttgtgttgtttccgtgtaaagtgttatagttctataacggcacttttctggtgccatattatatcatgcatgttgtagtgtcttgtgacttctatacctccccctatcgttgctactctggagctgagttgttgctaatatatgtgttctactgactagtgtactgcaaaattgcattgctgcgaagcacatggagttcgcagcctgtgaccataaagtgcactcaggtggcacggcaaaggtggactgggcgcaaggttttgtcggtggaaataacggcgcagaatgtttctatggaagtttaactttgtgcttaggtcagctttgtcgatttgtagtcgtctgtatgactgtaattcaattggaatggtgaaatgcaatgaaatgtatcggttagatcgtgtccttttgcttttgtgttcggtttttctattttttctattttctttctttttttttattgctgtggcagagttgtaaactattcgcgatgattttgttgcagatatattttttccc

SEQ ID NO: 393651 - DNA, 721 bp, Oryza sativa
  unsure (1)..(721): unsure at all n locations
caagaagaagtancaatggtctngtgaacaaggtgaatgccaccaacataaagaatatagtgcccgaactgttcaccnagaacctggtncgtggaagggggctcttctnccaancgtgcatcaagtcgcagnatgttcgcctggcttcanagatgtgtttgctgcacttgtcgcggttgtaaataccnagttccctnanattggccgcctgcttcttgttcgtgttgtgcttcagctcaagagggcatataagcgaaatgacaagccacaattgcttgcagcaaccaaattcatagcacacttggttgccccgggtgttgctcatgagctcgtggcgctggagcttcttaccgtgctgcttgagaacccaactgatgatagtgttgaggtagcagtggggtttgttaaagagtgtggggcaatgctacaggacttgtctccacaagggcttcatgctattttcgaaagatttcgaggtattcttcatgaaggtgaaatagacaagcgtgtgcaatttttaattgaaggactgtttgcaattagaaaggctaaatttcagggattccctgctatccgtccagagttggatcttgtggagcaggaagaccaatttactcatgagatatcccttgaagatgagctagacccagagactaatctaaatgttttcagggcaaatcctaattttgctgaagatgagaaggcgtatgagaacctaaaa

SEQ ID NO: 393652 - DNA, 489 bp, Oryza sativa
tggccgccctttttttttttttttttttttttttttacaagagtaaaaaaaatatagtgcccaatcaattagcgcgtgcccaattgccatatgctaatctcttatcttacatctgaacatacggcttatcaattgtcgccgtcgaacaccaagaggccgctaaacaaagaagtgtatacgaacagttctaacaccgatcgagttctgggtcaacaccaaaaaggaaaattaagcatcataccccattgtgttcacaacgttgacacatagcaaggctccctgctcaccatcccttcaaattaatttcaccattttaggtgcatgtaataccatgccatgaaacagcagcaagcaattcctctggagtgtgtgtgtgtgtggtgtgtgcaacctgtcgtgacaaatgtttttcgatgccaaaactgatcgatgatgaagatcatgtttttgttttgttgtcaagcttctctcctatatcacaacgtcccg

SEQ ID NO: 393653 - DNA, 621 bp, Oryza sativa
ctcgagcatcatcatcagtaggaagaagaagaagaagaagaagaagaagagcaacaggaagaagcatgcccgaagaggaagaagaagaaagcaaggagaagaagatgcaggactggggtccggtgctgatatcttgggtgctgttcatcctgctgtcgccggggcttctgttccagataccaggcaagtgcaggttgatcgagttcggcaagttccagaccagcgtcgtctccatcctcgtccacaccatcctcttcttcgccctcgacgccatcttcctcgtcgccatcggcgtccagatcaaccttggctcctctccctgattctctctctttgtttcttctaggtaatctcaattgcatatgtatagcagtatatatgcacctccatccatcatctctactcaccttagctcgttaatttgtactacttatttgtgtgttccttccaattcttggcataatattgtgactcaaaggaattgattcagacgttactcattacttagtttcttcctccacatatatatgtagcaaaatcaaaagtgcaccattcatagcatttcaagtaaattacaactagcaaatttcccagcggccgcgcattcgatatcagctatcg

SEQ ID NO: 393654 - DNA, 495 bp, Oryza sativa
ttgagctcacggccggtcactactcaccatcgagaggagagcaaaaataattgagtgatagctgttagctaagctacctagcatcatgcagggaggcgccaataataagggcttggtatgcttgatcgccgccgccgccgtggtgttggtattcgccggcagcagcggcattgcggcggcgcaggcggccgggctgaagaaggggttctacaagaagagctgccccaaggcggaggagatcgcgcagcgggtggtgtggaaccgcgtcgccggcaacccggagctcgccgccaagttcctccgcatgttcttccacgactgcttcgtcagggggtgtgacgcgtcggtgcttctggactcggctagcaacacggcggagaagaacgcggcgccgaacctgtcgctggcggggttcgaggtgatcgaggaggtgaaggcggcggtggagcggcagttgcgccggggtggtgtcgtgcgcggacatcgtggcgctgg

SEQ ID NO: 393655 - DNA, 689 bp, Oryza sativa
  unsure (1)..(689): unsure at all n locations
tgttttccgctcgctcgtcgactcctcgtctccgcgagagagagaaagagagtgaggggagggagcggaggtaaacccaaaaccctagcccgcgtcgtcgtcgtcgtcgtcgccggcggcgagatgtcggcggcggtgaacgaggagacctcggtctacgtcggcggcctgccgtacgaggccaacgaggacatgctccgcgacgccttcggccgattcggcaccatcgtctccgtcaaggtgataaatgatcagagagtcagaggcaagtgttacggttttgttactttcactcatgctgatgctgcacagcatgctatctcaggcatggacggcaagagaataaatagacgtgttgttagagtgaatgaagtgcgtactagaggtgcccgagaattcgggcgttgaaggttttcggcgagaacctggaagcgcaagggatgcttattgcgacagaagggatagagaaaggagctatgaccgtgacagagatccctaccatgacagggatagtgatagatctcgtgaccgtgatanagacagattttacgaacctagaggctttgatcaagaaattgactatcccatggatcaagatcatggggatgaaaggcgtagagactacgaccgtncagcagaaatgcataatgttgattcggataatgacagagaaaaagaaaactctaaag

SEQ ID NO: 393656 - DNA, 453 bp, Oryza sativa
tctttttttgagacctccacgagcccctcaggctccccggctgcgcgcccatcccggggagggacatcctcatgccgctccaggacaagtccagggcgtgctacgggtggatggtgcaccacggcgcgcgctaccgcgacgccgacgccatcctcgtcaactcgctcgacgccgtcgagcccgacgccgccagggtgctccgccacccgaagcccggcgtcccgccggtgttccccatcggcccgctgatacagacgcactgcgccggccacgacgacgccgcggcgcctccctcgccgtgcgccgtgtgcctcgactggctcgaccggcactcggacagggtcggtcattttcgttctccttcggcttcggaggtgcgctgcctatggtgcacatgcgccagcttgtgctcgggctggagctcagcgggcagcgattcctgtggatggtgcg

SEQ ID NO: 393657 - DNA, 320 bp, Oryza sativa
ttgtaggtggacatatgccagatacccaaacaaaaggtttatgggtctggggtactcccattgagttagatgtgaatggctccaaagcttctggcctttacctggacactgagggatttgagagcatcggaaaattcaaatgtatatgatgataggatatttgctctggccactggtttaagttctatccttatctaccatctttccaagaccatttggggagcttatttatctagacttttatttggtggtggaaatggtgaagaaattttatgaaaaagggaagggccagaatgttgttttggagccaccaaacctcc

SEQ ID NO: 393658 - DNA, 353 bp, Oryza sativa
  unsure (1)..(353): unsure at all n locations
tcgacaccaccgtctccgcttccctttccattcgcgccgccacctcgccgtcgcacccagcggcggcgtccgcgtgccggaggagcggcgatgtggtgccagtcgtgcaaggaggagtacgaggaggaggacgccgggacgtgcaaggagtgctacgagcaggcgagccagacggaggaggagctcaagcgcgagatcgacgacctccgctcccgcctccacttcctccgcctcccttccctttccctcgacgcttcttcctnttccatnacgactncttcttcaagcaatcccggcgantntcngccgaaccgaaaanacggcgttnccggcaaaggtaatattnnaannnt

SEQ ID NO: 393659 - DNA, 515 bp, Oryza sativa
  unsure (1)..(515): unsure at all n locations
gcttttctgtctcgaacgtacacacacgcatcccaaatggcccacgtcatggccgcctccgagctcgtcaccgccaccatcaagcgccccttccagaacgacgacgacaacagcagcaacggcaacggcaacgccgacgggaagcccaaggcgcggcgccgggaggccgacccggcggcggcgctggccgcggcgcgccacgagttcggcgagcacggcggggtgaacatgtccatcgaggcgtcggcgacgttcacggtgatggagccggacaccatgcgccgcctcttcgccggggagctcggcccggagcgcggcgacctgtacatctacagccgccacttcaacccgacggtgctggcgctggggcggcagatggcggcgctggagggcaccgaggccgcgtactgcacggcgtccgggatgtccgccatctcctccgtgctgatgcagctcgtcggcgcggnggggcacgtggtggcgtcgcggtgcctgtacggcggcacgcacgcgct

SEQ ID NO: 393660 - DNA, 495 bp, Oryza sativa
tccttttcccttccgactccccaacggcggcggcggcggcggcgtggtgcggcggcgagggttttaagtaggctgcgcggcggagaacgccggggacgcgagcggagtgatctagccttatcctccttcgtcgcctccggattggtttcgcggcggccggccgtgtctcctgactgcgtctgtggccgggatgagggtgaaggtgatatcgcgctccaccgacgagttcacgcgggagcgcagccaggacctgcagaaagtattccgcaattatgatccagcacttcgttctcaggagaaagcggttgaatacaccagggctcttaatgctgcgaagttagagaagatatttgctaggccatttattggagcaatggatggccatgttgatgctgtatcatgcatggcgaaaaaccccaattatttgaaagcaatattttctggctcaatggatggcgatattcgtctgtgggacattgctgcaaggaagacagt

SEQ ID NO: 393661 - DNA, 1032 bp, Oryza sativa
gaggaaggaaggatagctcaattgatttcgtacagatgctgcagatgtcggaggaggccgttgccgaaatgtcctcattcagatttttactattccaaagtgcctgaaccacaacccgtcagtcaagaaaatgcagatgacatgctctcgagcgaggaagctgctggagcagatggagatccaccgctcgattcatctggaggagttgaaccaactgtagaagaaactgttggtgctaatttctcagcgaacatgaaaagctctgtcccaggaagtgttcaagagactatctatatggatggttcttcccatcctactcatcctgtcagcaagggggttgcgaaggaggtccggccatatgatgcatgcgttgcatggtatgtacctggtacctgccgaagatcggcccctggggatgatagcccccccacaagctgctacagtggggagcaactttgccaacgaccactctgtcatacttcaccaggcttatgatggtttccgggcaatagctgcggagacaggctcattgtatgagcatctaaggcaaaaagaccatcagacaagtgatgatatcatgattaccttggacaaacttcagcagattgctttgcatcatatgaaggatattgcctgccatcaagccaacaatgtagttcaaccatctgatcagagtaattctagggctccagtgccagacacagatgctgctccaccatagttaacggtgctaccaagcaattgatggagcgcgaggatgtaatcaagaatcctgtacaaatggttgtgtttagcaggaaatggtaacttcagtcttctggctgttcgctggatgcacctgatgcggcatttgtgaattgtgatcagcgctgctgcacctgacgaataattttgttttcctgttgcatctgacgaatgattttgattttcttttgccgcatgactcgaactaaactgatccatgtcaatatgctactactgatgtctaatgaacttgggacagatgtgtatagttaaaaaaaaaaaaaaaaa

SEQ ID NO: 393662 - DNA, 502 bp, Oryza sativa
accttaacctgctgcttttgctttggttaattagctgagagagaaattaagagagagatgagttgcagcagcagcaacagcagcgcccatggcttcttgtggctgatgctcgtttatgcgttctgtgcagctgttcaagctcagcaagcagcgagaactgatccagcagaagtggctgcactgaacacgatcctggggagatggggcctgcgggcgtcgccggcgtggaacatcagcggcgagccctgcagcggcgtcgccatcgacgagaccggcgtcgacaacaaccccaacatcaacccggccatcaagtgcgactgctccttcaacgccggcaccgtctgccacatcatcagactgagagtgttctcgttgaacgttgttggtcaaatacctgaggagctgcagaatctctcttatctgaataacttggatcttcggcgaaattacttgacgggtcccctgccatcctttattggaaacttttctgccatgcagtact

SEQ ID NO: 393663 - DNA, 866 bp, Oryza sativa
  unsure (1)..(866): unsure at all n locations
ggatagtcccaagcgagaggagaggagaggggaggcgatggggagcgggagcaagaagaagagcggaggaggggatgaccagaggccgctcctctggaggctcccggaggtcacctccaccgagctcggcaagatcggccccgccttcggcctcggcgtcggctgcggcgtcggcgccggcgtcggcttcttcggcggtgcaggattaggttatggatttcccggactcacattaggctttggagttggagctggatgtggtgtaggatttggctttggttatggattggggaaaggaattgcttatgatcaaaacaaaagatactctaatgttggcacgatgttccaagaagctccaagtcttccgatggacaccgttgctggtttggttgattgacgctggttgtgaacaccaaaaagcttgtgagagcaacttcaaaagagatttgaaaaatggcgttgagcttataatttgcctccatcagctgtgtcagcctatgaaaactgggttatcattgaaggttataagcaagtatgctgttgtcttagatgaaggtttaggagctagccatgggatgaagcctattgcaagcagtatgctatcttagatggaatttaggagttagtcgtgggatgcagactattgcactgcaatgttctttcttattcttgtgtacatcagtaattatgtctatatttaattagggtaatgaaatgctattgcagtctctgcatgttagaaatccccctgtgatgaacagtgtcagttagaattcaggaacaaaatatgagactggtgatctcatttggctgcttgttattactctgttaatggttgtgctcnnnnnnnnnnnnnnnnnnnnnnn

SEQ ID NO: 393664 - DNA, 517 bp, Oryza sativa
ctcctcacttcacacacaagctcaagctcaagctcaagctaagcttaagcttaagctaagcttcacgcaccacgatctcgcgaacgccatgagcgccaccatggacgcggtcatgccgggcgccgccggcgcgcacaacgcgacggcggcggcggcggcggggcggcgcggcggcggcatcgtcgccgggatgatggcgttaccggaggtgcagacggtggagctgctggtggcggtgtcgatcttcgtggcgatccactcgctgcggcagcggcggtcgcaggggctcccgtcgtggccgctcgtcggcatgctgccgtcgctgctcctcggcctccgcggcgacatgtacgagtggctcaccggcgtcctcgcgtcgcgcggcggcacgttcacgttccatgggccatggctcaccaacctccactgcgtcgtcacctccgacccgaggaacctggagcacatgctcaagaccaagttcgggagcttccccaagggcccctacttccgcgacaca

SEQ ID NO: 393665 - DNA, 545 bp, Oryza sativa
  unsure (1)..(545): unsure at all n locations
ttgtgttctaagctgttgcagcgagcttaattaagcttaaatgaattgaagaaaggcgaaccatcgagcagccatcaacattaagcattgcttgttaattgtgctcgatctatgtagtagtagtagcagcttgttaaccagtctagattgtctttttttttttctcctacgaagcatggagtttgtcatctcagtttgggtaagaaaaactagtagcacctaatcagccatatatcgatgttcaagatccagtaactgagaattaattgacactaaaccaagtgtcaaagattgacctgatctggttactgcatcataagttttaagattgttgcaagttgttgattgaaacactctttgttttggagatgtaagccgtttctatttccatttccattatttgatcggtgttattatacacactgatacatattgagcgaaagcaaaagaggcccataacattatttagaaagtgttatgggcttgacattaaaatggatcggtccgnnttttccgccnnnnnnnnnnnnnnnnnnnnnnnnnnn

SEQ ID NO: 393666 - DNA, 578 bp, Oryza sativa
tctctctctctctctctttcctctccactttgaatcaatcaaaacggagaagaagaagaagaagaagaagaagaagaagaagacatcaagaacacgtggagcagaagcttctctgccggcttctatcgtagctctcaaggataaagaaaatctgctgcagaggtacaagatctagtggcagaacatgatgagcaatcttaagcttggggtggaggttaccagtgctcatgacctcctaccaaaagagcagggcacatgcaacccctatgtcgagatcgaattcgatgaccagaagttccgcacagccatcaaagagagggatatcaaccctgtctggaacgagcagttctacttcaacatatctgatccatcccgcctcactgagaaagacctcgaggcgtatgtgtaccacgcaaaccgcgccagcaattccaagacttgccttggcaaggttcggatctccggtacatcctttgtcagccactcagatgccacacctcttcactaccccctggagaagcgcacgatcttatcccgtgctcgtggtgagctcggtctcagggtgttccttacagatg

SEQ ID NO: 393667 - DNA, 627 bp, Oryza sativa
gtttggcacgcccatcgccaactggaccaggggcacggagctgtacgagcggatggtggggcgcggcagggcggccatggccaccgccggtgcaggtgcaggggccaggatgggggcgctgctgtggtaccagggggaggcggacaccatccggcgggaggacgcggaggtgtacgcccggaagatggagggcatggtgcgcgacgtccggcgagacctggcgttgccggagctgctggtgatccaggtggggatcgcgacggggcagggcaagttcgtcgagcccgtccagggaggcccagaaggcggtcaggcttccttttctcaagtacgtcgacgccaagggcctccccatcgccaacgactacacgcacctcaccaccccggcgcaggtcaagctcggcaaattgctagccaaggcctacctatccacgctctaattatatcatttgcgttcactgctggctactaagtactgattcattcctccccttcccctctatgcaaaatctgtcatatggagcgcgtgctgtatgtaggggatgagtatcttaccacttcttccttcattccggattaaaatataatgttactgattttctttttccaaaaaaaaaaaaaaaaaaa

SEQ ID NO: 393668 - DNA, 465 bp, Oryza sativa
  unsure (1)..(465): unsure at all n locations
tgtnatagtgacagagcttatgtttgctgattcaactggatcatggggtactcctttggttccagttgagcgttctccaggtatcaatgatattggcattgtcgcttggatcatgaagctctccacaccagaatttccaagtggccgggagattattgttgtttcaaatgatgtgacatttaaagctggatcatttggtcctagggaagatgctttctttgatgcggtcaccaaatcttgcttgtgagaggaaacttcctcttatctacttgtcagcaactgctggtgctaggctcggtgtagctgaggaaataaaagcatgcttcaatgttggttggtctgatgacgagagccctgaacgtggttttcattacatttacntcactgaacaagattattcgcgcctgagttcttcggttatagcccatgnactgaaacctagaaagtggagaaactagatgggtt

SEQ ID NO: 393669 - DNA, 731 bp, Oryza sativa
ttttcttacgtagagttagagctgtcaaacggtacagattcttcaattttagagcggagttagcggagctgctccataaatttatactatagaggtgtagctgggtttttgtcgctccacaactccactccatcttaatagacccattaaaataggcacactttgatgccaaatttgctgacttgtcaaatgggaaaaatttgcaggattacacggcgaagctgtcggactttgggctggcgaaggaggggccgcagggggacgcgacgcacgtcacgacccgcgtcatgggcacccacgggtacgcggcgccggagtacatcctgacgggccacctgacggcgaggagcgacgtgtacagcttcggcgtcgtgctgctggagctgctgacggggcggcggaccgtggacaagcggcggcgcgggcgggagcagaacctcgtggactgggcgcggccgtacctccggcggccggagcggctgcaccgggtgatggaccccagcctggagggcggctactcggacaaggcggcggggaaggccgccatggtggcgtaccactgcctccacagcgtgcccaagtcccgcccgcacatgcgcgacgtcgtcgccgcgctcgagccgctgctgcagacgtcctgcggcgacgtgctcgccgggcccttcgtctacaccgtcccgtccgctgccgccgttgttgttgctgccaaggacgacgggaagaaggcggcc

SEQ ID NO: 393670 - DNA, 503 bp, Oryza sativa
gtcttttccgagggctgcgagatgggacccgccgccgctgacgacgccgccgccggcgaggaccaggctttgtccgaccttcgtgaaaagcatcgaattgacctggagagattaacgctaacatcgcagccactcagaacattggcgttatttgcattagccattggacagagtataaaaagcacatgtttatgtgctctgaaagatagggctcgcctgaagttcttggttcttttggctgcttctgcctgtactccgctcttgttaactaacggtccacatgaaaagcatgttcaggagctgctttggtatatcagatttggattatggtgggtcatactaggggtggcttcatccattgcgttaggctctggtttgcacacatttgtattgtatttagggcctcatattgccctttttacaatcaaggcagttcattgcggacggactgatttaaagagtgctccttatgatactattctccttaaaatgagaccttcatg

SEQ ID NO: 393671 - DNA, 518 bp, Oryza sativa
tttctctctcttcccatccgccgccaaaaccctagccccccctaaaccccgccgtccgatcgccgccgccgccgccgtcctcccgctttcgcggccttcggtttgggcgcccgccccccgcccggcccaagaaccgtgtgcccccgccgccgccgccgcgatggacatggactcgtgggagcgcctcgccgcggacgccaggctgctgggtgcgtgcttcgatgcgttgattgggatggaggaggcggacgggagcgaacgcgaggaggaggcggcggaggcggcctgcccgttctgcgaccaggagttcgacggattcgggctttgctgccacatcgaggccgatcaccaggcggagaacagggccggggtgtgtccaatttgctacgatgcgggtgggatggacttggttagacacatcacttcggaacattccagtttctttaagggcaaatggagaaatcggcgagtttcacatggatcacattcttcaacgcgtgccacatttaaaaaggacg

SEQ ID NO: 393672 - DNA, 544 bp, Oryza sativa
  unsure (1)..(544): unsure at all n locations
ttctagcgagctctcctttcctttctcctacgcctaggcttctagaagcttcctttccaaataggggctaatctcctgagctcgaagctctcctcgtcagcttcaggtggtcgggtgctgcctcctcctcctcctcctcctcctcctcgtgctcaaatctccccgagagttcgtgctttgccgcgagcagcgagctgcgatctcgcctgaatccttcgtcggcgggggggatgaattgatcacgcggtgtgcgctttctgattctgtcgggttcctttcagatgcacgagcacgtcggtgtccgcctcctctttgcttgatttgcttccgctgctgctgttaggtgcgcgagagctcgtgatggggtgaagcgtgtgttcacaggattagattgcgctcgcctgattcgctgcatcttgttcttcttgctgccgcctacgcgacttgatttcgtcacgccaaagccgtgacaggctgattgctaccttgcttgccgatctgtgctttaaattccaccattgtttgctggtgctggatgagaaan

SEQ ID NO: 393673 - DNA, 499 bp, Oryza sativa
gcggtctgcttcacgcctccctcctcctcgccgcctcgccgcctcgcctcgcctcgcctcgcctccaccgcctctactaaaccctccgccgccgccgccgccgcggtgatcaccggcggccgagggatggagcagaatggagagaaccatctcaaagatccacttcttcaggcagatggaggcggctccggtgcttctcccgccggggcgtcgccgcggaaggagaggaagacgaggaaggtcatgttcaatgtccgggggatctcgtgtgcttcgtgcgccgtgtcgatagagacggtggtggctggcctcaagggagtcgagagcgtctcggtttcgccgcttcagggccaagctggtgtccagtacagaccagaggaagccgttgcaagaaccataaaagatgctatcgaaggcctcaatttcgaggtcgatgaacttcaagaacaggaaattgctgtatgcagactccagataaaagggatggcatgtacaagct

SEQ ID NO: 393674 - DNA, 768 bp, Oryza sativa
agttagcagtacttgtctcagtgtccgtgagacgtttgtgtaagattaggttaaactagaagttgtaatgctgtattaagtgtttgtatttctaatatgaaccgtaacaaggccagagcagaactcgttatacatacaaaaaaaaatgaagatggtgctcccagtgagaaagccgaaccgagcgcagaactccgggtatcgccggatccctcctgacttacagctcctacagaaggaaacatgaagtagcggctcgaaacctagaacagtggcttctgtccaccggcattcactcttgagggtggattcttgctccagaattgtgctgccatctttcaaatgatcttcatcgtgcaaagtaattatatgtacattcctctgaatgatctatgcaccaattgttgatcctggcagggtaataatctggatgtattgagtccatcacagtgcgaatgtcacgggtagatctgctgttttcaggcaattcattcttggctttctatcccacccgttgttgttgcaagttaagctagcagtacttgtctcagtgtccgtgagacgtttgtgtaagattaggttaaactagaagttgtaatgctgtattaagtgtttgtatttctaatatgaaccgtaacaaggccagagcagaactcgttatacatacaaaaattgatggccaggtcagtgttaccgtattattatgcaatggcagaagcttgcataaggcgtggtgccactcgttgctttgctgtaaaaaaaaaaaaaaaa

SEQ ID NO: 393675 - DNA, 637 bp, Oryza sativa
  unsure (1)..(637): unsure at all n locations
cctttcccccgctccccttccccgaggagccacgccgccgccgccgccgccgccatgccgaagcactaccggcctgcgggcaagaagaaggaggggaacgcggcgaagtacatcaccaggaccaaggcggtgaagtacctgcagattagcctcgcaaccttcaggaagctatgcattctcaagggcgtctttccccgggatccaaagaagaaggtggaagggaaccacaagacctactaccacatgaaggatattgccttcctggcccatgatcccttgattgagaagtttagagaaatcaaggtccacaggaagaaggtcaaaaaggcgtttgctaagaaaaataaagatcttgcagacagattattgaaccgaccaccaacttacaaacttgacaggcttattcttgaaagatatccaacttttgttgatgctcttcgtgacttggatgattgcctaacaatggtgcatctttttgctgcgttgcctgctgttgaaggtgaacgtgtgcaagttcagcggattcataattgccgcagttgagccatgaatngcaagcatatatatctcgaactcattccctgcgnaagacatttatatccgtcaagggcatatattatcaagctgaaggtcaagg

SEQ ID NO: 393676 - DNA, 405 bp, Oryza sativa
ccgtcgttgccgcctgcttttgcttctttccacttctgacttctccaagcccaaactccaaagttctcatcgttgcgcgtggcactgcggactctccactctccacgcccctactccgaggatacaccgtgagtaggcgtggtggcgcttgatctcaaatatcaaatatgcgtcctcccgttttcgtgcagtcgatctaacaccgttgtttcttgctaatctcgttttcgttcccccggatcaaagaaactttattttacaacaacaacaacaacagcaggaggacctcgacatttccttttttaaatgatcttattaccttctctctcttattattacagattttagaaataacctgtagcctttgtttgtttgtctggtcccaatttctgcaggttcttgagt

SEQ ID NO: 393677 - DNA, 550 bp, Oryza sativa
gtgctggcgcggaggcggaggaggagggactctggttgctggtggagggagccgcggcggagaggaagaggaaggtggcggcggtgatcgaggacgtggagcacgcgctgtcgaccccgacggcgctgctgcggggcatctcggacgccatggtcaccgagatggagcgaggcctgcgcggggacagccacgccatggttaagatgctcatcacctacgtcgacaacctccccaccggaaatgaacaggggttgttttatgcattggatcttggaggaaccaacttccgcgtcctgcgagtccaactcggtggcaaggagaaacgtgtcgtccaacaacagtacgaggaagtctcaattccaccacatctgatggttggaacttccatggaactgtttgattttattgcttctgcattgtcaaaatttgttgatactgaaggtgatgatttccacctcccagaagggagacagagagagctgggcttcaccttttccttcccagtgagccagacatcaatatcgtcaggaacgctcattaagtggacaaa

SEQ ID NO: 393678 - DNA, 964 bp, Oryza sativa
ttggtcacttcaaaactggatagttatgattgtaagggcaagaaagttttggagaagcctgtggatctcgagttatctttgaattttggaccctgtgaatctgctgtgacgaatgtggacttctctgcagcaaccaaacaacaggccgtatttctgcaatcatgcaatatgtcctcagtgcctacagtggacgaaggatcaacatctgctcgctggaaatctggtggtaagctacttccttatctgtatcagtccaggaacaacactggtcatttttcaagtaaagagttaccaggtagctccaaccagtctcaagatcttgccccactgccaaaaatgatacaaacgccacaaagtccagtaaccagtacttctggtgttgtcagctttcaacaacgctgcaacagcacaaaaatctgttcacaaccgggatgtgcaaaaggtgctagaggttcttcagggcgctgcattgcacatggtgggggtagaaggtgccagagagaaggttgcaagaaaggagccgagggaaaaactatcttctgtaaagcacatggaggtggcagacgctgcgagcaccttggatgcacaaagagcgctgaaggccgcacagatttctgcatagcccatggaggtggccgccgttgtagccgtgatgggtgtagaaaggcagcaagaggaaaatcttggcctttgtattaagcatggtggggggaagagatgccaaaaactgaactgcacaaagggtgcagagggccaatcaggcttttgcatcgctcatggtggtggccgtcgctgcaaacatgatggttgcacaaagggagctcagggcagcactaatttctgcaaagctcatggaggtgggaagagatgcacacatccgaattgcagcaagggtgctgagggaagcactgctttttgcaaggcccatggaggaaggaaacgctgttcagttgagggtgcccta

SEQ ID NO: 393679 - DNA, 571 bp, Oryza sativa
tgcaccgcctcttactcgctctttctcctcctcctccccgcctcctctccgctttctcctcctcgcaccgctcctctccgccttcttctcgcgtcgcgccgccgccttcctcgcaccgtgcctctccgtcttctcctcgcgccgtgccgccttctcctcctcgcgccatgtcgccaccctctacccacacatctgcgcgcccacgacctgactcctgaggcctcgatgacggaaggctaatgggagacacaagatggatgggatctggaccgtggagtggttgagatcgacgggatcaatggctggattgatttgcttgatttgattttttttccatgaatcatgctctactttgctacttgttggggcatcatcaaattttagtccttcatcccagttgctttttcattcatcatgtacagagttctttttttgcaattattttttgggctgagttcggtctttgaccgagaccaaaccgaattaaccgaagaccgaaatactctatcttgagttttcttgaagaccgatcagtcttgtgatcgtaaagacccgatttttcaaagactga

SEQ ID NO: 393680 - DNA, 454 bp, Oryza sativa
  unsure (1)..(454): unsure at all n locations
cggacgngtnanantnagtagccatctcgcactaaaatggcgatcccgaccctcgggctgctgccaacctggggcaccggccacctcatgtccctgctcgacgccggcaagcggctgctcggctgccgcggccggcggaggcctctcgctcacggtgctcgtcatgcagccgccgaggaaggagtatgcgtccgccgtcgccgccaccgtgcgccgggaggaggcatcgggcctcgacatccgcttccgccacctccccgccgtcgagcccccgaccggctgcgcgggcgtcgagggagttcgtctcccgcttcgtgcagctccacgcggaccacgggggggcggccgtctccggcctggactggcccggtggccggcctcgtcatcgacttcttttgcacgacgctgtncgacgtggcccgggagtccgccgtcccgcgctacgtgtacttca

SEQ ID NO: 393681 - DNA, 502 bp, Oryza sativa
  unsure (1)..(502): unsure at all n locations
cggacgntcngggtaccgcgtgggcgcccggttgctctgcctcgggggcgacgcgggcggcgaaacaagccgcgccgcccccgtccctctcctcccctcccacgccgagccgccgccggcaaagccgggcgcttgcaaggacagcggcggcggggctctctctctctctctccaccgctcgcagtggagctggacggggcgccggcaagacggagcggcaaggcgccgacgacgacgaccagatccagcgccaggatgcacggatccggtacccctatggccggatctgctgcttccgggcggcggcgacccgggtcggcaagtcgcggcgtcggcggcgtggaggtggcggtgtcagcggccggagggcggcgtcgacaactggagggcggcctcggcggcgtggagttggcagcgaggcggaggacacggcggcatgaccgtggctgcggtgacaaacggggagcgtgaccagttctggccggacggctagcggcggtgc

SEQ ID NO: 393682 - DNA, 739 bp, Oryza sativa
  unsure (1)..(739): unsure at all n locations
taacgtgtgtgtgtttggagcctgtagcatgggggggagtagtctttttttccgtaagtatgaccttcttctgttgtaattctatacataatacttttcatgctatatcaatatgaatcttcttgtgttgtcttgagcgggtcattcagaaaaaaacactattagtaagtgggaaactagaggccgaccggaggtttctttctatcgttgggagcctatctgccttccgacctccatcgaattgggtgcagaccagcagctgcctctgattgccgtcgtccgccgtatatatgatgatggagaatagcaggggagcagcagccggagtcgtcgccggcgaacaacaatagcaagaagaagaagaagaagaagacggcgtcgcggttccggcgtgtgtgcgtgttctgcggcagcagccccgggaagaaggccgcctaccaggtggccgccgtgcagctggggcagcagctggtggagcgcggcatcgacctggtgtncggcggcggcagcgttgggctgatggggctggtgtcccgcgccgtccacggaggcggcgggcacntggtgggcgtggtgcccaatggcttnctnccacgcgagctgatcggcganacctgggggaagtgagggcngtgggaacatgcaccacggaagcgganatggcgcgggantcngacnccttcatcgccctccccggcggctacggcacgctggaagaactcctccaaggggggcccgg

SEQ ID NO: 393683 - DNA, 510 bp, Oryza sativa
actgccatcccctccggaaagttatgcaagctgattccaacagcagtaatgatcccactgaataatacttgccgacgatgttttttcatcatatctttacccgaaccatcatcgtcagtctgcttcttgcctgcatcagctgttggcacaacagttggctctggaataaacttgacaaccaaaccaaagaaaagaactccagcaaaaaaccaaaggttgcccttcaagaaaccaatagaattcaatgcattgtgtgccaaatctagaaaggaaatgctcaacataagtccagcggcaaaaccctgtagaagcccaagcatcttaagattaggcgtcggattcaaaatcacaaacagcgcaccgatggacgtgctgaggccgccgacgagcgagagggcgagcgccaccagcacctgcgactccattggcggcgagagagagctagggcttgcagggtatcgaggcggggggaggcggggaggagaggagaggagagggagatgggggaag

SEQ ID NO: 393684 - DNA, 483 bp, Oryza sativa
catccattcccccccaatccctcgcgccgctccccttcccccactcaccaatggccgccgccgccgccgccgcgtcaacgtcgcgcctcctcctcctccgccaccaccaccacgccgccgccgacgggtcgaagcagcagcagcagctcaggtattcctccaagccgtcttctctcgctctgccccggctgcgccttttgccggcggccggggcgctgctgcccgaccgggtcaccccgttctcctacgaggaggacgacgagtccgacgaccacccgcgcgaggagtgcgggctggttcgggtcgtgggggaccccgacgcgtcgtcgctctgctacctcgggctgcagaagctgcagcaccgcggggaggagggtgccgggattgtcgccgtcgggggtgacgggaagctcaagtcggtcaccgggctcggcctcgtcgccgacgtgttcggtgaccccgcacggtggcatcgctccccgg

SEQ ID NO: 393685 - DNA, 254 bp, Oryza sativa
tgcgtgatctctccattcttcccaacccagcggttcgagctagctagctatctagttcatcatccccatccaccgagctcgatatccctggccatggccatctccatggcctctcccctggcttcttggcctggggcattcttaggctcatacaagtatttgctgtacgggccggtggtggggaaggtggtgcaggagttgagggagcaagggaggttgccgctggggacgtcgtggtgcctccacctcatcct

SEQ ID NO: 393686 - DNA, 828 bp, Oryza sativa
ctggaaagagagagagagatgggtgcgtcctctctataaatccacctcgtgttgctgctcccacaccccccctcctcgatcatctcctcctccctaccaacaaccaccaccatcctcttcttggcacttggcatcaagagacacatccagacgcctcgagttgtagctagcaccagtggctcagcttgcccagtgctgctgcatcgatcagtggcagtagctagctcagctctagccttttgccaccgaccgctccgatcgaatccggtgctaggctagccagcctcctcgctctttataaccccagccgccattggagagggagggagggagctagagctttgttcttgttcttgcatgctgttcttgttgatcgagtgagagagggggaaggaagaaaggagggaggcacatgcttataccgttcgtgctggagttcctgatcgatgtcgcctgtgatcagtgagatcctcctctcggggtttatgatcaactccacactccggcgccgcacccatctcgtccagtctttctccgtcgtcttcctctactggttctatgtcttctcataagctactcgccatccatttccctctcctcctctctctctagcttccttctacaataatcgatctcgtgttcgtcgtcgtcgttcttgtcgatctctgtgtgtgttcttcgtcgtcgtcgtggttcgttttggattttggtttcagtttagtatatgcacttcttgttcttcactgctgctgctgctgctaagcttgtagcattctagtggtgcttggtgttcttcttttccgaaatctttgcgatcgattgattgat

SEQ ID NO: 393687 - DNA, 498 bp, Oryza sativa
gcgtcacctcctcgcgtgctcagcgccgccgccgggcagctgcttcttccgccgcatcctcgccgccgggttagggttttggggatgtccgaccggcagcagtcggaggagccggaggagcaggtggacctggagggggacgacgacaacgacgtcatggacgacgacgaggacgggtaccgccgccgccgccgccgcgaggactccgacgagccggacgacgacgaggaggatcccgaggtcgagggcgatggccacggagacgcggggaccgcggcgggcgaaggaggagcgcatgagatggacaaggccgccggcggcggcggcgatgggcctgaggacgatgacgagaagcggaagtgggatgagctgctcgctctgccgcctcagggctccgaggtgttcatcggcggtctcccccgcgacaccaccgaggaggacctccgtgagctctgcgactcgttcggcgaaatctattgagtgaggttgatgaaagat

SEQ ID NO: 393688 - DNA, 579 bp, Oryza sativa
  unsure (1)..(579): unsure at all n locations
gaaacgagggatcgatcgcgtccacgcacgcccgatcccggccgcgagatgagcttccgcggcgaggagagcggcggcgaggatggggggcggacggcgtcggcgtcggacctgcggaagccgttcctccacacggggagctggtacaagatgtcgtcggcgggcggcggcggcgggatggggtcgcgcctcggctcctccgcctactccctccgcgactcctccgtctccgccgtcctctgcaccctcatcgtcgccctcggccccatccagttcggcttcacctgcggcttctcctcgcccacccaggacgccatcatctccgacctcggcctcaccctctccgagttctcgctgttcgggtcgctgtcgaacgtcggggcaatggtgggcgccatcgcagcggccagatcgccgagtacatcggccgcaaggggtctctcatgatcgcggcaattcctaacattattgggtggctcgcaatatctgtttgcaaaggactcatcctttttgtttatgggccgatttnttggaaaggattttggggtcggcgtgatatccaatgtggtgccagtttat

SEQ ID NO: 393689 - DNA, 377 bp, Oryza sativa
  unsure (1)..(377): unsure at all n locations
gatctcccactccattattcgcctcgcccattgccccgtggccacgggcgaagccggagggaggggagagacgcggttcctcggtcgccatggacgggctcatcaaggggctgatcaacgtggcgatcgacgccgtcgaaggcgccggacgaggtgagcggggcggcgaggacgacgcgccgaggaggcaccgccccgcgcgggaggaggaggagggccgcggcgacgagcggtcgcggtcgacgtgggccgaggtggtctccgatcacaagggcggcgaggcggaggagcgcccggaccatcggaattcgaggcgggatgggaggcaagagaggagggaggattggggattggaagagggtggattnccggaagca

SEQ ID NO: 393690 - DNA, 548 bp, Oryza sativa
  unsure (1)..(548): unsure at all n locations
ttttgaaagaaaaaaaaagaaaaaacaaaggaaatggcgtggtcgaggaggagggaggagagagagccgcttccgcttgattcgattcgaagcaaaaccaacccaacccaacccaactcaaccgaatcgatggccggcgacgagcccctccccggcgacgggcagcggcggcgctacctcatcggctacgccctggcgccgaagaagcagcagagcttcatccagccgtcgctggtgtcgcgcgcggcggggcgcggcatggacctcgtccccgtcgacccctcgcggcccctccccgagcaggggcccttccacctcctcatccacaagctctacggcgaggagtggcgcggtcagctggacgccttctccgccgcgcacccagccgtccccgtcgtcganccgccccacgccatcgaccgcctccanaaccgcatcttcatgctccaggtcgtctccgagctcgacgttccgnttcaaggccaacaacaacaaaacttnggaatcccttcaangtcgtcgtttaagagcngcggccttttcgattt

SEQ ID NO: 393691 - DNA, 547 bp, Oryza sativa
ctctttgttttttgggttacttttgagcctttggatgcaacagccctggtaagttgcccttggctattgttttggccccaacaagagaactcgcgaaacaagttgagagggaattttctgattcttccaatgtggaaacgatctgtgtatatggtggaactccaattagccagcaaataagacaactcaattatggagttgatgttgttattgggacaccaggacgagtaattgacctgcttaaaagaggtgctctgaatctgtcagaggtccggtttgttgttcttgatgaagcagaccagatgttgtcagtgggttttgatgaagatgttgagacaattttggatagagtacctccaaaacgtcaaaccttgatgttctctgcgactatgccaacttggattcagagactcacccagaataccttaagaatcctgttacaattgaccttgtgggtgaagatgatcagaagctagcagaaggaatcagtctttattctatcgcttcagagggccatgccaaacctgctgtccttggagaattgatt

SEQ ID NO: 393692 - DNA, 700 bp, Oryza sativa
  unsure (1)..(700): unsure at all n locations
ggactgcagggagcttttntaccgttcaactccacgaatatnggctgctcgcatggtcttcctgtgctggcgagggcatcggctggtactgcaggcttggccgctgcaaggggtgccggcgccgtcggcagggcccagctgtccctgctcccaagggacgaccatgactnttgcagccatagtggtgcccacgctttgcaaggcagtgaatgtnaattaacgacatggtcagccacaaagcaggtctgcttggggattgccagattagcaagatcagtttcattggtggaggtctgtcacctggtgcacttcgtcatcggatcttcctcctcaactccgtcatgtgcagatccagcgcacggtgcgtcaccgttgtgaatgtcaaaccggttcaccttgcgatcatccaccggctttcctcgaacgtcgtccttgaaagcgaccctgtgcaggcatacatctttcgctgaaaacttcagcagaggagcagttgaagaataagtgattgccgtattcgtcttgatgcacgcagattgcgcatgcacaatgttcttcatgagcaaatttgtcattgttggtagccgatctttgaagataagccaggcaaaaattgttgcactcagaggggggctgaattgttctacacaaattcccagactggacaatgggcaaaagcagaagtattgatctgatcatatag

SEQ ID NO: 393693 - DNA, 420 bp, Oryza sativa
gcggtgactccgtccgcgtcaccgagacgctgcagggcggctccagtgtcaagttcaggggggaggtgcctccttccatatgccagcaatgctatgaaactactctacaagagtacgcaaagcgcttcaagattcctggatttcgtcccgggaaagtagttccagagaacgtacttataaactatgtaggaccaaaacacgtacaggatgctacagttgaagctatcttgaggcatacacttcctcaagcattgtcctcggtagaggacatgggcattagaagattctgtacgcattctaacaaagtttgaagatatggcaaattcattctctcttgataatgtgtttagatatgatgtttctgtggatgttgcccctgaagtgagatggttatctgaagataaatataagaacctcaaa

SEQ ID NO: 393694 - DNA, 830 bp, Oryza sativa
  unsure (1)..(830): unsure at all n locations
cacaagcccaccaaatgtacaacaaccaacaaccgggagccatgcaacccagccagcctgctgtaacccagatgcagtcaggctttgcgaaccaattcggttcgatgccaccacactccatgccaggaatgcaattccccgggatgcaaccttcgccgatgccaggagcgcagccagtcatgatgtatgcgcaaccgatgatgatgccgggtatgcagtttgcagccatgccgcaaccacgaatgtatggcccccagatgtcccagtaccggcttgtgcagcagcaagcggcacaatactacagcaacagccaagggaggccaacatactacgctggtatgaatgacctctcccagaaaatgtatggcctctccatgcaagacagctcttacatggggatgaacagctcgccctactctacaacaccttcatcatcatcttccatggggcaaccatcgaagcctgaggacaagctgtttggagatcttcttagcattgccaaaacaaagcagaacaaggcttaatgagaaacaatcaaatggagtattaaaaaaaaagtgtgaagaggtctaatatctcttgtgtaattgttacacatttttttccccacgtggcttgatcatacgctgttgtagcatttgaatgtataatcttgttccggttttgtacgatgcccggccccgattgatttcatttgattcgttatacatacagtaccgtgtgtactgatcacggccgctgagaggatacgctggtaaattaattgatgatctagtataataagcatgtatttttcccccctctgacnnnnnnnnnnnnnnnnnnnnnnn

SEQ ID NO: 393695 - DNA, 352 bp, Oryza sativa
gtgtcctgctgattctgaggatgcatcaatgggtgaggaagatgatgaggattctgaagcaaaagataatgctgggagtgatgaagaacctgatgagcctccagcaaagaaaaaggcaacagatgataaacaaacaaaaaaggcaaaagaaaaggatgcgactgccaagaaggcttctacaagacctgcaaaaggtgtgtctacgccttctcaagacactgaagaagatgatgagccagaagttgagttagaaagcaaaaaggttgtcaaaaaaagtctcatagagttcaaaggagagcgatgttactgtagattaaaccacccagaaggcttctaaattccaaaaaggatg

SEQ ID NO: 393696 - DNA, 589 bp, Oryza sativa
cgctgctgctctggttgtctctcgtcctgagtctccgactgagcgcctccaatctcaacagccacctcccacctgttccggctccggctagacctcgccgccggcgatccccagcctcagcgcatccaaccgacggaagaacacaaggcgccgcaccgcaccgcagcgatgacgctgatcaccctcatccgcgactacatcgatcgcatgctccacgacatccccgggatgaaggtcctcgtcctcgaccccgataccgtggggatggtaagcgtggtgtacagccagtcagatctcctccggaaggaggtgttcctcgtggagacggtcgacaacgcctccagctccagggagtccatggcgcacctcaaggccgtctacttcctccgcccctcctccgataacgtccagaagctccgccggcatctcgccgccccgcgtttcgccgagtaccacctcttcttctccaatgtattgaagattccacagattcaggtgctcgcagattccgatgagcaggaggttgtgcagcaagttcaggagttctatgctgatttttgtgccatcgacccttaccatttcacgctgg

SEQ ID NO: 393697 - DNA, 529 bp, Oryza sativa
  unsure (1)..(529): unsure at all n locations
ccgagcccgagcactcgcngccgcttcaaccgccgctccccgcaacgacgccccccccaccagcgaagccatagacaagttggtctcatgaattcaggaagcacattggcatccagagtttcctgttcatcgggaaacaacggcatcttcccaccctgccttctcccaggattcctgggattcccagttgtgtttgtaaacttccacttgttcaaggccattgttcgcagccctgcatcttctgtggtgttgggaatctgttggagggcgcctttccattagagaggtgccccataaagtcttttgtttaagttagtcctggggaaactggcatagctggaatttgtggtgcaaaacatccttggcatcagtagtctacactgctgaatctcaggttcctgaagatggtttcctctgaaataagctctgttacaacaacccatgcacaaggtcccaagctctttagagggaagatacttctgccaatgggcccctcagatgttgtgccttctgagaacgtgagttcgat

SEQ ID NO: 393698 - DNA, 899 bp, Oryza sativa
  unsure (1)..(899): unsure at all n locations
gatttccgggatgtatctaggtgaaattgtccgtaggtgctggtcaagatggctgaagtatctgatctctttggtcattccttccccaagaaacttgctgaaccatttgttctaaggacaccacatctatgcgctatgcaacaagacacctctgacaatcttggagaagttgagtccatcttgagtgatgtcatcggcgtgtcccaagcttctctgctggcacggagagtcactgtagaagtctccgactgcatcatcaggagaggaggccggttggccggggcaggaatcgtagggatccttgagaagatggagaatgactccagagggcacattttcggacgaagaacagtggtcgcgatggacggtggtctatatgagaagtaccctcagtacaggaggtacatgaaggaggctgtggctgagctactgggacccgagcgatcgaatcgtatccccatcgagcacacgaaagacggatcagggatccgcgcctgcgctgttggcagctgcaaactcaaagtatgctgctgctcaaatctctacaaggtgatcgcaattgttataattgttgagttactgggccgaattaattctctacaaggtgatctcaattgttatcattgttgagctactgggacctgaacaatccaagcatatcatcatatggtggcctcttatctgaagtatggaggggcttcatatatgctattcttctgtactactagtctactatactatataacgcatttgaggaaaagaaacaccagaaatttatcaacttatgttttgtataattcatcaacttatgtgtttgtatagttacagttcaccagaaattcatcagcttatgtatttgtatagttaaagtttatcctcnnnnnnnnnnnnnnnnnnnn

SEQ ID NO: 393699 - DNA, 890 bp, Oryza sativa
  unsure (1)..(890): unsure at all n locations
caatggcgaggcactactgcatcatcggcctttggcttcttcccaggcattgttcatccccgattacacccaccaaaatatacacaagttgggatgcccagcattgtgaaccccactgatgcatttggaagagtaatccatgctccattaggaactaacagtgcattcaaagaacctaaacatcagatgcccaacaatttgaatggagagttccaggacgtcattgagatgccttttactcatgaccatcatggatcaaatgatcaaccctgagattgattccacaactgaagcaagagatcaatatgtgccatgggctttcagcaaaactgtgatatatgaggcatgttgatatcatggtactagctcacagctgatcactgaagtataagcatccaaaatgcttagttagtgctatttttctcatgttcatagcagcaattgacctcctgtggaagcctctctttggatgttccatttgctgttatagaaagttgggagataaaaaaaaaaggatgttcacatggagatctcaagcaatttgttctccactgaagtagtctacagtcttgaaatggcgagaagcttcattttgcaagaaggtgatttttctgtggtctcgtcaaccccaggattattacatacactagctagcattgtgaggctacagaaattgttctttgttgtacttgcttagcccatgttccatctgacaagcaacataggcagaaatgcagtcactgattttgtatttgttgaaaaaaaaaataaatgggcttggcctgatgtagcaagcatttgaattttgcaacgggtgcatantggcacagatgtttttatntcngcnaagctgtgaannctgaaagagaaaaaagaaaggaagaagaata

SEQ ID NO: 393700 - DNA, 609 bp, Oryza sativa
cattttgctcatgtgttactgatgagacactgcgtgagatagctaattcatgtccgaatctctctgttcttgatgcatctaactgcccaaacatttcatttgagtcggtaaggcttcctatgttggtagacctgagactactaagttgtgaggggatcacgtctgcttccatggctgcaatagcttacagtcgtctgcttgaggcattacaacttgataactgcagtttgttgacatctgtgtctttggatctgccacatctcaagaacataagtcttgttcacctgcgcaagcttgctgagttgactttgcgaagtcctgttctttcttacattaaagtttccagatgctcagtacttcatcgtgttagcataacatcaaatgctcttcagaaattggtgttgcaaaagccagagagcctatcaaggtttgtccttgctatgcaacaccttgatcgatgtcgatcttagtgactgcgaatcattaacaaatgcagtttgcgaagttttcagtgatggaggtggttgcccattgctcagatcattgattcttgacaactgtgagagtctgagcactgttgaactgaatagtagtttcatggtcaatctc

SEQ ID NO: 393701 - DNA, 345 bp, Oryza sativa
aaccaatctcctcccccctcctttcctcctcctcccgaaccaccggaatccgacgcggcgccgccgcgccaccccgttccgccggctctcttcctcacctctcctccccaggagatcgtcaatctcctcggtcaggtgtttgatcgattgcctgtgggaagcatatgggcggttagattcgtgaagttgagaggaatcagaagacgggaattgtttgaggggactgaatttgatctggaaaatggggtggttttcggcctgcgtccggattggctcgggtggcgctgaggaggaacctggcgcgtgctccggcgaacccttttgccggtcctgcgccacggtact

SEQ ID NO: 393702 - DNA, 543 bp, Oryza sativa
atctgatgtgatttcttgatatcctaaatataagattaatacttcacgttgctgagttgagaaaaagatggttgaatcaaaagaattctttttttgaagttcattttttatcaggggacaatatgaatattataccgtgttccattaaaacactcatggggttatacgatatatcgggcgtagaagtaggccaacacttctattggcaaataggaggtttccaaattcatgcccaagtacttatcacttcttgggtcgtaattactatcttgctaggttcagttatcatagctgttcgcaatccacaaaccatcccaaccgatggtcagaatttcttcgaatatgtccttgagtttattcgagacttaagcaaaactcagattggagaagaatacggtccctgggctccctttattggaactatgttcctttttatttttgtttcgaactggtcgggtgctcttttaccttggaaaattatacagttaccccatggagaattagcagcgcccacgaatgatatacatactactggtgctttag

SEQ ID NO: 393703 - DNA, 518 bp, Oryza sativa
gtacccggagaccccacatatccagatctgcaagcggcctcctcctccttcctcctgatcctttagcttcctatatacgattccaccatcgaaggccagggcccagacttgcttgccgcaggttactgatccaccgaaggagggaggcgcccgcccgccgccatggccgaggtgacggtggtccgtgcggagcgcgaggaggagtccaccctggagcagggtctcctcgccatcccggaggaatccaaccaacttacatacactggagatggatctgtcgacttttctgggaatcctgttgtgaaggagagaactggtagatggagggcatgcccatttatcttaggtaatgagtgctgtgagcggttggcctattatggaatctccacaaaccttgttacatacttgacaaagaaactgcatgatggtaatgcttctgctgctagcaatgtgactgcatggcagggaacttgctacttaactccccttattggagctatactggctgatgcatactg

SEQ ID NO: 393704 - DNA, 646 bp, Oryza sativa
atcatctggatcttgaggcttggagtgttccagaagtgcttcggccactctacgagtcatctagggtagttgctcagaaaatgactactgcagcactacggcacatcagacaaattgctcaagagacaagcggggaggttgtatacgctttggggaggcaacctgctgttttgcggacatttagtcagaggttgagtagaggcttcaatgatgctataagtggtttcaatgatgatggttggtctgtcatgggtggggatggcattgaagatgtgatcattgcttgcaatgcacagaaggttaggaatactagcacttcggccaatgcttttgtaactccaggaggtgttatatgtgcttaggcatccatgctactgcagagtgtcccacctgcagctttggttcgatttttgagggaacatcgttctgaatgggcggattataacttcgatgcatattcagcttcatctctgaagacaagctcatgttcacttcctgggttgcggcctatgagattttctgggagccagatcattatgccacttgctcacacggtggagaatgaggagattttagaagttgtccctcttgaaagacaaagtggtcacacatgattgatgtacttaagtgttaagatattgaccct

SEQ ID NO: 393705 - DNA, 524 bp, Oryza sativa
atggcatctgcagggagaatgtgttcccgatgaacctgggaaggaagcagctgcaccaaaggccactgcattccattccttgcttcctgccgttagggagaaaattgttgacggttttactccagaagctcgtgacatgtttgaaagagagttcgaattttttgacaaggtcacctcgatttctggtgttctttttcctcttcccaaagaagagcggcgagcgggtattaaaagggagctggagaagattactgtgccaggtgatgatctgtacctacctactgcaacaaacaagtttgtacggggcattcaagtagacagtggcattcctctccagtctgctgctaaagttccaataatgattactttcaatgtggttgatccgtgatggggacccaaacgatgtgaagccacaggcttgcatttttaaggttggtgatgattgtagacaggatgtgctggcactccaagttattgctcttctaagggacatatttcaagctgttggattaaacctttatctc

SEQ ID NO: 393706 - DNA, 788 bp, Oryza sativa
gtgtctggtgacagcaaccgagagataaatgcaatacctgcggagaacctatacaggagattcacatgagctcaaagattctgtcgtggacgataaggatcctagacatctgactgaagggagcttgccagacaaagctgcatcaaattttaagaatggaatcaaaccttcagccagcagtaagcaaaagcaacaaaatgacagccagagtgaaatcagtgatcatacaacaggagcatctatcttctatgagaaagccaagaagcattgagcagatatgctaaagaacactagtcaatctgccagctatccgacagcccaagtatcaaaatctttggaaggaatgctttctcaacctcattacaacggtgtcacctcctagggagtgaccataggggaaaaatgccacaatgccttctcacctgaagagccagaagtttgtcttgtaaaagctgttgatgtagaagaaccagcccaagagagaagccaactgcatgataactcagagagcaatgcatatagtactagtgtagcagttgatgatcaggtggcggttctagaagaatgtggcatcaaagaagacacccaagaaggtatcatatatgctactgatgaggtagacaccgtgcctgttgaaggagttggcaaattggattgttccaaaacaatttgcaacatacagtgcatcccagcagaacaatacacagacagccccttgccagaaatattagaaggaacttgaggaataagaacctgttcaaatgttcatgagctctcctgagagcatg

SEQ ID NO: 393707 - DNA, 499 bp, Oryza sativa
gacgtgccatcgtcgtcacacgcgtacggcgtaccggcaccttcgatggcggccaccaagcccccgagctgctccacccgcctcagatctccggccaccaccgccgcctgcttcctcccggcgtccctccttctcttcctcctcctcctcctcctccgccgccctcccatgggctccttccctcccacaattccaggtggctccgtgtcgtcgcggcgggcggagctgtacgggaggatggcgagggacctcgacgagcgcggcgcggcgttcttggacggcggcgagacgtcgcagtcgctcacgctgtcggagctcttcgacaccagggacggcgccgtcgtgcccatgctcaaggctgccaacccgccggtgcgcgcgaatgtgctctacctggatcctgagtttgcttccgtgatatcgaaggctgtgaaggaagtgtttcttccttattttaacaagctatctggttccaaaatatgagcatctaccacttcag

SEQ ID NO: 393708 - DNA, 473 bp, Oryza sativa
  unsure (1)..(473): unsure at all n locations
ctcgaccataaatggagctctcgtggtcacttgctgccgtattgcactcacctctcttcctcctcgccgcgctcctgctccttcccgtgttcaccttgctgagcttctcgtcggcgaagaagccaggcgatggcggcggctggcggctgccgcttcctccgtcgccgcggggcgtcccgtttctggggcacctaccgcttcttggctccttgccgcaccggaagctccggtcgatggccgaggcgcacgggccggtgatgctgctctggttcggccgcgtgcccaccgtcgtgggcgtcgtcggcggcctcggcgcaggaggccatgagggcccgcgacgcggcgttcgcgagccgcgccagggtgcgcatggccgagcggctcatctatgggcgtgacatggtgttcgcgccataccgcgagttctggcgccaggcgcgccgcgtcagcgtgctccacctnctcagcccgcg

SEQ ID NO: 393709 - DNA, 502 bp, Oryza sativa
atctgtcccaatcacccaaacatggcggaggcggggcccagccggccggccgccgccgccgccgtcgccgccggcgacttcccggagctcctcgccttctgcgcccgcgcggaggccctcatcgccgagctcctcctcctctccgaccgcgccccgtcgcagttcgccgaccgccgcttccaccccgtcctcttcgacttccgatacttcgactccccgggcgaattcgaggcgaggatcgaggggaacatggagctggaggccctggaagacgagctccgcgagtcctgcggctcctacatccggaggttcttcgccttgctggatgccgccgtcgcttaccacgacgagctgggcagctacctcaacgacctgcaggaagggctgtatgtgcattgcacattggatggtgtactggagagtaaccgggcttgccaattgcttacagaatcgatgactttgtttgggggtatggctttgctaatggagcacaagattagcg

SEQ ID NO: 393710 - DNA, 524 bp, Oryza sativa
  unsure (1)..(524): unsure at all n locations
acgcgtccgcatccatcaagttggtcatcgagctcgagctgaatctaaacctttgcaacaatggcggcgcgtgttgttgtggcgttcgcggttgcgtccgccatgttcgtggccgtctccggccagaagttcaacgccatcttcagcttcggcgactccatgtccgacaccggcaacctctgcgtgaacggcccccccgccggcctgacgctcacccagcctccctacggcgagaccttcttcggccgcgccacctgccgctgctccgacggccgcctcgtcgtcgacttcctcgcggagaagttcgggctgccgttgctgccgccgtcgaagaggggcggctccgacttccggcgaggcgcgaacatggcgatcatcggcgccaccaccatggactccggcttcttccagtcgctcggcatcggcgacaagatctggaacaatggccccctcaacacccagatccagtggttccagcagctcatgccctncatctgcngctcatcttgcangacgtacctgtc

SEQ ID NO: 393711 - DNA, 917 bp, Oryza sativa
  unsure (1)..(917): unsure at all n locations
atagcggtgatgcaagcgtgtctgcttccacagatgaggctcttgccaaggatgatgacgcaattgtcggtgctgttcttcctcccttgtcatcagaggaacccacaaacatcacacaggattcagttcttgaggatgaggagctgaaagtccaggagactgctcctgctactactaatccttctccggagaagagcagcaacaatggcagctccccctctgtggttccatccgaccctgctactctccctgttcagcagattcctcctactcaagaggcaaaggatcctcctgctcagcaaattccagctgttccagaggccaaagttcctcctgttcagcagattccaacatttccagtggttaagacagattcagaggcggcgccgcggcggaaggagtggaagccgctgtgcgatctctggtcgaaccgccgcatcgactggtgcgagctcgacggcgacgtccgcgtcgcgggcgccaacggcaccgtctccctggtggcgccgccggggcccgccgacgagcgcacgttccgcgccgagtcgtggcacatcaagccgtacccgcgcaaggccgacccgaacgccatgcgccacgtccgcgtgctgacggtgcagtcgctgcccgccccggcggcgagcgcggcggcgccggcgtgcacggagcggcacgacgtccccgggcttgtgttctccgaccgcgggtacaccggcaactaacttccacggcgtacaccgacgttcatcctagccgctgttcctgacggcgaggcagtactaccggcggaggtgaagctanctggtntccgacttccaagatgtggtggctcggcaagttcttgccggtgttcaaggccgtcttccaaatacgacctcatcaaccttcgacgacgaccgccgcntccacaagttccg

SEQ ID NO: 393712 - DNA, 863 bp, Oryza sativa
  unsure (1)..(863): unsure at all n locations
tgacaaactagaaccacttggtgaggctagggagattctcaagtttgcaagagctcaagctcgaaggcaggctgccaatcttgagcatccgcttgtttgtattgatgtcattgaagaaggtattgtttcgggaccccgagctgggctctggaaggaagcaaatgctttccagggtcttcttttcgcggatacatgtaaaaacttagttcatgtattcttttctcaacgggcaacatcaaaggttcctggtgctacagacttgggattgatgcctaggaaagttactaaagtttgccatttctaggtggtggacttatgggttcaggaattgcaactgcgatgatactgagtaattatcctgttatactcaaagaagtaaatgagaagtttctaaatgctggaattgacagaattaaagccaatttgcagagtcgtgtgaggaaagggaaaatgacagaggagagatatgagaaagccatgtctcttgtaacaggtgtcctcgattatgaaaggttcaaagacgtggatttagttattgaggctgttattgaaaatgtgaaattgaaacagcaaatattttctgacttggagaagtactgtccttcccattgtgtccttgctactaatacatctacaattgatcttaatctaattggtgagaaaacaaggtccaaagaccgtattgtcggtgcacacttctttagccctgcacatgtcatgccacttctgggaaatagtccgcacccagcacacctcaccacaagttgtcgttgatttgcttgatgttgggaggaaatcaagangncacccatagtgggttgggacctgtaccgggttcgcagtcaacaggatgttctttccct

SEQ ID NO: 393713 - DNA, 871 bp, Oryza sativa
aaccttcaggatgccatgtctgttgcaaggaacattttgaaaaacccaaaacttttacctggaggtggtgctaccgagctgactgtatcagcagcactgaagcaaaagagttcttcagttgaaggtgtagaaaagtggccctatgaagctgctgctttagcatttgaagcaattccaagaactttggctcaaaattgtgggttgaatgtcatcaggataatgacacaactccagggaaagcatgcaaatggtgaaaatgcgtgggttggcattgacggaaggagcggtgacattgttgacatgaaagagcggaagatctgggattcttacagtgtcaaggcacaaacgttcaagacagctatcgaggcagcttgcatgcttcttaggatcgacgacatcgtcagcggtatcaagaagaagcaggctcctggagcctcagctcctaaacagcctcagatcgaacaggagggtgacgcggacaatgagcagatgatcccagagtagaacttgtgtgctgttggtgtgaggagcctgcactggcgatgttatgctctaaagccagagtaagcccatgaagggagaacggctagtttgacatgtgaagcttttgcgagttgtgtttcttgaatgtttgttcttggctaagcctccagggttttttctggttttagtttgaaaatgtgccgcttttatatgtttgatttaggggcacgatgaggtttctcgttctgtgtattgtatcagcattttgggatcccacgttctgcggggttagctgctgttcgttttattaatgtacctcgtactggacggctaccggacctttgattaagcagcaacactagtattagctttaaaaaaaaaaaaaaaa

SEQ ID NO: 393714 - DNA, 493 bp, Oryza sativa
gtcggatctctctctctctctctctctccctctctctctcgcccatgtaccatctccatggacgacctcgccgccgcctcccctcctcacccgccgccgccgccgccggaatcccacgtgcctccgcccccgcagacgccggagaaggattcatgtgaggatacaggagacatgaggatcagtgaagaaaagccatgcacagatcaggagttagatgctgatcagatgaatagttctagctttaatagttccagcgagtgtgagaatcaaacacctagcaatgatgaaatgactggatcagagtccaaatctgaggcagctcaaacagagggtggtggatcgagtgaagagaaggtcctgaagaagccagacaagatcctgccttgtcctcggtgcaacagcatggatacaaagtttctgctactacaacaactacaacattaaccagccaagacatttttgcaagagttggcagagatattggacggcaggt

SEQ ID NO: 393715 - DNA, 580 bp, Oryza sativa
agaaaaaactcttaaaacaagggaaaggagaaatccaagccaatttgcgacgaaccctaaccgcccaccaaatcctctcctccttccccaacggcgagcgtccccggcgaatccgccttgacggaggcaccccggcgagctcaccttcccggaggaatcccagctcagcctcatcgtcttcggtgagggaaatatcttggtgattcttgggaaccttcagaaagaccacttaatagttttccttggcccagaaaggcttgaggcttgagagctgaaaagttctgctggagctagtgctataatggccacaaaacttgtggttcttgggaatcccatgggatgtggacactgaaggattaagagagtacatgggcaagtttggacccctagatgattgcgtcgtcatgaaggagcgttcgtctggtcgatctcgtggggttggttatgtaacgttctcatcagctgatgatgccaagaatgttcttgagtgtgagcatgttctcggaaaccgaactctagaagtgaagatagccactcctaaggaagaaatgaaatcacagggatcaaaaaaggctactag

SEQ ID NO: 393716 - DNA, 472 bp, Oryza sativa
  unsure (1)..(472): unsure at all n locations
gttaagatcttcgaggacgagtgtaacgaggtcaacaccggccgcgtggtcggcacctatgggtacatggcgccggagttcgcgctggagggcgtctactcggtgaagtctgacgtgttcagcttcggcgtgctgctgctagagatcctcagcggccagcgcaacggcgcgctctacctcgaggagcaccagcaatccctcatccaagacgcgtggaagctgtggacgggaggggttggcggccggagttcatggacccggcgctggggcgggggtacgcggcggaggaggcgtggcggcgctaccacgtggggctcctgtgcgtgcaggaggacgcggacgcgcggcccaccatgttccaacgtcctcctcgccctcatcagcgaccacattgaacttccccgagcccttccaggccgccatgtttaccaggctccggagggcgttctncttcgcccgccgctcattgacc

SEQ ID NO: 393717 - DNA, 601 bp, Oryza sativa
  unsure (1)..(601): unsure at all n locations
cccaaatcccagagaggagtcgcgagcttttcatcaatcctctgggtggcccccaggtttccccacccgcaaagagcctcaaaattccccctcctctgtcgcgaccgatcgcgaccacggcgccggacgagcagacaccgccgccacgatgccgccctccaccggctccgtcccacccgccgcatcaacgccggcggctggggacgaggccaccgccgccgggagggtactcctcggcaggtacgagctcggcggcctcctcggccgcggcgcctccgccaaggtgtacctcgcccgcgacctcctcaccggccgcgacgtcgccatcaagtccttccccaacccccgccacggcggcggcctccgcggcggcgaggaggatgtcctcctccgccccgcgcccatcgagcgggaggcggccattctccccaggctgcgccaccgccacgtgatgcgcctccgcgagattctggccacgcgcaagaangtccacttcgtcctcgacctcgccgccggcggcganctcttctccctgctcgacctccggccgcatgacggaagactccgcggnactncttccggcagctcatctccgccgtcc

SEQ ID NO: 393718 - DNA, 340 bp, Oryza sativa
atcccttcctttaattctctcgaactacgactagcttcgagctttcatcactcgtcagcttgagcgcccagcagctatcgtcagcttaaaattagcgccccagcttagcttctgagctgactcgagcttgaagacagattttggtcgcatttcagctaacacaaagcttaacacacgagctcttgtcagctgatcgatccggggttgaagagatattgcagaaaaagaagaagaagaagaagaatcaagcttggtgcacggcgtcgccgccatggcggcattgcgcgtgggcacgagggcggtggaagggaggttccaagcgagcaacggcggcggcggc

SEQ ID NO: 393719 - DNA, 495 bp, Oryza sativa
  unsure (1)..(495): unsure at all n locations
cttgttgcgaagtgatcatgaagccgcgtccgtctccggcggcggcgtcttccggcggcgttccggcgaggctccggccgcacctcacccggctcaccgtgttcctgatcgtcttctccgccgggtactcggttggcatcatgtcgtcgtccatccggccgcctgcgagcaagccgtcgcagaggtcatacggccgcgcgccggcacctctccggcaccgcctcctccacggatgtcccggcgagcaacggcagcgctgcggcggcggcgaactacccgcgctcgccgccgcacgatctgttccggttcagggaggagtgtggcgaggcgatacccagcgacgccgtcgtgcggacgttcctcgacaagctgttcgacggggagagccgtacgagagtttcccgccgccgacaacgccgggttgttgaaccggcttcggcgaggccggcgggtggggttgaccggcgngtgttcggnagtgatcgagaaggtggg

SEQ ID NO: 393720 - DNA, 645 bp, Oryza sativa
ctctacgaacgaacgaaacacgccttcttccccaacgaccaaaccaaagtttgggtgaagaaaaaaaaatatcgccgcgtttttatcccccacgagacgagtcgagacgaccaaaagcctaactaatcgggggcaagacgaggaggagagcggattctcgtcggcttcggcgaccggaagaggagaggagaccgaccccgcgccgtgttccgccgccgccgccgccgccgccgacgacgacggcaagtaggaatttgattctcctggggaattaacttgttaggggaaaaggaatttgggatgggcgaccatgtggtggtgaatgtggaaggcttgggaaacgatggaggggctgtggagaagccatctgaggccgtgaacagctcagtggtggctgctgcgtcgctttctacgactgttgatacggtcgaggagggcggtggagaggaggagccgctcatccaggcggcggagtgccgtatatgccaggaggaggatagcatcaagaacctcgagaagccttgtgcttgcagtggcagcctcaagtatgctcatagagcttgtgtgcaacgctggtgcaatgagaaaggagacattacatgtgaaatctgtcatgagcaatataagcatggatacacagctcca

SEQ ID NO: 393721 - DNA, 590 bp, Oryza sativa
  unsure (1)..(590): unsure at all n locations
tggngcagaagagccctttgcacaatggcgtcgacaagtgctgagtgcatgggcaaacctgacgatacctccagtggcgctatcacaacttgattggcaactctggtataaattgatttgggccctttcttgggtactacattttcccactgccttgccatgtaaactctcggtgacgacatgagcggttctgttcatcttccaacgtaatcagtcgaattgccctttttccctactatcagagttcatgaatccatggaacggctgaattgacaggattgaacagaacgtgctagtggtgatggcatttgacaaggaagtagtattgcatatctttttctgagcaagatttttattagctagttacccatctgcttctcatgatctttagcacccaaagggcactcatggttacaatttcagttgacaaaggacatggcgtgccaacgtatttgattagcatattattacaatttcataccaggtattaagtaactacactttcctgcatatgccatgttctttgtcaaatacctggtgcttgcctgttatacgttttagcactatgtatactagtaatatgcccgtgc

SEQ ID NO: 393722 - DNA, 517 bp, Oryza sativa
acgacgacgtcgaggtcgaggcgggggcggagtgagcggggcccacggtcaggaggacgccgcgggtctggacgatgaccttgttctcgaggatgagctgcgaggtcgagaagagggcgaagacggcggcggcggcggcggcgaggaagaggaggaggacgacgtcgacggcctcgccagctccctcgaatcggggatcctctctggatctagcggcgacgaccctaccggtccggaggaaggggatgagaaggagaagcagttaggagatgatgcgaagaacaataagaggaagcaggagtctgaatctgatggggatagcggcagcggcagcggggaggagcagaacaagagggtgaggagagcaaaggggaaagagaaggacgtggcgtcggtggcgcctcagatcgatagcggcatgttctgcaatatcccgccggagttgttctcgcagatattcaagttcctctcatcggaggatctcatctcctgcgccctcgtctgccgcttcatgaac

SEQ ID NO: 393723 - DNA, 537 bp, Oryza sativa
tttcgtatcaaacatcatcagactgtatacctttgcatctcttaatgaatgcagtattggataacaaaatgctggacagtggaaaaaaaatgtcgtaaccatcttagttgggctcggggttaaatattcacatttaaattttcacctgtcaatcagtcaatctagctaacacgtgtgaatatgtacatcatgttaacttgcacaaattaaaaaatggatatgaacaagcaggaatggctgcagaataaagaatgagaacaaaccgctactatcagggtgtaggcctgcactagatgatcaatgtacacgcacaaggcattgccaaggtaggtaggtagatagaaataagatgttgctttgctgtatatgaagtcgtcagatttcttttgatccatgcgtccggtgcctgcctagccagtctaggactgtcagtaagctcagcggaatgtagagctgtcgtcacagagatctcatgtaaacagacataactgctttccatagaaatatgctggcagcatgtgaaaattttgcttcttc

SEQ ID NO: 393724 - DNA, 527 bp, Oryza sativa
gatcaggctagctacctacggtcggaaaaaaaggggcggtatgatagctagcccaaaggtctctatctctcagctctgatagcaggaggcaaggagggttaaatttttcactgccaaagaggagttcacatgtcagtgataagagtggtatgtcgccaccagcactaccaacatttaaaatagtatagaaaaatgaagcaacgatataagatggttgaaatgatcataaagttgaacttgagaaaaactatccataattgagggtagaaccacagaagtgaggccctagaggcctatgagcaggttgcctttgcatttcttaacagtgcactgggaccagaacgtaggctctgttcgttatgggaagataggggagattgattctcgttttccgcgtgcacgtttttcacactactaaacggtgctttttttgcaaaaaatttctataggaaagttgctttaaaaaattatattaatccatttttaaatattaaaataagtaatactcaactaatcatgagctaatg

SEQ ID NO: 393725 - DNA, 501 bp, Oryza sativa
ccattactcccaaaccctcgcgcgcgcgctctctctggtggtcaacgcgcgcgcccccgcccccgccccgacgagagcgatggcctcgccggcagcggcggcccccgcggcgctgctcgtccttctcgccgcggccctcgcggcgaccggcgtcgtcgccgacggctccgaccaccgctacaaggccaacgagctcgtcccgctctacgccaacaaggtcggccccttccacaaccccagtgagacgtatcggtactttgacctgcctttctgctctccagagaaagtgaaggagaagagcgaggcactcggcgaggtcctcaatggggaccggttggtcgatgcaccttacacgctcgattcccgtgtggattatgactccaagccggtttgctcgacgaagctcaccaacgaggaggtggccaagcttcggaatgcggtagcaaaggactactacttccagatgtactacgatgaccttccactgtggggattcattgt

SEQ ID NO: 393726 - DNA, 699 bp, Oryza sativa
  unsure (1)..(699): unsure at all n locations
ccttacgtgactcttccccatgaaggtcttttgaagtggaattcccagagtgatttcagtagactttctgttccgagattggccagtgagaatccgtcagttcattttccctctatggagagaggtagaaagaaacttatggacggtgcccgggtggtgttccctgatgaagttgacccgccttcaatatccagggaaaattgttgagtgctcttggaataaagaagaggactgttggtcctgcatgcgcattcgaacagataaatcaactcctaatgatatcaatacttacagaaaggtaatgaggagcatcactgataacattactgaagacaagctcctgggggaaatatatgaggtccatgaaccttcctatgtatgctgataggaaagcaaaggctcacgcgcgaagtatggctcaacaacgaaggggatgattaggattggttatatgcattcgtcttacttcttagaattatagagagttgtaaccctacaaccaacagatggcaaaggctagctggcccaggctgtagcatgcatagataatgttactatatcttcatagcgagccttatgcaggccgagaatttttttttcaatatgatctttctgttggtcattcacatgtgtcatttcagaatgctgtaaatcttcaattaatcctgtattctgtnnnnnnnnnnnnnnnnnnnnnnn

SEQ ID NO: 393727 - DNA, 530 bp, Oryza sativa
  unsure (1)..(530): unsure at all n locations
tttctagcttcctcgctgcttcgcccgccacgtcaccctcctcctcctcccctttttttgcgctcgctcgcctcgccatccatggcgtcgatggcgaaccagcagtagtagtagtccaccccaacgacgcgcgcgagccagctccggggtacccgccgctcgtgcccgggggggaagggggtgcaccggggagccgtcgcgccgcgcggctctgattcttcccgttcccggagatttgaaccatggagtctttacgtgacatggtcctcccaccaggatttggattccacccaaaagatactgagctcatttctcactatctgaaaaagaaaatacatggccaaaagattgaatatgagatcattccagaggtggatatatacaagcatgaaccatgggatttacctgcaaagtgcgatgttccaactcaggataataagtggcatttcttcgctgctcgtgacagaaagtatcctaacggttctcggtcaaatagggcacagttgcttgggtattnggaatccatggaa

SEQ ID NO: 393728 - DNA, 648 bp, Oryza sativa
  unsure (1)..(648): unsure at all n locations
atattttgttatctttgagtctatgcttcattttggctgatgtatttgtcaagcaattcagacagttgaaagctctgctcgcgagttcttaggaaaggacaagtcaactacacttgtggctagtgcaaactttgttgatctggctggaagtgagcgtgcatctcaggcattgtcagctggcacaagactgaaagaaggttgtcacattaataggagtttgcttgcccttggcactgtcattagaaaactgagcatgggaagtaatgcacacataccgtatagagattcaaagcttacacgcatactacagccatctttgggaggtaatgcaagaactgcaattatttgtacactgagccctgccactagccacattgagcaatcaagaaatactctgctatttgggagttgtgcaaaggaagtagttacaaatgctcaggttaatgtggtcatgtctgataaagcactggttaagcacttgcaaaaggaacttgctagattggagagcgagttgcggcatccanttcagagttccantctcgnaacattattgaaggaaaaggacatccanatcagaangatggagaaagaaataaaagaactgaagtcacancgtgatttggctcaatgccggttgcaggattttct

SEQ ID NO: 393729 - DNA, 525 bp, Oryza sativa
ctaccactgcaatttacacgacggccatgatgaggctgctgctggtggcggtggcggtggcgatggcggcggcggttgtggcggcggaggagagggcgacgtacatcgtccacatggcgaagtcggcgatgccggcggagtacggggacgaccacggcgagtggtacggcgcgtcgctgcgctccgtgtccggcgccgggaagatgctgtacgcgtacgacaccgtgctccacggcttctccgcgcggctcaccgcgcgggaggcgcgcgacatggcggccatggacggggtgctcgccgtcaacccggaggcgaggtacgagctgcacaccacgcggacgccggagttcctggggatcgccgggaacgacgggctgttcccgcagtccggcacggcgggggacgtcgtcgtcggggtgctcgacaccggggtgtggccggagagcaggagctacgacgacgcgggcctcggcgaggtgccgtcgtggtggaagggggagtgcatggccgggacggtgttcaact

SEQ ID NO: 393730 - DNA, 550 bp, Oryza sativa
gtgtgggcgccgtcggcgcacggctgcgtcggggagatcccggcgccggacgtctcgctcacccgcaagcttggagcggagttcgtggggacgttcatcctcatcttcttcgcgacggcggcgccgatcgtgaaccagaagtacggcggcgcgatctcgccgttcgggaacgcggcgtgcgcggggctcgccgtgacgaccatcatcctgtcgacggggcacatctccggcgcccacctcaacccgtcgctcaccatcgccttcgccgcgctccgccacttcccgtggctgcaggtcccggcgtacgtcgccgtccaggtgctcggctccatctgcgccggcttcgccctcaagggcgtcttccaccccttcctctccggcggcgtcaccgtccccgaccccaccatctccaccgcccaggccttcttcaccgagctcatcatcaccttcaacctcctcttcgtcgtcaccggcgtcggcaccgacacccgtagccgttgagaggtcgcccgcgtaggcgacggcgccgacgacaccctcaacatcctca

SEQ ID NO: 393731 - DNA, 876 bp, Oryza sativa
  unsure (1)..(876): unsure at all n locations
cgcccccaaatcgtaaaccctagccggcaacctcccccccgcggggcagccatgggcgccagcggnaagctgcagggcgagatcgaccgcgtcctcaagaaggtccaggagggcgtcgacgtcttcgacagcatctggaacaaggtctacgacaccgagaatgcgaaccagaaggagaagttcgaggccgacctcaagaaggagatcaagaagctgcagcgggtacagggaccagatcaagacgtggatccagtccagcgagatcaaggacaagaaggctcttatggatgcccgaaagcagattgaacgcgagatggaacgatttaaggtttgtgagaaggaaactaaaacgaaggccttttccaaggaagggggggggcaacaaccgaaaactgatccaaaagagaaggcaaaaagctgaaacaagagattggcttaacaatgtggttagtgatttggaaaaccaaatcgataacttcgaagctgaggttgaaggactttcaattaagaaaggaaagcaaagacctcctcgattggtacatttagagaaatctatcacacggcataaagctcacataaagaaattggagtcaatattaagacttttggataatgatgagttgagtcctgagcaagttaatgatgtgaaagatttcctggatgactatgttgaacgtaaccaggaagattttgatgaatttagtgatgtggaagagctctatagcacattacctatcgagaaggttgaagcacttagaagacatggtttcacttgccccttccagtcttgtcaagggtgttgcttctgtttctactactgcagtttttgnggtacgaggngttctttaggcaacttcacctactcaggntactgna

SEQ ID NO: 393732 - DNA, 753 bp, Oryza sativa
  unsure (1)..(753): unsure at all n locations
taccctcaagnacttcaggtctccatcactagagacgctcctgatgcattaagaactcanccttatgctggcaagtctacccatttctattgatacaactcagccagcaaatggagttgcttcatctgctacagtgatccctacggctcctgtgatgcccagaagtgccgctaaccagttactgggttgctgaattccactaggacttgagaagtatgtcttcctcttccatgctgaaagaggtggatatggctgcattgagtcagatgggagacagtgacctggaaggaaataggggtaccaatggggtcctagaaagaagattctcccaggcagtggcaccttattcaaaacggcgtagatggaacagcatgctcaggaacttggggcgttcgtgggcaatgacaatttattggtgtaagctgcttcattgcagatcttgtatatcccaatggtctagtgctctagtcaatccgtttcattgctgatagatcaacgcatcgcttttcttggcatgcataatcttatctgtcagctgatgatcccaatcctgttattcacgacctgccccttgtgtagcaggatctgaaacatggatatgtagctttgctacactaaccagtcagttttttcttcctctttgggaattgggaacatcgatgacctgtaatcgaaatcccatgctttatgaccttgggagcgttggcaattgagtttactggaacatactgagtgttaaaaaaaaaaaaaaaa

SEQ ID NO: 393733 - DNA, 542 bp, Oryza sativa
cttcgtcgtcggcttcgattcgatcgatcgaggcgaggaggaggaggagctagggtttcggatgggaggaggaggagggttgtagaagcgcgggggcaggctgcggtggatcgtcgatgggggagcagccggcgcggggggcggcgtcgtcggcgtcggagtcgtcgccgctgatcccaccgccgtcggagatcgacatcgaggccggggccggggaccagttccagtgccggatctgcctcgagaccgacgggagggatttcatcgcgccgtgcaagtgcaaggggacgtccaagtacgtccaccgcgactgcctcgaccactggagagccgtgaaggaaggatttgccttttcgcattgcaccacttgtaaagctccttactatttgagggttcatgttcacactgataggaaatggcgaacattgaaatttcgtttcttcgttactagagatatattattcatctttgctctagtgcagtttgtcatatctgcattagcgtatttggtgcattttattgatggattacagaattactgg

SEQ ID NO: 393734 - DNA, 535 bp, Oryza sativa
ggttaacaaatccgcgacagggaacgggaggccatcgaaggcgagaaggatcgcggtataaactgcagcgtctgctactgcagcagtcggcacacatatcattttttgggacagcggcactgctccatcttgcagagagcaggtaaattctttcatactttcaactcttgatctgactagtccattgcagtaattgatttgactagtccattgcagtaactatgcctgctgatgttaatgaaatttgtaaattggaacttttcaatatgataactttttagtgggaatgtaatatttaaaaagaactgcaccaattttatggttgatgtagtgatgctaatttacatatacccaagagaagcgacaaaactgctgttgttgcaacagttggattccttgaataaagaggtagatgaattgtaagcatcaagggagcagcagtcgaagaaaattgaaagtttgaagaactcatcagaagagaccaattcccttcttcgtcgtttgattggccatttggcctgaatactccatattt

SEQ ID NO: 393735 - DNA, 511 bp, Oryza sativa
gttcaagatatcagaaagaacaacacataccaggatgtctcagctcaagtcttctagcctggctgcactgctgatcttcctcctggcagtgttcaccactgcagcagcagcggcaggtacagaatgccagaacgatgtcgaggtgctgaagacaacctgctacaagttcgttgagaaggacgggccgaagctgcagccatcacctgactgctgcacctccatgaagggcgtcaacgtgccctgcgtctgcacctacctgggcagcccaggcgtcagggacaacatcaacatggataaggtgttctatgtcaccaagcagtgtggcatcgccatccccgggaactgcggaggtgagcaggcttcacttgattggccacactgatcacctgggtaagaactgacaataacacgccggctcctctggattgcgacttccagtggggcccaagtgtcggtgtcagctgggatccaaggtctaaaacaagaactgattgacttgtgaagttggctg

SEQ ID NO: 393736 - DNA, 514 bp, Oryza sativa
accttccagctcgaagatttctgtctgaatcgatcggatcaagatcaaatcaaggagggaggaggttgagcaattcctgacagggacagatcgggaaagctctcacagctttttctttgtttttgtttgatttgttcctgcttttcgattggaaaattgggaggggaggaaggtgatagccattgaggtggtggcatttgctgtcaccacctttagctatcgccttcctcttcctcgtctcgctcgccccccggtctagcttctttctgcagggccggacggaaaaaacaaaacaaaagaaggcaccagccagccatggcgatggtgctggactccttcgtcacccggtgcacggcgtcgctggaggacttcgccgggcaggaggcgtgccggcgccctcggccttcgggacgacgtgcggtgcctcctggccacgctccggcgcgtccaggccgtcgtctcccacgaggagcgccgcggcagggtgctgagcgccaaggtggacgcctgggtg

SEQ ID NO: 393737 - DNA, 502 bp, Oryza sativa
acgccgccgtcctcacctcaccgccggccaagccagccgcggcggcgcaagatgaaccaccacctctcgctcctccacctacctcgcctctaccccgtactccaccaccacccccgccacctccgcctccatggccgcaccaccgtcttccaagctcgcctcccttcccctcagcgaacgaaccagcaccgcctcctcgccgtgacgaccgcaccaccggagcccgagaagacggaggagcagcagctcctccaccccctccaagaaccagcggagggagaagtcagcggcggtggcggggcagacaggacgtgcgggctcccgacgtgggcgctgatcggggccatcgcggcggcggtggcgctgtcgtcggcggcggcggccgggccggcggcggcgctggggccggagggcccgctggtggaggagttctgggacaacatgcggcggtacgcgctgtacgtggtgacggtgagcaccgggttcgcgtacacgctggcgc

SEQ ID NO: 393738 - DNA, 457 bp, Oryza sativa
cgaattgaggaggaggggagagagagctcaaaaaccctaggaggaggtttgaggggccagatcgatggagagccccgcgaaggaggaggcgggaggggagctggcgatggagatcgagtccaccgtcacggcggaggactggcgccgggcgctggcactcgtggtgccctccgtcgtcgtcctccgcaccaccgcgccgcgggccttcgacaccgaggtcgccggcgccagctacgccaccggcttcgtcgtcgacaagtccaggggcatcatcctcaccaaccgacacgtcgtcaagccagggcctgttcgtcgcggaggcgatgttcgtgaacagggaggagatccccgtgtatcccctgtacagagatcctgtacatgattttggttttttccgctatgatccaggtgctatcaagttccttaagtatgatgagatccccctagcacctgaagc

SEQ ID NO: 393739 - DNA, 789 bp, Oryza sativa
aacaaggccgcgagaggattccgatacccttctctctctcgccgagctcgaatccaccaccaccaccaccaccaatcggagccaccggagagcggcggcgcagagacggcggcggctgcggggggcgagaggccgattcgccggaggagagaaggagagagagagagagatggcgttcacgatgcgcgcggtgaaggtgccgccgaactcggcgtcgctggaggaggcgcggcaccgcgtgttcgacttcttcaggcaggcgtgccgcgccatcccctccatcatggagatctacaacctcgacgacgtcgtcaccccgtcccagctccgctccaccatcgccaaggagatccgcaagaaccagggcgtcactaaccccaaggtcattgatatgctcctgtttaaggggatggaggagctgggcaacatcaccgaacacgcgaagcagcgccatcacgtcatcgggcaatatgtggtcggccaaaagggactggtgcaggatatggagaaagaccaagggtcctcagacttcctgaagaaattctacactagcaattactcctaatctgtgctgcaaactcctcctccttcagtaatacccgagaagtgatctgaataagacgctgagaacccacagctttaattgttttatcactggaatctttttgttattctgcttgatccttcaatcatctgcgcagtgtggcgctgttgctagtgaattgtttgtaacttgtagactgtactctgcaaagttgatgttcatgagttcaaaaaaaaaaaaaaaaa

SEQ ID NO: 393740 - DNA, 459 bp, Oryza sativa
  unsure (1)..(459): unsure at all n locations
atataagctctcacctttgcctcctcactctcctcacactctcttgtctccactcgccgcgccacgccacgccgcgccgcgcaatgcgcctccactaccaccacctcgccgtcgtcctcctcgccgccgtggcggcggcggcgaccggcggcggccggtggcgaagccgacgcgctcctcgcggtgaaggcggcgctcgacgacccgacgggcgcgctcgcgtcgtggacgacgaacaccacctcgagcccgtgcgcgtggtcgggcgtggcgtgcaangcggggtgcggtggtggggctcgacgtgtccgggcgcaacctcaccggcggcttgcccggcgccgcgctgtcggggctgcancaacttggcgcgcctcgaactcgccgcgaacngcttgtcgggggccattccggcggcgctgttccgcttcggacgttcttaacaactcaacttttcaa

SEQ ID NO: 393741 - DNA, 547 bp, Oryza sativa
cgcagcggggcgcggcgggagcctgcctcaccatccccgcgggcttcagcccctcggctctcctcgagtcccccgtcctcctcaccaacttcaaggttgaaccctctccgacaactggtactctgagcatggctgcaattatgaacaagagtgcaaatccagacatacttccttcgcctagggataaaacatctggtagcacccatgaagatggtggctctcgagattttgaattcaagcctcatctgaattcatcctctcaatcgacgggcttctgctatcaatgatcccaaaaagcatgaaacttctatgaaaaatgaaagcctgaatactgccctgtcatctgacgatatgatgatcgacaatatacctctatgttctcgtgagtcaactctcgcagtcaatatttcaagtgccccgagccaactggttggaatggttggtttaactgacagctcacctgctgaagttggtacatctgagttgcatcagatgaatagctctggaaatgctatgcaggagtcacagcctgaaagtgtggctgaaa

SEQ ID NO: 393742 - DNA, 431 bp, Oryza sativa
  unsure (1)..(431): unsure at all n locations
cagccgccgtgcaactgcaactgcacttgtcctcccacattngcggcgggccgccttcgccatggccgccacgccgccgggggccaggaaggtgccgcgggaactcgcccagcacggcgacgtccgcgtggacaactactactggctccgcgacgactcccgctcccaccccgacgtcctcgcccacctccgtgccgagaatctctacaccgccaccatcatgtctgatgtcaagaacctcgaggatgaaatatatgctgaaattagagcaagaatcaaggaagatgatataggagcgcctcttcgcaaaggccagtattactactataacagaacactgactggcaggagtatgtgcaacactgcaggcgtctcgtgtcaactgatgctcctgttacagtctatgatgtcatgcccacaggacccaatgc

SEQ ID NO: 393743 - DNA, 406 bp, Oryza sativa
ctttttaacgttccccgacgccggccggccgcccacggccctcgcgcgcatgggcggcttcgctccccaccccgtcgtcgtccccaccgccgccatggacgggaccagcagcgttagcgcgcggacggcctcgtctctgtcgtcgtcgtcgtcgtcgctcgacgacggcggccgtggccggcctccgccggccgggtcgacgctggagctgccgtcgcggaagcactaccggtacccttcccggtcggcgaggctgttccagaagctgcgccgctcgctcccgctgctgacgctggcgccgcggtgcggccggatgcaggtcggctcggcgagcgaggtcgcccgcggcggcggcttccggcggaggaggaggaggagcagtcgactcgcacactgatgtcgcacg

SEQ ID NO: 393744 - DNA, 489 bp, Oryza sativa
gtccaaaaccctcctcccctcctctcctctccattccgccgccatggccgccgccgccgccgccgccaccacccccaactccctcctcctccgccgcccggcggcacccaagccggcctccgcggcggcctcgccgctccgtctccccacgcgggcagccaggatctcctgcgcggccgtggccacgcccgcgcagtcctcctcctcccccgccgccgccgccgccgaccgcggggtctacaacttcgccgcgggcccggccacgctgccgctctccgtgctccagagggcgcaggcggagctcgtcgactaccgcggctccggcatgagcatcatggagatgagccaccgcgggaaggagttcgacgccgcgatcaagaaggcggaggccgacctccgcgcgctcctcgccgtgcccgacacccacgaggtgctcttcctccagggcggcgccacctcccagttcgccgccgcgccgctcaacctctg

SEQ ID NO: 393745 - DNA, 493 bp, Oryza sativa
tggacgcgtccgcccacgcgtccggcagactaccctggggtgagggatgcttggatggaagtagcggcttctcaagggcaatcattgttatctgttgatatctcttgctctgatgtgactgatggtggactgaatcaactcaaggattgcatcaacttgcaaagtttgtcatgcaattactgtgatcagatatcggagcatggacttaaaacattgtcaggcctctcaaatgtgacatccctgagctttaaaaaatgttctgctgttactgctgaaggagctaaagcctttgcaaacatggttaatttgggtagcttggaccttgagcgatgtccgaagattcatggtggacttgttcatttaaaaggcttgagaaaactggaaaagctaaatttgaggtattgtaatggcatcacagattctgatatgaaacatttatcagatcttacaaatttgagagagcttcaactttcttgctgcaaataagtgactt

SEQ ID NO: 393746 - DNA, 562 bp, Oryza sativa
tttacgcgtccggtcttttctcaattgtgttattgcagtttcatgtgagggtgctcctcctgtccaaatgggagaaagatatcctcacatgttcttgatcctcctactttttcatggagcccatgcggctttgaaagatccagtacagaaatggcagactcttggaggtcagcgtcctcttgtcattgctcgtggagggttctccggcttgtttcctgattcaagccagttctcgtaccagtttgcaatgtcgagtagcttgcatgatgtggttctgtactgtgatctgcaattgtccagtgatggtttgggcttctgcaaaactggattgacattagagaactcgacgcttatcgccgaagccttccctaagagggccaagacatacaaggtgaatggagaggaaatccatgggtggtttgctttggatttcaccgcagacgagcttgatcagaatgtcacattgatcccggacatcttttctcgcccaagcacatttgatggggccatgggaatgtttacccttgaagatcttgtcggactcaagcccccacatttatgg

SEQ ID NO: 393747 - DNA, 218 bp, Oryza sativa
tagccgcgggtctcctctcaacaacctgcgctgggctgttgagcttccgggacgcttactccggctaccaccaaatcagcatggtgagagaggacgaagagaagacagcattcatcatgccgttcagggtattttgctatgttaagatgccgttcggactaataaccgccgggaatactttccagcgcacgggctagggcgcacttagcgaccagatt

SEQ ID NO: 393748 - DNA, 563 bp, Oryza sativa
cgaccaccgctcctccgcctccgcctctcatatttttcccatttttcacctgccttaattcgccctcctcccataaccgtagtagtaatcgtactcctccattctcgccggaatccagagcgaagctgtaggaaattgttgggaggaggagcaatgccttactgcgaggtggacaggtaccagaacggcgacgagtgggacggcgtccgcctcttctaccgccgcttcggccgcggcgccaccaaggtgctcctcgtcatcggattggcggggacgcacgactcgtggggcccgcagatcaaggggctgaccgggtcgctggagccggccgccgacgacgaggagtccggcgacgccgcggcggcggagggggacgacggcgatggcatcgaggtctgcttgcttcgacaaccgcggcgtcggccggagctccgtgctcccgcacaaatcctactacttcgacggtgatcatggcgagggacgctcttggccttgatggaccatcttggggttggaagaaagctcatgtatctggccattccattgggcgcgatgatatcctt

SEQ ID NO: 393749 - DNA, 742 bp, Oryza sativa
  unsure (1)..(742): unsure at all n locations
ttttgatcaatcaagaaatcgttctagctagaagggggtgttcgatggcggcgatggcggtggtaatggcggtgatggcggcggcggcggcgtcgccggcggagggcgcgagggcgttcttcgtgttcggcgactcgctggtggacaacggcaataacaactacctcctgacgagcgcgcgcgccgacatgccgccgtacggcatcgaccacccgagccaccgccccacggggaggttctccaatggcctcaacatcccggacatcatcagcgaagcacctcggcgccgagcccaccctcccttacctcagcccggacctccgcggcgccaagctcctcgtcggcgccaacttcgcctccgccggcgtcggcatcctcaacgacaccggcatccaattcgtgaacatcgtgaggatgagcaggcagctgccgtacttcccggagtaccaggagaggctgcgcgcgctggtcggcgcggcgagggcgcggcggatcgtgaacngcgcgctcgtgctcatcaccctcggcggcaacgacttcgtcaacaactactacctcgtccccttctccctccgctcccagcagttcgccctccccgactacgtccgcttcctcatctccgagtacaagaaaatcctccagaggctgtacgacatgggggcgaggcgggtgctggtgacggggacggggccgctggggtncgcgccggcggancgcgcgctgcgggggcgcggcggcgggt

SEQ ID NO: 393750 - DNA, 679 bp, Oryza sativa
  unsure (1)..(679): unsure at all n locations
ctcgttagctgctgcccgcccgcagcatcagggggggcctcgccgccgccgccgggggcgtctccttcccacgccctgctcccccgccgcgccgctgcgccccacgccgncaccgccgcgccctcgctccgcgcgcgggctcctcctccccctccccctccacggcggtggcggcgcccgtctacgcccccacgccgcgggaccgggccctgcggacgccgcacagcgggtatcactatgacggcacggcgaggcccttctttgagggatggtacttcaagggtgtccattcccgagtgcaggcagagcttctgcttcatgtactctgtcgagaaccccgttgttccgagatgggatgcagtgatctggaatcgggtcatacaatggttccgcgcttcactgggcgtcgcggcgcagattcttggcgccgatgacaaagtacatatgccagttcaccgagaaatccaataacttttggggaagaattttctagtcgagttttggaaggcttccaagtnacaccgatttggcatcaaggctttatacgtgatgatggaaggtcaaagtatgtgccaaatgtccaaacagctaggtgggagtacagcactcgaccagtatatggctggggtgatgtcacgtcaaagcagaaatcaactnctggttggcttactgcttttcc

SEQ ID NO: 393751 - DNA, 637 bp, Oryza sativa
  unsure (1)..(637): unsure at all n locations
gtgagaggaggaggataaacggaggaggccgcgatgggaaccgtgctggactcccacttcctggcgctcacggccatcgtcactgtgggatatcagctggtgttcttcatcatcaccgcgctcctgcggttcgataaagtcactgatttcgcaggaagtacgaatttcatcatacttgcaatcctcacgctagctttgaagggagcatggcatttccgtcaggttgtattgactgtgctcgttgtgatttggggtcttcgcttaggactattcttattaatgaggattcttcaatggggagaggacaaacggtttgatgaaatgcgcgataacttgggaaaactagcagttttctggattttccaggctgtttgggtatggactgtccagcttgcctgttacaattgtgaacgcaagtggccagcgatccctccaattgaagcccgtgatattattggttggatcatgtgnctgatcggggcaggtatggaagcaatagctgatcagcagaagcttacgttcaagaattctccagcaatcgtgaagggtggtgtaatgtgggtttttggagttatacttcgccatccaaattactttggcgaggatttcctttggtgggggatatttgtagcatcta

SEQ ID NO: 393752 - DNA, 522 bp, Oryza sativa
  unsure (1)..(522): unsure at all n locations
cggacgtnnnntntntntcgccgctacctgcgcacgccacattcgnctgcattttccatgagccagtcttccccgcgtttgctctcatcgtaggccgcgaccgacggacgcggcgagaggatagagaccaggggcggccgggcggacggacagagcaaccagcgccggctgccggcttagctagctcgcggcggagcatgccgagatccagggggtccgagctgccgcagcgagcgtcgccgcgggcgccgctgcacctcaagacgacggcctgctcggatgcgaatggcgcgcaccaccgtacagtcgtcgaccggagcagccccaagctcgccgaccgccactcgccgcgcagcccgctgcatgagaagaagcgcgcggggacgcgggtggctgagctggagacgaagctgggcaaggtgcaggacgagctcaagaagctgcgggagcagctcgccaccgccgaggccgccaagaaggacgcgcaggtcgcgctcgaggaggctaagaaacgcgttggca

SEQ ID NO: 393753 - DNA, 652 bp, Oryza sativa
gtatattcctttttctgcagcgagggaaaactggattctcgcatttgacaagtttcatatgcagaatcatgatatctatgctcagctatcaggtaatagcaaggttcccaacgctaagagcttgccatccagatcagttggtagggccagaggaaggggtgagacaagatttcagcccaaaggttctagtacagaagaaaattcaaaggagcgagagcacagtattcaagaaatactgaaggctttctatattcgatttgttcgcctcaatggagttcttttcacaaggacaagcttggaaacatttggggagttgtctgctacagttatcagcgatttgcaaattcttctttcatctgggccttacgaggagcttaattttggtgttgaggctgctgaaaacgcgctttctgttgttaagcttattgctatccttatattcacagtgcacaatgcaaacaaagacgcagataatcaatcatatgctgaaattgtgcaacgcagagttgttcttcaaaatgcatttgctgcagcctttgaatttgttggataccttctcaaaagatgcgcagagcttcatgatgttgcatcaagtatctacttgccagctattttggtcttcattgaatggctggcgtgccatccagatttt

SEQ ID NO: 393754 - DNA, 451 bp, Oryza sativa
tccgtctccgcctccaaaaccctaaccctagctcgccgccttcgcgcgagctctcctccatggagaaccccaggccacaggctcctgcggggacccctcccatggctcccctccccgtgcccccgcccatcgcccccatccctgccccgcctccgcgagccccagcacccgccccggccgccgccgccgccgtcgcctcgacctccgcggcgggaggaggcggcgggggcggcggtgaggctgactacgaggtctccgatgaccaccgcgccgcgcgggagcgccacgagcgcgcggtgcaggagctgctccagcgccgccgcgccttcgccatggccgtgcccaccaacgactccgccgtgcgggcgcgcctccgccgcctcggcgagcccgtcacgctcttcggcgagcgcgagatggagcgccgggaccgtctccgcgctctcatggt

SEQ ID NO: 393755 - DNA, 378 bp, Oryza sativa
  unsure (1)..(378): unsure at all n locations
gtcctctccttttttttttttttttatcataaaaacgtgcaaggtgtatgccatttccattctatgaacagagtaacacaggctgcatcgcttgtctgctcggtgagcagtagacaaggtgagtttgggcatttcatgcggttgtatgtggaacatttgtagctgaactgaacgactacaagacacattgaatcagaaccaggcaaggagcttttgctgctcacttgctcaggcgagctcactgtaaccgtgcagatctatgtacagtgcaacaagaagatgatggtcttcatcatgtttgagccaatgcaacgcttggggcggccttgaactccttcaccgccttcttgacggcttgacgncgatgtcgatcagctt

SEQ ID NO: 393756 - DNA, 562 bp, Oryza sativa
  unsure (1)..(562): unsure at all n locations
tcgttcgcctcgtcaccactccgatctcttcacctggatcctgcgccaaaccctagccccgcccgcgagcgccgccctcgccggctcgccctcagggggttgcgagagagcggaggctgtggcaggggcgcgccgccgtaggtagggtatgagcgncgcgtacagggatcgggggttcggcggcgcggcggcgnagatggaccnnaagcgcatcaaggacgtnctcgagaagcacctggacaggtcgttcncgtccacatccaggggggcggcnggtggccaaggagaggnaccnnntcgncgncncagnggnggaagctnnccgcgncnntcggcaagntcntnaaggtctcctattttnnagaagaatttnaaactnncagtttagattcagatntcaattggnttctntngggagagnncacatcttgnatttcatggttntgcaggttttngngncaatngnttnctttnttgagntccgntnntttnttattataaaaggttnttttnanccnattnnttgncttgngcatncaggtggcatnnttttnactattaa

SEQ ID NO: 393757 - DNA, 486 bp, Oryza sativa
tttataagctctcctcgttcgtctcctcctccgccccttctcattcccaaaatccaccaaatcccggcagcaaggcgcgatctctggcgcttccgcggttcgcgcgatccccgatcggtccgcgccaggggcgctggtttcatggattggagttgctgggacggctcttcgtgggaaccctcgtgctgacctgattcgtttgggcgtggttgatttgggtcttagtttttggtggactttgagtccctttgcgggtggctcttgtttgtaggctgtgattggggaatcctgggaggttgtaggaatgggattatctagattgctgtaaatagaggtgaagacaattcttttaggtactaatttggtgcacataaggtgagaattttggttaggactaggtggagatcaggattattgttagggaaggggatgggtggcctctgcttaaaggtttcagcggtagacaagttcccgagcgacaccacg

SEQ ID NO: 393758 - DNA, 626 bp, Oryza sativa
  unsure (1)..(626): unsure at all n locations
ctcaccacatcaccacctcactccactaaccagagagagaacgcagctagtagcattattagcatcatgaccgcgatggcggcggcggcggcggtgttggtgtcgttgctgctggtggcggcggctgcggggcagcaggcggcgctggtgccgggggtgatgatattcggggactcggtggtggacgccgggaacaacaaccggctggcgacgctggtgcgcgccgacttcccgccctacggccgcgacttcccggagacgcacggggcacccacggggcggttctgcaacgggaagctggccaccgactacaccgtcgacaacctggggctcacctcctacccgccgccctacctcggccagctcgcccagtccgacaaccgctccctcctccacggcgccaacttcgcctccgggccctccggctacctcgacaccaccgcctccctctacggggcgatatcgctgagccggcagctggggtacttcaaggagtacaagacgaaggtggaggcggtggccggcgggaagaaggcgtgggcgctgacgtcggagtccatctacgtggtcagcgcnggcaccancaacttcgtgcagaactactacgtcaacccgatgctgggcgc

SEQ ID NO: 393759 - DNA, 504 bp, Oryza sativa
  unsure (1)..(504): unsure at all n locations
aattcggcacgagatctcctgccnnngagccaacggctcaagggggccttgacccgcgtcctgatcgggggcgcccagccaatggctggtgggccccgtcacacatgtgccatataaagaggggtggaggacgggacggcaagagacacaaggaacgaggttcgtcgccgccgccgccactccaccccataaaccctaaccgatcgagggggcgcacagatgtacgggaagacttccaccgccgcgccaccacctcgccgggatcccctacgaccaccactgccgcgcagacccgtcgccgtcacgaccaccatcgccgccgccgccaacgtcaagcagagcacgacaacgacgatggctgggacttcctcttcatccaacgcgtcaaccgatggntactccttgatgggttacattaaagatattccgaccctgaaaggagataactacgaagaatggaaaagagaactcgaccttgcttttatctttgggagaggttggact

SEQ ID NO: 393760 - DNA, 382 bp, Oryza sativa
gactctgtgggccggagcaaaacacagaccgttggatacgaaatggacggcccgaacgagacccaggatataatacgcagcgcagaagaaaatcaaacggaccaacacgaaaaccctcctcctccgcccaaccccattccttctcacccactctcttctcccgccgccgccgccggaggaggcggctcctcgtcgtcggcctcgacgaccatggcaccggatcgtgtcgcgcgccctcccgttcgcctcgcgctcgccgcagctcgggcgcggcgctgatacgctcggcgccgatgcgctgcccgaccctccccgtcgcggagcccaccgctaggctgctgtactgcggcgggttcacgcccttcttagaggcgtggcgctc

SEQ ID NO: 393761 - DNA, 838 bp, Oryza sativa
  unsure (1)..(838): unsure at all n locations
acttctctcgctgttcttctctcctcctcctgtggctggctgcttgctctactgcaattatttattgccacctccaattcttagtactgcgagattaattactcattcctccccgcagtgccatgttcttgagtttctttcggtttttttaatccattttgcaacactctctgtcctgcagccagagctgcatttgctggggatttatactagtaggcggcttcagctttactctctcccctttctgcttctgctgcttctccctttccctctcaacttctcaggtggcaggggtgggagggtagcatctggcccaagcaaagcgccgggttcttggctctgctcgctttttttcgtggtaaatctgtgtgcaagatctggggtccaaaaggaggggacagcagcacaagggaggagagggagttcttgcgttgggattctctcttcggcaatgaggcccgacgcgaggctggatgcggccgtgttccagctcaccccgacccggaccaggttcgatttggtggtgatagtgaatggccggaaggagaagatagcctctggcctgctaaacccgttcctggcacacctgaaggtcgcccaggatcagattgcaaagggaggatactcaattacgcttgagccgagctcaggggttggcgcgccatggtttacaagaggcaccgtggagagattcgtgcgcttcgtgagtactccggaggtgctttagcgagttacgacgatagaatccgagatcttgcagctcgaggacgncatctctattcagagcaacgataatcttgggctaagatctgtagaagatcatggaggaaaattgact

SEQ ID NO: 393762 - DNA, 532 bp, Oryza sativa
ttcgttagaggggagccaacggaatatttatgcaaaagcttgtactggcctgagaagggtgcatttttctcccttcctcatgataagctggcccttgcggatgggctctgttgctcttgtcagcagaaagagccagacggtgatgaattgcaaatactatccaagaacagcttcatttacagaaacattacctacaatgtcaatgactatttgtatgctacacctggctttttctctcaagaggaggatcgtgcaaccttcaagggagggcgaaatgtgggtctaaagccctatgtagtttgccatctattggatgtccatgaacctgctggatccagaaaaattcatccagcatcaacaaaaatcagtgttagaagattttacagaccagatgacatttcatcagccaaagcttatgtttctgaccattgagagggttactattgggaaaaatagttaaagtgcctgtggtatgatagagggaaaagtgaggccaaaagaagacgacatctcaacttagatgttccaggat

SEQ ID NO: 393763 - DNA, 529 bp, Oryza sativa
gacgaaccgactggagcacttaccagaaaggactatatgggaaaatggcatccatatgtgaagttaaagctactcagatcgagaaactaccatctaagataacgtcagagtagcgaacctgcttgaaccctgaatggaatgaagatttcacgttagttgtcagacacccagagtctcaggctctggagcttactgtttacgatggggagcaggctgggaagcacgacaagattggaatgagtggtatcccatcgaacgagcttattcctgatgaggcccaggcacttacacttgacttacacaagactatggatgctaatgacccagcaaatgacaagttccgggggcagctcactgtggatgtaacatataagcctttcaaggaaggtgattctgatgctgatacaagtgatgaatctggcaccatttgaaaaagcccctgatggcacaccggatgggggtggtttgctggtagttatcgatcatgaagcacaagacgttgaaggaaagcaccacactaatccatatg

SEQ ID NO: 393764 - DNA, 488 bp, Oryza sativa
acgcaccaccggcgccaaaccaaccacccaccatccaccggtcgaacacttggcgctctcgcccgccttagctcgctctgctcgtggtgctcgacccgaacaagaacggacatggctcccaggaacgccgccgaggccgtcgccgtcgccgtggcggagggcggaggagccggcatggagcccaggttccgcggcgtgaggaagcgcccgtggggcaggtacgcggcggagatccgcgacccggccaggaaggcgcgggtgtggctcggcaccttcgacaccgccgaggccgcggcgcgcgcctacgacagcgccgcgctccacttccgcgggcccaaggccaagaccaacttccccgtcgccttcgcgcacgcccaccaccacgccccgccgccgccgctgcccaaggcggcggcgctggccgtcgtcagcccgaccagcagcacggtcgagtcgtccttccgggacacgcccgccgccgtcccggt

SEQ ID NO: 393765 - DNA, 749 bp, Oryza sativa
ctcggctacaacttcctcttcacggacgttgacattgtgtggctgaggaatcccgttcaagcacgtgccggtgtacgcggacatggcgatctccgagcgacgtgttcttcggtgacccggacaacatcgacaacttcccaaacacgggcttcttctacgtgaagccgagcgcgaggacgatcgccatgaccaaggagtggcacgaggcgaggagctcgcacccggggctcaacgagcagccggtgttcaaccacatcaagaagaagctggtgaagaagctgaagctcaaggttcagtacctggacacggcctacatcggcggattctgcagctacggcaaggatctgagcaagatctgcaccatgcacgccaactgctgcatcggcctccaatccaagatcagtgatctcaagggtgttcttgctgactggaagaactacaccaggttgccaccctgggcaaagcccaatgccaggtggactgtgcctggtaaatgcatccattgattttgattgtcgatcgggcagtatctggtgttgtaggctacgtacagtcaggaagatagctttatttgcacatgaaagggcgaattttgttttttttggtttgttgtagattgatgggtcgatttcaagttatattactgtatacctgacggcagacaagtatacgcatgatgggcaaactatatgatatgatatgatatgataggactttagatgtaagatgtcatcatgtcttcagctatg

SEQ ID NO: 393766 - DNA, 508 bp, Oryza sativa
tgatcttggaatgcccagcgagcatatcccgctcgccggatgccgccgccgccgcctcactctcctcccctcccgccgcacctcctccgccacctcgacggccgggcgctctccacccccctcctcgacccgctcatccgcgcggcctccgcctccgcctccgcgccgcaccacgccttctccctcttcctcctcctgctccgctccgcgctgcgcccttcccacctcaccttccccttcctcgcccgcgccgccgcgcgcctcgccaccccgcgcctcgcgcgcgcggtccacgcgcagccgctccgcagggggctcctcccccacgatctccacgtctccaactccctcgtccacatgtacgccgcctgcgcgctcccgggactcgcccgccgcctgttcgacgaaatcccccgcccgaaccacgtctcctggaacgccctcctcgacggctacgccaagatgccgtgacctccccgccgcgcgccggatgttcgcgctgatgccc

SEQ ID NO: 393767 - DNA, 486 bp, Oryza sativa
ctcattcttccattgatgggaaagaagttataaactttgcatcagcaaattatcttggtttgattggcaatgagaagattattgattcttgtgttggttcactggagaaatatggtgttggttcttgtggtccacgtggcttttatggaacaattgatgtccaccttgactgtgaggcaaaaatagcgaagtttcttggaactccagactcaattctgtattcatatgggatttctacaatatttagtgtgatacctgccttttgtaagaaaggagacatcatagttgcttgatcgtaaggtgtgcactgggcagtgcacaatggtcttcatctgctcaagaagcactgttgtttattttaaacacaatgatatggcttcacttgcaaacactttggaaaaacttacacgtggaaataaacgagcagaaaagatcagacgatacattgttgtagaatctatctaccagaattctggtcaaattgct

SEQ ID NO: 393768 - DNA, 490 bp, Oryza sativa
tgttatcacaaacagatcgatcgctcctatcctctttcccccttctcctcgcgtcgcctccacaacccaaccaaccatggcgaggccgccgcaggaggcgactcgacaccttcgtcagcatcaccggcgccgacgaggccctcgccgtccgcaagctcgaggaacatggtggcgaccttaacacggcaatcaatgcacatttcaatgaaggagacagtacagtgaacagagccagtcaaaacaatatacctgagagtcatgatgatatgatggacctggatggaccacttgataatgcatttagaagactctttgttccctgaaactttgcgtgacccttttgcactgatggacacaaactttcagcaaaattatttttgacagaggttggttccacagatcctttcggtcatggcccacaggtttcacaccctaaggaggtgcgagagatacctacgaagttaaggatagcaacccgcatacaggccct

SEQ ID NO: 393769 - DNA, 787 bp, Oryza sativa
ttcatagtacacaagaatgggttaaaggagaggcagttgcggtatttggtgaaatggaatccttacatgcggaggtatatggattcctttctaatactgaaaagagtatcataaccatggatgaatcattaaaaactggcatagaaagacagatcattgagatgaaggatttgcttaacatggaaagaaatgaatatgagactttgcttctaccagttatcagggggagtacccattccatgaaatcaagtattgatattttggagctcaaccgtctgagacgtggtctcctcctagatgcttacatttgggactgcaggctttgtaacataagttcaataacaaaagatggccgtgcttctagaataaagggttcggaagctgaattacaccaggcaattacaaatcacggagaaatgcatcaagagccttctacttgtccacagtgttcttcaggaagtttaagaaaatctctactatctagagagggccattccatggacactgagattatcttgcctgagatagatttgccagttggtatggtggatagttttgtgcatgatataggaggccttgacttggttttcagcaaatttgatgtgtcgggaatagcacagagtctatcaaaagattccatcaagacagaaccagtggagagattaccctcacttgcatctattttatctgataaaatagatatggcatggagtggatcttgtgaattacacaacaacctccctgagagtacaaccaaaggcaatgaaaatccaagttacagtaaagc

SEQ ID NO: 393770 - DNA, 669 bp, Oryza sativa
  unsure (1)..(669): unsure at all n locations
tcgttccatggcgttcttctcccatcaccacctccagcagccgcatcctcaggctccgccgccgccgccgccgcagcagcagcagcaaccggtgcccccttccttcaggaacgcgctgccggtgccggtagatgggcagatcccggcgcctcttcccttcttcaacccgccgccggccttccaggaccagcccgcgcagccaccactggtggacgcgatggggcttacggccgcggcggggctagggtcggaggcagcctagggagcaggagctgctaggagagaactcccagatgtcgtccatcgatttcctgcagacgggctccgcggtgtccactgggctggcgctctctctggaggacagacgccagggcggtggcagcggcgctggggctgggaactcctccggcgattcgccgttgctcctgctcccgatgttggatgatgacatctctcgcgaggttcagcggctcgatgcagatatggaccgcttcatcaaggcccaggtcaggcactcgtaaacctttttcgttgtgggattagctaatacgaaaaatgaactaatgatgttattactttaccagcatgtgttacttgtatgaggnattcatgatcattttgttagggaaaactagtgaagcgtcactgtttcagggccatatagttttt

SEQ ID NO: 393771 - DNA, 447 bp, Oryza sativa
  unsure (1)..(447): unsure at all n locations
ncgctgcggcgggcccaaccncaagttgttcccggagttgttgccgcgtcgtgggcgaggtacagcngccacggagggccgccaggttgagatgaccgtgagaactgtgttacgtacacagggccatgtggatggcgtgcgggaccttttcgtgcgtgttcctcgcgtgcaatttttcgtcgtgggagggaacaccgcggaaaatggcgtgccatatgcccctgctgctgccatgggtggggttggtgggctctcgcaggagtgtgacataagcctgtgatgtcaggaggggaatcgaaggtggcgcacgattcgattagacagtgtagtgtcggtgtttcaagcttgttgcagctggaatgaactcaagcggaactcgtgtattaagtactgtatttgtgttccatcaaagaaaatacttttttttgtcaaaacanacncacgtcc

SEQ ID NO: 393772 - DNA, 523 bp, Oryza sativa
  unsure (1)..(523): unsure at all n locations
ctccgaccacctcgctcgcctcgcctcgacgtctccttccctcccgcctccaagcaacccctctcgccggaggaggaaaccctcctccgcttccaatccccaaatccccatccgctatatcaacccgatcccctccccgatcgttcgatcgttcgatcgatctcgccctcgactccaagccgacgagaggagttgaggagttgaggccatttcggtgcgtgcgcggcgggcggaggtgatcggtggcgtttcgttccgttggcggcgggcggaggctgattgctcgcgcggcgtggagcggtggggggagggatccgagcgggagggagagcgcgcgcggatggggtggcggagtcgcgcttcggcggtggcggtgctgtggatgctcgccgctgtggtggcggcggctgcgctggatcctgatcaggacgagctcgaacgcgcgtttccaatcgtcgaaccagatcatggtcacactnaactccgtcttgcataagagggtttgaagcaattaaaagaatcg

SEQ ID NO: 393773 - DNA, 495 bp, Oryza sativa
gtcctttacaccacttcccttccctctctgcagccgaggcggcggaggagaagaggagctcgatcgatcccccccaccggcggcggcgggcgagatgaaggtcaccgtgatgaccgccgacgagcagattctcaccgtcgacgtcgaccccgacgaatctgtggagaatttgaaggcgcttcttgaggtggagactagtgtgcctttgcggcagcagcagcttcacttcaatggcagggagatacagaacacggataaacttagcaccgtcggagtccaggatggcgatcttgtgatgatgtgtgaaggttacctctaatgaaaggccatctcaggatattataagattaaaccctgatggatctgcctgttgatcctcaagctttccgacaacatattcgaggtgattcacaacttatgggacaactccttcagaatgacccggcattagcacaagctattcttggtgatgacatcaatgagttgcaaaatacc

SEQ ID NO: 393774 - DNA, 471 bp, Oryza sativa
ctacagttcccttcccaaaatccctcccctcgggcccctcttccccttcgattctggcggtttgccgccggcgagggttggaggaggggtccggccacctcccctccactagtattgtatagttagatttgtttttaggtcgtcaggtgtttcctgtagttagggtttgtccttagttggtgtttttgccgacgagtctccatgggtgccgttgtggtcggcggcgacggcagttggtggcggtggaggtgcgagatccaaagacctgtggatgaatcgacggaaggagctggctccttgcggcggcggcggcggctgcatcgtcgtttgcggccgggaggttgccaccccgttcctagcgttgcgtgcggtgacttctcgtggctcgcatcgactggatctgctgtcgcccggagcttgctgctcgtggtgcatgatgatagcccgtcgacgaggtggcggttcgagagc

SEQ ID NO: 393775 - DNA, 763 bp, Oryza sativa
  unsure (1)..(763): unsure at all n locations
aaatcaactccacctccagaagagaagtccccaccatcacatactccggagagctcatccccaccatctnaggagtcagaaccaccaccgtcaccaacaccaaagagctctccaccatctnacgaggagtacgttcctccatctccggcgaaatcaactccacctccagaaaagccactaccaccacacacaccaacaataaatagttctccaccatcggaagaagagtacatgcctccatctccagtgaaatcaagtccaccaccagccgagaagtcccagccaccgccatctccagttgagtcagtacttccaccagtgaagtcttcaccaccacacgcaccggttatttcagaaccaccaccaacaaagtcttcaccgccgcaagtgccagtgacctcggaaccaccgccagcaaagtcttcacctccacatgaaccaattagcccgccagaaacaccagagaagtcttacccgccatcaactcctgaggaatcatctcctccctcagtccccaaggcttcatctccaccaactggagaagtctcttcctccaccggctacagtggagcttgcggcctccaacagttaagcctttgcccccaccggttcctgtgagctcaccgccacctccggagaagtttccacccccgcaagctccggtgatcttgcngcctcctccaattaaatntcctcccccaccggctccagtaatctggccacctcctccagttaagtccccaccaccaccagcaccagttat

SEQ ID NO: 393776 - DNA, 373 bp, Oryza sativa
  unsure (1)..(373): unsure at all n locations
ctgnaaatcctgaagcttcttcttcttcttccttcctcctcttgctctcttgctcttcctatgctagcactctccatgctcttcttgcccttgtagcattggctccttggtttccatccatggatccacgctaaatgcattgcgaggctgcaaattggtagcattcccttccccgttgcatctgctgcaactatgtaagcaggagtgtctgatttgacacgcctgaatacagcttctcagatcttcagttttgttgtttgtctgagaaagggggagagagaagaggccccttttgggtccaagaagaggaaaatgggggggagcttcgtgcccctccgtggaataaggacggncctcaatgggngnctccagt

SEQ ID NO: 393777 - DNA, 463 bp, Oryza sativa
  unsure (1)..(463): unsure at all n locations
cacccgcccgcctctccctcttcctcgcgtttctttccccctccacaagtagctctctccccgccggtctccgggtagccgcctccgaacccagccgagagctcgaagcctttccttactctcttgccatgtaccgcgcggcggccagcctcgcctccaaggcccgtcaagccgggagcagcgctcgtcagattgggagtaggctcgccttgcatagaaactatgctgccaaggacatcaagtttggtgtcgaggcccgggccttgatgttgaggggtgttgaggagttggctgatgcggtcaaagtgacaatggggtcctaagggacgcactgttgttaattgagcaaagcttttggtgctcctaaagttacaaaaggatggagttactgtttgccaagagcattgaattcagtaacagggttaagaatgttggtgcaagccttntgaagcaggttgctaat

SEQ ID NO: 393778 - DNA, 437 bp, Oryza sativa
atctggagctctaaaacccaaaccctagccactgcgccgccgccgtcgccttcgccgccggcccgccgccgccgcttcagccatgaacgcctttcggttcctcggggacatgacccacctcttctcggtcctcgtcctcctgctcaagatctacgccacgaaatcctgctcaggggtgtcgaggaagacgcaggagctgtacatgctggtgttcgtggcgaggtacatggacctgttcacggactacatctcgctctacaactcggtgatgaaggtcggttttcatcaccagctcggcggcgatcgtgttggtgcatgcggcgccacccacaggtgcggtgcacgttaccgacaaggatcagggcacctttccgccatgtggtgctcgtcgtcgttgccttcttgctcgcattgctcttcaacgagcggatcacctt

SEQ ID NO: 393779 - DNA, 648 bp, Oryza sativa
gtggagacacgcaaaagcaaagcaaaccactcgccgaacaccaactcctcgccgccgccgccgaggaggaggaggagggagcgagcttgacgccggcgccatggcgggcgggggaggtagggagcggcgcggcggggggaggctgctcgtcggggtgctgctcctgacgctggtggtgtccgggcactgcctggagagcacgcaccaccgcgggctgaagcggcggcggcggaagcacgagatccactcgccgatcaagacggtggtggtggtggtgatggagaatcggagcttcgaccacatcctcgggtggctcagccgcacccgccccgacatcgacgggctcaacggcacgcaatccaaccgcctcaacgcctccgacccttcctccccggagatcttcgtcaccgacgaggccggctacgtcgactccgaccccggccacggcttcgaggacatccgcgagcagatcttcggctccgccgacacctccgccgtgccggcccccatgtccggcttcgcccagaacgcccgcgggatgggcctcggcatgccgcagaacgtcatgagcgggttcaagccggagtccgtgccggtctacgccgccctcgccgacgagttcgccgtgttcgaccggtggttcgcctc

SEQ ID NO: 393780 - DNA, 423 bp, Oryza sativa
  unsure (1)..(423): unsure at all n locations
ttgcccctgctcctccggtgttttttgttatcattcggcagcccgttgcttgccaatcaggccctgtctagggctatcctgcgtgagcggtgggccggcaacttctgccatgtggtctcacagcatgatgttgtcccaaggctcctcttctgcccactcaatgtcatccctgtgcacattgttgttggtatgcagctgcaccagttgccggtgcgcgcgcgccgtgcagccggtgtggtggccacggtcactgcccgcatggctgacaccaaccaggagtcgctgcggcagtgatccaagagcacgccggtgaggcagcaattgagcagaagcttgctgctccggaaatanccagtgggagcccatancggccttttggggcgtatgtnctgtgctcttcggatggtgcggcgtgtgtcgaca

SEQ ID NO: 393781 - DNA, 350 bp, Oryza sativa
gaagccgtgtccgccattgccgcgtcgcgcgcccaatttactactccttccttcgcaagctcgctagcttcccacctaccccatccaccgaggagggagagagggatttgatatggagtcgtcggcggggccgatggagctggtggcggcgctgctgcgggggctgacgccgcgggcggagcagctgctgcagctgtcgtccgggggagggggaggccgccgccggtggcgcggcggaggcgagggccgcggtggccacggtggccgccgcgctgctcgggtgcgcgttcttggtgttatggaggcgggtctcggcggggcggaagcggaagagggaggaggcagagagg

SEQ ID NO: 393782 - DNA, 644 bp, Oryza sativa
  unsure (1)..(644): unsure at all n locations
gcggtggcgccggagatgtcgtcattcttgctctgcgggaggaggcggcggggggcggatctccatggcggaggccgcgtcgcccatcagcagccggccgccgccggcgcagcagcagttcgacgagctcggcgtaggcggcggaggcggaggcggaggtgggtttgacgccgaggcgctggcggcggcggcggtcggcgaggagggagccagcggcggcgcggtggggaaccggtggccgcggcaggagacgctggcgctgctcaagatccggtcggacatggacgccgcgttccgggacgccaccctcaagggcccgctctgggaggaggtctccaggaagctggcggaggagggttacccgaggagcgcgaagaagtgcaaggagaagttcgagaacgtgcacaagtattacaagcgcaccaaggagagccgcgcggggcgcaacgacggcaagacgtaccgcttcttcacgcagctcgaggcgctgcacggcaccgccgccggcgtcgtggcggcgccatcgccggtgacgtcgctggccccgccgccggcgacggctgtgggggtgtccggcggngtgcgcgcccccgacgagccgtcgtccgcggtggtgatggggaacgtgatgagcttttcgacgt

SEQ ID NO: 393783 - DNA, 603 bp, Oryza sativa
  unsure (1)..(603): unsure at all n locations
gcttctntttcgagccacactcctaagaagactccaaggatagctccaatggaggtgaagtgcttgctgctcctggctctcttccttctgctaggaacacatggtggtgaagcgcagcgctcgtgccggccgtcatgacgttcggtgactcatcggtggacgtaggtaacaatgactacctcaaaaccatcatcaaggcaaacttccctccctacggaagggacttcaagaaccaggtacccacggggaggttctgcaacggcaagctggctactgatatcactgccgagacgttggggtttgaaagctacgcacctgcgtatctcagcccagatgcgtcagggaagaaccttctgattggagccaactttgcatctgcaggatctggctactatgaccacactgcacttctgtatcatgctattcctttgtcccaacaattggagtacttcaaggagtaccaatctaagctggcagccgtggccggaagcagccaggcccagtcaatcatcaacggctcattgtacatcatcagcgncggtgccagcnatttcgtccagaattactacatcaatcctttcctctacaagncccagaccgccg

SEQ ID NO: 393784 - DNA, 510 bp, Oryza sativa
ttctaacaacgtcgccggcggtttgacgtcgagcggcgtacggcagaggcgacggtaaacccccacaccgccgccctccgccgccgtcgtcgttcatccgtgggagggggatacatatgcatgcaagcacgcatatcgactttcattgctcgtagttgcagagattaatctttgtggttacttcaatactgtatcaagtcttagtgaaggataattatcttgaagtatatcatacttcccagaagctagatacaaacacgagttgtcactaccatgggttcctgtgcttccaagtctgtcattgagcagagaccaccagcaaggcactataccaggaaaggaagaagagctcgtactaattcccgatccatcatgccagaggcgcccaagtcacggttgaacgattcaagaggacacatgactgacttctcaatgagtgagggtgtccattttgagacatcatcaaaccatggaaatcagagcattccaaacattccacctcacacagat

SEQ ID NO: 393785 - DNA, 736 bp, Oryza sativa
atgttgctagtgtggcagtttcaccaagtgaaatgtttgagtctgtgtttgtacttgttgaagacgaaatgatggctgatcctgcgtatcttatttctatcatcatggagtttctacgaagtgtctcaagagctgggttgaaggctcctcctaacctttttgtgatgatgacaacactgctggcccgcagcaaccgttatcctgaaatagccttgtttgtatccaacatgtatcctagaaccctccacggaacttgccatgcaactcatggaattaggtcaacaacactctccgacaaggaagctgggcgtggacatgctgagagagcggggcttgcaccatgactacgtcactgcgttactgcaagacggataccacctggaggctcttcgctacgctagaaaatacaaggtaataactgtgcagcctgtcctgttcttggagaaagctgtggccataaacagcgcgcagaacctcgccgccatgctgagcttcttctccgagttcacgccgaccttcaagacgacgtcggactacggcagataccggcatatcttgtctgagatgatctgaacaaatttcagtagacagggtgaactgcctgaaacgatttggcacgttttatgcaaatcccgtacagaagaaacttgatacgaggaatggtgtaaagttcagacgatttaagtataattgaacaaatggaacgaggttgctcagtgaaaaaaaaaaaaaaaaa

SEQ ID NO: 393786 - DNA, 616 bp, Oryza sativa
cgagagcaacaccaaacgaaggggaaaggaaggaaggagatctcctatctctcctgggtggtgggtccccgtaggcagccaccaatggagggctcgccagcgacgcgcctcccggaggccgactcgctccccgacggcttcgtggagagctccgccgccgaccaggcgccccctcctcccgccgacgccggcgatcccgcgagccgctccctcggcctcgatcaagccgacgcaaccgtgggcggcggcggcggcgacgaaaccctaggggctcctccctcgaccctcgcctccgtcgctcaggacaccctggacgcctattcggccgccgacgcgctgcagagcctcaccgtgggcggctccgctgcggagccggagcgtgctctcggcgaacccgccgtcgacgcaggagatgctaaagagtcctcgaaggagagcagtgtggtggagcaggtggtatctatggccgatcagaaggggagtggtgagcagaagcgccaggtcgtgaaaaagagcaaggtagagaaggacagagagctgtttgaacttgcgcaggcgtaccaccaggtggtagcagagagggatgcagctattgcaggtaaagagaaactagagt

SEQ ID NO: 393787 - DNA, 463 bp, Oryza sativa
  unsure (1)..(463): unsure at all n locations
cttccttcttcttcttggaagcagccttcctaggcttgttcctcctctcccctcttccttccttcctgtagtaattaagcaaaccgaattccatcagcgctggctcgttggcgatctgaatcctcctcctcctccttgtcacctccttccgattcaggggcaggggcagatgcagatgcagcagcggcggaagccaccgcctgcggcgccgccggtggccgccaagcagccttccccgcgcaggacgcccgggcctctctccttcgccggcgccctgctctccctcctcgtcgtcgccaccttcctcttacatcaacgaccacggcaacatgatgccaccccacgcgtcccccgaccccggacctaccgccttcctgcaggaggccggcgcaccaaaaggtcaactccatcctcctcttcccgccacgcccctggcccttccccgngcaccaacaccaacacg

SEQ ID NO: 393788 - DNA, 538 bp, Oryza sativa
  unsure (1)..(538): unsure at all n locations
tcggtttgctatccataaggttcagttgaaccaggtacgccacttggtggaagatatatcctgtctgttcaaggatctggacctgaggctgatgttgtctaccaaaagaatccttaagaacttagatgctgaagtggaaaatgcaataaattgcttggtatcttctgctgttattgatcctgatgtcaaaggtggacttagatggcctcttgggaaagaatcgattgatgagaggttcagcatagttggagtgtggcatacaaactacaaagctttcagaaatgagaagttgaggctcaagctaaggcatgctgaccggtttgaccatcgaagctcaactggagaggtttctaatgaagttacctttaaactaattggcatatctgcaagtctggaggctgttgatcaggaggcgaattctcttgcaggagatgctggagtctgtggtaggaatgatctgggagagcggttcgagctacaagaaggcctgatgcacagttattgccgagtngatgcatgctgactactctactgatac

SEQ ID NO: 393789 - DNA, 520 bp, Oryza sativa
tttctttattccacttctcttctctctcgtggtcgggggatctcatcaggagcgcagatgctacggcgtccttgagaattgcagagaggcaaaagaagaacaagcagagagcaagaacaagcagaagcagaagcaaagaggcgatggacggcgacacgctgtcggcggcggcggcggaggacgggaaggtgctgcacgcgttccagacgagcttcgtgcaggtgcagagcttgctggaccagaaccgggtgctgatcaacgagatcaaccagaaccacgagtccaaggtccccggcgacctctcccgcaacgtcggcctcatccgcgagctcaacaacaacatccgccgcgtcgtcgacctctacgccgacctctcctccctcttcgccgcctcctcccccggccccgccgcctccgagggcgcctccgtcggcaccgccgtccgccacgccggccacatgcgtgtcaggtccacccacctcgactgaacaagaaccattctcattttctcaattaacca

SEQ ID NO: 393790 - DNA, 495 bp, Oryza sativa
  unsure (1)..(495): unsure at all n locations
gcgcanaagcatatagtaggtagatatatatggagatcgtgggcgagtgcgagtaccggggcgaggcggtgttggtgacgccgagctcggccacgccgcggcgctccctctacctctccaacctggacgaccagcgattcctccgattctccatcaagtacctctacgtcttcccgccctccgccgccgtggccgccgacgccctcagggccgcgctcgccagggccctcgtccactactacccactggccggaaggctcagcgcaccacgccgacgataagcttgtgctcgactgcaatgccgagggcgcgctcttcgccgaggccttnctgcccaccctcaccgtcgtcgactttctccgtgccggtgccaccgccaagccgcacaagtcctggaggaagctgctctacagagtccacgccgtcaccttcgtcgccgttccgtcgctcgtcgttcaggtgacacaactggggtgcggaggcatggtagtgtgt

SEQ ID NO: 393791 - DNA, 532 bp, Oryza sativa
tcgttccgcggcggccgtgagcaccaacactcacgcattccttcctactccgcgagatctccggattcgtttcggtgttttgcgagtcgcgcccggagaagaggagaggaaatccggtcaatcgcggcgtcggcgtgccgtcgcttggggtggtgttggtggttctgaattttgattgcttcgtgcttttcgttcgggggagggcagcggccgccatgggattggggaacgtggcgagctcgtcgtcgccgcggctgctggatccggcgcctctgctgccgcaccacggtgcaagattggcgcccggaagctgtcagtcgcagcccaagaccttcgcgaacgttttcatcgtggtggtcggcgccggcgtgctggggctgtcgtacacgttcttgcggaccgggtgggcggcggggtccatcctactgctctccgtcgcggcgctcaccttctactgcatgatgctggtcgttcgctggcggcgccgtcttgtcgaccagcacccggggaacgccttctttggggactgggg

SEQ ID NO: 393792 - DNA, 596 bp, Oryza sativa
  unsure (1)..(596): unsure at all n locations
caacgagcgaaccgtncgtcgaggcgtccgtctcctcctcctccttctcctactgctgctgctgctgcttaaacccctcagggctccgggccgacgctccatttgtggctgttgggtttggagcttcaggcgcaatggcccccaagggcgccggccgtggcaagggcaggggcggcggcggcggcggcaaaggcgacaagaggaggatggaagagaaagttgggccgggtgccatagacgtcacggttgtcactccctatgaatcccaggttacactcaaggggatatctacggaccgtgttctggacgtgaggaagctgctgggctcgaatgtggagacgtgccacctgacaaactactcgctctcgcacgtgacgcgagggcagcggctggaggacggcgtggaaatcgtgtcgctgaaaccatgctctctcaccatcgtggaagaggagtacgcgacggaggcggcgagcggcggcgcaagtccggcggctgctggacatcgtcgcctgcaccaccacgttcatgaacaagccccgcgacagcgccaagcacaagtcgttcaagcacgcgcgcccggtgacgtcttcgtcacc

SEQ ID NO: 393793 - DNA, 533 bp, Oryza sativa
ctgattagttcatgttggttcctaatcctgatcaaattacactggaaaggctttttagagttgatgatatcagggttggcgcaacttccagaaaatctattcctcttcttgttgacctactcaaacccattccagaaagacctggtgctcctttcttggcgttgggtcttctgacacaattagctatttgtttgccccccaaacatgatgctaatggctgaagctggaatcctagaggcacttaccaaatacttgtcacttagcccacaagatgcaacagaagaagctacaactgatttgttaggcattctttttagttgcgcagaaataaggcacaatgaagcagcacttggtactgttaaccaacttgtggcagtccttcgtctaggaggaagaaattcacgctacagtgctgcgaaggcattagagagcttatttattgcagaccatgtcaggaacagtgagtcagctcgccaggctattcaaccacttgtagaaattctgagtactggcatggagagggagcagcatgc

SEQ ID NO: 393794 - DNA, 493 bp, Oryza sativa
aacggacaacgcagcagcaaaaccgcgagacacatgacgacggcgacgacgacgacgaccttgccggcggcggcggcgctgctgctgctgctgctgtcggcggcggcgcagtgtgctcggcgtgcccgccggcggcgagccagacggcggagaacaacccgcggctgcagcgggcgtacgtggcgctgcaggcgttgcggcggcgcgtcaccgacgaccccaagaacctcaccggcgggtggtgcggccccgacgtgtgccgctacttcggcgtctactgcgccgccgcgccggacgacccgtgcgccgccaccgtcgccggcatcgacctcaaccacggcgacctcgccgccaccctccccgacgagctcggcctcccttcaccgacctgcgccgtgcttccaccttcaacttccaaccgtttctccggcgcgctccccggacaccctccccaagctctccctcctccacgagctcgacgtcagcaacaacc

SEQ ID NO: 393795 - DNA, 542 bp, Oryza sativa
tcgttcctctccaacatgaagatgccattgctgctcctcatcgccatcgtcgtcgtctccctctcccgtggcaacggggagcagaccgacctcacgcgggagacgttccccgcgggcttcgtcttcggcaccgcgtcgtcggcgtaccaggtggaggggaacgccctccagtatggccgagggccctgcatctgggacaccttcctgatgcaacctggtgtaactcctgataattcgaccgcgaatgtgaccgtcgacgagtaccaccgctacatggatgatgtggacaacatggtgagagtgggcttcgacgcgtatcgcttctcgatctcctggtctcgcattttccccagtggacttgggaagattaacaaagacggcgtggattattaccacaggctcattgattacatgcttgctaacaacattattccatatgttgtgctctaccactacgaccttccacaggtgctccatgatcaactacaagggatggctacaccccagaattgcgagagattctgtgagatttgcagacttct

SEQ ID NO: 393796 - DNA, 619 bp, Oryza sativa
ttgagcttcagcccggtgctgaggcggcggcacccggcgccggtggccgtcgcggcggtcaccctgcacggctgctacggcgtcgtgctgaggcagtacctcggcaaggtgaccatcctcacggaggagctcgtgcgcgtgctccagtcggcgggcaggatggagaaggccagggcgcacatgacggcggaggacgccgccgactgccgcgacgaccgggccaaggccatcgtcggcgacatggagccctacgaggtggattccgtcgttatgggcttgctcaaggtgtggatggacgacaggttcaagatcaccatggactgcctcgccagagccaaagaaaccgagagctggataccaaaatccaaagatgaaccttttgccgggtcagcgatggagatgatgaagctggctaagtataccgtcgaagagttctccgagatcccggcgagcgcgaaagacgaggtggtgcaagacctcgtcgacggcctcgaggcgatcttccaagagtacatctccttcgtcgcctcgtgcggggccaagcagaattacctcccaccgttgccaccattgacgaggtgcaaccaggactcgggcttctcaagctgtggaggaagac

SEQ ID NO: 393797 - DNA, 552 bp, Oryza sativa
gccagacctgccacctgcattgcatttgctctctctctctctctctctctcggcaccacggacactcgtacagctgccgcctgccggagggttggtggtgtgtttcaggttccagaaaaatcctccagcgttttgtggtcgcttgaggagctgagctgtgtgagccttgcaaggtttgcatcaacaagcttgggggtttttcctatcttgttgttctgagggaattcaagaaatgctccatatggtctgaattcgtaggtctttttgtgttggaatctctcagagggtttaagaggaaaaaggaaagaggagaaattgtaaggacaagtagagaagaacatggctgacctggaagcaggcatggttgctgctgccacagaccagggcaattcaacatggtcacatgatgacgcagccacactgatcccgaacagtggcaatctgggctcgagcaacaggagcaccaagacggccaggttcaaggacgaccacgagcttgtcgagatcacccttgacgtgcagcgcgattcggtggcactccaagaagtgaga

SEQ ID NO: 393798 - DNA, 459 bp, Oryza sativa
  unsure (1)..(459): unsure at all n locations
cccgcatatcctccgcctccctttcccccctctcctcctcagccctatttcaccaccacctccaccgctgccgcggcgagaattcgatcggttcttggcagccgtagtgcagttttgtgcagttttcttctctcttgttgttgaggatgaagtttgggaagagcctgagtagccagatcgtggagacgctcccggagtggcgggacaagttcttgtcgtacaaggatctcaagaagcggctcaagctgattggtgggggtgggggtggggaggagaggcaggcgaacggggcacgcgttgcagcggatggcggcgaggaggaagccgccgccgcggcgatgacgcccgaggaggcgggcttcatgcggctcctggaggccgagctcgacaaagttcaantccttcttcgtcgagaaggagggangaattacatcatccgccaaaaaggaactgcaagga

SEQ ID NO: 393799 - DNA, 490 bp, Oryza sativa
tcgtttcttcgtctctctctctcaacttccaccaccgcatcggggattcctcctcccctcacctcatcgccatgttccgaaccttctcgaagcttcgggaggcggcggcgccactcaccgccgcggcggtgcggaggtgctgctccggaggcggcggcgggcggatccgcgcggaggccaattgcccgcgctgcgcggcccacatgtcggtccaattctccctccagccactctcgacgcccccgccggccgccgcggctggtggcggcggcggagatgggtcgcatagccatcaccatgacggagcgagcgtgtgccccgcgtgcagcgcggcgttcctgttccgagcgcaccggatcgagcccctgcgcggcgcgttcctcgagatccctcctggcgtcgggggcgaggacgaagacgccgctagggaggggttcgccgatcggatcaggaagatgatatcggagcgcccgcccgacgattttccgat

SEQ ID NO: 393800 - DNA, 392 bp, Oryza sativa
ttgttttttttttttttttggaacccataagcaaaaaggacattaagttaatcgtctgaccttctacagatttactgttacacaatcgatcaccaggaggcctccctcgctcgctttctttctactgttacactctgctcgcgttacaactaacgggttgtttggctgaggtctcaccctttgctattaagaagaagatgaacacaaaggctctagcagctacataaatttaatcaaccatgggcaattctcaaaacacatgatagttctatgttgtatgcacttgattgtcctatgcttacccaagggggtgtcagtaataattctccagcaatcccaactgctatgaggcaccattattgttgccttctgttgctgctgctggtggtggt

SEQ ID NO: 393801 - DNA, 518 bp, Oryza sativa
ccaccactctcgctcgctccccccactcccactcgcctgaaaccctagcaaggagctcccggcggatggacgagggaggcggcgctggtgctgcggctgccgccgccgggaacgcggcgggggcggcggtgcaccacaacgcgcggtccgcggaggacgtcttccgcgacttccgcgcgcgccgcggggcatcgtcaaggcgctcaccaccgatgtggagaagttctaccggcagtgcgaccccgagaaagagaacctgtgcctttatggattgcccaatgagacctgggacgtgacccttccagctgaggaagtacctcctgaacttccagaaccagcactgggcataaactttgctcgtgatggaatgatcgaaaaagattggttgtcgctggttgcagttcatagcgatgcatggctactgtctgtagcattttaccttggggctcgctttggatttgataaggaagccaggagacggctcttcaccatgattaatggtctttccactgtatatg

SEQ ID NO: 393802 - DNA, 514 bp, Oryza sativa
  unsure (1)..(514): unsure at all n locations
cgtanacgtattccattcccttcatgctggttagcttctcccccttgttcgatgcctccggatccctaacgcttgcttctcccatgccactccactcccacctcctccttctcctgctggctctctccacgtcggtggttgctggctctgtctcctcctccccctcggtttgtgccggcggcggtggcggtggcggcgacgcggccatcgtcgcggcggcgttccggggcgtgcgcaacttccagctgcctccatgcggggctgtgcgggagctgcggctcccgtcgcggaacctcacgggcgccgtggcgtgggcggcgctcgccaacctgtcgggcctcgccgtgctcgacctgtccgggaacgcgctccagggcgccatccccggggggttctggcgcgcgccgtcgctccggcacgtcgatgtctccgggaaccagctgggtggggctctccgggtggtggaggctagcccgcggctcgagtcgctcaacgtgtcctgcaaccggttcac

SEQ ID NO: 393803 - DNA, 594 bp, Oryza sativa
tcgttaactatatatccttttggtttgcaaaggttttactaggttatttgcccccctcttctagaacgcatccagaattcgtggactctgcgacccaactcacacggcgaagcacacagaattttttttcccaaatccatttattttcctctcttctctctctcgaatcgaatcgaatcgcctcgcctcctttgttgaattgaatccaagctcgattcgccgccgccgcacgccgccatgggcaactgctgcggcacgccggcgacggcggaggagggcgggaagaggaggaggagggggaagcagaagaaggcgaaccccttcaccgtcgcgtacaaccgcgcgccgtcgtcggcgggggcggcggcggggaggcccgggctgatggtgctgcgggacccgacggggcgggacctcggcgcgcggtacgagctcggcggcgagctggggcgcggcgagttcgggatcacgtacctgtgcacggaggccgagacgggggacaggtacgcgtgcaagtcgatatcgaagcggaagctgccgacgcccgtggacgtggaggacgtgcggcgcgaggtggagatcatgcgccacatg

SEQ ID NO: 393804 - DNA, 579 bp, Oryza sativa
  unsure (1)..(579): unsure at all n locations
ctcattctcggtgtctctcactcgctttgtacgtacgttgccgcctgcccatggcgtcgcggtcgctgttcgcgttgctggtagtggcggcggcgatgtgtgcgtcggtggcgtcggcattgcggagcagggcggcgaccgacccgaacatggaggtgaagttcgacttcacgccgtttctgatccagtacaggagtggcagggtgcagaggctgatggggacgacggtggtggcgccgtcgctggacgtgcgcaccggggtggtgtccaaggacgtggtcgtcgaccggagcacggggctcgcggtgcggctgtaccggccgaagcaccggggcgggagagctcccggtgctcatctacttccacggcggcgcgttcgtcgtcgaagtcggcgttcgacccggtgtaccacaactacctcaacgcgctcgcggccaaggccggcgccatcgcggtgtcggtgaactaccgcctggcccccgagcacccgctccccgcggcgtacgacgacgcgtgggaaggtgctcangtgggtggccgccgaaatgcaangcggcgcggactcgtggctcgcgaagc

SEQ ID NO: 393805 - DNA, 891 bp, Oryza sativa
  unsure (1)..(891): unsure at all n locations
ggagaaaccaagtggaagggttacatatattgtcgtccttgaaggtttatgtaggttcagtgttcaagagctcagtgcaagaggttcatatcatgtcgctcgtgtctcacgtcttgatatgacaaaaacggagttggagcacgcagagcaggacccagatctcattgctctttctaggcagttcaaagctactgcaatggaactaatttccgttcttgaacagaagcagaagacagttggtaggactaaggtgcttcttgagacagttcctgtgtacagactagctgatatttttntggctagctttgaaataggttttgaggagcagttgtcaatgctggattcagttgacttaaaagttagactttccaaggcaaccgaacttgttgacaggcacctgcagtcaattcttgtagctgggaaaataactcaaaaggttgagggtcagctatcaaagtctcagaaagagtttttgcttcgccagcagatgcgggctatcaaagaggaacttggcgataatgatgatgatgaggatgatgtagcggcattggaaaggaagatgcagaatgctggaatgcctgctaatatttggaagcatgctcaaagggagttaaggcgtctaagaaagatgcaacctcagcaacctggatatagcagctctcgaacctacttggaacttcttgctgaaacttccttggcaaaaagtcagtgaggagagggagcttgaccttagagctgcaaaggagagtcttgaccgtgatcattatgggctgaccaaggttaagcaacggattattgaatatttggctgttcgtaagcttaagcctgatgccagaggtccaggcctgtgttttgtgggaccacctggtgttggaagacatcattagcatc

SEQ ID NO: 393806 - DNA, 613 bp, Oryza sativa
  unsure (1)..(613): unsure at all n locations
cgccaaccttctctctcccgatctgcgccgccgccgcagccgccgccatcccaccgccggactccggcgaagcaggcccccccccggagccaccccacagcgcattccacctcccctcccctccttccttccccgtcgcgcgcgcgcgcgaagctggtctctaggaggggggcgactttagcctgcctctccccccacacccaatcctcgactcggatcaagctgaagtgtgctagatgatgaagaggaggtgcctcaagcagaccacgatattgtagcttatggttccttgatgagcagtgaaaatgctgctggctgtggaaggagggggctctttctcgtcgtcggcttcagggtacagccatggccttgcccttctgcttcttgggaggaaagatgaagagaagcctgtcaaggtatccccgtggaatcagtaccgactagtcgaccgggaagctgagcaggtgtatcatctggcttccaggaaagaccaagctccngggtaaatgtgccccgtttatctgctttggccgtgcagctgctgggcttgaaggggcgtctcctccaaaactgagttcaggcaatacatcagggagttcgtcagaagatcgtc

SEQ ID NO: 393807 - DNA, 452 bp, Oryza sativa
  unsure (1)..(452): unsure at all n locations
cagctacaaaagaaggtacacaagaaggtgaactcgtcttccaagctcctcaagtacagcggctccggcgggacacctcgctccatgggcggcgacatggagtccggcagtgtcaaggacctgcagactcacctcttcagctacgaggagctcgaggaggccaccgattccttcaacgagaacagagagctcggtgatggcggcttcggcaccgtctacaaagggatacttcgagacgggcgcgtggtggcggtgaagcggctgtacaacaacagctaccggcgggtggagcagttcgtgaacnaggcggcgatcctgtcgcggctcggcacccgaacctggtgatgttctacgggtncacgtcgagccanaccagggagcttctcctggtgtacgagttcttggcaacggacggttgccgaccaccttcanggccaccgggcgaagagcgg

SEQ ID NO: 393808 - DNA, 769 bp, Oryza sativa
ttcagatgaatgtccggtccatctagataatgattggaatattagtgttgttgctggtctccttgtccagaatgctctgaaatatttgttgaagtttggacaagtttccccttacttgggatataattcacttaaggattatttcccaacaatggaaatgaaaccaaatccacagtgttcaaatccagcatgtgttcagagacagaaagaatatatgcagtcaaaacctgctagagatgcagcagcaaaagctaagatggaagctgaagcatcagcagcagatgaatgtccggtccatctagataatgattggaatattagtgttgtcgatgacagtgacacagtgacaccaagcattctaagcactggagctgatagcctcccagaaggccttgtccgcgaactcccaactgcagattcctaccaagaaccagttgctccagttacatccggggctattgatgacgaccttgaggagcttcagcgccagcttgatgccctaaactcgtcttaatgttttgtaaaagctggaccgtcatcattaacttggtttctaccaaagctcaacactgggttagaaaaccaacctgggtactgatgcttgtgtttactccgacagagttacccatttcagtggatatagcttctgttcataccaaagaggttgaagggttttaagttacttacctgtactgttttgagcttttgtgtacaattttgccttgagttaatgtagattttatgaggctggaaaaaaaaaaaaaaaaaa

SEQ ID NO: 393809 - DNA, 538 bp, Oryza sativa
  unsure (1)..(538): unsure at all n locations
gacactatctggaataaatcctgatgttacgttggagagctattcattaaatattactacagtgaaaggatttgaaacatttttaggaagtctcaaagccagaagctctgatgggcgtaacactggagttgatcttgttttgagctgcgttgataactatgaagctcgtatggttgtaaaccaggcatgcaatgaacttggccagacatggatggagtctggtgtctcagaagatgctgtttctggtcatatacagttgctggttcctggtgaaacagcatgttttgcatgtgctcctccattggttgttgcatccggagtggatgagcgcacattaaagcgggaaggtgtttgtgctgcctctttaccaactacaatgggtgttgttgctggtctccttgtccagaatgctctgaaatatttgttgaaggttggaccaagttccccttacttggggtataattcacntaagggttatttccccaacaatgggnaatggacccaaccacagtgtccaaaccagcattgtcagggcaag

SEQ ID NO: 393810 - DNA, 473 bp, Oryza sativa
  unsure (1)..(473): unsure at all n locations
tgagcctttgtggagagatacagagagaggcggaggagcacaagccgtcactcacctcacctgccttcttcttcatcatcatcttcttcttcttcctcccgcttcgccgattcaggatctccttcgctgcagatgagaagcggcgcctcggcggcggcggcggcggtgtgattctcctctccagagagagaaagaagagagagagagagagagagagagagagagagagagagaggagaggagaagaagcgtgaccaccgatgggatcgctggagacgcggtaccggccggccggagcgccgtctgatgacacaactaagaggaggacccccaaaagtaggatttacaaagatgtcgaaaattttggngttcttgtccttgaaagaactctggttgcaagttcaaaacttttgagatatttgctcctagctatcacttctgcgcgttcttacctcctaactccaccttttncg

SEQ ID NO: 393811 - DNA, 610 bp, Oryza sativa
tttttagcggaagtgaacaaccgcgccacgccatggggcgaagcgagtcggcgtccgcaggatttccctctccgcccgtgccctaaaccgctcgccgccggcgacgttgcgcccccgaccgcgagtgggccggcggcgatgtccggccccgtcgttcccctcgcctcgacggctcaagggccctgcgagccctcccctggctctggcccgctccccgtttccgccgccgctagcgatccgccggcgccctcctcgtcggtgcccgccggcggtcgtgagccctccgctagcgggctgccccccgcggtgactcctcagcttggggatcatgatcaaggtggtttacctaactgtgtgccaaaagtggggatgacctttaattcagagaacgaagcttatgatttctacaactcctatgctagaaatgttgggtttagtatccggaagaaccacgcaaatactagggcggatgggagtctttgctccaaatatttcctgtgcagcaatgaagggcagccggtggcaagcactacccagccggggcggaagaaacgttcttcaacaagatctgattgcaagcttcgtcttcagttctatattttccgagaag

SEQ ID NO: 393812 - DNA, 399 bp, Oryza sativa
  unsure (1)..(399): unsure at all n locations
ttccccttcctcctcacctcccattccctcagatcttcccccatatctctctgtctcgccgcagtccgcctcccaatctgaggagcttttcttcagctcaagcttcttgctcgcttgctctctactagcgctccttttgactcgtggccaagctgcagaggaaacccaaatttccaagtaaagcaacaggtcatgaaagagggaaagctaaggtgagaggagatgggaggaaggaaggaaagaaagatggtgatgatggcgataagtcgccccatgattcgcgccatcattncgtctcgcccgaggccagtgcgctggtaaaagggcctcgccgtccgtncgtccggccggccgtncggcgcgcgtggaggaggttgnttggtgggtgcggaggtgcgt

SEQ ID NO: 393813 - DNA, 897 bp, Oryza sativa
  unsure (1)..(897): unsure at all n locations
tcgtgtaaatgacaagtctttctactgtttggtgaaggaatgtgagcatcctgttgcaccaagacagcggaaatttgttcgagtgcaacttttgagatcaggatggtgcattaggaaaatccctggaagggatgcatgccgaattacagtgctgcatcatgaagacaacggcatgaacatagagatggcaaaactggcatttgccaagggcatttggaaattacatttgtaaaatgaacagtgcactacgtcgctatcctcaacgtaacatttcatcaatatcaattctgaccatgcaaagacttaccaagaagtttcctcaggccttggagactgatgtagatgcaaatcatcatcctcaaggaaatacaagagcaaatgttgttcctacacattttgcaagaacttcatcacgccaacagccagggaagaagtcatctcgggcaacgattgcaagtggacttctgcttatcggaagcattgtttgtctatcccgaggccgatctaaccttggggcccagcttgcaatggcattcttcttgaagaaggcgttcaaacaagataaaggatcgagctcgcagaggagcataagtagaactgatgtgactgaacccaggcacttggaatagtattggttaaccttggagacgttttaccttgaccttttcttcctctttcttgagaaaaagtgggaatatcgtttgcttgataaggcatatctgtacacagcatgacggattatgtaaataataggtttgtagttgtctgtgtttgccaatgagtacttctgtggagtactacatcgtctcactgtagaaatcgggtacctgagaatattaatgtatgaaagttaattttggagcaaaagagttctgattgnnnnnnnnnnnnnnnnnn

SEQ ID NO: 393814 - DNA, 503 bp, Oryza sativa
  unsure (1)..(503): unsure at all n locations
gttttccagggtcttgaggatcacttgggtgatatggacttcaaaattgcaggaacaaggagaggtattactgctattcaactggatataaaacctgctggaataccgttggacataatatgtgaaagtttggaacctgcacgaaaggctcgaaatcaaatccttgaccgtatggaccaggaaataagttctgcacgtgcttttaatgatgggagctctcctcgattagctacactgagcttcagcagtgattctcttaggaaactgcttttccacaggaaaaaaattgagcaagaaacaggtgcacgggtatctgttagtgatggtacagtcactattgtagcaaaaacccaaccaattatggataaggctatcgagaaggtagaatttcttgtgggtcgtgaaattgaagttggcagaacgtacaaaggtgttgtttcctcaataaaggagtacggtgcttttntgggattcaatgggtggacagcaagggctancttcca

SEQ ID NO: 393815 - DNA, 443 bp, Oryza sativa
agtctcccgtctcctttcccctccttcctcctcccctttcgtcttagcctcagctcgccgcgagacgaatcctcccctcgccgccgccgggtccgatcgacggcggtatcgagggacggagggggcgcgcccgttctctcgccgtacaccgtcgtcgccgaccggctccctcgacggcacgagtttgaagttggaaatcaaccttgttgttctctgtagcgctttcctttggattgcggagaatttcaaacaaaaccaacaaacctttgcatctgactgacttgaggtaactatgccaaaggacaggagcacccgtgccgtgtcatacgagcgccgccggtctcgtgtttcgccgtacccctccaatgggaagggctgtgctcgcaggtcagaggagtctgctgctgctgcccgtgccgctgccgcgaagcaggctgcggaat

SEQ ID NO: 393816 - DNA, 579 bp, Oryza sativa
  unsure (1)..(579): unsure at all n locations
tttttttttgcagagaatgcatcctgaagcggccaagccacaccaacaatgttactcatttaggcctcgcgatttcgcaagcatatgtagccggggtgaaacaacaatgtgacaatgactcaaaaagaagaagaaaaatggcaatctaacacgcatacgctaatacgctatcagttgacgcgtgccagacatcagtgcacacatctcaccatggtctacaatcatcagactggatcagctaatggtaattctacagctgcacttatgatggaccatatcgtttcttcacttggttcttccaagttgacaaaagcacctncaatcaggttgacgcatgaatgatgttgtatcgctctctcatgggtgctcattggcctctgatggatcaacaatgttactcagtatctaaacccaagggcatgatcctcagttgttatccaggtggtcacctttcgcngttgcgactctgtgtttcatcaaaaccgcctacaggcgcaacctcgtttaagtcaagaaatcttctcccatcgcttccattattaatgctaggagaaagcaggggtggccngctcctcgtgc

SEQ ID NO: 393817 - DNA, 840 bp, Oryza sativa
  unsure (1)..(840): unsure at all n locations
tgtgatctgagctctggtcagccgagccaagcctgccggtcgccggaggaggcaacgacgaccatgatggcgccgtccttgtccaccgccgtctcctctcttctcctcctcctcctcctagccgctgctatctccgtctcctcctcaccgccgatgccggaggccagcatccgggtcatctccgccgagaaaaggatcgacctcaccagccccatagtcaaagttttcctcacactaaagctcgagaatgatgccactgcccctgaagcatctcaagttctactcgcattcacacccacagaggttgaacatcttgcgattgtcaaggcgaccagagcggaggggaagcgcaagaagaagatatatgtgcctctctctgtgaaagcctctgatcttgctgccgctccaaatggtgctcgcctggactccattttgctgagcactccattgaaacctgctgaggtgaccacgctggaagtattttatgctttgacacactctttggagcccttcccagcagagatcacccagtcagatccccagctggtttactaccgtgacagtgctgtgcttctatctccgtaccatgttctggagcaggttacctacatcaaaatgccgagcaatagggtggagtcctttacaagggtggaccccaccagtcgagctggtaatgaagtgaaatacggcgcatacaacaaccagcttccaaactcgtatgtgcccatacttggtgcattatggaaataatcgnccgtttgctgttgttgaggatttgtgcgcaggtggagattctcattgggggaatgtccaatcactgagcagtataagctgaaatgg

SEQ ID NO: 393818 - DNA, 430 bp, Oryza sativa
gatgtcgcatcgcacacacggcggaagaacgccactagcctgacgtacgtacggcagcaatggccatcgccaccgagtcgcagcaggcgcaggtgcaagccgccgccaccgacgccgtcgcggcggcggcggttcgggcgcaaggtggtggacgaggtgtccggctggctgcgcgtgttcgacgacggcaccgtcgaccgcacgtggacgggtccccccgaggtgctcccgctgatgcagccggtgcccgcctacgccgagccgcgcgacggccacacgctgcacgacctccccggcgagcccaacctccgcgtgtaccttcccgaggtcgccctcgccgagcggcgccttcccgtcgtcgggcagcttcacgggggcggcttctgcatctcccacccgtcctggctcatgtaccaccacttttacgcgc

SEQ ID NO: 393819 - DNA, 430 bp, Oryza sativa
ctgtcccccaagatccagatcgccggtcacccccacgaactcgctcgagatccagagagagagagagaggcagtttcttggttgattttcgaggatgaagaggaagactcggaacaagataatcctgacgacgctgctggtgtcggcggcggcgatcctgatcggcgggacggtggcgctgatcctgacggcggggacatggaaggtgaagatgaaggagtcgcgcgagaagatctgcgacaaggggtgggagtgctcgggtagcaagtactgctgcaacgacaccatcaccgacttcttcaaggtgtaccagttcgagaacctcttctccaagcgcaacagccccgtcgcccacgccgttggcttctgggacttccagtccttttattaccggcgtcgccctttttaagccccttggtttttgcaccac

SEQ ID NO: 393820 - DNA, 643 bp, Oryza sativa
cttttttctccatccccctccttccgttcttccatttacctccacctatatagcactccggaattgcgccatctctctgccttaggagtacagtgaagtgctctccatataattgcagtggtgcaaggcaggcagcaactttcttcttcttcctcctatcataatctgctcatccttttcctcctctggagcaaccatgtccatgcagaaggtgtactagatatatagagttagttcgcagctgctccctacttacataaacaaacgcattcagatagccagcttcttgatcggcaacagcagctagttagagtgcaacaagaggtagcagagacaattttttttggcaaggcaagcaaaagctgatcgaggagagcgatcgagcaggtgttgatcgatcggtgcgaggaaacagagacaattttcccacacagattgtgatttggtagcagcagcaatggcgggcgttggattcgtggaggacatgctgcgggagcagagcctcctggaggcgacctgcggcgacctcttcgaccacatcgacgacctgctcgacttactaaaagaggagtcagccttcaaagtgctgctgctagacacaccatcgccagtgaatcacatgtactagtgcatgatcgattga

SEQ ID NO: 393821 - DNA, 659 bp, Oryza sativa
gatatcttcttctccatcagatcaaatccatcggaatcgatcggtggctgggagtgggaggagaggggagcctccttatcccccacgcagacgcttctccaccgcacattactcgcctccgccgttttggattcttccctgattttttcccctcctctcgatcgcttggtgtttgtgcttgttgttgcgttgcgtttgcttatagtggtccagtgagctccagcgagcaaaaacagacgccatgagcgccagagagagattttggtgccaatagacacacactgatttcatcatcatctaggcccaaaaacctctactcttccgcgtcttggaaaattcttctcagattgcatcaccagtaggaggattgtcagattgctgctgctgctcttgtactagttgtattcaggattcagaatttgggcggacgacgacgaggataaatcggatcttttcttcctccttgattaattcctgaggcgtgtgtgtgattagttcaaaaaagaaaaatagaagcgagatgtcggcgttgctcgatctgctcatgggggtcttccgccagccgaccctcggcggcgtcgccctcgagctcgcctccctcgccgcgccgctctggctcgccgccctcgtcggcctactaatcgcttggcgtggcgccc

SEQ ID NO: 393822 - DNA, 577 bp, Oryza sativa
gacgctctggctcaacaaccagcacggcgtccccaagctctccggcacgctcgacctcatcgccaccatgcccaacctcgaacaggcatggctccacggcaacgacttctccggccccatcccggactccatcgccgactgcaagcgcctctccgacctctgcctcaacagcaaccagctcgtcggcctcgtcccaccggcgctcgagtccatggccggcctcaagtccgttcagctcgacaacaacaatctcttgggccccgtcccggcgatcaaggcgcccaagtacacctactcacagaacgggttctgcgccgacaagccgggggtcgcctgctcgcctcaggtgatggcattgcttcacttcctcgccgaggtcgattaccccaagaggctggtagctagttggtccgggaacaattcctgcgtggattggctgggaattagctgcgttgcagggaatgtgacgatgctcaatttgccggagtatggactcaatggcacaatcagcgacagtcttgggaatctgagtgaactctcggacatcaaccttatcggaaataaccttactgggcat

SEQ ID NO: 393823 - DNA, 403 bp, Oryza sativa
  unsure (1)..(403): unsure at all n locations
gtgactttgttggctaggctgggttaatctcctccccggtctggtcgattcgaagccatggagatatagcctgcaagcttcatggggctggagcgagctcgtatttcttgatgcaagtttcagcccctccaagaacagggtaggagagattatttgtgttccttccattgctggttggttgctgcagtctgcatgtggtggattcttgggaagaaggtggtggtgaggtgaggtgaagagggagatgcccaaggtggccggagatggcggcggcggtggccggaggagcgaggacttgcgcgttgttttcctcagggtcggcgccgccgtcgcgctctncgtcgccgggctgctcctctcgcggcggcggccacggcancaactccggttaactcctcctcct

SEQ ID NO: 393824 - DNA, 506 bp, Oryza sativa
ttcgttttcgattccaatcctctcgaccagcgagaggcctcgccttcctcctctcccccacgttggcgtagctcgcgcgcgcgcgcgcccccgcgcccgaatccacaaacagcgtggtcgcgggcgggggttctcgatgaggcggatgctggaggtggcggcggacgccgggctcgtctgcggcggcggcggcggcaaacggcgcggtggactggtggcgcgacgtgaacgagtcgccggtgtggcaggaccgcatcttccacgtcctcgcggcgctctacggcttcgtctccgccatcgcgctggtccaattgatcagaatcgaatgtagggtgcccgaatacgggtggacaacacaaaaggtgttccatttcctcaacttcctcgtgaacggcgtgcgatccatagtgtttgtgctgcgacgaaatgtgcagctcatacatccagagatactttaacatgtgcttctagatatgcccgggctcgcattcttcacgacgtatgca

SEQ ID NO: 393825 - DNA, 615 bp, Oryza sativa
cacatactcgttaacctccatcttctcttctcctctcacgagctcgcagctcaagcgcacccagccatggcgactcctcagatctcgcgcaaagccctcgcctccctcctcctcctcgtcgccgccgccgccgcggtctccaccgcgtccgccgacgacgtgctcgccctcaccgagtccaccttcgagaaggaggtcggccaggaccgcgccgccctcgtcgagttctacgcgccatggtgtggtcactgcaagaagcttgcccctgaatacgaaaaactcggtgcaagtttcaagaaagccaaatcagtcctaattgcgaaggttgactgtgatgagcacaagagtgtgtgcagcaagtatggagtttctgggtaccccacaatccaatggttccccaaaggttccttggagcccaagaagtatgaaggtcaacgtaccgcggaagcccttgcagaatatgttaactctgaagcagccaccaatgtaaagatagctgcagttccttctagtgtcgtggttcttaccccagagaccttcgactctgttgtccttgatgaaaccaaagatgtccttgtagaggtctatgccccatggtgtggtcactgcaagcat

SEQ ID NO: 393826 - DNA, 483 bp, Oryza sativa
  unsure (1)..(483): unsure at all n locations
ctcgtcttgggtttctctccctcctcctcgccgtcgcgtcgccgcggaggcggaggcggagagccaaggccgcggcggtgcagccgccgtcccctcctcccgccgccatggtgaggccgacgcaggacgcgatcgacaccttcgtcggcatcaccggcgccgatgaggccgtcgccgcccgcaagctcgaggaacatcatggtgacctaaatgaagctgtgaatgcctatttcaatgaaggagataggaccagcaccagagccaatgaaaatcctatacctaccggttatgatgacatggagttggatgaaccatttggtcctgttcctacatttcacatgcctttgggcaaccctttttcacttctggatcaaggttttttagaacgagctgctgctgtgtatggtgagggacctcatattacacaccctanggaggtgaggcggatagatgtgaaagttaaggacaacaatactccagcag

SEQ ID NO: 393827 - DNA, 987 bp, Oryza sativa
  unsure (1)..(987): unsure at all n locations
cggacgngntncaagagcgtggtgctaactgctatggtcgctatatgcctcgtatggttatcattcccccaggtgttgaatttggccatatgattcatgacttcgatatggatggtgaggaagacggtccatccccagcctctgaagatccatctatttggtccgagataatgcggttctttacaaaccctaggaaacctatgattctggcagttgctcgcccttatcctgaaaagaatattactactcttgtgaaggcgtttggtgagtgccgaccactgagggagcttgctaatctaacattgataatgggaaaccgtgaggctatttccaagatgcataatatgagtgcagctgttttgacatcagtacttacattgattgatgaatatgatttgcatggtcaagtggcatacccaaagcgtcacaaacactcggaagttcctgatattcaccgtttagcagggagaacaaagggtgctttggtaaatgtgccttactttgaacagttcggtgtcaccttgatagaggctgccatgcatggtttgcctgtaattgcaacaaaaaatggagctcctgttgaaattcaccaggtgctggacaatggtctccttgttgatccccatgatcagcatgcaattgcagatgcactctataaactcctttctgaaaaacaactttggtcaaaatgccgagagaatgggctgaaaaatatacatcagttttcttggcctgaacattgcaagaattacttgtcaaggatatcaactcttggcccaaggcatcctgcttttgctggcgatgaataccggattaaggcacctattaaggggaggaagcatgtcactgttattgctgtagattctgtcagtaaggaagatctgattcgcattgacagaaattctatcgaggctgcacgtaaagaaaatttgtcaggatcgacaggttttgtgttggcaacttccctgaccataggggagatacatt

SEQ ID NO: 393828 - DNA, 428 bp, Oryza sativa
  unsure (1)..(428): unsure at all n locations
tcgttttgttgccactcggcactcgccaccatgctcctcgtcggcgtcctcctgctgctcttcttcaacctacatctccccacggccgccattgacaccctcacgctaggccagtctctgctgtggaaccagacgctggtctccaatggcggcaacttcgagctcggcctcttctcgccgggaaagtccaacaagcactaccttggcatctggtacaagaagatctccaagaagacggttgtttgggttgccaaccgtgagcgcccgattcttgagccgtcgagctgccacctcgagctgagcgtccacggcgatctgcggctgttctcgacggcgccgtcgaacaccttgctgtggtcgtcgaacgcgtccggtntttcctcgccgtcggccccgggaaccaacgttggcaaggttcaggacgacgg

SEQ ID NO: 393829 - DNA, 798 bp, Oryza sativa
ctgagttcttgcctgttaatttctcctcttcctccggcgtcgtcgtcgaggagatcgttcgatcgactgatcagcgattaggcgtgagatagaggaggaggaacggattgtggttttcttgaattgttaggttgggttgtggttatgatgatgcaggggggtaggattgcgaggagagggttgtcgaggctcgcagcggcggtggagacggccgccgtcgcgccgccgagaatggcggacttcaaccacgtcccgctcccctacgacggcccgtccgccgccgagatcgcacggaagcgcgccgagttcctcagcccgtccctcttccacttttattccaaaccactgaacatcgtggagggtaagatgcagtacctgttcgacgagcgcgggcggcgctacctggacgcgttcgccggcatcgccaccgtgtgctgcggccactgccacccggacgtcgtcggcgcgatcgccgcgcaggccggccgcctgcagcactccaccgtgctctacctcaaccacgccatcgccgacttcgccgaggcgctcgcctccaagatgcccggcgacctcaaggttgtgttcttcaccaactccggcacggaggcgaacgagctcgccatcatgatggcgcggttgtacaccggctcccacgacatcatatcgctccggaactgctaccacggcaacgccgctggcaccatgggcgccaccgcgcagaagaactggaagttcagtgccgtccagagcggcgtgcaccacgtcgtgaacctggacctcgacaggggcgcgttcggc

SEQ ID NO: 393830 - DNA, 513 bp, Oryza sativa
  unsure (1)..(513): unsure at all n locations
cggttgtcctccgccgcagtctccattgaagcggcgggtgtatattccgcgcctcagagtgaaaatacatcaggaatcagaagtcagtgaactcaaatgccaaggcagtgaagaaccaatggatgcttcaagggcaactacggaacaattaatggagagtggagaggatgcaaaaactaccgaaggtgcaaaatggatggcaaagaagaggaataggtgctgctgaaagcatagcagcattttgctatgaagctgggattccttttaatattctgtgcatagagagtttccagttaatgttagaagaaattgggaaatttggacctggctttcaggggccctctatggatgagcttcgagagaatttattgcaggagcatgtttcagctataactgataaagttcgatggctgaaggattcattggagtttgggggatgttctattattcttgacacttggctngatgaaaatggaaggcgccttatgatgctgggagcccactctattattg

SEQ ID NO: 393831 - DNA, 618 bp, Oryza sativa
gactccctcctccaaatctcccctaaaagcttcccaatttggcgagaattccccatatatttgccccatctcggcgtcccaacgagcccttccagattcccagccgcctctcttcttgttaggggatccgaaatctcggtggacgagagacttggtggtaagattcgccggccatggcgggcgccgtgctggtcgccatcgcggcctccatcggcaacttgctgcagggctgggataatgcaaccattgcaggtgcggtactgtacatcaagaaggaattcaacttgcagagcgagccccttatcgaaggcctgatcgtggccatgtcgctcattggggcgacgatcatcacgacgttctctggagcagcggctgattcttttggtaggcggcccatgctgatcgcgtcggctgtcctctactctgttagtgggctagtgatgctttgggcgccaaatgtgtatgtgttgctcttggcgaggctcattgacgggttcgggatcggtttggctgtcacgcttgtaccattgtacatctctgagactgccccgtcggacatcagaggactgcttaacacgctgccgcagttcagtgggtctggagggatgtccctttcat

SEQ ID NO: 393832 - DNA, 529 bp, Oryza sativa
  unsure (1)..(529): unsure at all n locations
ggtttgaagaatggcaaaacaccccagaacttcacagagctcgagaaattagcactgggcaatgttcaagaacatagccgaaggctgtgggcatttctattatcagtctattgggtctcttttgtcacgtacttcgtactatggaagtcctacaagcatgtttctaatatgagagcggctgcaagatcaacaccagatgttaaaccggaggagtttgctgtgttggtgagagatgttcctaagccacctcctgatcaaactataaaggattctgtagactcatatttccgagcacttcatcctgataccttctacagatcaatggttgtgactgaccacacaaaggctgacaaaatttatcaagagattgaaggtcacaaacagaaaattgctcgtgctgaagttgtctatgcggagtctaaaacaacaggcaagcctgagggctccaagcctacgcatcggnttggatttcttggtcttatcggtaaaaaggttgatacaattgagtattgtaatgnccaantcaagg

SEQ ID NO: 393833 - DNA, 501 bp, Oryza sativa
ttcgtctccgcgcgaaaattcccacgccacgcgcgccggaagggagggaaggcttttcctccgcgctccgcccacgcgccgtcatcgctgcccgcctttcttcctccgctttgtttgggccggagcggggggcgcaccggcgccggcgacgtctctcttccgaatcgggaggcgggagccagttcatggaatctggtggaattgatgctcaagtcagagcaatcgagcagcgcacaagattggagattcctatacgtgattgagattgcaaatgtggcgcctgttcaatgagttgtgggatgttctaggatctgggtttttctcatcgaggtttctttaatccagctcaaatctatttaccacctcatccgtttgcaccgagatcatctctgtgtgtgtggtcaccgtgagattaggaggagatggacgaggaggattactcgtgggttcggcggacaaggttctcccactccgtcgtccgcttcaagtcccgcagggagc

SEQ ID NO: 393834 - DNA, 675 bp, Oryza sativa
cttgaagaaagaagaaatgcttcagagaaggaagatagctgctacttctcgtgtctcttctgtaccaatggttcagtctccagtctcctcaaaatctggggagatatcaagcagttcaatgagtgcccagtttggcgctgctgtgacatctgctgtaatgggatcacagaaagacaagttccctgcaaattccaatcctgcagtagtgggctatccccctgttgcttctagccctagtgattcaatgcaccggatgcagcagccttcagttgctccttcaaagagaaaatcaaattctgttcccaaaactcaaccgcctgtgagtggtgtagggtctccagccagtgtttcaaacatgcatgctgtactgaatgctagcagcccatcaattgggactgcacctatgggtgatcaagcaatccttgagagatttgtcaaaattgatgccatatctcaaaggtgcaagctgcacagcaagaaggacaaagttgacaatatacctcagagaaaaccgattatcaatgcaagccaagagaaagttgctacagttctctccaattgctttcatgctgaagattttagagatgaaataaaacctctttgtaactctatgttgggtggaacaatgaattcctttaagactagaatactaaactttgtggtcaacaaccgcat

SEQ ID NO: 393835 - DNA, 536 bp, Oryza sativa
tggcgtcaaggaacacagcgatacgccccgcgccggcccggtcggccctggccgtccggcggcgcggcgcgataccacgagttaaatccacacgactctcggcaacggatatctcggctctcgcatcgatgaagaacgtagcgaaatgcgatacctggtgtgaattgcagaatcccgtgaaccatcgagtctttgaacgcaagttgcgcccgaggccatccggccgagggcacgcctgcctgggcgtcacgccaaaagacgctccgcgcgcccccccctatccgggagggcgcggggacgcggtgtctggccccccgcgcctcgcggcgcggtgggccgaagctcgggctgccggcgaagcgtgccgggcacagcgcatggtggacagctcacgctggctctaggccgcagtgcaccccggcgcgcggccggcgcggtggcccctaggacccaacgcaccgagagcgaacgcctcggaccgcgacccaggtcaggcgggactactccgtgagtttagcatataaatagccgaggag

SEQ ID NO: 393836 - DNA, 583 bp, Oryza sativa
ctcctcctcctcccctttcccatccatctctctctctctcctcctcctcgccgccgaccgccgccgtcgccgcgagtcgccttcgccgtccgggtagcagcaggaagagggaggaagggggggcatggcgctacggaggctgctccaggggagcgtcctgccgcggatggcgggcagagccgccgcggcgccgttctcgacggcgtccggggagaccgtccgcgccacgctcttcccaggcgacggcatcgggccggagatcgccgagtcggtcaagcaggtattcaatgttgcaggggtaccaatagaatgggaagaacactatgttggtacagaagttgatcccagaacagagagttttctgacttgggaaagcttggagtcggtgcggagaaacaaagttggcttgaaagggcctatggctacgcctattggaaaaggccaccgttcattgaatcttacactaaggaaagagcttggtctttatgcaaatgttagaccttgcaacagcctcccaggatacaagactcgatatgatgatgtgaacctgtgactatacgggaaataccgagggagaaatagt

SEQ ID NO: 393837 - DNA, 519 bp, Oryza sativa
  unsure (1)..(519): unsure at all n locations
ttttacgcgtgggctcggcgcacacagcagatgggcgaggtctgagcgcatcgtcctcaacaccgagtagaccggccggccgcggcggccatcatcgctcctaccatggccaaggagctcctcgccttccccggtgtcgccgtaccgtacgtgcagcagtttcttgacaagaacgatggcatactgaagtgatgccaaattgccaactgccaagttttcttgtgcttcttttccaggtgccttagctccgggagcacgatccattctcgatgctaggcagttagctttttctcccctttagctcctttttgctttgtcaggcaggggaggcagttttgctttgcctctataagagacagtgcgattattaggctgggcaagtgttaaaccgttgctgggatttggtggatctatcaaagcttggtcgggtggtatctcttgggtggaatagtactactgccaggtactactctaattcttaattattcagngaatagatgatatccttggtttcttttt

SEQ ID NO: 393838 - DNA, 337 bp, Oryza sativa
tgtacagggagagtggcaggtcaaggggatttggctttgtcacgtatggttccgctgaagaggttgagaatgcactttcaaatcttgatggcgctgacatggatggcagacagatccgtgttacagtagcagaatcgaaaccacctaggagacaatattgaaattcgtttagatgccctgaagcctatggatagtccagatatgaatcatactatcgtcatgattgttctatagcatcgagggaattctagtcgtaactttcaccatatggatcaaaagattggtttggtgatgatatatatctcattttggtttaagcttttgaacccactttttt

SEQ ID NO: 393839 - DNA, 493 bp, Oryza sativa
agcctctctgcttctctcttaaaccctctctcgcctgctacagaaaaaatcccctttctcgacccctcttcctcctcgattccggcggactcgtcaccggcggcgggaggaagaggggtcgtccccctcccctagtttagtacagtagtcgggctaatctcgttaggtcgggttcttcccgttcttttctcgttggtgcggtatggaagctggagacggcggctgcgacgtggatgcagcttgtgacggcgatggcgacgcggaaacgacccgagacgatggcgacagcgcggatccggtccgcggcggtggcggcggcttggaggcggtccacggaggcggtagctgctccgatgcggttcacggcggcgacttggttgccgtcccccgaggcggcggctgtgcagttgcgacccgcggtcgaggcggcggctgcggctgcgcggctgctgccctgggcggcggcggctgcacggatgctgctcgcggcggc

SEQ ID NO: 393840 - DNA, 793 bp, Oryza sativa
tttttatctggagctcttcgtggccatcagcacccacgcctaaggtccggttttctgttagaacgacaaggtgatggtgtttggggtgttccgttgtcaactaggagcagggaaggaagaagattaattgagatccggaacgcgcttgaaatgattcacagaggggaaaatgtaagatttgagtccattttctgtggtggagtcgacattcatgacagacacaggggatatgcgccttgacatagacaacatgtcttatgaggagctattggcactggaagaaagaataggcaatgttagcactggcctcagtgaggaagaaagtgacgaaagctcctaaaagcaaaggaaattctcatcatggaggttggaagcatctgtggaagaagagccatgctgtatctgccaggaagagtatgttgatggggatgatctcgggacactggactgtggacatgacttccatgttggatgcgtcaggcaatggctggttgtgaagaacccctgtcccatatgcaaaaatactgctctgaagtcttagaaaaagcacagggctgtaaacactgcgtgcttgttcgatcgcaagatcgtttagtgattcatattaccgtgccgttttttgattagaaattttttttgccattgacctacaaatttgattaaaaaaaaaggtaaaagaactggtccctgcaaactgccccctcctgcagtaaataatccctggaatctgtcgctctgcattcaactgaatatttatggctggtatattggatgatggctcaatatttttttc

SEQ ID NO: 393841 - DNA, 452 bp, Oryza sativa
cttcttaatgaacccgctgttgagccatctacaaaccagacatatggctcaatgttgaaaaatctaacattcatcaagactttttgcatctggaatacttgtccctaagaactatatctggccttgtaacacaagacaattatctgcagcccagcacatcggtcggtggtgatgctcataaagcaggactagaagtttatgccgctgattttgcaaatgactttttgctcagctacaactacagctatgatccattaacagaatatcttaacttcattgataatggtgccttctctgttgacggtgtattgactgatttccctattaccccttcagaggccattggttgctttagtaacctcaacaacagcaagacagacaatgcgaaacctctcatcatctcccacaatggtgctagtggcgactacccaaattgcactgacctagcttat

SEQ ID NO: 393842 - DNA, 360 bp, Oryza sativa
tccgcctcccgctcgttgccttcgccgccgcctcacgccgccgtgattcgagttaggccctttttttttttttgctctgaccagacttgccggcgaaggaaccaccggcgggcaccgcctctcctcggcaatcgttgccggggataaagtggggtcgttaagggagcggaaggcttgggggtttgggattatagatcgaggaagatgaagcaatccatatcgactatcatcttggtatctactcacgctgctgctgctaactataggatcatttcgctactgcctctatctgacccgactctttaaggtttttgcctcgtcgataatgaacttgagtacactcagaagcttgcctattag

SEQ ID NO: 393843 - DNA, 510 bp, Oryza sativa
tcctgatccaactcacgaattggggagcacacaacaaaattccgatccaaccctaagcccgatccgccctagcacgatcccctcccccctccccgtctccgatccccctcctccacctcagatctccggcgagccgatcgaatcggcggctgcggcggcggcggcggcgcgatgtcggggcagacgcagcgcctgaacgtggtgccgacggtgacgatgctcggggtcatgaaggcccggctcgtcggcgccacccgcggccacgcgctcctcaagaagaagtcggacgcgctcaccgtgcagttccgcgccatcctcaagaagatcgtcgccgccaaggagtccatgggggaggccatgagggcgtcctccttctccctcgccgaggccaagtacgtcgccggcgacggcgtccgccacgtcgtcctcagtccgtccgctccgactacctccgcgtccgctcccaccaggagaacgtcgccggtgtcaagctccccaagttcacccact

SEQ ID NO: 393844 - DNA, 407 bp, Oryza sativa
gtagagtgcggtctcctctcctccctccctgctcgcgctctcagtctcccccatccccaatcaccttactagcttagtagctttgtgaatcaatcaaggccagggtttgttcagatcatccttccctcccatttgcccatgccttggctttgatccgaccaggcatggagggcggtggcacgaggacgcgccgtcgcgccgtcaccgcgagccctggacgcaacatggtctgggtcgagccaccgggcaagactcatcacctgcgctcgccgcccccgcccccttccccgtcctcctcaaagagggtggccgtcgtctactacctctgccgcaatcgccatcttgaacacccccactttattgaggtgccactcgcctcaccggacggcctttacctgcgagatgtg

SEQ ID NO: 393845 - DNA, 660 bp, Oryza sativa
  unsure (1)..(660): unsure at all n locations
nttnttatgtggaggcctacctcaacaaccctgatgtgcaaaaggcgcngcacgcaaacattcaccaggcttgatcacccgtggtccgcttgcagtggagtcttgagacgctgggtcgacngcgcttcaacggttctgcccattatcaaggagctcctgaagaacaacatcagagtctgggtgtacagtggagacactgatgggagagtncctgtcacttccagcagatactctgtnaaccagctcaaccttccagttgctgctaaatggagaccatggtttagcaacactcagggtgttggagacgttggtggatacattgtgcagtacaaggggaacctcagccttgtaaccgtgagaggagcaggccatgaagtccccagctaccagccacagcgagcgcttgtgcttgtccagtatttccttgaaggcaaaacgctacctgattgcgaaaaatgtggagaggcttagttataaaaaaaaaacttaacttatgtttacaaatataagtagcataatgtgccatgaccacaagtcgcttttttcccatcgctgcccccattctagatagtgcaagaaagaagcaaaatgaaatgatattaagaagtactcaaatatagaaaccattgccccctgtatttagcaaaaaaaaaaaaaaaa

SEQ ID NO: 393846 - DNA, 656 bp, Oryza sativa
cttccttccttcccttggtggtggtggtggagactggagagcggaggcgaaaaaaagaaacgaatcgaatctctcgtccctcctcctcctcgatctccttcctctcaattccatccatcgtctagtcttcttcccaaacccaacaactccatcttcttctttgcttcgcccttgatttgtgtgctgcgtgaacaaggcctgtctagagggcagccatggccactgtttctgacatcggcctctccgcggctatcaacgtctcgatggccgttgcattcttgctggtctttgcttttctacgattacagcccatcaacgatagggtttactttccaaaatggtacctcagaggaatgagagacagccctgtttcctctggtgctgcagtgcaaaaggttgtcaatctaaacatgagatcatacttgacatttttaagctggatgccggctgctctcaagatgccagaggatgagttgatcaatcatgcaggccttgattccgctgtctatctacggatatacctaacagggatcaagatattcgttccaatatccaatttagcttcgcttgttctgttcctgtgaactggacaaatgacaccctagacagcatgaaggtagtccacagtaaaatggacaaactttaatatcaaacat

SEQ ID NO: 393847 - DNA, 765 bp, Oryza sativa
tggacgcgtgggctggcaataggagttgctgggttgtgcaaggcgctgcatagcagcttggtgataccaccagtttctcagaagaagttactttcgaactcagatagactttattacactggaggcctgaaaaatcttggcaacaattgctttcttaatgttatcctgcaggcacttgctagctgtgacgggtttgtttcctctctagataatttgcttggaagtgaggatgtgctacctgaggaaaagtccgaaaaaatgcctcttatttttgctctaagttctcttataaaagacttgagcgtagttcgagacaaaaggactgaactgagtccacacagagtaatggatgctttgagcttctacgtcggccactttaatttgacaagagagcaggatgcttcggaagcctttcatcatcttttgacctcactgagggatgaattttcccgttgttatgtaccaaatagggagttctctggcagacatcaccatgtttccttccaaagtatatagtcaaagggaagctgtcattggacttcgaaaatttctactgcttgcctctctcacctgtggctactataaatggagatattatcaatggatgtagtttggtggattgccttgagcactatacggcgttggagcatcttgacaactatcgttgtgatcattgttggcacaatgttgctgccaaatattttgtctcttaaaatccgaggtgatgaggaaaaaattaacaaactacacacctgtgtcgactat

SEQ ID NO: 393848 - DNA, 544 bp, Oryza sativa
ctccctccttgcttatcaacacgtacgttgcgtttcttggcaatgcgtgctgcaccgacgacgatgtggcgttcgccggcggcgccggtgtgtctcctcgtcgccgccgttctcctgtcggcggtggcggcggcgacggcgggggaggagtacgtgaagtacaaggacccaaagaagccgatcggcgagcgcgtcgacgacctcctcagccggatgacgctcgcggagaagatcggccagatgtcgcagatcgagcgcgccaacgcgacctccgccgttatcgagaagtacttcgtcgggagcgtgctgagcggcggcgggagcgtgccgtcggagaaggcgacggcgaaggagtggcagcagatggtggccaagatgcagaaggcggcgctcaagacgcgcctcggcatcccgatcatctacgggcatcgacgccgtgcacggccacaacaacgtccacaacgccaccatcttcccccacaacgtcggcctcggcgccacccgcgaccccaagctcgtcaagcggatcggccagtccaccgcc

SEQ ID NO: 393849 - DNA, 486 bp, Oryza sativa
  unsure (1)..(486): unsure at all n locations
cacaggaggtctcgccgggcggtgaaccaccccagcggcgacggcggcagcaccagcagcatcatgggcagcattgcgtcgtcgatcgggaagatgggcagacggcgaaccgacagcagcgaacacgtcgacgtcgacaagccctagcacgcaactcatcggatcgagtcagagtggacacgatcatcctggtacaagccattgtcgtcgtcgtcgtagtcttcttcaaccgatcggcaaatgagctactattttttgtagattattactattattttttcctcaagaaaatgagctattccatctgtgtagatttgagccatgctgtattacgctgtgtaaatccaaataagcagtccttgcatgcttggtagcccccagcacttccagtggagttcttgaaaatttgtaaatgccaggttcagagatttggaccgatatgataatgagaacccnnnnnnnnnnnnnnnnnnnnnnnnnnnnnnn

SEQ ID NO: 393850 - DNA, 780 bp, Oryza sativa
tttcgcacgcaaacgccggtagcgaggagaaggattgcttcttctttttttttttgtgtgtgtgctgcgttcttgggtttcttggcaatggtgattggggccgagatcaaggacgagatggaggaggcgccgccgctgctgctcgacgaggccgcgcgccctcgccgcgtcgcgctcttcgtcgagccgtctccgttcgcttacatctctgggtacaagaaccggtttcagaacttcatcaagcacttgcgcgaaatgggggatgaggtgatctgttgtgaccaaccatgagggggttccccaagaattccatggtgccaaggttattggttcatggagctttccctgtccaatgtatggaaaagttcctctctcgctggcactcagtcctaggattatttcggaggttgcaaagttcaagcctgacatcattcatgcatcctcacctggaattatggtttttggggcacttgctattgctaaactgctcggtgtccctctagtgatgtcctatcacacccatgtcccagtatacattccaagatatacatttagctggcttgtagagccaatgtggcaagtcataaggttccttcatagagctgctgatctaacattagtgccatctgttgctatcagcaaagattttgaaactgcccaatgttatatcagctaatagaatacgcctttggaacaaaggtgttgattcagccagtttccatcccaagttccgcagtcacgaaatgcgagttagactaaggacgctttgggcgtgaaaag

SEQ ID NO: 393851 - DNA, 475 bp, Oryza sativa
ttttgaaggcggcggttctagggatgagactcggtggccttcctcatggcgtgcgctgccccgtactccggcgtgaagcgtggagggcggatgggcgcagctatcaggaggccactacggcgaggtcgtcaacatcaactttcgttgctacccggttctactgcaacacctcgaagaatggcgaggcagcgacatcggcgacccccatctccgctttctgatggggcggagcccctcccggggttgcaggtccgatacagacggagtatggcacctcccaggggttgagcagccagcattggtagccatcggcgttgagggtgcagcagaccggcgccgtcgttcgaccccgctagcgacctccgacgagttccaacggcaaggaggtgccctctcacatcatcccagatccgattgcccactgttaccgacgtggtggcaggccttcttgggagggaaggagttaggacgttga

SEQ ID NO: 393852 - DNA, 608 bp, Oryza sativa
gtcttcttgtggctacatttggtttagcaactgcacagaagctgtttgtaaagatgctatggtgtgtttttcgagcgccaatgtcattctttgatactacaccatctggtcgaattttgaaccgagtttctgtagatcaaagtgtcgtggaccttgatatagcattcagacttggtggatttgcatcaacaacaattcaactacttggaattgttgctgtcatgagcaaagtcacatggcaagttttgattcttatagttcctatggctgttgcatgcatgtggatgcagagatattatattgcttcatcaaggggaattgactaggatcttaagcgtacagaagtcgccggtgatccatttgtttagtgagtcaattgctggtgctgctacaatcagagggtttgggtcaagagaaacgattcatgaaaagaaatctttaccttcttgactggtttgctcggcctcttttttccagcctggcagctattgaatggctgtgcctgcgaatggaattgctctcgacctttgtcttcgctttttgcatggcgatactagtgagcttccctcctgggcacaatttgaacccaagtatggctgggcttgctg

SEQ ID NO: 393853 - DNA, 449 bp, Oryza sativa
gctataacagcttaggctttagctcgcctcgcctccaagcaaaatccccatttccttctcctctccaaaccctagcaaaggctatctctctcttcgccgccatggaggatgacgacgcggggggcggaggcggaggcggcgaggcgtccccgccgcacgcgggctccgccgcggcgatggcgggggcggggagggacatcgcggcgtcgccgacgagctcgcggtcggtgacgcagacggtgaacgggtcgcacaggttcgtgatccaggggtactcgctggcgaaggggatgggggtgtgggaagcacatcgcgagcgagacgttcacggtgggagggtaccagtgggcgatctacttttaccccgacggggtgaaccccgaggacaacttcgtctacgtcttcgttttatcgcgcttgcctcctagggcacccgcttccgggccctt

SEQ ID NO: 393854 - DNA, 530 bp, Oryza sativa
cgatcgattcccatcgccccccaaatccccatccggttccaagccctaaacctcccgagtcggtcgaggcggtgctcgatccggccgttgcatctccggattcgagcggggggcgttgccgcggtgcccggatccggaggaatcgcgccgcggcgggttttctagggttccacaccgtcgcgcgtcccggcgggtgttcatgaaggccatggggtacaataacccctacgattccagcgggactgacgacgatctccctccaacacaaaatagaggattaagagtgcgatcttttagtgcgaatggcagggcatctgttatgccattttcttacattaggccgcacggtgatttggagagtgaaatacatcacgttgagcaagaggcgtacactggtgttcttagagcatttaaagtgcaatctgatgctatatcctgggaaaaagaaagattgatcactgcactcaggaaagaaataagagtctctgatgatgaacacagggaactattaaacaaagttaatgaagatg

SEQ ID NO: 393855 - DNA, 633 bp, Oryza sativa
  unsure (1)..(633): unsure at all n locations
tttgagatgacgtgaacactatgagaagaaagaacttttatctcttgagaagaacaaaaaccttcagatgaggagtccaaacagggcacaaccgcacattcatacaaaccgtatgtgagtatatggacaactctatttgatctgcatggtaaggtgttctttttttcaaagcattcagtacaatgatgactgttgctgcaaagtaggcctattggtagtctagaattttcaatcctgtttccaacaacagtacacagggagatattgaaaggaacaacctgaacctattgttctatccctttgtatataagcttattctgtctccaaaacataacttgccttctgaataatgtttattgaaatatatctctattggaggtacaattcagacactgatttatattattggtcttttcaagaagtatttatattattgtaagttgtggttgttgttaaatctcatgatttcatattgtttacgttgtcatggagcacttttgtgttcaggtgaatatagcagattaaggcgtgaggacagtaactggaataggncttcaattgttcacagaaatgcctgcaagcagcacgcccttttcctcgggtgtatctgacgagcttctgtgctctcatcga

SEQ ID NO: 393856 - DNA, 450 bp, Oryza sativa
catcggcttcggctccgaccgcgacgacacgagacttttcctgcctccgccgccggtctcggcgtggtgccctgaggcggcgaggccgccgtgagatctcagctccgccgcccgtgggaatcgagctccggccccgtgccttttcctgcccccccagctgaaaaatggggaggataccgtctctgaaaaatttcaatgccttcccccatgcggaagaccacttactaaagaagacttactctggtgctatcgtcacgattttcggactaattataatggttacgttatttgcgcacgagctcaaattttatcttaccacctatactgttcatcagatgtctgtagatctgaaacgaggagaaactctgccaattcatataaatatgtcatttccctctctaccatgtgaagtcttgagtgtggatgcaattgacatgtctggcaagcatg

SEQ ID NO: 393857 - DNA, 460 bp, Oryza sativa
gtttcgctccatcgacggcggcgccgcgttcggcttcccggacacccccgaggacgccgcccgcgccggcctcgtcagcggcaaggaccagatcatcgaccggagcatccaggacgcctacatcgccgccattaggagggcgcggagcttcatctacatcgagaaccagtacttcctcgggagctcctactgctggaagcccaacgacggcgtcaagccggaggatgtcggcgcgctccacctcatccccaaggagctctccatgaaggtggtgagcaagatcgaggccggcgagcgcttcaccgtctacgtcgtcgtgccgatgtggccggagggcatccccggagagcggctccgtccaggccatccttgactggcagcgccgcacctatggagatgatgtacaccgacatcgcccacgccatccaggccaagggcattgacgcccaccccaggacta

SEQ ID NO: 393858 - DNA, 512 bp, Oryza sativa
  unsure (1)..(512): unsure at all n locations
gagttatcgttnanagaactgccactganaccttccttgattttcttatattgcatccggagcttaccttgagaatgtaccaataagaaaatgggggctcttcagaaaagacagaagacgagtctcgaccattggaggatggcactggagaagcttctagatcaaggaacttgtattttgcaattggtgatgccaagtgccgggctgctgtccaactcctattgattcaggctgtgatggagatatataacatgtacagagctcggctatcatcacagaacactgtgatcctctttgaggcattgcacactgttgctactcatgctcataaaataaacagtgataatgacctgcgatccaagttgcaggagttgggctcgatgacccaaatgcaggacccacctttgttacgcctggagaacgagtcgtatcagttgtgcttgactatcctgcagaacatttgcttggacagatctcccaatgagaggagtgtagaggtggaaagccacctt

SEQ ID NO: 393859 - DNA, 742 bp, Oryza sativa
ggagagaagaaggaggagaagaagaggagagagaggagctctgagctctgtgctctctcttgctgctgctgctggctgctgctcacttttccttttgggattgttacttattttaatcctgggatctgattttgtccccatattgggaggatcgattatctttctcccctcctctcctctcctctcatcccctctcccctatctatctgtcttgaagaagatcagctggctgctttggtgtcaatcgctgctgcagttcctgttgcctttgccctgcgccccatcaggagcacaccctcagattttgattggtagctgtgttcgtagcaataacagcctggcagagaatctttgagaagttgcagtctattagttcaacaagggaagttgaacgggatcaagtttagtctggataacaaaatattgatgtcctgctggaatcatcaatcaagtcaacgtcaaagctggttcttcatatacatatatgcttttgcagtaatctcgagcaataagtagttataattgcgagatggctacttactattcaagccctggtagcgaaagagactcgcagaccatgtactcaagagacccaggcagtgcatcctatcctatgtcatcagctctagggaacttgctctatctgaacaatccatcttctggaccttatacggagttcagcggcattctgcagcctcagcagaattgcatggagatgcctggcccttggcatgcgtcagca

SEQ ID NO: 393860 - DNA, 489 bp, Oryza sativa
tctttgtcttcttccatctccaaatccttcttccctaatccccctcgccggcgaagcgcggcggcggcggcggcgccttcttccctaatcccctcgccagcggggagccgcagggcggcggaggcgtgcgtcggctgctgctgctgcgcgggcgggggaggtggggagagatgcacagatccgcgggcgccacgatggcgtggaacgtgttcaggttctgcactgcgctgagggggctgggctccatcatgatcctgctcgtcctctccatcgtcggggtcacctactacgcgggcgtggtgtacaactacggccccgcgctcttcgccggcggcgccagcaccctcctcgcgctcgtcgtcctgctcctcttccacttcctgcttgttatgcttttatggagctacttttctgttgtattcaccgaccctggttctgttccaccaaattggaatctcgactttgatgaggagaggggagaaactgccc

SEQ ID NO: 393861 - DNA, 473 bp, Oryza sativa
  unsure (1)..(473): unsure at all n locations
gcggacgngngncgagaccttcgccgtttggcccccgaggtaaccgacggacaccaccaccaccgcgccgcctcgcctcgtgaagctccactagtttctagggtttagcctagccccgaccccgaggaggcccgagatcgcaatggagggcggcggcgagggcgcggagtcagcagctgtcgcctccgcggcggcggcggaggtggaggtgaagaacccgaggtgcttcatggacgtcagcatcggcggcgagattgaggggaggatcgttatagagctctacgcgtcggtggtgccgcggacggcggagaactttccgggcgctctgcaccggggagaagggcgtcggcgccgtcaaccgggaagcacctacactacaaagggatcttgctttccattcgngttatnaaaaggctttaatggtacaaaggttgagatataacttcttggtgattggacanggagggagtaaa

SEQ ID NO: 393862 - DNA, 913 bp, Oryza sativa
  unsure (1)..(913): unsure at all n locations
gtccatcgccatcaccggcgcgaggacctcctcgaagctcgccaaggcggagcgntatcagttcgggttcttcctcctctccgacgaggcgctcttcgaggccatctacgagcagccgccgcccacggatctgaaccccaaccccgagcccaacccgggatgcgtcctctccagcccctacgtcaagccgctcttcagcttcgccgacctcgacggcaacggcaactacaaaaagaccttcccggtcacccaacccgacgagtacagcctcttcttcgccaactgcgcgccggagacggccgtcaccatggaggtccgcaccgacatgtacaacaccaacctggatggctccaaggactacctctccgtcggccaggcccccgtcccggcgatctacgccttcttcacggtctgctaactcgtgttcttggccgtctggctctacgtcaccctctaccgcaaccgcctctcggcgcaccgcatccaccacctcatgtccggcctgctcgcggcgcgcatgctctactgtatctccgcggccgaggaccagcactacatccgcatcgcagggacaccacacgggtgggatgtgatgttctacctgttccagctggtgaagggtgtgatcttgtttgctgtgattgctctgattgggaccggttggtcattcctgaagcccttccttcaggacaaggagaagaaggtcctcatggttgtaatcccattgcaggttgcagctaacattgctgcagctgtggtcggtgagactggtccattcttgcagggatgggtaacatggaaccagatcttcttgtttgttgatgtcgccttgctgcttgtgctgtgctcttcccggttgtgtggtcgatgcggtcgcttgcgggagtcatcnaagacagacggtaaggcggcc

SEQ ID NO: 393863 - DNA, 461 bp, Oryza sativa
atcaggcatcagcagcagcagcagcaacaacatttggccgctctgaagattggtgacggagaatgcccggcggctccctcctcaatagcggcggcatggcggactacggcggcggtggcggcagcggcggcggcctcacgttcccggtcgtggttacctgcctcatggcggcctccggtggcctcatcttcggctacgacattggcatctcaggtggtgtgtcggagatggagtcattcctggagaagttcttcccgggcttgctgaaggggacggcgcacgcgagcaaggacgtgtactgcatctacaacagccaggcgctcacggcgttcacctcgtcgctgtacgcgttcggcatggtcgggacgctggtggcgagccgcgtcacccggcggaccggacggcaggccgtcatgctgatcggggggaacaattttcctggtcggcgcgcttcttaaaac

SEQ ID NO: 393864 - DNA, 804 bp, Oryza sativa
cttatccttctcttctacgtcacaaaagttgacacctttgcccctctcgaaccaaacggatttcagtacaacccaagcaatccaatcccatttattttttcctctcaaaagatcacaattttttcatcttcttctcgtgatatcctttgttttttttcatccatccatccattcccctttgcacggttgggctcgtctcacagttgttaattaacagcaagaacatttttttccttaaatttctatttaatttatactacttgcgagcgagagccacctaatcttggtgcccaccaagcataagcttcatcatcttcttcttctttgaagtcgtcttcttccctcctcctctcgtcgcctcttggaaagagagagagagagagagagagagagagagaggtgatcgagttgcagcaatggcgaggagggcgccatggctcgccgggattggggccgtgccgttcttgatcgtcgtcgtggtggcggtggtgggcgccgccgtgccggcgatggggaggttcgtggtggagaagagcagcgtgagggtgctctcgccggagcacatccgggggcaccacgacgccgccatcggcaacttcggcgtgccggactacggcggcacgctcaccggcgtcgtcgtctaccccgacaagaaggccaccggctgcgccgagttcgacgccaagttcaagtccaagtctcgccgcccggtcatcctcctgctcgaccgtggagagtgctacttcgcgctgaaggcgtggaacgcgcagcaggcggtcgcggcggcggtgctgatcgcggaca

SEQ ID NO: 393865 - DNA, 500 bp, Oryza sativa
cagctcgcggcggcggcggcggcgattggcttgtgctctctccggcgaccgcgcctccttccctccacggtgacctccttccggcgaagcactgcctctctcgtagtctcagttctcctcctacgttctactggacttgtgctgcgaggggagatctaccaatctgggcgtggattggtctgtttcttctggtgacaaaccttaagcttgctcggatttgttcggaacaataccatggaggtgagaccaatggttgctttgcgtgctgccctagttggtggggtcgcagcatttgccaagattggtgcggcgatgaaagctgcacgaggtgagaaggttggtgcagcggctgcagcaatgacagctgcagcaacagctgctgtatctagcaaagacacacacaaagagtgttcgaagactgaaacacaatgatatgggccttacttagtggagaaaccctgtatggaaatgcctcttcagagcttaataatttttttttc

SEQ ID NO: 393866 - DNA, 945 bp, Oryza sativa
  unsure (1)..(945): unsure at all n locations
ttgttcttaccaaccgaagagctggatgcaatcagggagctgttcaatatgttggacaccaaaaagaaggggcacttgacactagaagagctcagaaagggactgcaagtgatagggcacaacatccatgacacagatgtcgatatgctcatggaagctgcagacatagatggaaatggcatactggactgcaaggagtttgtgacagtatccattcacctgaagaaaatccgtagcgaggagcaccttccgaaggtgttcagcttcttcgacaagaacggcagcgggtacatagagattgaagagttgaaagaagccctctccccaagaggtgaccagaagtcgatcgacgacatatttctggatgttgacatagacaaggatgggaagataagctacgaggagtttgagttaatgatgtcagccggaatggactggaggaatgcatcccggcaatactcgagagcagtttacaacactctcagccgcaagatattcaaggaagtgtccctgaagcttgatcacagtggtccacttgttgcagcaggaaaatagcaaccagctgttaaactaagtgatgtggtctctacatgcaatgctcactgcctcactcataactgagaggaatgtgaaaaacatggcgcagttttccttgttcccgtattggtctccacatttttgggatgcaaaggtaccacgggggttcagtgaccctgaatgtttcagatgcagatgtcaaagagcaggcttaaatacaccctttctctttctctgaaaacagagggaaaaaaagaaagaaagagttgtatccntctgactttgaagtcactctccatgtttgttaatgtaaaaccagaggtaggccgaatctcatattgttcaacacaggaggcagcaatgccctgtaccactaaccgctttggtgcaaattnctcccgcggccgc

SEQ ID NO: 393867 - DNA, 770 bp, Oryza sativa
ttttcctctccccttcccacgctccgccgccgccgccgtgattcctcgcattcgtccccactccccagcggcaccgcatccgagccagcgcgacctcctcctcgagccagtggtcgcccgcccgcccgccgtcgctacctcctcctcgagccagcggctggcatagatccggttgtcgatgtggttgcagatcacggacgacgtcggccaccaggtggatgaggtcgagggaggcctggcggcgctgagcaacgatgtccaggtatggtgcttcttctccacctctctccctcatctcaggatgcgtcagatggtgctctccgggccgggatccttctctctcgcgcctcggtgtcgtcgacggcagcgtgaggaggccacggggcacaggatggagcacgcatgggctagcgagaccgcgaggtcgtcttaggtcgtcgtccccgtctcccccgagctgccccgttgtcgcttcttcctgtgagctctgttctttgacccaacaactatttggggtttagtctgtggcaagtgttctgctccaaatcactcgagagattggtgtccatctgtaggtatgattgactgatttatgccctggattgagagagtaatatgtaattaggtgctttcttggtcatttttttcctggggatttaactggcatccgtagatttcttggatttgggattgatttactgcttgattcgaagctctgtttcgttatataatggcgagaacttgaactccatctattaagacattttttt

SEQ ID NO: 393868 - DNA, 274 bp, Oryza sativa
gtctccggccaccgttaaatacctcgccgccgaccaccaccaccgcggcggccctgaccccaccctgcgagccctagccatggacggcgacgacgaggatatgcgcgacgtctcgtccacgtcgtcctcctcctgcggcggaggggagggcgcggggttcgaggaggggatggtgggaagacacctgaatggctatctcaaatggctgtcatcgattctacgctgggggcagtttgcacatgcatgactggtctcagagaggatccagactgag

SEQ ID NO: 393869 - DNA, 562 bp, Oryza sativa
  unsure (1)..(562): unsure at all n locations
ggttnnttggnccnnntgngngnngccccccggggttttttgggggggggggggggaacccgacgggaacacggtggtcggcggcgtggagatggtgagcccccccggcgaggcgtacgtggactcgctgttcgacctggacccgcccggggcgggggaagaggctcggcggaggacgagctggtgacgctctgctccggaggtgatgagcgccggcaacggaacaccagcgccaccgcgctggagtgggccatgatgcaccttcgtcctcgacgccggcgtccaggacaagctctacggcgaggtcgtctccaaggtcggcaccaccgcgcgcatcaccgaggccgacgtcgaggccatgccctacttgcaggcggtggtgaaggagacattccggcgacacccgccgagccacttcgtgctgtcgcacgcggcgacgagggacacggagctcggcgggtaccgcgtgccggcggacgccagcgtggagttctacacggcgtgggtgacggagaacccggcgacgtggccggacccggaggcgtggcgccccgagcggttc

SEQ ID NO: 393870 - DNA, 507 bp, Oryza sativa
tctgagtacaaaataaaatacaacaaagattaatgatgcagttatctttttttacctgaatttgatttttctgaactaagtgttttctttcttctattacctaattttgatgtctgtgttttcacttcacttatgccatctttctcccaataatatttggctaagctacattaggaattctcgattagctgaacctagtctttattctttttcttttgtgaattgaacccatatgtcaagtagtgtatgctatattaactgaaacctttcctgttctatggatgtttataaaatagaatttgttgtttaagattcagatagttttttattttaatttgtacttggatgtcattacaagtaagtgtgcctgacgtagtgtttattgacatttgggaatctgtaaaattgtgttgctttgggcttaagaacaatgggtagatacttcacattataatcatacttcacatttactaatcaaacggttcaatgtaaaagttactcatgctc

SEQ ID NO: 393871 - DNA, 570 bp, Oryza sativa
  unsure (1)..(570): unsure at all n locations
attaccgtacccgcggccggtaccgctcgtcctcggtcgcgaccgcgcgccatggcnntnacgcgtgcgtctgccatgggcgccgctcctcctccgcacctgcgtancatgacctcgttgtngtngtngccgtcgccgcggcggcgctatgtctcgcgtgccgaggtgcgtcggcgggcggcggcggcggcgtcgacgtgctcgatcgggcgaggcggccggagttcgcggcgtggatggcgggcgtcaggtgggccatccacgagcggccagagctggcgttcgaggagatcgagaccagcaggctggtgagggcggagctcgacgccatgggcgtcccgtacaggcacccggtcgccggcacgggcgtcgtcgcgaccgtaggcaccgggcgcccgccgttcgtcgcgctgcgcgccgacatggatgcactcccgatgcaggaggaggttgcagttgggagcacaagagtaaggtggccatgaagatgcacgcctgcggtcacgacgcacacaccaccatgctcctcggtgccgccaggatcctccaggagcgacgccatgagctgca

SEQ ID NO: 393872 - DNA, 634 bp, Oryza sativa
  unsure (1)..(634): unsure at all n locations
ctaccatatgccctgtgttagttgcaactccctctcgagcacgatatttctaaggccggtgcagtctgtctgtctgtgtagtgtagcgaggagtgtgaacgatgtgatgccactgccagtatgccacacacaaccagtaaacctgggataatggttggtgtccggtgttcatgcattgactcgaatagcgagtcttctgttcagacatttgatgctatgactcgaatagcggtgactacacatcatatgccctgtgctaattgcaactcccaaacggaagcaaatctcccgatgggtaatcaccgcttgctgctgctcctcctcctcctgctcgcggtcgttggctctgatcatgggggcgtgctcgccgccgacgagttcacctacaacggcttcggcggtgccaacctcacgctcgacggcatggccgccgtggcgcccaacggcctcctcgtgctcagcaacggcacgaaccagatggccgggcacgcgttccacccgacggccgatccgccttgcggggcggcggcggcgggcggcagggagccgtccagtccttctaggccgctttcgtcttcgccatcgtntccaacttcaangtgctgagcgacaanggcatggcgttcgtgggtcg

SEQ ID NO: 393873 - DNA, 501 bp, Oryza sativa
gtcttgtcgagccgagtcgagccaatctctcttcggggttttctcctctcctctccggggtccgatccccacgtatggcggcggcggcggcatctgcggcggcggcgacggccgcggaggacggggcgcggctgctgcggctggaggagcacgcggcgcacggcggcggcggcgcgtgggagtacctctgcctcgcccgcaggctccgcgcgcgccgcccggagcccgtcctccgcctcggcctcgccctcctcaacgactcctccgcccgctcccgcctcgcctcagaacagtggacgctgtatgagcaggtggcagcggctgccatggattgccagcgtctcgatgtggcaaaggattgtattggagtgctttccaagcagtttcctggcagcatgcgggttggtcgattggaagccctgctggttgaagcaaagggtgaatggactgatgctgaaagggcctatgcgcttatccttgaaaacaatccgttcgatcaga

SEQ ID NO: 393874 - DNA, 508 bp, Oryza sativa
  unsure (1)..(508): unsure at all n locations
gtgctggcgagcttctacaagagcgaccacttcaagaaccggccgtacgacccgtaccacaactacacgagcccgacggcggccatcctctgcgccgacgcgttccagagcatgtacgcgcagatggtgtgcggcctgcgccagcgcaacgacgtgctgcgcctcggcgcctgtgttcgcctccggcctcctccgggccatccagcttcctccagctcaactgggagcagctcgccgaagacatcgagtccggcgagctcacccctcgcgtcaccgacccgtcggtgcgcgaggcttgcgccgccatcctcctcccggaccccgagctcgccaagctcatccgcgccgagtgctccaagggcgactgggccggcatcatcacccgcttttggccgaacaccaagtacctcgacgtcatcntaaccggcgcgatggcgcagtacatcccgaccctggagttctacagcggcgggcttcccatggngtgcaccatgtacgnttaatccga

SEQ ID NO: 393875 - DNA, 558 bp, Oryza sativa
  unsure (1)..(558): unsure at all n locations
gtgcatttagggttatatcgatctaatcatttctcccttgccaattaagtctccatcgatcggtaaatcagctatggaagcgagaaaagccagtnttgtttgctgcatctnactgcttgtnttagcacttggaggtcctgcttctgccacagattattgctacaaagccattggcaagctgatcgtctgcgtgggtcctacgtgcaagttggactgttggcttgaggcgaaatacaacaaaggcagagtcaagcgtcacaagtgcatgaaacatggcatatttgccaaatgttactgcgaaatctgcgttacattttgagggaatcgatcgacaatttgtaaaagtctttggttgatttttagtctcgtcgtaataatctagtacgtcgctttgctagcctgtttctcttaattaattgattagttttggcgagttgctcttggtcggatgtaggatatatgattatttatttccttcctccaatgtatcagttatcactgtactctcattcgagattttttttaaataaagtataagtgataagtgcgcttaataaa

SEQ ID NO: 393876 - DNA, 308 bp, Oryza sativa
tgagattcctcaacctctacatctctctcctccaatcccctcctctctctctatctctcttcccggcctgtgcagagacggaggcaggataggccggcgagcaaaggtactaaagatcacatctcttcaaacctggttaggaagcttacttaatgaagacacaattggattgattttagtcgccaaacccaagccaacatacagactgtgcgcatatggctactcgcattcctggtactgtagcagctagcggggtgtactaccatgatcaatacagatccatgtaagctgaaggattcattgcttgg

SEQ ID NO: 393877 - DNA, 295 bp, Oryza sativa
attgctgcatgctccagaaggagtgcctggtggtaatgttattggtgcaggagcggaaaatctcccggatacccttgccaacaaagaaaataatggtgatggcttcttggcagagaagattcaagagctccgacatgctacaagggatgaaatgcgacgccgtgctctcaagaaaagagaaatgctactccaggggcctaggaatgcgacaagaatttgcttcttgatggaggtagacctattgctgtgtctccgcctataattgaaggcttggatgatggggaagaagaagaga

SEQ ID NO: 393878 - DNA, 682 bp, Oryza sativa
cccatcctcaccgatctctctaaacccaaatacgcaacaaatactcaatcgtcacatcttaaaaaacaaagaaaaaggaagagagagagagagggaaaacaaaaaagaaaagaaaaatcaattcccaaccttgctgctacaaatgcctcaggcttagcaactcgacctcctccccccttctccccttcctcccttctttgacttcccctttcctcctccgtgcgcacgctctcctgattcatacagcatttcgtcggggatgacgtcgacggcgtactcccggccgtcgaagctgccgggcggcggcaacggcagcgaccgcaggctgccgccgcggctgatgaggggcctcaccaccaagatcgagcccaagaagctcttcgcaatctactcccctgtgttcgccagcacagccaacacatccgctctgatgcagaactcgccgccatcctcgccggagacgggacccattccgccccaagaaactgcagctggcgccggaaacaatgacagcactgtggaccccgtcgatctccctgaggacaagtcgctggtggaggcgcagcctcaagaacccgggttcccctcggcggaatctcaggagcctgtgttgccggcggcgctctcgaagaaggaggatgatgccgaaagggcggcggcggcggcggcctctgagataaag

SEQ ID NO: 393879 - DNA, 441 bp, Oryza sativa
tcttcctcccttctttgacttcccctttcctcctccgtgcgcacgctctcctgattcatacagcatttcgtcggggatgacgtcgacggcgtactcccggccgtcgaagctgccgggcggcggcaacggcagcgaccgcaggctgccgccgcggctgatgaggggcctcaccaccaagatcgagcccaagaagctcggcgtcggcctcctcgccggctgctgcctcgcgctcctcacctacgtctcccttgccaagctcttcgcaatctactcccctgtgttcgccagcacagccaacacatccgctctgatgcagaactcgccgccatcctcgccggagacgggacccattccgccccaagaaactgcagctggcgccggaaacaatgacagcactgtggaccccgtcgatcttcctgaggacaagtcgctggtggaggc

SEQ ID NO: 393880 - DNA, 415 bp, Oryza sativa
  unsure (1)..(415): unsure at all n locations
gataattcgacggatttgctgttaaatccgagttaaccaaacagaagccgatcagagaccctaccctccgccgatgcgtcgagaagaagcctccgccgccgccgccgccgccgaggctgggaccccgcgctcaccggacctccacgacctctccgacgactccgactacgccgccgccgccgccgcgtcctccagtcactcggcgatgcggaggatctggtggatcaagggtcgggcgagacggcgaaggtggatgtggtgtacgagaaggagcgtgtgacgatccacccgacgcagtatggntccggccggatcaacgggaagctgcgcctctacttgcagcagggctccctgttcctgagttgggagccaaatgagggagttgattctttatcaagcaattcanctaccatng

SEQ ID NO: 393881 - DNA, 334 bp, Oryza sativa
ctactggcgaccaagccgccgccgtctctcccctcgccatccgcgtcgccgtctaccccgccatccgcgccgccgacgccatccgccggcgccaaccagacgcgccgccgactatccccgacatcttccctggccatccgcgccgacgtctgtacccggcatccgcgccgccgtctcccctcaccatccgccaccgccggccagacgcgccgccgcctctccccgccatccgtgcagccgtcttccccagagcgtcgcggcgctctcctcgctgagcacgcagccgaaggagccgaaagctgcactcgctccaccggcgccgtccctcgccacc

SEQ ID NO: 393882 - DNA, 518 bp, Oryza sativa
  unsure (1)..(518): unsure at all n locations
tctttcnnncaatccccacccggcctagcgagcgagagagagggaagggttgcgacttgcgactcgcgagcggcgagatggcgaaggacgtggagatggcggtgcggaacggagacggcggcggcggcggcggctactacgccacccacccgcacggcggcgccggcggcgaggacgtcgacgacgacggcaagcagcggcgaaccggtaacgtatggacggcgagcgcgcacatcatcacggcggtgatcggctccggcgtgctctctctcgcatgggcaacggcgcagctcggctgggtggtcgggccggtgactctgatgctcttcgccctcatcacgtactacacctctgggctcctcgccgactgctaccgcactggcgatccggtcagcggcaagcgcaactacacctacatggatgccgttgcggtctacttaggtggctggcaggtctggtcctgtgggtgtttccaatatgtcaacctggttgggacagcaatnggtacacaatcacag

SEQ ID NO: 393883 - DNA, 369 bp, Oryza sativa
gggactaaagcgaaaaaattcgcacgaacccgaaaacccttttctccatcgcctccccctccgccgcgccgccacttctctgctctcctcctctcgccgctcccagggtttcgcgcgagatctactctagcattcgggcgttagggttccccgagatggcgagcgagcaggcggcggagagctacacggtggaggagctcgtcgccgtgaacccctacaaccccgacatcctcaacgacctcgagggcttcgtcaacgatcaggtttccaaccaaacatataacttggatgcaaatcttagtcttcttcggctgtgccaggtcgaaccagaaagggtgagtgtgcagattgtatctcgcatattgatta

SEQ ID NO: 393884 - DNA, 434 bp, Oryza sativa
agctaagattgcaattcaaagggcttatgagaaagggttccaggacctccattacgtggagcgatatgaggaccacacaattgctcatgcaattcaggccaaatatgagaagacaaagatatacctctggcctggaccaatgagaagtggaatgtctgctgctggtaggacggttgaaacagtactgtatttagctggtttcagcaacgtcaagtcaaagattattggttcaaggaaccccctgaatgttatcaaagctctcttcatagcattaaacgccattgaaacgccaaaggatgttgagcagaagtttgggcggaccgtggttgagtcatacttattgtagtcatcaatttgtttgtcctgtggagctcgccatctggctgtggcgatggacgtccaaagaaagagctaattgccacactaacgtgtga

SEQ ID NO: 393885 - DNA, 475 bp, Oryza sativa
  unsure (1)..(475): unsure at all n locations
gccgagaaggtcaccgccgctggtcgccgtcgtcgtcgtcgccgccgccgccgccgccgttgtgctcgcgggagctcgaaaccccacgctggtcgcgcggcggaggagggaggtaggagggatgggtcgatctgtttacgtggcggcggccgtcgccctggtgctcacgagctgctccgtgctctgccttggcgcggagggtttcggggcgagggagtgcgaggagctggggttcaccggtctcgccctctgctccgactgcaacgccctcgcggagttcgtcaaggaccaagaattggtggaggacttgccgtaaatgttgtacaagaggattcaagatgattctatcagcaaagctcacattctcttggtgcaattattgaggtgtgcatgagaaagtttgtgttttatccagaaatcgtgggcttcctcgaaggattaaagccgcttccttatgtggaagtcgtantgctat

SEQ ID NO: 393886 - DNA, 432 bp, Oryza sativa
ggctttttcaagctcacagaggaagaaacaaatagggtttgcaagttaacagaagggtactcaggatctgacatgaaaaatcttgtgaaagatgcctcaatgggaccactaagggaagctcttcaacagggtgttggcataacaaagctaaacaaggaggacatgcggccggtgatgctcaaggattttgagactgctttgcaggaggttagaccttctgtttcctcaagtgaactgggaacttatgaagaatggaacaggcaatttgggagcttagcaaattaatttgcagggagatgttgaaaccttgaaggcgctagtatgctttcccatgcaaagcatgcgaaacatatgcttgcgagagtcgacagaggacaatgaagcataccttgtgcagccatatacctctagactacttgtgatcactgatgc

SEQ ID NO: 393887 - DNA, 551 bp, Oryza sativa
  unsure (1)..(551): unsure at all n locations
gcttggcgtaaaagaaaatctccccgtctcgtcggctcctccgctccttgcgccatctcgcggctgaacaggggaggggcggcgatctccatccggcgagcggagcaggggaggggaggggatcttgacaatggttggacctgggcataggaacagtcacgggaagcgtcactctgattatgctgaaaatggaggtggcaagagaaggaatcctggtgatgatacatatgctcctggtccagatgatactgtctaccgctatctttgcccttctagaaaaatagggagcatcattgggaggggtggagaaattgctaagcagatgagggccgacactcaagctaagataaggattggtgagagtgtatctggttgtgatgagagagttatcacaatatttagctcaagcagggaaactaataccctagtagatgcttgagataaggtttgccctctccaagacgctctctttagagttcatgaaaagctatccatagatgatgatattgggattaggaagtatgagggttagctcagtaccntcggttctt

SEQ ID NO: 393888 - DNA, 466 bp, Oryza sativa
  unsure (1)..(466): unsure at all n locations
ctttgttgttggatagtaaaacctagctttgctatagcaacaacaacaacaacaaaaaatctctctcacatggtggggatgcgtggagcttatggctacaatgacaacggcaacgagggtggcgtagtagttggagggggggaggcggaggcggagatcgcggcgatggcggtgctacacaaggtggcggcgccgccggcgcagaagcacggcgagcaagctgaaggcgagggtgaaggagaccttcttccccgacgacccgttccgcgggttcaaggggaagccgctgacgaccaagtgggtcatggcggtgcagtacctgttcccgatcctcgactgggtgccccagctactccttcttccccttctttcaaaatncggaccttcgtcgccgggccttcaaccaattngccaagccttcggcccattccccttcangggggcatttaagcttaaggcggaaact

SEQ ID NO: 393889 - DNA, 509 bp, Oryza sativa
gtctctacctctctctcctcccttctcccacccaccccttctctctctacctctctctcctcccccttgtgggtgtgtgctgtggtggagaggagaaagggaggaagaagaggagagcaagaaccaaaaaccaagagctgctgccaaccctgcacagcctgggcttgtgatcattgattgcccaactattactaccttcctgtttttttcttctcatatagaagaatcccatctatctatcccttatacatatctcttcttctctttggttcttggaaatctcccatctcttctagatttcctttgtggcttcaagggcctccacaccatatcttgattagtagttggttgctcttcttcttgttcttggttttcttgattgcttagggggttggaattttgcgggtcttggtttcttggtctttccccccaatctttgcaagtcttgtagagagtatttgagttgttccttccgcttgttgggggagccatggatgataaggattccg

SEQ ID NO: 393890 - DNA, 614 bp, Oryza sativa
  unsure (1)..(614): unsure at all n locations
ctcttcttcttaccaccctctcccggataagaggcgcaaccaaagcccccaccctcgcccaaaacccccacgagccgcggccatggcgaccaccaccaccacccccgcctcctctctcaccgccccgctcctccgcccgagctcgaacgcgaaccccgccccgagatctctgccgctcctcaggagccggaggtgcgctcgggccgtggcgaccgccgccgccgccgctggccacggggccgctcatcagaggagcgggatttggtcgatcagggatgatttggtggtgccgaggtcgccctacttccctgtggagtatgcgtcggggcaggaacgcgggccatcgcccatggtgatggagcggttccagagcgtcgtcagccagctcttccagcacaggattatccggtgtggtggacccgtggaggatgatatggcgaacatcatcgttgcccagctgctatatctcgatgccatcgatcctaacaaggatatcattatgtatgtgaattctcctggaggatcagtgacagctgggatggccatattcgacacgatgaagcatatcagacctgatgtttccacagtttgtattggactngctgaagtatggg

SEQ ID NO: 393891 - DNA, 459 bp, Oryza sativa
gttttatactgttgttgtcctctcgtggccattaggagagggcctcctgatgctgaaatgtgagtgagagctttgctttgcttgcttgctggctggctggctggctagctgggggttggcttcccctcatcctcgtgcatcatccactgtgctcggctcagctgtctgccctgttcttgctttggtggttggacggttagcatcttcctcctcaagctgagatccttcttgacgccattggaggggtcgctgtcgcctgcgtccttaagcctccctgcttttctttttctctctctctctcctcggcgagggagacgacgacgacggtggcggcggcgatgctgagcttcaagcagagccacgaggggttcggccatgtcgccgccgctggagctggaccgcagcagcagcagcagccgtggtgggcggggtcgcagctgctgtacggggaggcgtcgc

SEQ ID NO: 393892 - DNA, 445 bp, Oryza sativa
tttggttaccgtgatggaaatccaagagtcacggcaggggttacaagggacgtatgcgtgttagctagaatgatggctgctaacttatactatgcacagatagaggatctgatgtttgagctatctatgtggcgctgtagtgatgaactacgtgtaaaagctgatcagttacaccgttgcgcaaagaaaaacacaacaaagcactatatagagttctggaaacaagttcctccgagtgaaccctatcgtgtaatactgagcaatgtcagagataagttgtacaatacacgcgagcgagcacgccatttattagccagtggattttctgaaattcctgacgaagcaacattcactgatgttgagcagtccttggagcctcttgagctcttgtacaggtatctctgtgcctgtggtgataattctattgcagatatgcaatctttat

SEQ ID NO: 393893 - DNA, 562 bp, Oryza sativa
atccgataatagtcttacgaactgctgggaggctagggttcccggcggctccccttgcgccaccgcgccgcggccgtcttctcgccgccgacgctgagacaggccgcgccgccgctcctctccacgcgccggtccggtccggtccgtcgccgttcggtgctccgagctcgctcaaccagcggcgatggcgggcggcgacagggagagggatgtcgaggaggagacgaggaaccagatgatgcagaatctcttcggcgaccagtcggaggaggaggaggaggacgacgacgaggccgtcgatttcgtcgacgaggacgaccacccgcatccgcatcagcagcagcagcagcttcgccaccaggtggtggatgacgacgacgacgacgacgcccacgcccgctccggctaccactcggaagaagtggaaggtgaggctgataatggaggggaaggtgaagcggaaggagaaggtgaaagtgaggggcaagttgggatggaagaagaaagtgaagctgaagctcatcgtgctgatctttgatcaagagaaagtgatggggaaaag

SEQ ID NO: 393894 - DNA, 452 bp, Oryza sativa
  unsure (1)..(452): unsure at all n locations
ttgaaaaccaaaaccatttcccccatttcctcccctcccctaccctaccatggacttctccggcggcagggcggcggcggcgtcgcgtcggggagggtgcaggcggagcggtggctggagatcgccgggaagctcctcgcggcgcgggacctcgtcgggtgcaagcggttcgcggagcgcgcggtggaggcggacccgctcctccccggcgccgacgagctcctcgccgtcaccgacgtcctcctcgcctcccagtcggtcctcccctcgggccaggccgacccgctcgccgtcctccagctccccccgtccaccaacccggccgaccacgccgccgtctcccgcgcctaccgccgcctcgccctcctcctcaggcaggacaccaacccgcacccgggcgccgacgtcgccctcagcctcgtccacgacgcctatgccatcctctncgatcc

SEQ ID NO: 393895 - DNA, 452 bp, Oryza sativa
cccttccaaaaaaaccaaccccctccgcgatccccgtttggaaataactcccgccgccgtccgccgccgccgccgacgaggaggggtcaccgatgttgtccgaccaggagctggcccggtacgtggagtcgttcgtgcgccaggcggcggccgtcccgggcgccgtggcggcggcggggggcatatcggcggagtccgtggcgcgccagctcggcccccagctcggcctcgacctcacccccaaggcccccctcatccgcgacatcctcctcgccctcttctcccccccgccgcagggggcccccttcacctgcttcgctccctccccctccgcctccgactccgcctccgcctccgccgccggtgctggccacttcttctcccagcagcagcagcagcagcagctgcagacgttcctgacggcgtcgcagcagtaccagcaccgcggcggc

SEQ ID NO: 393896 - DNA, 514 bp, Oryza sativa
cttcgtcaagcgactccaaaacgtgccccatatctaatctggcgtcgcacgcggccggcggcggcagagcagagcatcaggcgcgtgtggatagccggaggacatggccacccacttcacgctcaacaccggagcacgcatcccctcggtgggcctcggcacctacaaggccggcacccgcgtcgtcgccgacgtcggtctccgccgccgtcaaggcaggtgtaccggcacatagactgcgcgccgctgtacaagaacgagcaggagattggtggtgctctgaagaagctcttcgatgatgggggttgtcaagcgggaagacctctttcatcacctccaagatatggtgcagcgacctcgcacctgaagatgtcccactcgcaatggatagtacactgaaagatctgcagctggattacgttgatctgtatctgattcattggccgtttcagatcaagaaaggcacggagctcagtccagagaacttcgtcaagcctgacatacccagcacctg

SEQ ID NO: 393897 - DNA, 504 bp, Oryza sativa
gaaaaaatctctcccgtctccgtatcctccgctccttcgccatctcgcggtcgcggctgaacaggggagggggaggggcgccgatctccatctggcgaggagagcagggcaggggaggggatcctgatgggtggtgcccccaaagtttgggggttcaactgaaaccccatgcccccccatgtcccaagttggatccgccggtgagggatccaattccatggcggctgctcctcctcctcgcctcctcctcctcgtcgtcctcctcctcgtgccagtctccaacgccatctactgcgaggaggatgattgctatgatcttctaggagtcaagcaggacgcgaacgtatcggagatcaagaaagcctactacaagctctctctcaaacaccatccggataagaatcctgatccggagtcacggaagctgtttgtcaagattgccaatgcttacgagattctaaaagacgaatcaactagggggcaatatgactatgctattgcaca

SEQ ID NO: 393898 - DNA, 541 bp, Oryza sativa
  unsure (1)..(541): unsure at all n locations
ctcatctcctctctctcttctacctcacttcaccaattccttctcctcccatctcccaatcccccaccgcggcgcccaatgcagcacaaaccctagccctccctccccttgatctcgcgcgagcatggggaactgctgccgctcgccggccgccgcggcgcgggaggacgtcaagtcgtctcacttccccgcatcggccgggaagaagaagccccaccaagcgcggaacggcggcgtggggggaggcggcggcgggggcggcggcggcggaggaggaggaggagcggggcagaagcggctccccgtgctcggggaggaagggtgcgagctgatccgagggatcgacgacaagtacgcgctggaccgggagctcgggcggggggagttcggggtgacgtacctgtgcatggatcgggacaccaaggagctgctcgcctgcaagtccatctccaagcggaagctgaggacggcggtcgacgtggaggacgtgcgccgggaggtcgccatcatgcgccacctacncagagcgccagcatcgtgt

SEQ ID NO: 393899 - DNA, 563 bp, Oryza sativa
cctctcccgacgagggtgggtggggtggggtggggtgggggttcctggtcctccacagtccagggagctgagccgcgccgccgccgcagccttatgacagacaggaatggtccgcttgcactgggcaagcatatttcaaggagaatgtgtgtggcaaactgctattgcaaggaactggccatcagctggtttacggaaacgctggcctgggccaattcccacaggttctgctagaaggagattccaagcattatacgtcagccagaaccttgtctcatctggtggggatattgatgaacttgctggccacacttatctctattcgaaagaacagcttgagcgcccagttgtttgctccttccagcatactccatgggcaccatcaatcgatcaagttcatttgcttggttggtagggacaggagaaaaggcacatgaacttgcttcaacgatatggcttgcagttattgacaacttggaagaaaaccagctaactttctagctgataaaacacctttctcaagaaggagactggttccttacattcccatactgcagatcata

SEQ ID NO: 393900 - DNA, 470 bp, Oryza sativa
  unsure (1)..(470): unsure at all n locations
tcggtttaccacccacctctctccctcccctcccctccccaaacccaacccgagccgaggccggaatttcctttttggtgcgacgacgacgaggtgagggtgagccaaccgccggatcgcgccgccatgtcgctcgacgagctttccgcacaagaagctggcatcctcggagggaattcggttcgcgcggtcggattccaggttccggagccttagcccagcgcccatcccaatcccaactgccccaagcttcagatcattggtcgacccggtttctgatgagagagtaaaccatgatactgtgacctcacatgaaagtgaaattgggtctgggtccatctccacagttagctcaacagttagttcagtagaatcagagaaagcagcttatgaattccttgctcaaactcctatcaagtcaaccgatgcaaccttgttgagttttnagaagtatgagactngtgcaaaag

SEQ ID NO: 393901 - DNA, 391 bp, Oryza sativa
tcgggtgggactacccgctgagtttaagcatagaaagatgtggtggagagtttggaggctatggcgctgaattactcgtcgtgctcgctcaccagctcgttcctgatgaacgaggactgcgctggcatgatgtgtgggtgcgggtgctggtcggaggaggcctcgccgctgtcatccggtggggtgaactccctgtggtgggatgagctggagtttgagctggagctggaagaggaagaggagttcgaccctgtggacctcttgcctaccgaccccttcggcatgaacctggagaccacgttcaccgcggcgatcgccagttgcattgaggacctcacagtcatgtccagtgctgggcgttttggagacagccccgatgaatgctgttttt

SEQ ID NO: 393902 - DNA, 506 bp, Oryza sativa
  unsure (1)..(506): unsure at all n locations
catatgcttcgaagtttagcccatccccgatcgcggcagcatcatgttacaagaattcttgctcatatcgccgtgcaacgtctgaagaggtgttcaatccggacgaacaagatgcagcagagccggcaggacgtggacgagcatgtcgccgagctccgcggcgagctgcgcaaggcgcgcgaggagcgagaccgcgcgtaccgcgtcctggaggtgagcgagtggaaggcgctggcgtcggccaacgaccgcaccaccatagagacgctcgaggcggagctcgacgcgtccagggagtccgagaagcggatgctcgagtccctggcgatgcagacgaagcagctcgagatgaccaagatcgagctcgaggaggccaggctggagaacgcgtcgctgcgtgagaccatccagaggctcgaggccttagcggtgcccgtcgcgacgacgccgaagggaagtacgatcgcgactaccgagggttcacgcnagctgccgatgggcttgtg

SEQ ID NO: 393903 - DNA, 829 bp, Oryza sativa
ggaaaatctcgcgtctcgtctcccctccttgcgccatctcgcggctgacagggtaggggcgccgatctccatctggcgagcagagcagagcaggcgaggggaggggatcctggtgcataattcttgaatccattttaagtgcagcaattctgagtaccaaaaaatccattcaaaatggtggttcttgctgcttccatcatttcaaagtccgggaaagcacttgtttcaagacagtctgttgacatgtctcgcataaggattgaaggattacttgcagctttccccaaactggttgggaactgggaagcagcacacttatgttgagactgaaaatgttcgctatgtttatcagccaatagaaggcctgtacttgctacttatcactaacaagcagagcaatattcttgaagatctgggacaccttgaggctgctctctaagcttgtgcctgaatattctccctctcttgatgaggagggtgtttgtaaaacagcatttgagcttatatttgccttcgatgaggccatctgtcttggaaataaggaaaacgtaacagtccaacaagtcaaacaatattgtgagatggagagccatgaagagaaggcgcacaagctgatgatgcaaagcaaaatcaatgaaacaagggatgtgatgaagaagaaagccagtgagcttgataagatgaagatggaaagaggaaaacttgacaaaggaggatactcggcaatatcaggtcccagggtagttgaaaaagcatttggtgacatgagcattactggtagtggatttggagtggttctggataggtggactgagcatggatatggact

SEQ ID NO: 393904 - DNA, 463 bp, Oryza sativa
  unsure (1)..(463): unsure at all n locations
gggaacgtgcnagatncnatgccattctgacaggcgctcgagatcccgcggctgcctccggcgagcgatctccctgcgtctcctcggtctcctcgcgagctcgccgccggccgcctgagccgatctccatcccgcgagcagcagcgccggcgtccccgctgcttcttccgccgcatccttcgctcgctcgctggcgcataattcctgaatccattttaagtgcagtaattctgagtaccaaaaaagccctcaaaatggtggttcttgctgcttccatcatttcaaagtccgggaaagcacttgtttcaagacagtttgttgacatgtctcgcataagggattgaaggattacttgcagctttccccaaactggttgggaactggggaagcagcacacttatgttgaggactgaaaatgttcgtatgttatcagccatagaagggcctgtaattgtaattatac

SEQ ID NO: 393905 - DNA, 430 bp, Oryza sativa
tcgctgtgcacgcacgcacgcagcttcctcggccttggaggggtgaaggggggagggaggaggagcacaacgaaggatcttggggctcgggttggtcggggtatggatcggctcggcgcgggtgtcctaatgccgagctttcttggcaagatccatggccgccgcgcgagaaccctcgtctcgtagacagccctaaagccctcgcggcaggatggtcggagcgcgtaggcaaatcgacggggaggaatcaagaatcggggcggggccttcgatcgctgcagaaaccgccatggacagctccagcaagctcgcgcgaatgcgcctgtgaaagaagacttgtagttgcagagcttgcaaaaccagattgtggaggagaagcagcgatgccaccgatcccatctctgtggatccgcgtcttcttcttctggct

SEQ ID NO: 393906 - DNA, 504 bp, Oryza sativa
ctttttgcttctgcaattctctctcctcccaaagcgcgagctcgtcggaagctagggcctcccgctccgatcagatcgccgcgccgccgctgctccagggtacctcaaaaatagaagatgcaaggggggagaggcaggagggatggtttcttcggttttggggacccctttccaggtttgggtagctttggacaaccagggagcctaatgtcaagtttctttggtggggcaaatccctttgatgatcctttcttcacaaaccctttcgggtggctatgatgggggacctagctttgttaacaggccaaagcatgtttgggagctttgggtcaagcatgtttgggcctcatggaaatgtcaatggactgagcaatactggaggcttccttcagcaagctcctgaaccaagcaggccgagagggccaataatccaggagctatcttcagatgatgaggatggcgcagatgtgaataaagaagatgagaagaggaatgataacccta

SEQ ID NO: 393907 - DNA, 510 bp, Oryza sativa
atctttttccaagattgctcgatcccctcgtgtccctctctcccaacaacactgcgccacagacacaaatcacactcagatacgaaagataagtacagagagagagagagggcacggattatacactgcacacaagcatatatatatatatatcgattagccatccgtgctgatctgaagagtatcatcggtagagagttttacagagttgtttggacaaggagacacacacatggctttcttgctcttctttggctttgtgacagctgcagtgctgtgcttcgtcgtcccggcgttcttgctgctctgcacgagcgtgcagaggaggagagatgttggacagggtggagggcgagattggcagaagaagaagaagctcaggcttcctccgggatccatgggctggccgtacgtaggcgagacgctccagctctactcccaggaccccaacgtcttcttcgcctccaagcagaagaggtactgcgagatattaagacaaatttgtggggg

SEQ ID NO: 393908 - DNA, 775 bp, Oryza sativa
tccacgcgtccgcccacgcgtccgcaacagtgcattaattgatagggagtggaaagttgctgaggtgtgccagaaactagagcacagcttagagattcttggtgtcagtgctatagaggaccgcctccaggctggtgtaccagaaactattgaaatactgaggcagtcaggaataaacttttggatgttaactggcgataaacaaagcactgctattcaaatcgcgcttttgtgcaatctcatttcttcagagcccaaggggcaactcttgtatatcaatggaagaactgtggatgaagttgctagaagcttggaaagagttctacttactatgcggataactacttctgaacctaaggagctagcttttgttgtggatggttgggctcttgaaatcatcctgtcacgctacaatgaagcctttactgaattagcagctctttcaaaaacagcaatatgctgccgggttacaccgtctcagatagcacagcttggtaagcttctaaaatcatgtgactatcgaactttggctattggagatgggggaatgatgtcaggatgatacaacaggctgatattggtgtaggaattagtggcagagaaggtcttcaagcagcaagggctgctgactatagcgttggcaagttcagatttttgaaaaggctgattcttgtccatgggcgatactcatacaaccgtacagcttttctttctcagtattctttctacaagtcattgttaatttgctttatccagatacttttttcttttcttc

SEQ ID NO: 393909 - DNA, 513 bp, Oryza sativa
tgcttccttcgtcctcccctccagccgccgaccgaccgagcgcgatggcggcggcgcggctccggctgctgtccgcggggctcctctcgccggcggtgtccagggcgcggcactcttctcccctgcagggtctccgcgcgctgtccacgctctccactacgctcgggtccggcgcgggggaggacgagatcgagcgcatccgccgcgagttcgaggacgccaagcggaactacctcagcatccccgtcgccatcaaggacatggccaagatgaacccgcaaggcatttatgtgaacaagaacgtcaaactggatgacctgcaagtctatgggatttgactatgactacacgctgtcccactactccgagcacctgcagtgcttgatctacgatctcgccaagaagcacttggtcaatgagttgaagtatcccgagagctgcttgaagtttgagcatgaccacggcttttcccatcaaggggctctattatgaccgataaaaggttgccttttg

SEQ ID NO: 393910 - DNA, 472 bp, Oryza sativa
gtgaaaccctaggcttggttggctccaagcttcgcagccatcgccgcctcggcataaacccttctactccgcagccatcgccgcctcgagctgagcttgagattcgcggggggcgcagcaatggccgggaagaagaggccgccgaccgcgctctccgagcccgaagccgccgccgccgccgaggaggaggaggccgcagccaagacggccccggctgcggaggcgccagcgaagaagaagaagctggccatggagcggaagaagcagcggaaggagattgacaaggagaggcaccgccagtccgctgaatcggacgccgctgccgctaagccgaagcagccggcggaggtggcgccggaggctgcggctgcggctgcggcggcgcccgtggctcctccgcctgtgattccggtggtgtcggggcctgggcttcacatgaacgtgttcagggacctggcttcgcctgaggcgt

SEQ ID NO: 393911 - DNA, 440 bp, Oryza sativa
tcggtggccggcgttcctgtacccgccgccggcgccggcgttcgtggcggcggcgtcggtggcgcagttcgcgttgctggcgaacgccgggctcggggagctccgcggcgagcacatggcctactccaagttctggcaggtcgtcgccgggaagaagaagaacggcggcggcggcggcggcggcgcgctgctgcccagccggcaggggatgctggtggcgtacgtgccggcgttcgtcgccgcggcggcgtcgttcgccgtgcccggcgccgtggtgggcgtgcgcgcccaggtcctcagcgccgcgctcaccgtccactttctcaaacgaattctcgaggtactgttcatccatcagtacagtggaagcatgccactcaacacggcggccaccatctcctccagctacctcgtcatcaccgccaccatgatctacgcgc

SEQ ID NO: 393912 - DNA, 556 bp, Oryza sativa
ctcccctcccaaccatttctcctgggccttgctccgctccacctcccaccaaaccctaaccctaaccctaacgcgcctaccacgcgaggcgcggcggcggcggcgggcaccatgtccgcggcggtgtgcggcaaacgggcctcctccttcttcgaggacctcccccattcgccgtcctccccgccctccaagcgcgcctgcttccgtggaggttcctcgccctcccgcccgctcgccgacccggccctcgtcgcccagatccgcccgcggttcccctccgtcggcctcgaggttattgagaacgcgttggaggaatgtgaaaacgattttgattcagcaataaagttcttgttcaatttgcatgtaggacccacagaatgtaatgtggatcctatttatcaatctccatcaggaatgtctacttgagcttcaagtggctgatgaaggtattttggctggtaatgaagctgctgtacctataggaaatgctccctgcgctgataacttttcatcaagcagcacccagtgggttgagattcttgtgaacgagatgact

SEQ ID NO: 393913 - DNA, 708 bp, Oryza sativa
  unsure (1)..(708): unsure at all n locations
tttcgtttagacacctcatatggaagctctgcgacggggtgctccacatatccaatatttcgcatgctcccaccatctggtaaggagaagaatttcatatattgccacctacatcctcagataagggtgtacgaggcagagccaaagcctgtggttttaggattaggtggaacgattggaaatgagagaatctttttagatgaggacttctctaaacttacagttcgccatcatgctgttgataagacttaccaacatggctccctcattcccaaccagggttatttacctgttgaggcttcagtacttgatgttgaagcatggggccttggtggagaagcaacgagacggcaacaggatatgtacaagaagagggaggatattttctcagagcagcgaagaacagttgatctcaaaacatttggcaattgggaggactctccagagaaaatgatgatggacatgatttctgatccaaatgcagttcgacgggaggaccgttgaatacaattttggactatatgtttattatagctcattatctaaaaaatgtttattatagctgccttagtgccagtacatatctggacatgggaaatggacgatcttgaggtttcatctttcttgtaccttggagatatatagaggagtaggtgcacatatttgctccnnnnnnnnnnnnnnnnnnnnnnnnnnnnnnnnnnnnnn

SEQ ID NO: 393914 - DNA, 508 bp, Oryza sativa
cttctgtctgctactaccatgcattcgaccggcatggagatggaggtggaggtcgccggcgacgacgaggcggtcccggaggcgccggagcggtccgtcgtcctcatctccgccggcgccagccactccgtcgccctgctcagcggcggggtggtgtgctcgtgggggcgcggcgaggacgggcagctggggcacggcgacgcggaggaccggccggtgccgacggtgctgacggcggcgttcgacgacgcgccggggggcgtcgcctccgtcgtcatctgcggcgccgaccacaacaccgcctactccgacgaggagctgcagctctacagctggggatggggcgacttcgggaggctgggtcacggcaactccagcgacgtgttcaacccgcagcccatccaggcgctccagggcgtccggatcacccagatcgcctgcggcgacagccactgcctcgccgtcaccgtcgccggccatgtccacagctggggacgcaatcaaaatg

SEQ ID NO: 393915 - DNA, 515 bp, Oryza sativa
gctctcctctcttctctcgccctcaccgctcgccgaggttgccgtctccttgtctcctccgctccttgcgccgccgccgcgacgagtcgcggggaggggcggcgatctccatctccatctgaggcgaggagagcaggggaggtgaggggatcctggtgaggtttgtgattactggacaatagaaatatttacacaatatggctggcggctctgctgatgcagtgaccaaggagatggaggcgctactcgttggacaaaatccaaatgcggttagtggagaaacatgcgagacctcatcaaaagaaggcaaagttgcagatagcaatggatctcattcttcaaccaccagaagatgatgatgatgaagcgcaaggggatggtccatctcaagatggaggatcagaagctgcaaaaaaaaaaaaaaagaaaagcaaatccaaaaagaagaaaggccctcttcagcagactgatcctccatcaattcccatagacgaacttttcccatcaggagattt

SEQ ID NO: 393916 - DNA, 438 bp, Oryza sativa
gcagttgtgagccagcactgcatcagcatgatgagcagtcgtcttctcaaacgcgcctgcctcctcctcctcgtctcgtcatggctatgctccctctccgacgccaagaggaagacgccaccctcgccgccgccgccgccctcctcctttggcctccccgtccgggcggtgtgcctcggtggctggctcgtcacggagggctggatcctcccctccctcttcgacgccatccctaacaaggacctcctggacggcgcgcagctgcagctcaaggccgtggcggcggacgcgtacctcaccgccgccgaccagggcggcgccgcggcggtcgtcgccaaccggacgcaggcggcaccctccgcctcggagaccttcaagctgtgccggatcaacgagacgacgttcaactttcgggcgtcgagcggtcggttcgtcggc

SEQ ID NO: 393917 - DNA, 476 bp, Oryza sativa
tcggggggcatcgcatctggaggtggaggccaatccgctcgctcgctcgctcgccggcgacccgaatccggccaggagggggggcggctggccggagctagggtgggtgggtggttggccgcaccaccttcctccgcgccgccggagcgtgggcagcggcggcggccggtgggaggaggggaagcatggcgggctccatggtggaccgggcgaccagcgacatgctcatcgggcccgactgggccaagaacatggagatctgcgacatcttgcaaccgcgaccccgggcaatcaaaagatgttgtttaggctctcaagaaaaggattgggcacaaaaatccaaaagtccaaattcttgcgctgactctcttggaaactgcaatcaagaactgcggggatatattccacatgcctgttgcataaagagatgtgttgcatgagatggtgaagaatgtgaaaaaaaagtttgttctgaa

SEQ ID NO: 393918 - DNA, 421 bp, Oryza sativa
  unsure (1)..(421): unsure at all n locations
ctcaagtggtggaggggaagaggagcacaaggagaggcagacggcgataagtcgctcgctccccaaattcgccatgatcggggggggctcccctaccgtacacgccccggaggaagcccaggccccgcccatgctgctgagctcgtgatcctgcgctcctggccacaggctgcgattcggcgttggggtttctggtccgaggcggccatcaagatccgtgcttcttgtcctttggcccgggcggagtggtttctttcttgcacgggacgtcttcgacggaatgcctgtnaggggaattcgctcgctgtgagttnggaggggtngtagctgtgcttgcctgcttggtctggtcatggtggattgagtgcttgggggtggtgggatttngtccctgggcatggccggttcggagaggaccgtn

SEQ ID NO: 393919 - DNA, 924 bp, Oryza sativa
tgtgttgttcatgtcaaagaggttccttttgctcgatcgtccctgaatcatgatgacatatttattctggacacgaagtccaaaattttccagttcaatggctccaattcgtctattcaagagcgtgcaaaggctcttgaagtcgtgcagtacatcaaagatacatttcacgagggcaagtgtgaagttgcagctgttgaggatggcaggttgatggccgatgctgaagctggtgaattttggggtttttttggtggctttgcccctctaccaaggagagcccctgtagaagataatgagaaatatgaagaaactgttttcaaattgctctgttttaaccaaggaaagttggagcctatcaattatgaatccttattgcacgagttgctcaagacaaataagtgttacttgttagattgtggtgtcgggttatttgtttggatgggcagagccacatctttgcaggagaggaagagtgccagtgaagctgctgagaaattgctctctgatgataaccgaacaaaaacacatgtaatcaaagtaattgaggggtttgagacagttatgttcaagtcaaaatttaaagagtggccacagacacctgacttgaaattgtcatctgaggatggaagaggaaaagttgcagctcttctgaaacgccagggcttaaatgttaagggcctgatgaaagctgctcctgcaaaagaagaaccccaagcttacattgattgcactggcagtttgcaggtctggcgcataaatgataaggacaagatacttttgccatctgctgaccaatcaacattttacactggcgattgctacatatttcaatatatgtaccctggagatgacaaggaggagtgtcttattggaagttggtttgggaagaagagcattgaggaggatagggataactgtatt

SEQ ID NO: 393920 - DNA, 549 bp, Oryza sativa
cgaaaagagaaccagagagagagagagagagagagagagagagagaggagtggaagtggatcggggcatcgctgcggcgtcggggctgtgcagatcggaggaggtcatgaacgactaatctccgttcatttattatggacttgcaccagttattaaagtacagattgactggcgctaacgttgtgtacgaaattcctacagagaacaacttgcaaaactctccctggcaagctaacccactgaagtacgagttcagcgattccccatacacccctctctcttcccaatttgagtgtgacaatttgtctgctcttaccaacactccagataaccagagctctacagaaaccatttcagcccaaccaatctccccattggaagcagacagctcatatagacaggcgggtattcttctccaggagaacattcaagtgggagctgatccgttgtatgctacatcaagacataatatgcaacacgccttacgggaggattgagactgttctgatgggcacctgatacagatgatgcgacaacttaggcacccaa

SEQ ID NO: 393921 - DNA, 888 bp, Oryza sativa
  unsure (1)..(888): unsure at all n locations
gtcaaatgccatgaggtatagttatctcagaggcccaggtggccgattcagaaatccatttgaccatggggtgcgtaaaaactgttctgacttcttgctgaaagggtacaatgaggatattgagagggtagaacagacattacaacctgatgaggaattgggaatgattcaaatgacaagaagtgcagtctcacagaatggcgagagcatgtcacttcatgctaatggcacagaccatggttgtgctgatccacaagggaactcaaaatcccatcgtcactcgcacggttcatcacaatgttgcagtcacagtaagagacctgacaagacccccttggggctaggattgggccttggtcgtaacaacccatctagccgctacacacgttcacttccttccattcattccggagagtagtgcttatttgcccttgtgattcttttggagaaggcgagctagatcgtatttcaacttgtaggtgtttattgcacaaccacagctttcttttggctatttcttgcctgcagtatttgtcgccttggatctggtctacatncgacttgtccagggtgtggtatatttggaggcccaatcaaccgactactgaaattgagaatatgaaggagatgcaagttttatgaaggcttcatgaacatccttagcctctcaggaacaccagcgaatgtctgtctaggcgtagcaatattttttgtgcaaaagtgcatctttgtacaatgtctcaacattttgtatgtacaagagggttagctgtccagatactatgatgttttcaagtacagctgtatattggaagaactgtaaatttatatagcgaaaccaaatgctggcaaatgtttgtttctctccnnnnnnnnnnnnnnnnnnnn

SEQ ID NO: 393922 - DNA, 955 bp, Oryza sativa
  unsure (1)..(955): unsure at all n locations
gtatgaccaagtggcaaatatttcttcagatggagcagtccttccaagttcatcgcagttatggaagtatgcttgaaggggaggctgatgagctcaagagagttttccttgaaggaaatccatactttttgggattgaccatgattgtttctctgttccactctctgtttgattttctggctttcaaaaatgatattcagttctggaataagaacaagtccatggaaggtctatcagcaaaatccgtggttctgaactttgtatgccagctgattattttcctctacctgctcgacaatgagacttcatggatgatccttggtagctctggaattggtgtttgcattgaattttggaagattggaaaagcaatgcatgtcgagatcgatagaagtggaaagattcccatgttgaggttccgggaccgtgaatcatatgcacagaataagacaaaggagtatgacgcaattgcaatgaagtatcttacatatgtacttcacttccttgtgttctgtttctccatctattcccttaagtatgagaaacacaagagctggtactcatggatactctcttctctcanaagttgtgtgtacatgtttggtttcatcatgatgtgcccacaactattcatcaactacaagctgaagtctgttgctcatatgccatggangcnaatgactacaagttcctcaacaccataattgatgaccttttcgcatttgtgatcaaaatgccgatnctgcatcntctcncagttttcagagatgatgttatcttcntgatatacctctaccanaaatgggtgtacccanttgacaagaancgtgtccaccantacggcttcggtgggggangaaaacctcaagctcccccnacattggnaanggaacgatccancagctgcatcccancaancccggggtgaagcgganggcgagacgaacccnggaga

SEQ ID NO: 393923 - DNA, 440 bp, Oryza sativa
ctcatttgatttgcaggccaattccagttgagtttctccacgggccacagatatggcttccggcaggatagctctgctctgccttcttggcttgctgctggtagcagcctcaccggctgccattgctgccaaagatgacaaaatcttctaccagattactttcatgtggccgggagcgtactgcgcgcagacgaaggccggatgctgcatgccgaagaccgacgtcgcgccggcgtccgacttctacgtcgccggcttcacggtctacaacgccaccaccaactcttccctgtccagctgcagcaacactccattcgacatgaaccaaattggggatgccacgaggctgatgcagtactggaacaacatcaggtgccccagcaagagcggccagaagggctggaagaacgcgtgggagatgtcggtgtctgctccgacct

SEQ ID NO: 393924 - DNA, 543 bp, Oryza sativa
cgggagagaagcgcacgcacctccgtccctcgtcgggagcgcagaaatggcgaccctctcgatggtctccgtccccatcgccacctcctccctgcccctctccgcccgaggccgcagctcctccgtctccttccccgttcccaagaaagggggtattggtcatggtggcctgcggatcgagtgcattcgtattggtggagtggagatcccgaaccacaagagggtagagtactcactgcagtacatccatggcattgggcggtcacgctcccgtcagatcctcttggacctcaattgtgacaacaaggtcacaaaggacctctccgaaggaggaagtcaatcactctccgtaaggaggcttaccaaagtacatgattgagggagaccttaaacggtttaatcgtgtggcgattgagaggttgaaggagattaggtgttacaggggcatccgccacaagctagggctgccagttcgtggacagaggacgaagaacaattgcaggacgctgaagggaaggagggcttctgttgcgaaagagaagt

SEQ ID NO: 393925 - DNA, 430 bp, Oryza sativa
  unsure (1)..(430): unsure at all n locations
atctatncgtgaccgcagctcattaccccattcgagaaatccttgagaaggaaaagaaggagaaaaatgtggcaaaagcagaaggcaggcctgagcctgcattgtatggtagtgaggacattcgtcctctgaccttagatgatttcaaatctgcccatgagcaggtttgtgcaagcgtttcatctgattcagcaaacatgaatgaacttcttcaatggaacgacctatatggcgagggcggttcgaggaagaagaaagcactgagctacttcatgtgagagcgattccatcataacatgtgagagagattaagaccctgccatattgatattgtacagtcgctataccacccctcttggcaagcgcttcgcgacttggccggccaaaaccagtcgggttttttcctcttctcccttcaggagcagcggcc

SEQ ID NO: 393926 - DNA, 442 bp, Oryza sativa
gacctatccactcctccatgcggcatcgcacctcacttcccagccactacttgccaccaccaccaccacccacaccgaactaacctcgccgtggaaaccaaacccccgcgtccgaaccaccacctcgcctcctccccccctcttcttccagccccaccgcgcgcagcagcggctacgaccacggcacggcgccgcgcggccgtaccatgccgtgaccggccggaacccaccaccgcctcgaccgccgcgcatatgcaccccatggccgtggctgtggccgccgccgtctcatgcccgcgcctcgtccccgggcgtatccccctctccgccgcctccgtcgccgtcgcccgtggccgtggctgcggggtggcggtgagggcgcgtggccaaagcgccgccacgcccgacccggctgccatcctgcggcggtcggcggtcgtga

SEQ ID NO: 393927 - DNA, 1178 bp, Oryza sativa
gctaatgatgatgataaagtgagatatgcacgatttatcttacgtgcatatgttgaagatagcaagaagactaaatggtgtccagctcctgactgtacatgtgcagtggaatttgtcagcgatgggaactatgatgtctcatgcaattgcaaattcagtttttgttggaactgcacggaggaagctcatcgaccagtgaactgtgagactgtttctaggtggatattaaagaatagcgcagaatctgaaaatatgaactggatactggctaattctaagccgtgcccaaaatgcaaacgaccaatagagaaaaaccagggatgcatgcatatgacttgcactccaccttgcaaatttgagttctgctggttatgtctgggttcatgggctgaacatggggagagaactggtggattttacgcttgtaatcgctatgaatcagcaaagaaggagggagtttatgatgagactgaagcaaggagggaaagagccaaaaattcacttgagagatacatgcattactatgagcgctgggcatctaatcagacgtcgaggcagaaggcacaagcagatctgcaaaaggcagaaaaggaacaacttgcaaaattaacagatgtttttggaataccggagacccaactgaagttcataattgaagcttggtcacagattattgaatgcaggcgggtactcaaatgggacatatgcttatggctattatctggacgacaaggtcaagagcgaatttttcgagtacctgcaaggggaagctgagtctgggctggagcgtcttcaccaatgtgctgagaaagacctgcaatcatttttgactgtgagatctgataatactgaacctgcaccatcaattgctgaattcggtgacttccgggtgaagcttgcggggctgacaagtgtgactcggaattattttgagaaccttgttcaagcactggaggctggcttggaggatgtacactctactgcccagggtaccacatcaagcaatgccaccaacatcccctccaagaaagcagtcactaaaggcaaaacaaagaagcagcttcctagaacatcttcggacaactcagatgaaggctggccttgtgagcgctgcacgtttattaacccttcatcggtggatgcatgcagcgtctgcgataagcatagatactagatga

SEQ ID NO: 393928 - DNA, 501 bp, Oryza sativa
gatcattcctttcacgcctctctctcttctctgattgattactactccactacagtactagtccaaggcgggcggagacggcgacggattgcgcgggcgcaagcagcactcaagttcgctagtcctcctcctccttcctgtgtagtggagcgaggcgaggcgagccgacgccatggccgcggcgcagcgctggctccctgggatcctccgccgaggggacgggctcgcgcggcgcctctactcctccgcctcctccctcctcttcgacgacacccaggagcagttcaaggagagcgtgcacaagttcgcgcaggagaccatcgacccgcacgccgccgtcatcgacgccttcaaccatttccccaaggacgtcaacctctggaagctcatgggcgatttcaatctccacgggccttaccgccccagaggagtatggtgggatggggctccgctacatgtaccactgatttccattgaggagatcaagaagggcgtccggtt

SEQ ID NO: 393929 - DNA, 465 bp, Oryza sativa
ggacgttggttgtgggcgtgcgggcggacgccgcgagccggacgctgctcacgtgggcggtcatcaatgtcgccgcccccggcgaccgcatcgtcgccgtccacgtcgtgctcgcctccgcgcccgtggccgccgccaccaccgccgtcgactgcgacaccatgctcgccgtctacgagggcttctgcagtctcaagcagatcaatctaaagctcaagatttgcaaggactcctcggtccgcaaggcgctagttcgtgaggccaacctgtttggggcatccaaggttatcgtcggcatcgccaagaagaagcgcgggatttcgtccctgcactccggcgccaaatactgctccaagaagctgccggccaagtgcgcggtgctcgccgtggacagcggcaagatcgtgttcaggagagaatccaatgtccactcaagcaaggtcttccgggagattcctggatgtg

SEQ ID NO: 393930 - DNA, 923 bp, Oryza sativa
  unsure (1)..(923): unsure at all n locations
tcctcttccccttcctcctcctcctcctcctcctccacgcttccgcaaatttccgatctcctcctcctcctcatccagctcgctcgctcgctcgcggcggagaatccagcccgagcaggctggcttgtgcttgagctagaatctccggccccgtcgcaggctccgtatcaaccaagatataagctccacacggtttattgaacatttgtgccagactattggggtgaacattcagtcaagtcttcaaagtgtttattccaaaacaaatgcaatgaggttgtcatacaaggggcttgttgaaggaatacaacatatatttataggcgatcacctatatttttctgactcatgggcgactgggttataggagcactgatcaacattgtggggagtgttgccataaactttggttccaaccttctgaaattgggccatgatcagagagagaagctttcgacaaccaacaacaatcaaggcaatgacaaatttgttccgaagtcagttatgcattttcaaacttggagaataggcatactgttctttgctgcgggaaactgcctcaacttcatgtccttcgcatatgccgcacagtcacttcttgcagctcttggatcgattcaatttgtgtccaatattgcatttgcttactttgtgttgaacaagaccatttcagtgaaagtcatggtagcaacaacatttattgtatttggcaatatcttcctagtttcctttggtaatcatcaatctccagtttacaccccggagcagctagttgcgaaatacagcaatttagtgtttgttctctattgcatgtcactggtctttgtggttgcattcaatcagtatctctacaggagtggagaaactatcattttggatagtgcgaaacatactggctcacanttgcggacatttgtgccatt

SEQ ID NO: 393931 - DNA, 533 bp, Oryza sativa
aacaaacaacaacgcctatagtctagtagagcctagagagagaaagcgcgaggagaggagaggagatggagcggccggcgccggtgaggaagtcccacacctcgacggccgacctcctcgcctggccgcagcagcagcaccagcccgacggccacgccgcctccaccccctcccccgctcgccgcccccaccagccatcggaggcgctgaggaaggtggtgttcggtggccaggtcacggaggaggaggccgagagcctcaacaagaggaagccatgctccgcgcccaagtggaaggagatgaccgggagcggcatcttcgcggccggcgccgacggggaggcggaggagcccggcagcgccgccgagcccggccgagccgtcccgcgcaattaccagccagctactgtgagccacatttcatttgctgaggatggaagtgttcctcccaaaaagccaacttaagtggctgaggtagcaaagcagcgtgagcttagcggtactctgcaaagtgaagcagacagtaagatgaag

SEQ ID NO: 393932 - DNA, 498 bp, Oryza sativa
  unsure (1)..(498): unsure at all n locations
gtcactttccactccccagttcccagtgaacagagcaggagcagcctccactcctcctctgccactccactccccaccaccactcgcatcaccatccatccatccatctccaacccaagccgaatcacaccaatcgccatcgccatcgccatcgccgtgcgtggtcgccggtgccggcggcggagggggagggggaccaagggaaaagagagaaggtgagctgagctgagctgaggtgaagtggtgctgaggcgagtgactggggggcaatggcagcggcgtgggtgctggccgcggcggcggcgttggcgctgtgggcggcggcggcggagggggcaaggtcgccggcggcgagggtgcaccggcacctcaagaggctcaacaagccggccgtcaagagcatcgagagcccagatggagacatcatcgactgcgtgcatctctctcaccaaccagcatttgatcatcccctactcaagaaccatactctncagatga

SEQ ID NO: 393933 - DNA, 970 bp, Oryza sativa
  unsure (1)..(970): unsure at all n locations
tttcaattctccttgctggaatattgtgcatatatataaactatgactgtgatcgtcagcgccaagaattccgtcggacaaatgggaaatgctcaatatggggcaaagctccatctaagattgttgcttcctatcagactacaaatggagaaacaaaaagcagtcttctcttgacttctggatggttaatatattcgtcatttcttctttacatagttcatcaaaagtgatttgtaccatgtttgtttcaatagaggcaatgaatggcttttgagcatgcaccctcattttccatttggacaggtggggcttgtctcgtcattttcactatgttccagagattctatctgcttttttctggacagttccagctctttttgatcatttcctgccgtacttctatgtgatctttctgaccatattgctgttcgaccgagctaaaagggatgatgaccgatgctcatcaaagtatggcaagtattggaagatgtactgcaacanagtaccgtgcagggttattcctggcatttactgaggttgttgaccatgttcaacaacttctcgggataaaactcagccatgttgtgaattccttnctctgggacgatctactgctgtttgtgtaatatgtcattagcntgatgtatgcaggattagattcgggctgattggtttcaaccttttgagtttgctgtatccaaccctgacacagatgagtcaacgatgccgccaaatcgtgatttttcttgttagctcgctgataggagagatgattgcaggatcatagtttgtgtagtttgtaccttataatggatgtttcgacttcatttttctgctagaagcgattaggcagcacgaaaatgaaattgtttgaggttctgtactgctcgaataatgttgctgcaactgtattatccatgaactgtaataattcaaagtttggcaacaggcatggtgattggttctaccc

SEQ ID NO: 393934 - DNA, 425 bp, Oryza sativa
cggttctctaaaacctctcccgctccacgcgcggggcgcgtgaaaccctagcgagaggcgccagatctcccgcatccggatcgccgccatggccgccgccaccgcgctggactcgctgccggcgccgctccggtcgctgcggctgaagacgaagcagcaggagctcctgctccgggtctcggcgctggcgctcatctacgtgctcgcgttcgtcgtccgcctcttctccgtgctccgctacgagtccatgatccacgagttcgatccctacttcaactaccgcaccacgctcttcctctccgaccatggattcaggcgagttctggaactggttcgatttcgagagctggtacccgctcggccgcgtcgtcggcggcaccctcttcccgggcctcatggtcacgcgggtgttcaacgactctcgg

SEQ ID NO: 393935 - DNA, 425 bp, Oryza sativa
gtttatccgtggcgcatcccatctcgccccggcgactcgtcggcgtcggcgtcggccatgggcggcgactggcaggagcttgcccaggcggcggtaatcggcctcctcttcgccttcctcgtcgccaagctcatctccacggtcatcgccttcaaggaggacaacctccgaatcacccgctccacgccgacctccccctccgccgcggacacccccgccgccccggccccacctccggcctccctcgacggcggccatggggacaccagcgacggcagcggcagcgacagcgacagctactgggagggcgtggagagcacggagctcgaccaggagttcagcgcccgctccgagttcgtcgtcggctccgctgcgtctggcacgagcgtccccgagcaagcccagcttcagctctatgggctcta

SEQ ID NO: 393936 - DNA, 532 bp, Oryza sativa
tcgtttcttcctcctccccttcgccgaatcccccacaggaatccgccatggctagtgttctcgccgtccccctcctgctgtgcctgctcgcctccgcctccgccgcccgcttcgccccggcggacaaccacctcctcgcctgcggcgcgacggcaccggccgtgctccccgacggccgacgcttcgtccccgactccggctgcgcctccacgcgcctccgctccccggcacctaccctcccgtccgcggcctccagcgcggccccgcagccgacccctctccacgccgccgcgcgggtcttctcctgccgcgcgtcctacgacctcgccgtccgccgccgcgggtaccacgtcctgcgcctccacttctaccccttcgagcccgcgctcgcgtccgcgcgcttccacgtcggcgccgccggattcctcctcctccacaacttctccgcgtcggcccccgtcgtgaaggagttcatcctacccgtccactccgacgtcctcgtcctaccttcgtccccgagtcgggctctacg

SEQ ID NO: 393937 - DNA, 527 bp, Oryza sativa
gttgcttgatgccatcatgctgtccttcagctaatcaatctctccttgctcctcctcccagcatcaaatcttcagaaaattcccccttcttcatcacatcaccagaatctatcacctctgtcactgttcttgatcacaaaaagttaagacagattttgctgtgcttgctatcttccctgctctgctcatctcctctgctccagttcagaaatttgctgctggttcttgcacattggtgctcatcaagaactgatcaggagctgaagaaatcttgtgagaagctgaagaaatgggagggaagaatctggtggtgttgttcttggtgtcggtggtgatggcgatggtgccagggagcacgcagctgcaggcgtcgcaaacatggtcgctgctcaagatccagcagatgctcggctacccggcggtgctcggccactggcacaactacaccgacttctgctacggcggcgactacaagaccacgtcggcgttcgtcgagtgctacggcgacagcgtcacgcagctgcaca

SEQ ID NO: 393938 - DNA, 517 bp, Oryza sativa
ctttaatccattcattccaccctcttccgatccccaaccgccgctggtccgtatccattccactctcctccgacccctaccgctgccggagtgctagggcatcacacgatgagtgttgcaactgaagcatgcccttcaccaaagctacacacaagactaaggctgtgggagtttgcagaccgttacgtatttgaaccagttgacggtcttgctgatttgttcctgtcagttgatcggacaaatggatcaatgagtctagtggaagagttgccacctcgtggtccctctacaaatcctaaagttagaatagtttttggtgtgattggagtgctcaaacttgcagttcggtcgtactttcttgtgatcactggccgtgattgtgttggatcctacttggggcatgcaattttcaaattgacgggactaaaagttctgccatgcaataactcgttaaatacttcttctgctgagcagaagaaaatggaatcagaattttcggaacttctggatgcagcag

SEQ ID NO: 393939 - DNA, 607 bp, Oryza sativa
gcagcagcacagaagcagcttcccttccttccgtatagtgtaacgtaacgcatcaccacctcgcgggctggagatggagaaggagtaggagtaggagtgacgcctccggatttcccacgcctcgacgaacccccacaaccccgagatcgatcgggaggaggacgaccacgcccttcacctgcccccaaatcttgccccgatctcccccgaccgcggcaatgggggccgcctccgacgacgccgtcaagcagctcgccctcctcatggaccaagtggaggcgccgctgaggaggacgtttcagaatgtgcaccagggctatcctaaagaaacattattgcgtttccttaaggccagagagtggaacgtatctaaggctcataaaatgcttgtagactctttgaattggaggattcaaaacgaaatcgatactgttctggagagacctatagtcccagtagatttgtacagatcaatccgtgattcacaacttgttggactctcaggatacacacaggagggtcccccagtttttgcccgtggtggtgggcagagcacatatgacaaagcttcggtccattactatgtgcaatctcatattcagattaa

SEQ ID NO: 393940 - DNA, 569 bp, Oryza sativa
cgcgtgaaaaagtcaaaagcagcagcagcggcggagcaaccaagcctacctccaccaaaatcttcgccccccctctacctctcctctccgacccgccggtgacccgagcccccccaccgcctcacgccgccgccgccgccgccgcggggagttccattccaccgggtcgccttccggccgtctcctgcagagaggttcatgaggggctcgaggatgaatccaggtgaccgtagaacgcggagcacgatgtccatcgtaattgtgatgagtttgtgctgcttcttttatatactaggagcttggcagaaaagtgggaccggaaggggggatagtattgcattgagggtgacaaaagagaccgactgtacaatcttgccaaacttgcactttgagacccatcatagcttaggtggcgttaatcctttggtcatgaccgattaagtctttgagccatgccatattcgatacagtgactataccccttgtcaggatcagaaccgagccatgtactttcctagagaaaatatgaactaccgagagaggcattgtcctacagagactaagaaact

SEQ ID NO: 393941 - DNA, 517 bp, Oryza sativa
aaaaatggaagtccattcttgtcagcaccgtttggtttcattgctgctactttgtttttggatgctgttcatcagagcgcatggatcacgcaagctgtacatagcgtatctcggtgacagaaagcatgcacgcccagacgacgttgttgcttctcaccatgatacgctctcgagtgttcttggaagtaaagacgaatccttatcttccatcatctataactacaagcatgggttctcaggctttgctgccatgctgacagctgagcaggcagaacagcttgcagagttaccagaagtcatcagcgttcagcgaagcgggaggtacaggacggcgaccacacggagctgggacttcctggggctggattaccaaaagcccagtgaattactcagaaggagcaaccacgggacaagagataatcatcggggttattgacaccgggatattggccggagtcaagaagtttcagcgacgagggatacgggccgttccggacgttggaaggcgtttccaagt

SEQ ID NO: 393942 - DNA, 540 bp, Oryza sativa
cacacacgaaaacacatcccacgcggcggcgtgacacgcgcgaatcgccggagacctcgccggaggtggcgagctcgggtgccggcgatctcctccccgcgggcggcgtccgtccatggctcgtcggtcctcctcctcctcgtcgtcgtcgggggcgtggcggtacctcaacccggcgtattacctcaagcggccgaagcgcctcgccctcctcttcttcgtcttcgtcgccgccaccttcgccttctgggatcgacagtcgctcgtccgcgagtacgagtcagaaatttctcgattggatgataaagtaaatcagttgcgtgaccagttaagaaaggctggagttcatctggatgaaaatccaacaggtgacaaagtatccagagaaaagcttgtagaaattgatcctattaataatgaaaggagagaaaaggttaaggaggctatggcccatgcttggaattcctatgtgaagtatgcctggggaatggatgaacttcagccacaatcaaagaatggtgtcaatagctctggtggtct

SEQ ID NO: 393943 - DNA, 558 bp, Oryza sativa
cgccgtcgcttcggccaccggcggcgactgtggccccgtccgtgccggatccctccccgtcgggccacgtgacgatccgcccctccgagctgtcccgcagggaggcccaggtgctccgcgcgcggctcaccggcgagctcagccgggtccgcgccctcctctccgacatcgacgggtgggaggcgcggcggcggcggccggcggagcctccgcggcagcgggggcacgtgtcgccgcccccggccctccaggcggcgatgcggaagcggtgcacgcagatcctgacgcggctgcggaagcagaagatcagcgtgtggttcaactcgccggtggacgtcgagcggctgaagctgcacgactaccacgccatcatcaggaaccccatggatctcggcaccgtcaaggagaacctcgccttcgggaggtacccctcgcatgagcattcgcaccgatgtcgcctcaccttcagcaacgctgcgtacaatccgccgaccaccatgtccaccctacgcagtaacctcctcgcacttcgagggttgccagcggctgtctggttcg

SEQ ID NO: 393944 - DNA, 479 bp, Oryza sativa
tccatatctatctcttctctcatcttcttctctcctgcggatttgcaaattacacacttctgcaagctaaaaaatccagttttcttgctcaggctagtgcctggttgtatctacagctcagctcagaaagaaaggagtggtttttgaggagtggtttttgtctacacagctgctgcatatcatgcctccacttgccacaatgtcatcgccaggttcgcttcttctgttgacccccgctgtgtaccaggggattgggagaaatcgtggaggacaaagccaggaaggacaatctatctcgtcttcacgatctctcaagactaaactcagcgtttctgccagagcagtttcttcatgcgaagcatcccatgagaataacatgttgcgcataccagacacagactgcacgacgcatatctttctctgggacctacctcaccgccatcagggtcagttaaggagaaagtgaggagtccaagctt

SEQ ID NO: 393945 - DNA, 495 bp, Oryza sativa
  unsure (1)..(495): unsure at all n locations
cgcgaattcgcaaattgctgcatgngtcaaacttgtgcagatcaagttggactttttgcgtttgaaagataccattagcttttgttttggtaaccagtgcttggcactataagtagtatccatggaccatgtccttggttgtgccacttctttggtttcatgccaaaagaatctgatctttgaagaattggggatttagggttccaagaactgggagtctttcatgctgataagtgataaggatagcttatccacaatttgggatcttccctatggctgttggaatgaatttgatttcctgatttcttttncttcctttttttttcttgtggtttcttgtaatgataattattgcttgctgtaacaagcaaggatgaagagatggagatttgagggcagtattaaatgcaaaacactttctgattttacaagattttgtgggtaacaactgcaagatcttgaaacttcttgatgnttcaatccaatgaggagcag

SEQ ID NO: 393946 - DNA, 556 bp, Oryza sativa
tttgagagttcagttcttgagttctctggagggggagcagttcatccctttctctccttctgactttaggtttttgaaggcccccttgtgaattccctgttgtccatcagacaaggaggcctcaagatgtacatcatagaggacaaagggggtgccattgccctcatgctggcctccctcttcttcctggggacatggcctgcggtcctcaccctcctcgagcgccgaggccggctcccgcagcacacctacctcgactactcgatcacgaacctcctcgctgcggtcctcatcgcgctcaccttcggtcagctcggcgatagcaagcccaacatgcccaatttcttcacccagctcagtcaggataattggccttcagtgctgtttgcaatggcagggggtgttgtgctcagtatagggaacctctctactcagtatgcatgggcatatgtaggtctctcagtgactgaggtcatcagctcaagtatgggtggtgtaataggcacaacactgaattatttcctggacaaccgcatcaacagagcagagattcttt

SEQ ID NO: 393947 - DNA, 337 bp, Oryza sativa
caaattgctgcatgagtcaaacttgtgcagatcaagttggactttttgcgtttgaaagataccattagcttttgttttggtaaccagtgcttggcactataagtagtatccatggaccatgtccttggttgtgccacttctttggtttcatgccaaaaggtttttgaaggcccccttgtgaattccctgttgtccatcagacaaggaggcctcaagatgtacatcatagaggacaaagggggtgccattgccctcatgctggcctccctcttcttcctggggacatggcctgcggtcctcaccctcctcgagcgccgaggccggctcccgcagcaca

SEQ ID NO: 393948 - DNA, 355 bp, Oryza sativa
gccagccatcttttaccgcccgcttcccttcccttcccttcccagaccctaacccccccaaatctcccacaccgctcccccgccgccatggccgcctccgacgccgacgccgcggaggtcgagcggctctacgagctcggcgagcgcctctcctccgccaaggacaagtcccagcacgcggcggactacgaggcgatcatatcggccgtgaaggggcagagcgtgaaggcgaagcagctcgcggcgcagctcatcccccgcttcttccggagcttcccggcactcgccccgcgcgccatggaggccatgttcgacctcgtcgacatggaggaactcgcgactagaatacaagcta

SEQ ID NO: 393949 - DNA, 670 bp, Oryza sativa
  unsure (1)..(670): unsure at all n locations
ccntttcctcctcccctttctccccgtccggcaacgcagcctcaccgttcaggcggcggcgaaggccgcgtcgaccccgcgcagcgcaggcgccatggccgccccggaggcaccctcctgctacgttgggatcgcgcggcagtccgccgccttccgcctcatgaagcaaatggggtgggaagaaggtgaaggccttggtaaagataagcaaggcattaaggggcatgttagagtgaaaaacaagcaggacactcttggtgttggtgtagacagtcctcataacaaatgggtatatgacaccacccaatttgacaatatactaaagaaactgaaagtgcaatccgctactcctgctataaaagaatttgaagatgatgtaagcaattcaccagatagtacaccaaaggaagctaaaccagcaaacaatgaagttaccaaagttacccgaccccaaggaagatataagaaaagagagagggggaaaagtgtgagcggttattcagcaaaagatctttgaaggcatacttgttcgccaaagtgatgacaatngcaaagtgggaccaggaagttgaaccaacatgctggtgatgaacctgatcccatcatctgtcaagataccgttntcgcaactgatgatgtnaacgggtgggggcntaatttgggttccagt

SEQ ID NO: 393950 - DNA, 516 bp, Oryza sativa
cacccggccgagctcaacctccgcgccgcaccggacggtcgcacccgcgtctcccacctccccggcggcggctcccctcatctccgccggtcgcctcctccaagcctccgcgacggcacggcagagatgtaccgcatcgccgggagccacttgcgctctctcaagagatacagttatagtaggtttgctagtacaagtgttgtgaagcagtcttcaggtggtttgtttagctggcttcttggggagaagtcaagccaattgcctcctcttgatgtccctctcccgggtattacccttcctccaccactgccagactttgtttgaaccgtctaagacaaaagtcaccactctcccgaatggcatcaagattgcttcagaaacgtcagtgggtccagcagcatctgtgggactgcatattgactgtggttcaatatatgaaacacctgcttcatctggagcatcacatcttgtggagaggatggcgttcaagagcactacaaacaggagtcatttgcg

SEQ ID NO: 393951 - DNA, 564 bp, Oryza sativa
  unsure (1)..(564): unsure at all n locations
ttttatagctagctaactgttactgtacctcctcccatatatcatcttcatattcttgcagatcgataagcgagaaaaatgggagcacgctgcctcgcattgcttctcctctatggcacgttgctgctgctgttgctgctgccacagctgccgctcgccggcgcggcgacgagatactacaccttcaatgtgaagcttcagaatgtgacacggctgtgcaacacccgggcaatcccgacggtgaacggcaagttccccgggccgaaaatagtcaccagggagggagaccgcgtcgtcgtcaaggtggtcaacaatatcaaggacaacattaccatccactggcacggagtgaggcagatgcggacggggtggtcggacgggccggcgtacgtgacgcagtgcccgatccagacggggcagagctacgtgtacaacttcaccatcaacgggcagaggggcaccctgttctggcacgcgcacgtctcctggctgcgatccacgctgtacggcccatcatcatcctccccaangccggcctccgttgcccttcancgagccgcacaa

SEQ ID NO: 393952 - DNA, 469 bp, Oryza sativa
tagctatctcacgtagtctccctctcccggtcttcgcgacgacgctagctttacacgttcgtgataatggcggcgctgctgctgctggcggcggcgatggtggtggtggtgttcgcgcacgggcggcggcgcagggtacaatgctatctacagcttcggcgactccatctccgacaccggcaacctctgcgtcggcggctgcccgtcgtggctcaccaccggccagcccccctacggcaagaccttcttcggccgccccaccggccgctgctccgacggccgcgtcgtcgtcgacttcctcgctgagcactttgggctgccgctgccgccggcgtcgaagggcggcggcgacttcaagaagggggcgaacatggcgatcatcggcggcaccttcatggacgccgcctttttaagtccatcggccctagcgacaagatttggaacaatggccccctcgacacccagatca

SEQ ID NO: 393953 - DNA, 483 bp, Oryza sativa
  unsure (1)..(483): unsure at all n locations
ggacgctggaggcctattcacacctccaaggagcaaggcacaaggttacagacgtgtcacgtgcgcgcgcgcatctctctgtcacgcacgcaacgtactcacttacgtgctcagccatggcggccaacaaggccgtcgtcgtcgtcgccgccgtcctcctcctcctcgccgtcgtcgcccggcgagcgtcgtcgcagagctacaacgcgatatacaacttcggcgactccatcaccgacaccggcaacctctgcaccggcggctgcccgtcgtggctcaccaccggccagcctccctacggcaacaacttcttcggccgccccaccggccgctgcaccaacggccgcgtcatcatcgacttcctagctgatcgtttcggattgccgctgttccgccgtcgaaggngaacggcggcgactttaagagggggngacatggcataatnggggcaccacatgaatttgattttttcaatngttggtt

SEQ ID NO: 393954 - DNA, 573 bp, Oryza sativa
ggagaccaagaagaagaaagaggaaaccacacccacctccatctccgcctccgccgccgccgccgccgaccaagtcgagggggagatccagcgagagcgaggaggaggaggaggatggcggtgatggaggagcagcaggagggagccgcgggggtgatgcggcggaggcccaagacgaagatcgtgtgcacgctggggccggcgtcgaggtcggtggagatgatcgggcggctgctccgcgccgggatgtgcgtcgcgcgcttcaacttctcccacggatcccacgagtaccaccaggagacgctcgacaacctccgcgccgccatggagagcaccggcatcctctgcgccgtcatgctcgacaccaaggggccagagatccgaactggatttctgaaagatggaaaacccgtacaggtgaagaagggtcaagaaatcacaggtccaactgattatagcatatagggtgatgacaacatgatatcaatgagctacaagaagctagcggtggatctgaagcaggcagtgtaatattatgtgctgatggcaccatcactcttactgtccttcact

SEQ ID NO: 393955 - DNA, 772 bp, Oryza sativa
  unsure (1)..(772): unsure at all n locations
gtgccgtcagcctccaacacaagagctggtggccgaggatctgcacggtgtggaatggcgctttcgtcacatattcagaggtcaaccacgaagacaccttttgcagagtggctggagtgtgtttgttagtgccaaacggcttgttgctggggatgcctttatctttctcagaggtgagaacggggaactgcgtgttggagtcaggcgtgcaatgaggcagcaaactaatgttccatcttcagtgatatcaagccacagcatgcatcttggggttcttgccacagcatggcatgctgttaacacagggaccatgttcactgtctactacaagcctaggacaagtccagccgagtttgtggtcccttacgatcgctatatggaatcactgaaacaaaattactccattgggatgagatttaagatgaggtttgaaggtgaagaggctccagagcaaagattcactgggactattgtcggaatgggggattctgatccagctggctggcctgaatcaaaatggcgctcccttaaggtgagatgggatgaagcttcttccatacctcgccctgaaagagtttctccctggcaaatagaacctgctgtaagccctcctcctgtcaacccactaccagttccaagaaccaagaggcttcgtccgaatgctaccgctttgccggctgactcttctgctatagcaaaagaagctgctacggaagttgtggtcgagtctgaaccaaatggtacgcaaaggaccttncagacacaagagaat

SEQ ID NO: 393956 - DNA, 498 bp, Oryza sativa
  unsure (1)..(498): unsure at all n locations
cacaaggtgaagctactcctatgcgagaggagcggagagagataagatgagggaccttctcccaccaatgatgaagatgctcctcgccgccctcctcgtcgtcgccgccgcctccttcagggcggccgaggcggcgctcccgtcgatggcggtgggcgtcaactacggcgccaacgccgacaacctccctccgcccgaggacgtggcggccttcctcgccgcgcacaccaccatcgaccgcgtgaagctgttcgacgccaacccggccttcatctccgccttcgccaacacacccatctccctcgccgtctacctccccaactccgacctcccttccctcgccgacaagcagaccggcctcgacaccgcccgcgcctgggtccgagccaacctctcccactacgtgcccgccaccaacgtcaccctacttctcgacggcaacgagatcctcctatgccctgaccccaacctngtgctctccctactccccgccatgcg

SEQ ID NO: 393957 - DNA, 508 bp, Oryza sativa
tctcggtgcagggaaacaaattgttagagaatctgctagattttcatctgggagggcctccccaggtgctcgagccttcagtgagtccttcaaacgtggttcggaggggaagaagacaccttctggaactggtgtagacatcgaagctgaagtgaaggatgccgagtgattcttctgcaggaatgtgctaagaatctctgcctcgttgacatcagttttgcagctcttcatggccaatttttcagagggctattaaatctggtagcagtgtcatgggtgtaccaaccgttcgctagatttgttgatatgctaggtccaggatatcaagacgaactgacacttgattccataagtgacgacatgtagcgccttcttctcgttgcaacttgtaaattgcaattacctctgcttgtgtaaaagtaacaacagaaaaggtagatgtgaatatttacttcttttttttttttttgcttttgtatgtggatgagcaatcaaagatcagttgaag

SEQ ID NO: 393958 - DNA, 504 bp, Oryza sativa
  unsure (1)..(504): unsure at all n locations
ggagcntattctacaaacacaacgcaacacaacccaaccgcatcgcctcctccaccacccgcccgccacacgcccaaaaaacgccccgaaatcccctccaaatcgcccaaaaccaccgtacgccgtcgctacatggagaacggcaagtgcaacgggtcgtcgaccaccaagtgcaacggtgcggcggcggcggcgatgcacgtggcgatgctggtgacgccggggatggggcacctgatcccgctggccgagctggcgaagcggctggcggcgaggcacggcgtgacgtcgacgctgctcacgttcgcctccacggcgtcggcgacgcagcgggagttcctggcgtcgctgccgccggcgatcgagtcggtgtcgctgccccccgtcgacctctccgacctccccgccgacgccgccatcgagacgctcatgtcggaggagtgcgtccggctggtcccggcgctcacggcgatcctgtccgggatcagggagaggcggcggctg

SEQ ID NO: 393959 - DNA, 475 bp, Oryza sativa
  unsure (1)..(475): unsure at all n locations
gccacttgacacagaaccacctcgctgcttcgcgctagcttagtcgctggttagaaagagacgcggcaatggcgctcctacggcctctcgcgctctgcttgctgctcgtctcctgcgccgcgcagtcgccggcctcgtcgccgtcgggtcgaacggtcctccgctcagcgccgccacgccgcagacttccgccgcctcgtcgccacaggtctcggccgctgcaccgaccacggcagcctcggcgccacaggtgtcgtccgcggcggccccgaccaatgccgcctcggcgccgcaggtctccgccgcggccccgaccaatcgccgcccaggcgccgaaggtctccgccgcagcaccgaccaatgccgcctcggcgccacgggtttccgcggcggctccgcccaatgccgcctcggcccacaggtttccgccgcggccccaccgaccacggncgccgcggcgccacagctggccgcc

SEQ ID NO: 393960 - DNA, 491 bp, Oryza sativa
atgccggccggtcccggtcccttggtggtggtcctcctcctaagcctgctgctgttggtggcagggatccatgggcgcctccagcacgaggaggaggaggaagaggaggaggtccaggaccaggagggaggcagcagcagcttcacccttccggtgtgggcgccccacgttccggagtcgggggaggagcggcgcgagcacttccgggcgttgatggccaaggacatgaggcggatgatgcggcaggtgccggagctcatgtccaagacggacatgttcgagctgccgatgcgaaggcgctcaacatcgcgcaggtgggcatgtacgtggtggttgtccgcatcggcaccccggcgttcccctacagccttgccctggagacggccaacgaagtcaacctggatcaactgccgcctgcgccggcgcaagggcaagcaccctgggcggccccacgtgccccccgccgccaccaccatgtccatccaagtcga

SEQ ID NO: 393961 - DNA, 563 bp, Oryza sativa
  unsure (1)..(563): unsure at all n locations
atcaaaatcgaaaccaaacctccccaaatttccccagagaccctaaccctaaccccacccggcgccatggatctcctccagtcgtcctacacgccggcacgacgaggacgacgacgagcagcagcccctctcctcgccggacgcctcgccgctccgcctccccgccaagtcggccgcccccgccgtcgacgacacggcgctcgcgctctccgccgccgccgcgtccacctcccgcccgctcgacccctgcctccacctcggcccctttaaccccaccgccgaccagctctgggcgcccgtcctcgggccccagcacccccacgcccccatatcctccgcctccggcaatccgaaccacaagctcggccacgtcgaggacgccgccgtactccccttgctcttcgacgagcagtacaacaccttgcaccgcttcggctacgccgtcgacccctacggcctncacatcgttggcgacgcccagccctcggtcgagcccgacaccgaatacaaccttgccccctgcgagcacaagcagccgccgctgcagttcaaggacgaggagg

SEQ ID NO: 393962 - DNA, 440 bp, Oryza sativa
ttttctcagctcagatcatcgttgcgagaccgagtcgatcgatccatcttgttgttgcgttgctctgtttggtttccgtagtagatcgtttcttggttagccggcctgttgaattgttaatcacgagaatttgggtattttctgatcgatgacgcagtgggcggatctggacgcgctccggccggcggtggccgccgacgtgcaggtcgtcacgtcggacgggaagagcatcgccgcccattcgttcgttcttgtaagatggacttctggttcttctctgttcagggcacggcgtcgccggtgctggagcggatgatcgagcgggcacggcgggggtggaacgccgagtgcaccattcgcgttctcggcgtcttcttcgacgccgtcttcgcctttctccagttgctctacgcttacaaggtgacccccgatgacgagga

SEQ ID NO: 393963 - DNA, 815 bp, Oryza sativa
cgcgcggtgaacgcggcctcaccatccggggctgggcgccgcagatgctcatcctgaaccacccggccgtcggcgggttcgtgacgcactgcgggtggaactcgacgctggaggccgtgaccgccggcgtgccgatggtgacgtggccacggtacgccgaccagttctacaacgagaagctcatcacggaggtgctcgaggtgggtgtcggcgtcggctccatggacttcgcgtcgaagctggagaaccgccgggtgatcatcggcggcgaggtggtcgcgggagccatagggagagtgatgggcgacggcgaggagggcgaggcgatacggaaaaaggcgacggagctgggcgtgaaggcgaggggcgcgctggagaagggtgggtcgtcgtacgatgatgttggaattctgatggacgagttgatggctcgccggggctccgtcaatgtgtgacagcactccctaacaaggtgattgacggcttgacgcatcaagaagatggtgatcggacattcggacatctccagagtccagactattgtctttttcctcagagttttttttttttggagtaactatatttatggcgccatatttttcatcaaaaaatagtcggtatatatttacattgtaaatttctaaattacatatgtaattttagtgtatttacaatataagtcataaaattacatatgtaagtctctaaattacatatgtaagtataatgtaattataatgtaagtgcaatgtaatttctatattttgcattgaaaattacatatattgattacttatgtgaaaaaaaaaaaaaaa

SEQ ID NO: 393964 - DNA, 837 bp, Oryza sativa
catatgtcctcacctttctgatgtcaatagccatggccgtcctcttgctcgttgcgttgttctatcggatcaagaagcaggcagctgccatggcggccaagaggaagcaacaacccaagctaccacccgggctagctaccatgccggtggttagcaacatgcaccaaatgctgatgaacaagccggtgttcaggtggatccaccgcctgctcgacgagatggacaccgagatcctgtgcctccgtttcggtcgcgtccacgtgatcgccgtcgcctcgccggagatggcccgggaggtcctgcgcaagaaggacgccatgctcgcctcccggccatcgtcgttcgcgtcgcggacgttcagctttgggtacaagaacaccatcatgtcgccggccggtgaccagtggaggaagatgaggcaggtgctcacgtcggagatcctctcgccggccatggagcggcggatgctcggcccgcgcgtcgaggaggctgaccaccttgtcaattacgtctacagccactgtaatgatggcactgtagacgtccgccacgtaacgagacacttctgtggcaacatcatcaggaagctggtgtttcgccggagacacttcaactccggcgatggcaatatcggccctggccgtgatgaggaggctcacatcgacgcgctcttcacggcgctggactaccacggcgccttctccgtctccgacttacttcccgacactggttgggcttgacttgggatggccatgaggaggttgtcaatggcctggatgaacacattcaatagggctggcacgattcctatcataatggagaggatagaagaatgga

SEQ ID NO: 393965 - DNA, 623 bp, Oryza sativa
tgctactctctctctctctctctctctcctcgaaaaccccaacacacacaacgcgaaccccactccgcgatggcgtccgccggcgatcgccgcggcggcggggggcctcccggctccggcgacgactccgggggtggttgggagactgttgagaagagggtaaagaaaccagcgcaacaagttgggaaggggcaatggggacaatggaattctccaaatgctgcacctgcacctactgcaccacggagtggctctggagcttttcatcattctggaaacactttggttcgacattctgatcgtaggccagcaagaggcactcctaggccaccaccacaaaacaggtctatagaggcagaactgcaagcaccgcacggagttgtgactgcacctctggcaaatggttggcagtggggagccaggtcttgcccacctggtactgaaagcaaggagggtggtcttcctttgtctggttgtgatcctgaaacagacaatgctgaaggttatgacacatcggacgatgataatgatgatgatatgagtgacgatttgagtgatgaccatgtatctgatgcagtgaaaaaagtttgagacttggaaaatccaagttgttcaaggtttct

SEQ ID NO: 393966 - DNA, 505 bp, Oryza sativa
  unsure (1)..(505): unsure at all n locations
nnnnnnnnnnnnnnnnnnnnctacacacacaattgtccatcttaatcagtagacaatattcaattattgccaggcataaattgtgtcattgatcacaggctgaatcaattcactaatggaacagagcagatgataatgtggacactggacaggaacacctgatccctcatctattacagtattattggaaactttttttttcagtgacaattagatcaagaacagtagcagcaagacggcgccggctgttcactcctgagcatctggtgcacggtaaagatggggaagccggcaaggttcgtcatcttcaaagcctgccttcttgtaggattcaacgctgtcgacaagacgtctcctcgagtttcctagggttccagcccagcttcttcagcttctctgatgtcaattcaanactcgtagtcatatccanatcaaccactttggntgtggagcggtagntagggtacatgctcttcatcaaatccaacaaatccctcatgtccat

SEQ ID NO: 393967 - DNA, 493 bp, Oryza sativa
tgtggatgcccctgatatggtccgctgccagataaacttcaagcggctttctctgactgacattaagattgacatcaagcgtgtccctaagaagaccaccttgattaaggcaatggaggaagctgatgtgaagaacaagtgggagaacagctcatggggtaagaaactgattgtccagaagaggagagcatccctcaacgactttgacaggttcaaggttatgttggcgaagatcaagcgtggcggcgctatcagacaggagcttgctaagcttaagaaggaggctgctgcgtagatcattttggtggtgatcagttgagattttgatcaatgatgtttgatgtccctaaatatgaaacattgtgccagccactgttattgggatctcatgaaaaatttaagttttgaactcctgtgtttagaccttgtgccacaaattctattcagaatctaagatagtatgccatatgttgtgtgaaaaaaaaaaaaaaaa

SEQ ID NO: 393968 - DNA, 715 bp, Oryza sativa
  unsure (1)..(715): unsure at all n locations
agtcacgccttgttaaaccgccgcccagttgaccgcccgtaatacgactccactataggcngaattggntcccgggccccccctcgaggtcgacccacgcgtccgctcgtccgccgancgtctgaggccaaatgcttgaagcgaggagtcaaggaggtcgtcaagagcatccgccgcgggcagaaaggattgtgcatcattgctggcaacatttctcccattgatgtgataacacatgttcccatcctttgcgaagaagccaacattccttatgtatatgttccgtcgaaagaggatctcgcaacagctgggactaccaagaggcctacctgttgtgtattggttctgaccaagccagccaagggcgagcttgaggaagatgtcaaggagaaacttaagacggactacgatcaagttattgtctgaagttgctgaggtcacgtcttcaatgttctaagttcacacttgtacttgtagctacaaaatcagaatcaacatccacttccagcacacagccctgttttgtactgtgtcagcatgacatcaacctgtggcggatgtttttcgagtgcctgtaggagacaatagttcctctgctagattatctatcggatgttgtctttttggactaattgattccctacctggatcatatataattagctcctctataaatcattttgtgcgaaacaaccnnnnnnnnnnnnnnnnnnnn

SEQ ID NO: 393969 - DNA, 515 bp, Oryza sativa
aaccctcgtcgagctcgatcccccgcggcgcctcaccccctctcctctcccttgccgcctctcgcccccactccgccgccgccgccgcctcgcctcccgcgggatcggccatggcattgaacgcccccgtcctcgtgctgaaggactcgctgaagcgggagtccggcacgaaggttcaccatgccaacatccaggccgccaaggctgtggcagacatcatccgtactacactcggtcctcggtccatgttgaagatgcttctggatgcttctggaggtattgtggttactaatgatggcaatgctatattgcgagaaatagatattgcacatcctgctgccaagtctatgattgagctaagccgtacacaagatgaagaaggtggtgatggcacaacatctgtcattgttttagctggtgagatgctccatgttgcagaagcattcattgataagcactaccacccaactgttatttgccgagcatacaccaaagctcttgaggatgctttagct

SEQ ID NO: 393970 - DNA, 433 bp, Oryza sativa
  unsure (1)..(433): unsure at all n locations
tgaggnaaaaatttggggtccaggttgtggncncggaacctcctactgttatgatccaagtccaagctccactgaactgaagatggcatgtccagaatctgagtttccttttagcacacatactttcattgaaagcatagctcctctgcgcaaagattacttcatcaagcagatacagtgataatggtgttcatcacttgttttccagatgttccgcagttcacagaattacaaaattgtgcccctttttccttttccgttgatgaattttagctggtcaatgacttagagtggcctattttaccgtgaattgtaattagctaaaataaatgcagtattgaaacctccttacagcacatgcttgtctgacttctaattgatgtgcttgtttctaacttcctattatgatgctaaattgatatgacgagttgag

SEQ ID NO: 393971 - DNA, 467 bp, Oryza sativa
  unsure (1)..(467): unsure at all n locations
cggacgggcttactggccgtcgaagccaacccggcgattccgcaaaaatccatgggcggcggcggcgatctcagcccctccagcgccccctcctccccgtcgtcgtcatcggagccccttccccatgagtttgccgaatacgcggccgtatccccggcaatcgatggcgagtccgacgggtgctgcgtctgcaatgaccccgaggtggaggccttcctccatggcggccgactccaggatcggtctctgcgggaggcgaaagaactcatcaggaggtataaacctggggacttggttgaaggagtgtgtggcacaaaatctggagactatgtgttgcctgatataacaacgtttctattggtgggcctagagatgctggcaagagcgcacttttaaccganttacacgggtnttcgcaaggatgatgatcctaatgaccagatcgagcacaggtttctgtaattcca

SEQ ID NO: 393972 - DNA, 580 bp, Oryza sativa
  unsure (1)..(580): unsure at all n locations
tgttcgattactctcatgttcctggacgagctgtgctccatcgtggtcgtcataggcatggtgtccgccggacatcatctgggctcagaatcaatcttcttttgtggtgcagaagctctgtgttcagggagatgaagaaatatcagaaggacttttcgggctggtgtggtgaatgtaaacgtgagaagaaggagaggcagattcatgctgttaaagcaactaagctggcgtttcttaggggtgctggaggggcaacgatttaaattatatctgctttatgtatttatacaatcttgtattatattatactttactgtcatttgggaagcagctagtgtgatcttcagtttttctggtcacaatcattagtggtcacaggtgtatgtaaattgaacttgtgatcaaatcaagctgaaacttagtggaggatcgcatgttagtgtgaaaggagtgctagcagaatagcaactccccccttcaatatcgtctaagcctgatattgtacagataagtgcatctgcatagaatgttctaatctgtcatcaaatttgggtgatgcaaccttttatgcaaaaaaaan

SEQ ID NO: 393973 - DNA, 518 bp, Oryza sativa
cctcaaatcgcgaaattttcttttcccccaaaagaccgaataaagagaaatctctccgagcgaattcgacgagatcggaggctcggatcgaggtattctccttctgatttgattggattcgggatctgctggcggggatccatctttaggtaggatttcataattttatggactttgattgcaaaacagcaagaggagactcttcatctgtgaatcgttcatgcattgtcactgaaggcactgtcgtccaggcaaagcccgtttctcacaacgggaaagctaaacactggaatagcctcagtacattgaataaccagaagtgcagttatgaattactttccgacccaaaggaaaatgttgaaacaagtgatggtgagaccgcctcaaagtgtgactcatggtgcttcactgatttgccatccgcattggtctgtgaagtgcttgaacacctcgatccaaggaacttggcattgtatcttgcgtctccaccctactgcataccctagccacagatcatc

SEQ ID NO: 393974 - DNA, 524 bp, Oryza sativa
  unsure (1)..(524): unsure at all n locations
ctcgagcattcaggggagagggtacgtgcaggagccagggtccaacaaagcgatacctccttctcctcctcctcctcatcctcgtcatcagattcgccgcacgcgcacgatgcaggaagaattcgattggccaaccttagtgtgatcaacatcaccagaaacagaaaatgttacctccagctctgtgagaagcacaaccaagaatgacgtggttattcagcaaggctccatctcttcatactggccatgggatgtcatgaaacttgaaaacgacacccattttctgtctcattcttcaggagatgggatgaaatgcacaaaggctgaccatttttctatctcatgccaaccgggggtccatggacctgggattatcaagaccaaccttcaaggtccaattttgctactgaccttggatcacatgcatattctagggaagccaggacacttggaagagtatatcatgggcagcagccttacttttccncttcaagctgttctggggaaaaatcttctgcattaaa

SEQ ID NO: 393975 - DNA, 486 bp, Oryza sativa
gctttctggctcgctctctctgcacgatctctcgtcttgttggattatacagccatgacatggtgcaacagcttcaacgacgtgcgcgccgtggagaacaacctggccaccgccgccgccgtggccgcggccaagaagcagcagcagcagcagcaggtctcccagcacgtcaacctcatcaagacctgcccctcctgcggccaccgcgcgcagtatgagcaggcagcggcggcggcgacgatccaggacctgccggggctgccggccggggtgaagttcgacccgacggaccaggagctgctggagcacctggaagggaaggcgaggcctgacgcgcggaagtccaacccctcatcgacgagttcatccccaacatcgagggcgagaacggcatctgctacaaccattccgagagctttcaggagtcggcaaggacggctgattcggaacttcttccaccgcccgtcgaagcgtacacgacgggga

SEQ ID NO: 393976 - DNA, 796 bp, Oryza sativa
  unsure (1)..(796): unsure at all n locations
tccngggtgcaggattcggcacgagcttcttaagctcacaataccatcaacgcttcctactgaatggaacaaattttatgtttgtgcaaacatctgtctatgtcctctcctactcctgtattctttcagttcattcattccatttgatagccgaatagtatttcttctccctcaaagtcgtttccccatctggtccgtggtgcttttcgtgagcatttctttagccctgtcccacttcatttttgagaaagaagccccaataactgaaaacattgcgagcaccacaatttcctttgggatgagtgtcttctggatctcaaccatggctggagagctcctgaactgccttgcagcaatcggagtcattatggatttccctccagctatacttggcatgacggtcttggcttgggggaattcggtgggtgacctcgttgctgatgtagctttggcaaagtctggccagccgacaatagccattgctggctgctttgctggtccaatgttcaatatgctggttggactgggaactgcacttgtaatacaaacagccagggtgtaccccaaagcttatgtactcgaattccatgttggaattgctgttgcatttgtatttcttcttttgagcctgatgggcaccctgttgatggtcacctggactaggtttcgggttcccaggttttggggttactgccttattgggctttacatctctgttacagtagtgagtatagctatagcgagctcttctggatgatacatanttttatacataatagcaactagtccgttgcag

SEQ ID NO: 393977 - DNA, 553 bp, Oryza sativa
agatccaattgaaatcttatgcatgggggcgctgttatctctaacgggatttaccaaacataaaagagcaatagctccctgtaatcactaagatatggcatgaaaatctctcagatgtggaagctttttcttgattgtcacaaaaggtgctcttgcttagatgcgtaccaatgtcatatctccaatcaccctgctaaggtaagtatgatttgcttgccacataggaaagtcatcagtgcggtccgaagaaataaaatggcatgccatttttaatctaaaatgcaaaaacaacacttttagtgtgtataaagggagatagattgagctaagtctacatgttgtactataccttcagatctcagttctttgctgcagataatagtggcacatggttcctggtttgaaaatttgttgtgactgcaaaaatagtcaataaaacttcgctattgtttgtgttgcttatttccattaaatgacttctcagaagctatgctccttctctgtcttgctagcttgtccttttcactgggttcaattgtaagacatgaattat

SEQ ID NO: 393978 - DNA, 486 bp, Oryza sativa
cgcaatcccagccatggccgccgctcctatcacgctgctcgtgctgtcactcctcctcctcgccgtcgccgccgccaccgccgccacattccccaccaccgtgaacgcctacacccccgccaccggcgtcgcggacgccggcgcggcggccggcgaggcggccggcgccaacgccgcctcgaacatcgccgccggcgccgcggcggggcatggccgcggacgccgcggaactcggcggcggcgaacatcggcgcctatataccggaggccgggtacaacccggggaagctgtgcgacaacgcggtggtgatggactcgtgcgtggaaggtgctcccgaggatccccggcgcgctgacggcgccggactaccgcgcgctcgccgtgatcctggacgcgtacgcgtggaagctggtgaggggtcgcggcagatcgccgactccatgcgcgccgccgagaagctgggccacaccatggacaagtgcatc

SEQ ID NO: 393979 - DNA, 669 bp, Oryza sativa
  unsure (1)..(669): unsure at all n locations
ttttcactctcagatggccacagcctgatttgggaacaaaagatgacaccactgaggagtcagagtcatctgcagctcctgaatcatcacaagctggtggacatggtgcatcgacaccctcagatacagagaaggatgatcttcctgtttcaagccagcttttagataacaatacagctactatgaaggagagctcttcgactgatatctccaaatcggtggagaattataacaagttcaaggaagaacaagaactcaaactacaagaatggcttagacagtctgaagaagctgatgataataaagagtgagngtggttctagctggtgcaacctagtacatttgctagagcacataccatgccatgttgtatcctatacatgcttacttgatgcacttccagatcttcagatggtaactgtttatgaagcagagcttgtaatcatgatgaggtacataatttatctgcctattagggaacgctgtaaattgccatactctgtttgccgttgatttatttattgccaaggcacagagaccatcaatgtactgtagaatagcctgaactattgatcatgcattttttttccatgtctcttcacatctattttcggtaatcatgtcggtggcatcagcaaatgaatatccttaaaaaaaaaaaaaaaaaaa

SEQ ID NO: 393980 - DNA, 460 bp, Oryza sativa
tttaaaataatactttattcctctctcttagttttatttttttactttgtttgagagagagaggatcaataatttcttgttgaaaaatggagattattagtcctagtagtagcagcaataacaattcacctgttcttgcaacatttcttgtggttcttgtagtgctcctagcatcatcacggccagcctcgtcgcagaaccagcaatccttcaccatcaaccccggcggcgccgcggcggcgaggcccggcggcggtaaaggcggcggcggcggcggcgggccgggcagcttcagcgacttcctgacccagaacgtgcagcactacgtgctgagcgagcagaagtacgccgggaaggtgaaggcgctggacgcggagctgtcggcagcggaggcccgcgcgccgaggtacctggtgagccgcgacgggaaggggaagttcaggaccatcaccgaggccat

SEQ ID NO: 393981 - DNA, 855 bp, Oryza sativa
  unsure (1)..(855): unsure at all n locations
ccccnnccggnccacccctcgaggtcgacccacgcgtccgagagacggacagaggccactacccgtgcaccacgccccctctcccacaatctcgctaaaaagttgattttctttttcagcttcctcctcccctcctccgcttctcatcaatccactagcatacatatcagatcagattcctgtacacttccctttcctcgcatccaatcccgactatcgcagcacccatcaaatcaccatccttttgcaaaacctaaaaaaaaaaaggggagataagaagaaggttcttgcatccagagaggacactgtccgtcgtgcagcgtttcttgcttggttgcttggttgaatcgggtggttttgggcggatggcggggaagtgaaaaaagatggcttccatcgacgcgcagctgcggatgctggcgccggcgaagctgtcggaggacgacaagctggtggagtacgacgccctcctcctcgaccgcttcctcgacatcctccaggacctccacggcgacgacctccgcgagctggtccaagaatgctatgagatcgctgctgagtatgaagggaagcatgactcccaaaagctcgatgaacttggcaacatgttgacaagcttggatcctggtgactccattgtgatggccaaagctttctcccacatgcttaatttggctaacttggccgaggaggtccagattgcatacaggaggagaatcaagctcaagaagggtgactttgcttgatgagaactcggcactgacanaatctgacattgaaggaacttttaagaggcttngttgttgacctgaagaaatcaccagnaggggtctttgattgccttaagagtcagac

SEQ ID NO: 393982 - DNA, 457 bp, Oryza sativa
gccctcggcttggcgcgccgtttcacagctgggcgggcaggaaggctgctggggctgggatgtacactcttccaagcagggagcagctgatcgtgaggctcaacgaaactgattgctccgtgcacaaggagatgaggagatacatcgatgcctctagccctatcatagactacatcgacaaccttttcctctcgaggagcattagcctagactggtgaaactgaactggagttcatatttgcagctgctgacaaagctgtcgttgatgccattgttttgttcttttcatagctattatgtagccttgggtgtggttgtctggtggatgctcaccctgactcccttcgcagagtcatgtgtaatgtataactgtatggtgattcagtacgatcatggataacctgttttgccagcgattgggcacagaggaatggtggttggatggtgctaaaaaaaa

SEQ ID NO: 393983 - DNA, 599 bp, Oryza sativa
aggcatatgactggatttcgcttaaatatgaactgactgttagtagtctttatcagatacatcgagtacactcgtgtcggatagcagctatgtaaactgtaccatcgttgctctaataacttttcaatgaaaaaaaatcaagctctaataactgttggtcccccatgataatgttttggggccgtggcaatacaacacttgggtgatttaggctgtatgctatatgaacagttgacaaaaggctaacttgcttaaaatctatacgtatggacgcttgcgccggagttgatggtcactctatgatcctgtacatgtgtgcgatctcaaagcagttcgccaattccatcctacggatgcggcgatatgcaaactggaccaaatttgatgcggtctgcgagcaaatttaattcagcccggaggtcagatcttcccgttgtttttccgtactctgaaatgatccatgtagttgtagaagtaaagaattgctgacaacaaaaatcgagctcagggccatcaatccccctacatgataccatcaacaaagacaatattaaagctcataattttaagataatggggggatgcaaacaaaccatacg

SEQ ID NO: 393984 - DNA, 677 bp, Oryza sativa
  unsure (1)..(677): unsure at all n locations
tttttttttttttttgcaccaaacccccggcttatataggcatatattatggcaaaaaaaccagtaacacatgatttctgatacttacaatgtacatctcgcaaccaaagcacagatcactcttacagttacagaggaacttagtatacatcttcctaggattagatacgtagaacaagtgacaacaacttattgcactatagaccccagctaaagtactagtagtagcttattcgggcacaatcacaaaggtggcaagctaaggttcttacaataaccatacaaggccatgcttatgccccagggatagataggaaggtatacacagcttgacatatttacaatcacgcaggatgcaaggggatcacccactgagggcagtcagacctccttccagcaagggaatagtaggcaagaacctgagcatggctatccacacagggttctccatcttctgtcatatgattaaaactctcagggctcggaggtgtaacccgatgttccagaaaggcctggccattgagcaggaggtcaagggctgtttgagatggctctgtatccttggcacccatatgtatctcaggggagggnatctggcagtacagcgaggggncaaagctcggctcgctgaagcagcagtttctcaattcaaagctctgaagggttggtgcagccac

SEQ ID NO: 393985 - DNA, 514 bp, Oryza sativa
aaatacagtccaaaggcatacttttacaggttacatgacaacggcttatcagtactacaaatcactgtgtagctgagcaaactgcaacatctgtaacttctgtagctgtcacaaaaaactactgacaaaaacatgcaagcatttttttttctttttcaccctagaatgtgtagtcaccggagttgtcgtatcgtcgcgaaatgctctcgccaccactgaggactgaccccatgcttgacctctgcacgagccggactaaggactggacgacctccgacatcggtggcctgaattccggctcaggctggacacagagcgcgattgcgtcggcgaatcgagagagggattttgcagggtacagtccttccagtgctggatctaccatctgatctaacgcatcgatgtcatgaagctgtggagaagcccatcggactagcgactgctgtggccatggttgggatctgtcaaatgatttcctgccagtcaggagctttagcatgaccactccaaaact

SEQ ID NO: 393986 - DNA, 596 bp, Oryza sativa
cgtgcggccgcgcggtgagcacctgcagcagcagcacgccgagggagtagatgtcggacttgacgcccagcttccccgtctgctggtactccgggtcgatgtagcagaaggtccccgccgtcgccgtcagccggtactgcgtcacgctgtccgccaccgccggcggcacgaggcgcgccagcccgacgtcgctgatcttgctgacgtagttgcggtcgagcaggatgttggccggcttcaggtcgcggtgcaccagcggctccggcttggtctggtggaggaacagcagcgcggtggcgatctccgccgagatcctgaaccgctggctccacgggatccgcggcgtgccgccgcggcggaacaggcggtcctcgaggctgccgttgtccatgtactcgtagacgaggcagccgtagtccgggcaggcgccgaggaggagcaccatgtttgggtggcggatgcagctgagcacctccacctcctgctggaactgcttccggcccctgtgcgcgtcggggcggagcaccttgatggccaccggggtgtggtcgagggaggcgcggtagacggggccgtagccgccctcgccgatcttg

SEQ ID NO: 393987 - DNA, 591 bp, Oryza sativa
tttttttttggaaataataataaaaagatttaagaattcatcatccacagtccaagtccatggcctctccccttatcaagaacggtatgtattggtatctgtatccatatgggtacaacattttctttgccttttcttcaaacgcccattggagaacaataataaccctttttgacttattcccaatctgaatacacttcaatttctctcttcccccctaatttcctctctctctctctctctctctctctttctcagaatatatgcacacaaaagaatatcaaacatttgatggtgaagaagaagaagaaagaaagaaagaaagaaaaaacaaaattaaaaaaaaattactctcacatgatgaactgaactcatctagaagtggtagtagtaccatgtaatgtggccaaccaaattgctagagcagcagcaaataatccagggcaattcaatcatcatcttcatcatcatctcatcagggacaggacacctcggattttccggacatgggtgcaattcttgcccaccaagcaccaccattgcatttgccgattctgtgatgtgtgtgctcagaatagcatccagtcgagc

SEQ ID NO: 393988 - DNA, 707 bp, Oryza sativa
  unsure (1)..(707): unsure at all n locations
nnnnnnnnnnnnnnnnnnnnnnnnnnnnnnttttttggatttaaatttatagattcatctctatttatttatcaaaattaaagaaaagaattatacatagtattaacctgcacgtatcaaccccctaggatatacacacacaccccaagtgtacaaaaaaaataaaattttgaaattcttcatattctgttcttcctcaatgaccgaaaagggcctgaaatcaaatgaattcccttctgttggccagatctgttagtgattcaccttcaccatttcctttgggaaaccaaaataatcttaatttttcataaccgcgaatttttagcctttttgggcctgacaacgctggcggtcagcttgatcctaggaatggaaaattcgccacttatcactttagaagcaacgatctcgtttgcagcatcggtgaagtggaccccatcccagctgatgaacttctcaccaagcttacacaggtccttgtcattggccgtgcagcttttcttcggatcatagttgtaagggggccctccatgtccacaacatgtcatcaatggcttctcaatcccgtgtttcgtgtggttgggcaacaagatcatacttgatggcgaaccctccacgaagacgatcgtcggagctggcgaattggcaagcggcngatccatcggcaggtttcggctccagcaaattggttggaaccccttgggcaa

SEQ ID NO: 393989 - DNA, 739 bp, Oryza sativa
  unsure (1)..(739): unsure at all n locations
nnnnnnnnnnnnnnnnnnnnnnnnnnnggagaggaaaccaattatacttttgtcagtctggctgtaccgctggggggatttgcaattataacactgctgcagcaaatttcttatttactttacatgttgaggtaccaccacccctggccaggagattatcatacaatccgtgcagaatactggacagattcaagcagtggcacatgaacaaaatgcaagacgatcatcacaaattcacaagtagttcatccgattgggtaggttgatgccagctcgcgctagaaggtcccttgctattttttcagctgaagcaattacctcctcctcattcaaattcacgatcttcttttccctcataatccatcgaccgttgcacattacagattcaatattttctgttctcatgcagtaaactatgttggcaatgcagtcatgcactgggaccatggaccatataagtggattcacaacaaccatgtccgccttcttcccaacctccagcgaacctatttcatcgtcccacagaactgcttttgcaccattaatagtagccatcttcaatacagtctctgcaggaagagcagttgggttcgttgtaccagtgatgtacgcctcacgcccttttgttaataagacaggctaggtacatctcatcaacaatgctcatcctgttattgcttggcgctccatctgtaccaagagagacacaaacaccagaatccagcatttctctaattgg

SEQ ID NO: 393990 - DNA, 436 bp, Oryza sativa
tgtagtaaccaattgcacattccatcgtttacagcaagcagcagcagctgcaccacttgtgagttggtcagcgactgaaatttactactactagcactatgaatgtatgtatgaaccaatatgcatcaccattctaaaacagacagacagatgctaattcactcgatcagcatatgtgtatgcatcaaaaccggtttcacaaaccctatctacatcaatattagatggtgctatgtatgctagcacaaatttgacctgaaactgtctctgctctgtagagctctttctaggactagacgcatggcacatcgtgcagcgggtggcccttgatgttcctctccatcaccctcctggcgagggacacctgcttccccaccgcgaacacgaacgccttgccgttgcccgacgcgccgcgggccgtcctgccgacgcgccg

SEQ ID NO: 393991 - DNA, 625 bp, Oryza sativa
  unsure (1)..(625): unsure at all n locations
agaaagaaaaaacgctttgcttccatgccattgataagcacagcacaggggaccgggagtccatgaccacattgtacttgcatgaggcgaaaatcattggcaagcagtacaaaatttcatttatacaagttgcccagaagggaccagttaggcactagcattagcatgagtttgtcctttatttttctagcaaattacacaaaataccgagggaaaaaggaggatggaattcaggtcgcactttcagctaggaatgcccagcccctgaattattaacaccacacagaattacggcgctgcgtgaatcccgaactaataaacacgcgccttgggtgggaacgactcaacttcactgtccaatgtgttcatgtggactggcctgtatgccaagcgaaccttctcattctcccagtaccccagcgagtgcttcatccattgctcatcatctcttttcgtgaaatcttcacgagcatgagctcctctgctttccttccgagcctctgctgagtgcatgggtatgcatgcatttatcaagagattttccaactcaatggtctctatcaaatctgaattccatatgagactccaatcactgattttcacnncgggcccccgagctgngcgt

SEQ ID NO: 393992 - DNA, 460 bp, Oryza sativa
gcgccaccatcatggtcggcgccgtcagcttcttcctcggcggcgccgtcaacgccgccgccgccaacgtcgccatgctcatcgccggccgcctcctcctcggcgtcggcatcggcttcggcaaccaggccgtccccctctacctctccgagatcgccccctacaacatccgcggcgccgtcaaccagctcttccagctcaccacctgcctcggcatcctcgtcgccgacgtcatcaactacttcaccgacaagatccacccgtgggggtggaggctgtcgctggggctcgccatgggccccgccaccgcgatcttcgtcggcgcgctgttcttgccggagacgcccaacagcctcgtcgagatggggcggctggaggaggcgaggcgggtgctggagaaggtgagggggacggggaaggtggacgcccagttcgaggatttgagggaggcgagcgaggc

SEQ ID NO: 393993 - DNA, 652 bp, Oryza sativa
  unsure (1)..(652): unsure at all n locations
tttnttttcaaagcgggaaaagaggtgtaagctaacagcacgagttgagatccacaaaacattgttctagagctagctagtacacgaatcgtctgctaccaattactaatacaactttcagagagacaacatcagcagttcagtacataataatagtgcgtccattgatctgaagcaggaaggtgcagcgcaggcatcatgtggagcaacttcattctctctcgtacctcgcaggtgagcgactgcggggcctatcatagccagggctggcttcacggcgttcacggtcgtagttgttgaggggggctgcccctctcatcacctttgttgcccccttgcggacttgcaccacggtgataatcagggctacctctgtcaccacccctgccatagtccgggctgcccctctccctgcctcttccatagtcagggctgcccctctcacgccctctgccataaggacttgcagaccgcccgcgatagtccctcctgtctgggagatcgatcacggcctcttctttctggggtgtatccattccttttctcatcatcatcacgaaggatattccacagagataaccctgtccataagagtggttcccatttgtaacctccagtggtttagtaagcatttcctggnaatcataatggg

SEQ ID NO: 393994 - DNA, 507 bp, Oryza sativa
cgaaaaaaccaggacgttaacctgagcgaccaccatttccaatcacaaaaacactttccagtgatgaaattttctgaagcaaccatcatacagaaaaggaagttaaataagttaccgtcaaggaactaaaacacatacgagttgttcttcaaattcacaatcctaagttgtccaaaaaccaaaaccaaactaatcagggctgacttagctgctccaaactccaaagtcgtccaaattgtgtagagcttgactggcatgaacaataccttcagagtggctcaaatcttaatcaggaagaggaattggccttacgggtaaggcgaacacaatctggataaaccagctcacaaaccgagagcgtttcgacctcctcgcgacgaatttcagaaacatcgacaacattgttggtggtcttctctgcagagatattcaatggcgacctcatacccatcaagatactgaaacccttccaagggtgacagcatcgatatacaaggaagggcgaag

SEQ ID NO: 393995 - DNA, 459 bp, Oryza sativa
tttttttttttttttaatttaattgtctgtcaatcaattcggggcgcttattgcattttagggcgtctcacaatccccataaacggcccttttttattttgtatcgggctactaaatactaaacacatttaagaaatgagagaatttagaatagctaccagaaagaccagtccaatccatagtgatgtaccggaaaatacaacgcttttattgtttgaccaaccatcaggagaagcatatacaaggggtacactaatgactaagactgaggaagtcacaattaatgcaaaaacagctgattggaaagcaactgtcatatttctaatcctccaaggtaccatcaaataaagttgactacatattatatttgatccctcacttaatcaaaattgtaataaaatacaagaagtaggaggggtttaatcatgaatccattgattcttctctttaaaacttatt

SEQ ID NO: 393996 - DNA, 823 bp, Oryza sativa
  unsure (1)..(823): unsure at all n locations
gggagctgagggtgattcattatactggacgtgtgtttccatcaagagataattagccatccaatgcagatgcaatcatgcaaccagaggatgtgaagggtgaagcaacttaaatcaaccgaacaatttttgacagacaagtatgatagatcgtatgcaaataaacaagcgatccaaatcctggcgaatgtgaaatcttctacggggatgaatacagatatcgttcggcactatgaaacagcaaacatcttctgattccacgaggaactggccagaacggtatttaaaagctgattaggtcatctttcttcggatcctgctttttgggcccttcttgggaactgcttcctcccttcttgccaaatatcatctcatcgagatcatcaaggatatcatcatctccacctgaccttgctcgagaaccagctggttttctgaccagggcatcttcattgccgaccgtagcagaatcttcatgttctgtggcaattggtatgactaccggccgttgttctgcgttctcagacgctgcgggtttcttcatctgttcatatttggacagcaccttttggatctcatcattcacactcaaggcctcaaaaagcatggcctcattgtctccagcagtctcaatcattctctggatagtgtgctgagattggtagcattgttgcacaagagtggatgtcaagtcatcctgcaaagcatcctgctgaggagaggatgaaagaacagttggaaagaagtnctatgctgttacgagccacatnaaaagcttccttcgtttcttcagcagtanatgtatgcacttgcacatcttcga

SEQ ID NO: 393997 - DNA, 625 bp, Oryza sativa
  unsure (1)..(625): unsure at all n locations
agttgcgtgctgcactcagttgctgtgtgttgatgtgtcncgtcaattgtttccaatagtaaagaacgccctgaaaagaggataatgcctactagttacaaacaacaaggacaaggcccagttttgcccttaaaaccttaaaataggattaaattgacctacagaatcctttacaagctacaaattcttcagatattagaatacaccaaaaaatgtggcaacagcaaacagcaaaaaaagtactcctcctatcaggccaaccagcttctcagataggtagttggcaaggaatgctcccccaacaattgcaaggaaagttgcaaccaagtgtccagctatggtccgcttgcgacaccaaaaggagactgagcagcacctaacgcaattgtagccagcatagagcgatctccccattctgcaaagaaaacaaggctgaaagacttccaaaggacctcaagaggactagtcaactttttagccaccttctccttgacaagctcctcagcctcagccagctccccagattcagagtttcctgaaggtttccatttgcattattgganagttgccatgcatcttttattgacttgaaaccaaaaaatgcaggagagcaatcgcagcatac

SEQ ID NO: 393998 - DNA, 496 bp, Oryza sativa
  unsure (1)..(496): unsure at all n locations
nnnnnnnnnnnnnnnnnnnnnggcaaaagtctccaattttgtgtgtatttgctgaatatacgtcagcaccgccacgtacggtctacacaagtacacatcagcgcgcgcgaaggtaaaatttctagcccccctctcaatcattttaatcctttaccaagacattggcacaagggggtgaccaaactaatcctctcaaaagaaacaccaaagcaattgttggtggatttccaacacaaccatgaatgcacagtgtatgatgttgttgcttgtaagggagctatccagaccaatttcgatcacatctactgcttttttgttttgcatcatactctattttgtacaccgcctgaattcttgtaccggctcaggaatgcagggttgaaggcctcacatcaaattgatttggcgtcatgctcagcactagaaccccntagagttcttgaaaagagtccccagtccttttggccaaactcaactgttgcaataacacaaacgt

SEQ ID NO: 393999 - DNA, 396 bp, Oryza sativa
  unsure (1)..(396): unsure at all n locations
nattagtgtatgtattacaagtctgtctaatttaccggggggattgatcgatcgattacaatagctgtgtttgacaacgttagattcaatcaaaaacatgggtgggtcaaaaaacagaggggcctataccaacagcaacaaatgatttgatgatgagttaatagaataatatccatccttcctacgaccgagagagagagagggcactaagtaaacaattaatattggtaaacctggaccttactgaacaaacaacattaattctgctaatacatatgtacaacaaacacttttttcagcacatcggagctgactgcggtgctcactcatgctttgctttgatttgctttcctctcctgctggatttaccctgttatataggattctgtaacatcg

SEQ ID NO: 394000 - DNA, 567 bp, Oryza sativa
agccaatggaccaaccataatgctaatattgcaatcacaaacacttaacatgagtttcgaagatatgttacattttcaacaaacattagaattttacaattgcgcacgaatataaattacacttctttccccttttatttatgacacaagatggcttcaaacgaagcacttgaagccccctattaacacagcaccactaaatcatcaggatccacagttcctaaatacacagcacggtaggaacatataagttacttgccagttgaaatgaaacagggcccagcgaagggaatggttggcgtttttaatgcatgaactgtattacagccagttgcgatcagaggtgctagccccggtgctaaagttcaattgcttctgataatccatactgttagcaagcatagccgcaatgttgccaccatgcaccctgccttctggaacagggtgattgaacatgatgaagagcctgcttggtgttagcggcaaatgtctaccaaagttgaaagaatttccaggaagggtcccatgactaacatcagaatcagcaccagtagaaccaggcagggc

SEQ ID NO: 394001 - DNA, 514 bp, Oryza sativa
gttattacaactttctggactgtcagtacagctatagatcacaacaagagtatctaaattcagaattggctaataaatttacaattatcttagtttacaactacattttcccacagatgtaagatccagaagctaaaatgctggagttatattgacaccaagggacacagcaatgaagatgtttcatgctgctgcatctgcacaaaattgttgccctcttttcaggagcgacaagacatttctgaactgcggatcagcggatattcatgagcaccttgctaccttcatctcctatgtattcaccacaaaaaatactggatctaatagatctgaattttcacacagctagcaccccaacaatattaacgtaagctagcgaaacctatgtggtatgtcacaagcagctaaataaataatggagcctcagcatgaacacatacaatctacagagagcacacacatgatctgcatataacaaatcacaatgggagaagagaccggacatactgccggg

SEQ ID NO: 394002 - DNA, 784 bp, Oryza sativa
agagtgaaaaaaaattctaatgctaatttaggaaggggtacaccaggagcaaattaagtggagtaatccaacaaaatgaaaaagaagcctagagacacacacacacacacacacagaactaatagtacaattttgtaactacagaactctccaatctccaataagaccgacatggtgttacaaggaagcagggtagcctgatgcttaaacagtgactaatatcgggacagctacagcaattgcagttagactcttctgcctgaagatggaaaacctactggaactcagatacatcttttacaagtcagaaagaaatgaagccatctttggccgccaccggcgatcatggtgtgcggctgcagcagtgacagaccaggaatttcatggatcctggtcagttcatctcagtttcaggctccagaggcggtgaccttcacatcgcccgatggtgttctcgcgctgtcaggtatcgactgagcaggagatgcccagctctggtctgggttgtatgctgaggttacgatgtttgttgttcttggggcgacggagctgtgctgcccttgctcgctgctgtgcgtatcggtactagagattggaacagcaggaggagtctgtgcaagggcgggtgccgcttccaccctaggcttcttattcttctgttctatttgatagcttggtaggaagcttccgacaacaatctgaacaggacttgctgccaccagaaggccagcaactccaccaccgacaacacggccatctgggctggcaagagaaacgctcatcc

SEQ ID NO: 394003 - DNA, 495 bp, Oryza sativa
  unsure (1)..(495): unsure at all n locations
nnnnnnnnnnnnnnnnnnnnnnnnnnnnnnnnnnnnnnnnnnnnnnnnnnnnnnnnnnnnnnnnnnatgtaggaccaagcgccaagcactatgaacaagtcatatgcctggcaacaagcaggaaacaataataagaatggcagtaatacagccgataataaaggagatgctttctcatgggacaccatagttctcaaactacatgaacacaaagttccagacacaaggaaacacagctcacaatagtagatagacttccatacctggatggaacatacttcttagagatttgataggccatcaatagggaccagaccggtcacgactgtaacggtcacccccaccttcaccgtagccaccaccattttgactacgaccagaataacggtcaccaccacggtcagatccataaggggcggcaccggcaccaccaccaccgtacctatcatttggggcaccatatttattacctttaccaccaccattttcagatgg

SEQ ID NO: 394004 - DNA, 404 bp, Oryza sativa
  unsure (1)..(404): unsure at all n locations
nnnnnnnnnnnnnnnnnnnnnnnnnnnnnnnncaaaacataaattgcaaatatattataccaagctttgtatgcttgcagatctttgtacaggtctggtgcctaaaagctataatggtaataattaaggagcagcaatcaaactacggtgcagttgcttatttcagctaagctctgacaaagacctccgaatgcacgggtagtatctgaggactaacagactcatcaaaaattatctgggcgattgctgaagctctttcaagatgcaatacatctgccttgagaaaatggggcagtgcctccgagtggacctttcggggggccttgtgggctgaacctccttggggagcaatcagggaaccagttgtgttaagacggctagctttcctcagcaggaaatccacc

SEQ ID NO: 394005 - DNA, 539 bp, Oryza sativa
  unsure (1)..(539): unsure at all n locations
taacaaatcaataaaggaaaatttnttgttccatttggtccnggtcttnggnaaaagggttgctacccntatcantatcagtatatatgtngntatgttttttttttggtggaaaataaattactatgaagttgtacataatgagcaagggaagcaagtagcttcatggactgtaggagtagtacataaaacatgtgttaagatttaacattatcattagtagtatatagtagggtgttagttgaggccgtcgtcttggaggcgccagtcggtggcgtagtaggagttggggaggccgagccagaacttgaatgcctccgcggcgcgcttcctctcccgcctccgatcctgcctcgcctgcgacgcgtgcttgctggtgaacatccgcgagtgcaggtccacgtacatcctcttgtacttggccttgttgggctccacccccatcttctccatcctcgccaccatttccagcgccttcctgaacagcgccgcccgcacgcacacgtccgccagcgcctccactcgtgccgaatcctgca

SEQ ID NO: 394006 - DNA, 421 bp, Oryza sativa
  unsure (1)..(421): unsure at all n locations
nnnnnnnnnnnnnnnnnnnnnnnnnnnnnnnnnnatgnnntctgtgatccaatcattgcaaggacaaacagtgtaggtatcgatgacaaaatttgactgctatagatgagaagaggacacaaaatcgctcagcagttcactttgacattttgtgacttgctggctaactgattctccaccgtttgatatattcccacgaaaactcaaaattgccattttgataaaactggcgtttttttggtctaaagaagcccaagggcaagtaaaggaaactcatggatgaggtgcaaacaaaattcccatgaaatggttcatatggccatgacttttgcacataaggcatgggcttacggcttccatcttgtcggaaggatccagcagatgctcgatgtccggggttacaatcgcgcgcttgctgatc

SEQ ID NO: 394007 - DNA, 468 bp, Oryza sativa
ttttttttttttttgcaatttagacaaccaagtcaaaatcaggtacaaccccattattcattacatgatcatgcaacacttcacgaaagttgtaatcgaattgagatggcagttaagctttcgaacgctaatacaactcggaaagtattcagtgcctacctgcaggcaacactgcatgaggtggtgctacattttctccaaagcacagaagtacattttaagcagaaaacaggggcttagatgcccttctccagcattgcccggactctggtagggagaccatatagcctgatgaacccttcagcatcagcctggttgtagatctccccattctcaaatgaggagatgtcttccctgtacaggctgtatgggctcttccggggacgcgacgtttacggagcccttgtacagcttgagagtcacggagccggctgttgtcgcggtaatgttctccatgaacgcatcaat

SEQ ID NO: 394008 - DNA, 625 bp, Oryza sativa
  unsure (1)..(625): unsure at all n locations
ttctttgatggagcactcagcgatgtggagctgagggactttcatgacaaatgcgtgagtgctcctctccagcctactgaaattgcaggcgtgaagagagtggttcaagagaagatgcctgaaggcgtgaatgacaatggccttaccttgactggattcctttttcttcatgctctttttattgagaaaggacgactagaaactacatggactgtcctaaggaagtttggttatgataatgaaatcaagcttaaagatgaccttattccaacaattaaacgagcgcccgatcaaaccctggagttgacaggtcaagccattgatttcttgagaggaattttcaatatgtttgacacagataatgatgatgctttgctacctgctgagctggatgatcttttttccactgcacctgaaaacccatggtctaataatccatatgtggactgtgctgaaaggaatgtcttgggtggggttgtcccttgaaggatttctctccaagtggggctctttatgacactttctagatccagcaaatagtttttgccaaccttatatatgtttgggctatttcgggggtgattttggctcagcatttnnccactattagggatangacggggtt

SEQ ID NO: 394009 - DNA, 515 bp, Oryza sativa
ttctttaccaccaccttcatcttggttggctgcggtcactccgcctacctacctgccgctgcagttggcttgctgaaccctcctcaagaacccacgcctctcctctcgcggcggctgctaaccgagccatggcgcgcaagaagatccgggagtacgactccaagcgcctcctcaaggagcacctcaagcgcctcgccggtatcgacctccagatcctctccgcccaggttacacaatcgacggacttcacagagctggtaaaccagcagccatggctgtcaaccatgaagttggtcgtgaagcccgacatgctgttcgggaagcgtggcaagagcggacttgtggccctcaacctagatattgctcaagtcaaggagtttgtgaaggagaggctgggagtcgaggtcgagatgggtggctgcaaggctccaatcaccaccttcattgtgggagccattttgtaccccatgatcaagaatactacctttctatttgcctcgagaggctgggcagca

SEQ ID NO: 394010 - DNA, 461 bp, Oryza sativa
atctcctcctcccaaatcaacccacacccgtgggatccactccgctgctcttcggagggcgccgcccagctgcttgctccgcgttggctggctaccagcggctctgtgcgcgctcgcgctcgcgctggcgcccgcctcggacgccacgtcggcgtcgctggtgggcatcaactacggccgcgtggggagcaacctcccgccgccgcaggccgtggctgccgctgctcgagggcctcggcattggccgcgtgcggctctacgacgccgaccctgctgtgctgcacgccttcgccaagaccggggtcgagctcttcgtcggcgtgcccgaccagtccctggccgggctcgcttgacccgggtggcgcggattcgtggctcaggtccaacgtcatgcccttcctgccggacacaaagatcgccgcgctcaccgtcggcaacaagtgttaacgggaaaaattcgt

SEQ ID NO: 394011 - DNA, 639 bp, Oryza sativa
  unsure (1)..(639): unsure at all n locations
cagactttagatnctttgagggaaaccatcaaactcccatttcttcatttggatcctcaggctcnaaatgtgncagttgatgtgttcagaaacttgtcaccgcatgttcaagcttgtgtnccagatctcttgaaggttgctctaaattgtatggacaatgttagagatactgatgggaccttgcgtgcagtcaagtcaaagatcgcaaacctcgtggcaagcaacatgagcaggaactggccacaggatttgtatcagaaggtggcgcagtgcatatgatggggatctgtccggccatatacctgacactatcaaaagcttccgaaagcacgcggaaatgcttttctgtgtttgtgctggtgatgtgcttatggtccgaaccggaatgtttcagactggtggatgcaaatccttttgatcactcagctatatcagccaaaagagaacatatatgccatgcccgggggtcatctgatgtgtagtgtgtgaaatgtgaaacttaatggcaccaatcagaatctgtattattaatccatggttgtaaagcagtttctgaatatccaaatgcactgttgcttagttcgaggagattatccgcggctctattgtactgtcgaacaannnnnnnnnnnnnnnnnn

SEQ ID NO: 394012 - DNA, 483 bp, Oryza sativa
tctttatatccgtagagcaaataactcatatgccgagagtttatcattggtgggagcttcaataggttagtgcgcttggcgaattcacaggccctatcttgtggtatgaactgggtacgcgatgatttgcactgcgtatcgggggcttaccattagattatgccacgactttgtcaagcgttcaaacccactgaaatgttgtgtgaaggtaaatatttcaaagtgttcatgaagaaaaggcaggtaaatatttcgttacttccccgtgacatgctaagccagaaacaatctcgctgcatgtgatatgctcagccagaaacagaaacaaaagagaaaaagagagtgattcttcccagcttttttcatgtgttgtctggctagagcctactcgctgagtgcctataaaaggaacgttacgaacgaaagaagcagactcaagaatagtatatcattggtgtaagcttcaataggttagtgtacttt

SEQ ID NO: 394013 - DNA, 618 bp, Oryza sativa
  unsure (1)..(618): unsure at all n locations
ctcttctttacaggaacttgtttgttttgcagccaccaccaccaccaccctccaactgtccaaccccacacaggtcagcacaaggcatgggggagcttagctagctttgccttttgccttctccatggctccatcctgtgagcacatatactactaatccacccctaatccgttgcagaaagcctttgctctcttcttgctttcctcaaatcgttgtgtcaagccagcagctggagcagagcagccatggcttcctaggcctacctagacgaagatgcggagttaggcacggactcttttgaccagcctggatgttaaatcagtgaacttccttggatgcttaaagaaagtggagtgagcttttctctagatttgcagttgtacaagcaatattgaccatcatgtctgttgagggcggtgaagcagattggtgcctgcacacctgggtaaacctgctgttgatcctgttcatgcaaaggcgagcaaggccggaaaagatggcaggtcagaccttattgctaaggagattttagnaggagcaaaaagccggctcatcggcgggcaagagtcttctgaatctatattnggcaagggccttctaacggttggtccagctct

SEQ ID NO: 394014 - DNA, 465 bp, Oryza sativa
tcggtcgaagcaatggcgacctcgtcgccacggggcgcttgcgctgctcctctccgtgcgccgccgcctcctccccgctccgccccgcgcgccctcccccgcggcgccacctcgcctgcgcctgcccctccgccgctcgccgccccccgcgcgcgccaagttcggcaagttcgaggcctccgacgccgcccccacggaggcctccgccgaggaggcggaatcggcggcggcaggcgggtgatggggcggcggaacagaaagcggaggaggacgacagctgcttgccgtcggacttggagggcgcgatatggcaatcggggaaggcgagcgccgacttcgcaaactctggtggcatgcgaaccattgcagagctactgatccctcaggtggaattcctcaacgaggaaagagcacaagctgaggtctgggcactgtcaaggatattcctggacacacttggaaaaa

SEQ ID NO: 394015 - DNA, 777 bp, Oryza sativa
gaacgcgatggcgtcggcgctgctgaggaaggcgacggtaggcggctccgcggcggcggcggcggcgaggtgggcttccagggggctcgcgtcggtgggctccggctccgacatcgtctcggcggcgcccggcgtgtcgctgcagaaggcccgctcctgggacgagggcgtcgccaccaacttctccaccacccctctcaaggacatcttccatgggaagaaagtggtcatcttcggcctgcctggtgcatacacaggagtctgttcacaaggcacacgtccctagttataaaaataacattggacaagtttgaaagcaaaaggggttgactctgttatcttgtgtctctgtgaatgacccttatgcccctgaatggatgggcagaaaagctaccaggcaaaagatgctattgaattttatggtgattttgatgggagtttcccacaaaagcttggatttggaagtagacctctctgctgctttgcttggccgccgttcccacaggtggtcagcctttgttgacgatgggaagatcaaggctttcaatgttgaggtagctccttctgacttcaaggtttctggtgccgaggtgatcttggaccaaatctgatccgagtaacgaaattctgtcgttgtttgttttctcatgcagcatgcatgcttttgctgtagtaaataaacgaaaactcgactactcgagtatccatgtaaagatgtttgtagtctgccttgtacgcccagaatatttgttttcctgttacaaaaaaaaaaaaaaa

SEQ ID NO: 394016 - DNA, 535 bp, Oryza sativa
  unsure (1)..(535): unsure at all n locations
tgtttggataaaaggcaattacctgaagtggacaaaacttctatgtacaaagcttctggatatatggacgttgataaaataaatgcagctgcttggcccgctttggtggctgacttggatgctggagaccagagcattacagctcttgcatttggttttacaaggctcttccagccggataaacccgtgacgaaaggacaagtggctcttgcactttcaactggtgattctgctgatgtggttatggaggagcttgctcgtattgaagcagagaaaatagctgaagatgctgtaaatgcacatggtgaactcgttgctcaggttgagaaaggatctgaatgccacttttgagagagagcttacaaaggaaagagaaaaaatagagagacttgaaaagttagctgaagaagctagggttgaattggacaagttgagagcagaaagagtggaagaaaataatgctctgattaggggcagagcttctnntgaatctcaaatggaagttctctcaaaattganggagttaagtagaggt

SEQ ID NO: 394017 - DNA, 340 bp, Oryza sativa
tgtttttctcccccacctccacctcctccgctgccgaggcgagatctcgccgccgccgccattccccaatccgccccaaaacccccaccccccaaaccctccgatcgatccgagggaggagccaatcccgcgctcgaattcgttcgccccgaatcagccgctggatgcgtcgagctcgaggcggcggaattcaaatctgagctcgccgttggcgcggatccgacggggatggcgacggcggtgtcgaagtcggcggctaagccccaccccaggtcgcccaccaccgcgcagccgccgaacaacggctccgcggcgggggcggcggcggggggcgggggcg

SEQ ID NO: 394018 - DNA, 455 bp, Oryza sativa
  unsure (1)..(455): unsure at all n locations
agcctctcccaccaccaccaccaccaccaccactacacactttgctcatctcatctccctccttccctcctataggaatccaaacccgccgcatcccggttcatgtcctgccgctccccatgtcgccgcccctcgagctcgactacataggcctctcgcctccgccgccgccgccctcctcctcctccgccgccgccgcccgcgcggacgacgtcgacctgaagggcaccgagctccgcctcggcctccctggctccgagtcgccggaccgccgccctgcggctattgccgctgccgctgccactgccaccacccttgagctgctgcccgccaagggtgccaagcgcgtgttccccgacgaggccgcgctgacgccgcccactgccgccgccgggaagggcaaggcggcgagggagggggaggaggtgggggttnaggaggaggaaagaaggttg

SEQ ID NO: 394019 - DNA, 509 bp, Oryza sativa
ggatcagcatttaatgccaaagggttatgcaatgccccaactgccgcaaaattgaaaaggggaactggctctatgcaaatggttcccgacccacacaagatgttaatatggatgagtgggctcatgatgaagacctttatgatgttagttactcggagatgccctttcggtttcactggtgcccatttggtcgtttggctcaacttccatccttttttaaggaaggagaatcatcacccccagttacttttcatgacttcatgggacaacatatgtttacggagcatgtagctgctgtatcttctgcacctggggcagctcatccatgcccatatgtggcatacttgcatcctcttccatcattggcgtcatcatcaagctctcatgttcctgagagaactatggatggtcctgcatatcatgatccctggcaccccttggctgggccttcagatggtaggcccttgcaatcagtgcaacctgctgattttcatcataaccattgggcg

SEQ ID NO: 394020 - DNA, 479 bp, Oryza sativa
gatgtggtggtggtggtgtgtggcctccttgccctccctcctctcgcgagggtgccatgcctcccccaagatcctagaacgcatccccacaacctcacctcgctcgcaagaatcttcttcccaccatcgccctccctcgggatcgatccaacccgatcatcaatcgcggcggggaaggaggaggaggggatggaggcggacgccgggaagctgttcatcggcggcatctcgtgggacaccaactaggaccgtctacgcgagtacttcgacaagtacggcgaggtggtggaggccgtcatcatgcgcgaccgcgccaccggccgcgcccggggagtctggttcatcgtctttcctgaccctgccgtggccgagcgggtcattatggagaaacacatgatcgatggccgcatggtggaggcgaagaaagctgttcccagggacgatcagcacgctcttagcacgagcggacgtaagcgctc

SEQ ID NO: 394021 - DNA, 493 bp, Oryza sativa
gaccagacgtcgagtcgagcattaactcagtcagggtggccatggcgctcaaggtcgtctctttccccggggacttggccgcggtctcattcctcgactccaacagaggaggagctttcaaccagctcaaagtggacctcccgtttcaaacgagggacagaagagcagtttccctgagaaggacttgctgttcaatgcaacaggctccaccaccagcatggcctggtcgagccgttgttgaacctgggaggaggtcatgggatggccccaagcctatctcaattgttggctcaaccggttctattggcacacagacattggacatagttgcggagaatccagataaattccgggttgttgctcttgctgctggctccaatgtgactcttctagctgatcaggtgaaaacattcaaaccaaagcttgttgctgtaagaaatgagtcattagttgatgagctaaaggaagccttagctgattgtgattggaaagc

SEQ ID NO: 394022 - DNA, 517 bp, Oryza sativa
ggcaaaacaatgcatacactgtgcctcatttaagagaaccgcagagggtaaatcttggcttcccattccaatattccatcatattaggctaaacagctatagattacaaaacatgccagagtttgaaggtgacactgctgtagaaggaaaccatgtcccatggcagtatggtacatgttccaaccggctgatttggagaacggttggaaggtcaacaatctagagtactagacggaacatgctgaaaggaacagattagatcaaggaccagaggagctacacaatgaacgaacagaacaaggctggcatttttattttagctgtctattctaaagagctcttgagactactgaggatatatggtcattcactatcactagttcactactgcataggtacagttggcctggggagcattgagttgactagctcctcgtttatcttcactggtagcggtggcatctgcttcatgatatctggagcatcatttctctctttcaagaccctgactcgtgcc

SEQ ID NO: 394023 - DNA, 675 bp, Oryza sativa
  unsure (1)..(675): unsure at all n locations
ttttttttttttttttttaaaatcctactaatatttatttttaaaataccataccctcacactcattttacttttaaccgaacaatataatagcccatcagatgcaatgtttaacccctaactccggctctggcttcacattgggataaaagggtttgacctctaactttggctatggcttggcttgggggttagtccgaacccaaatgggaacagcgggttgtaatgcttggcgccgaaattcatcggcagctggccccccggtttgaaccaagtccggggcagcttgccggtgaagccgtggatccccgaacagcacgtncggcgacgcgtgggccctccgtgccggggagccaggcggcgacgaacgcgtccatggcgccgatgtacggctccaccacgagcggacgcccggagacgagcaccaccacgcacttgacgagcccgcacacgtccttgatcaccttcggccccggcgacggatggtcaggttcaggttgtccccctccgtctccgcgtacggctcctcccccaccaccaccaacgcgtagtcgtactccttggcgctctcggcgatcgagcttcttgtccgggtggcttcgtgtagtcggatcaacgtggctntcgtccaacggcggccttgatcgcctccaggancgtcgtccggnggtgang

SEQ ID NO: 394024 - DNA, 536 bp, Oryza sativa
  unsure (1)..(536): unsure at all n locations
ggtcaagaatacttaccattttccaattctatacaagaaatttcatatttgatcaatgtacacgtaatatgtatagttcccctagcccccgactgttttatcgggagattctcccaggaagacagtcagataagacatgtaaaaaattagtaaagaggaaattcccctaaaccctggctgtgtgctcaggaatgtacataactacgggatatactgactagaatgaacaagtcgatatgaggaaaaataataataatctagaatgcagactagcgtcccatgctactggagcatcgactcgatgcgtccgtccttgtcgtacgcctccacaatcttcttggcataggaaggaatgtgctgctccgctctttgcttgccccatgcccgattcacatggaggtaattccttatcgtgtgataatccagagagtagcgagcaaactctagccccttcgnnccaatcagattcagtagnaaggctataacattgccgacaaatgtcggagctggctgannnnnnnctctcccctgttttg

SEQ ID NO: 394025 - DNA, 470 bp, Oryza sativa
  unsure (1)..(470): unsure at all n locations
nnnnnnnnnnnnnnnnnnnnnnnnnnnnnnnnnnnnnnnnnnnnnnnnnnnnagaaaatagcaggaccattgtatgaaaaaaaaaagcccaagccttgataggagttatacacatgaaaaacaacccaaacttggttgagttagcccctctcgagagtaaaacacggccactaatctcaaaaagctaagattaacgtcatcattttcaccatataccccacgcgcaatttactaattaatcggaaactgatgaaatcatcatcgggtgtagttggaaacccccacacccacctgagccgccgccgccgccgccgggcgagtgggctcatgggaggttgaggaacacggcggtcgggtccgggtcggcgaacccggcgccggccggccagtaggacgccatgtcgaacgccggcggcggccactcgaaagtgcaggtccgggtcggccagactcttggtgatggacgggta

SEQ ID NO: 394026 - DNA, 380 bp, Oryza sativa
ttggggtgaactgaaagcgggaaataatttaatatcaaaattttctgatcgagaattgaagactcgatcatgggcccaggtaggagagcagacaccatagaccgatagactttctgctcactccacaaacctagctctattttttaaatttaaaatacatttttttccgtcccctgtgtgcataggtagctagacaacggaagaattccatgcaggcttagtcgacttggatctctgatttgtagagagcgttggccttccaattatcggggatgacgtcgttggcgacaagcttctggtcagactcggtggtgacacggagggagaaggggcccttgagtggcttgggagtgtctattctccagatagcaccccatgac

SEQ ID NO: 394027 - DNA, 399 bp, Oryza sativa
gaagctgtcaaattcaaatactgtatatgtttatccattccttgcttgcttgctgatcattcaaaagaagcttgaaggaaaaggattaccccataatttgggagatttttactgttaacggaatacgaatcatgtgtgttttacatatctcatccaaaaggagaatagaacaatgagaaacaagatggatgattggaaaacaattcttattagcaaccatcatttggttggttgtttagtcctctggatgtcttggaaacagaaaaccacgcctgtcagaccgaaatcatcctcaaataacggtacagaacataacaaccatcacttctcttctgtcaatcgcagcactagccacatcttgctgagttggcgccacgtatgttgggttgggtgtaccca

SEQ ID NO: 394028 - DNA, 495 bp, Oryza sativa
ttattcggccgcggcgacccggcacggtggctggagatcgccgggaagctgctcgcggcgcgggacctggtcggctgcaagcgcctcgcggagcgcgcggtggacgcggagcccctcctcccgggcgccgacgagctcctcgccgtggccgacgtcctcctcgcgtcccagcgcctgctcccctccggccgccccgatcccatcgccgtgctccacctccaacccaaccccgaccccgccgaggtcaagcgctcctaccgccgcctctccaacctcctctcctccaaccctcgccccggcgctgacgccgccctccgctgcgtgcaagaagccttcgctcacctctccgattcctcggctaatcccgctcccgctctcgctcctcctgctgctcctgcttccggcggcgacgcctctgccgccgcggccgatgcgttctggacggcgtgtccgtactgctgccatgtgtaccagtaccagcgtgctctgatgggc

SEQ ID NO: 394029 - DNA, 558 bp, Oryza sativa
gcaactggaataaaccatccacatcgcgcaggatcactcaatccaagctgtgaaattcccagcatatgccacgttacaacctctggtccttccacaaaaattgaaaaagaaaaaaaaagcaacatctctagaaggctaaaataaacacttcaagaaaccgaacatttacaattccagcgcctagaatctattcccgggtgggcgagatgcccatgcagggctggaacagagattcgacactcagacaacagttccaaatccatgaccgatgcgatcgctgggttgattatgactgctgtatatcccgaaattaatctcatcatgcaacatgattagtcaccagacttctcaagttcacacagccaagtggttgtcaatatcaaaactgcgaagatctgaagcaccagttcctatccttttgtttatagggcagtagtggaatttgatatttccggacttgacatcttcaagatacatcctcaaggtgacaatgatcgaagaaaatgctagagaatcaaatggtatgtcatccaaggcaaaaagtgcacattctagcga

SEQ ID NO: 394030 - DNA, 767 bp, Oryza sativa
  unsure (1)..(767): unsure at all n locations
ggaatggaaagccatattattattagacagcaatgtgctcactgagaccatgagacattaacacatttttcaaatggtacttggaagttatccaagtgatctgtattcataaactttacggactgaagaaagaatgaatgatcccatgtaaatgggaaagatcagctgcttatgaaaatctacgttgatgcatcagggggtacaatccttaacccccaactatttctctactttctacactaaacacattgctaacgaaggaacaaacactaggcctatcagacgtcaggtggttaaatacgtgatctggtacaacaagcatggcctcaacagctagagcttttgcccccagctgtgatcactcatcagtaacatgaaaagtggcaacctatcaataatgattaaacttctttctatggcgactataatctgagacatatctgaaactctggccacagtcaggagccgagcacttgtacggtcgctcgcctgtatggactctgatatgctcagtttgcgcccacaaccacttgaaagtcattggacaaccatcccaggggcatttgaatggcctctcatctctggtgtacacactgntgacgcttcaggtatttgtgagagctgaagcgcttgccacaagactcgtcggtgcagatattgcgttggtgagcacgaagttcagcttnagtctcaaatgtcatgtcacaaaattctatggtcacactggaaatggttccacctttgncttcttcctctnnatttgcagt

SEQ ID NO: 394031 - DNA, 279 bp, Oryza sativa
ataggcgtaccagagcgggcaatggcggctcatgaagatctcgacggagccgagcgcccaccggagcacctggtgcagacgatccgacaggttgatgggcgccgaccccttgaatgccgccctcgccggcgtgcagtacaccgacttccacccacggcaatgcatcttgaaccccgttaagatgtcctccgtcaccgacccgtagatccacccaatctccttgccccactcggtcttctcctcgtagccgcagctgatgacgtggatggcctccttgat

SEQ ID NO: 394032 - DNA, 439 bp, Oryza sativa
  unsure (1)..(439): unsure at all n locations
ttttttttttttttaaccacgaaagatttttttactacatgcagttcacatgttcgacagaatcacaatgggcaccagcccaggctcacagaagtacagatcatgtcgcttaatcaaaccacctcataagcaggcaaaatctggagaactacatatcacaatctctattgacataacccagacatgctccggaatgcagaagcatcacctcgttcgacggctctgatcagtctcgaaaaccaaatcttccattggatctcactgttgctgctgcggctgctgagctaggggttgttggtagttgggataaccagcataagctccatacccgtacatattagggtcctgnggttgagcatacccataaccctcatatccttgccccatnaaccggtagtatccagcatnagcaccaccccactggttggaatcctgtttg

SEQ ID NO: 394033 - DNA, 288 bp, Oryza sativa
acataaatatatatcagcgcgtctccatgtatagagaatcgattatataggtttgaataaacattatgcgaccgaagaacaggaagaaaaagagaaaaaagaaagtgtgacaagctcaaaacaaattaaaaggcgtttaacgatgacgacacattgaatcatttctagaagcaacagcgcatctgacttggcttagctagcagctaacatgtttctgaagcccttttttagttccacacatcattggatggttggccactccttcctaatctcaaagtagtaactcat

SEQ ID NO: 394034 - DNA, 424 bp, Oryza sativa
  unsure (1)..(424): unsure at all n locations
gaacagaaaatctaccagagcatagattattgcaaatgttgtttgttacaattgacacttacaaaataacatgacaacaattgccaaaatgaaaaaaaacaggaaatgaaatcaaagctttctcaaaaaagacgcgcgaccaaaactaaactgattatgctattctccctcaaactcaatactctagttttcactccctccagttaaaattaggccggccaaatcatatcactaaaaatgcaacaaatgattactgcctataccatgacttatatacattatgagtttggggaaaaaaatgagatgcactagcctgatnaaagtatatgcatgcatatgcactggtagattgtcctgatggcttttttcaggcttgtatctacctgttaattagggtgaaatgtaaaccagaccagcacatgac

SEQ ID NO: 394035 - DNA, 484 bp, Oryza sativa
tttcttccttttttttttttttttttagcactaacaataataatcattgatgctgaagaccatgtcatgaaacaatcgggcatatggttcattgtactgtgcatattttcacagctttgcacatacagttctctggttatagtagaaggaagataacttacagaaatatagccgaactgcagaagcgtcgaagagaaaatactgacaacataaatattgcacaatggaaacatgaagcatggcatcaatgtagatgcaagattctctctctcttttcttggtttatatacacggatgcaacagcacacatgacaacagggctattaccaagcgtctgaatgaaatgggagttgggtggattcctcactttctcaggcctttacctcaactcgtttcacagtcgtgttaggagggtttggtcgttgttgctgctttgattccagcttggatgatccttttgctgcattcttggagctcatggatt

SEQ ID NO: 394036 - DNA, 700 bp, Oryza sativa
  unsure (1)..(700): unsure at all n locations
tcacactttctacccccaaacttgccctccaatctatctccgccgccgccgccgcctccgccgcgagagggcgtcgccgagctgcgcgggaggctcgcctcccgcagcatctggccggattcgtcgtagtcgaggcagctgtaagcgagagagagggagatggccgcggccgccgggaaggcggcgatggagcggcaccagtcgatcgacgcgcagctgcggctgctcgcgccggggaaggtatccgaggacgacaagctcgtcgagtacgacgccctcctcgtcgaccgcttcctcgacatcctccaggacctgcacggccctcacctccgcgaattcgtgcaggagtgctacgagctgtcggcggagtacgagaacgacagggacgaggcgcggctcgacgagctggggaggaagctcaccagcctgccgccgggggactccatcgtcgtctccagctccttctcgcacatgctcaacctcgccaacctcgccgaggaggtgcagatcgcgcaccgccgccggatcaagctcaagcgcggggacttcgccgacgaggcctccgcgcccaccgagtccgacatcgaggagacgctcaagcgcctcgtcacccagctcggcaagtcgagggaggaggtgttcgatgcgctcagaaccagaccgttgacctcgtgttcacgngcattcacgcagtccgtca

SEQ ID NO: 394037 - DNA, 613 bp, Oryza sativa
  unsure (1)..(613): unsure at all n locations
ttcggccggaatcttggcgccgtccgtgtccgcgggagacgaccgcttgatcttgttcatgatcctctgcaccgagtcctgcgggtccgacgatggcgcgtcgttcatggatgacccccgctcgccgtcgatggacaggcgcagcgagaggtcctggacgtccatgagcgagtcctccagggcttcctcctcctcggcggccgcgtccgccggcgtgtccatcagccagcgcgggttcctgatccggcatccggctatcctggtgaggtatgtccggcaatgctccggccacgagtagagctggatgttgngcaggncgttcttccggcactcctgccacaggttcttgtccgccaccagcttcagcagcgcgtcggcaatggcgtgctggtcatgcgggtctaccagcagtccattgttcagagcatttttaatgtcaaccggaccgccgttcttggtggcgacgatcgggcagaccgtgagccgcagcctcgatcagggtgagaccgaaaggctcaacaagagcacgactgatgaagacgcccttaattttncctgtgaggcgataaatatccggttcgcctgactgcttgtgatgcttggggaatgcaac

SEQ ID NO: 394038 - DNA, 548 bp, Oryza sativa
  unsure (1)..(548): unsure at all n locations
nnnnnnnnnnnnnnnnnnnnaaacatgaacaaatatggcgttttatattggcatgtaacatgaacagaagaacctacaaattacgaccaagttcacatccaactcccaaacaaaagaggacgacgcaaagttgccaacaacacacatgaactgaagactccgcagcatagggaagcccctgcagggcggtaaatctagtcagtgacccacgcgctgtcctaccatgtatgctgctgacctgctgtcctactacacaaaggcaagaccccgcggggaactagctcctttttgtcaccnggcccgcgcgccgggtcccgcccgtcgcggggttggcntcggttttttttggctaattggccccggcggaaccggnaggggcccccggcttgcnccctnggttnggcactggttacccttggcnaaaaaccnaacnttncaatctgccttaanaaattnggnaacccggcccccccctaagccnaaaagggaanattatggnaaaacnaatggccnanannggaagggcacccgtgtnnaanccntntttc

SEQ ID NO: 394039 - DNA, 275 bp, Oryza sativa
  unsure (1)..(275): unsure at all n locations
nnnnnnnnnnnnnnnnnaaaagcaaccatgagttgtttccctttggcctccattgattcatcaataaataatgttacatgtaatattctccgtgtgttatatggtggctatagtttagtggtagaattcttaccagccacaaattaacgaactttgtacatttttctcacaaattaggagaaaagcaggagtaaaacagagccacgatcaaaaccaggagtaacccggagctcgttgttatggcttctttccctggatctttttaaggtatttcc

SEQ ID NO: 394040 - DNA, 318 bp, Oryza sativa
  unsure (1)..(318): unsure at all n locations
nnnnnnnnnnnnnnnnnnnnnnnnnnnnnnnnnnnnnnnnnnnnnnnnnnngagcaaaagcacacagtaatttgcataaatatcatttacatcatccgatgtacaacaaattaatcaagccacacgcaaaatctatattgtaaggatgtaaagctcaaatcctcaatgctgctctcctcctaatattgggaggggcttattgcttgtgagcaaatcaaatcaatacctatagttccttttctgttttccctcaaattttacaactcaagcattgtacaaaacaagaaaacaagcaaaatggcaaaccaaagtatcaac

SEQ ID NO: 394041 - DNA, 659 bp, Oryza sativa
  unsure (1)..(659): unsure at all n locations
gtttaatccatatccaattgagaggaagcagagggggagagaggaaggaggcaggaggctgccataactccgcccgcaacctccgctctctgtctcgcggtgacctcgtacgtacccccgcgctagctgttaatggaaacgccgcgccctctcctcctcccttcccatcatcctcccgcggcctcgccctcctcttcttcttcttcctcctccttcccctacagatagcgaagcgagatggattgctgtagataggatacgcatactgtggctcttcccccctagcttcttccatctcctcgatcgtgttcagtttgattttggctttcgcttgtcactgtgtgggtggtggtgttgttggccatggcgaggagtggtggggagttggtggtggtggaggaagacgatgagtacgccaagctggtcaggaggatgaacccacccagtgttgtgatagacaatgactcgtgcgacagtgcaactgtcaatccgggttgatagggtcaagaagcatggcattttacttggaggctgttcaaagtacttgtgggacctcaancctcgtcaatcancaagggcttacaagtttcttcaagacggcaaacttggttcaatggaccgtgttcaantgtgacccatcaaggacggcaacaaggtgc

SEQ ID NO: 394042 - DNA, 337 bp, Oryza sativa
cctaaccctaaccctagcacggggctgccgcccatctccgcctactaccagacgcgcgcggagcaccacgccgtcgtctccagcgactggctcgcgcacgccgccgccgcgccctcgctccctccctcctccgatgccgccgacgcggacgccgcctccgacgccgcggcgctgctctcccccgggagcaacggcggcggcggcggggtgatccaggagttcaaacttctggcgccgcaagcccgaggccgcggaggccgcggcggccatcatggcgctcgccggcggtattcggttcagcaggggcaccaccatgatggagctcgagatcgagctc

SEQ ID NO: 394043 - DNA, 616 bp, Oryza sativa
  unsure (1)..(616): unsure at all n locations
tacctacagtccagatcaggtgctggtgagcaatggagctaagcaatgcattacgcaagccgtacttgccgtttgctcacctggtgatgaggttttgataccagcaccatactgggtcagttatcctgagatggctacattggctggtgcaactccagtgatccttcctacaagcatatcagagaatttcttgctaaggccagagctgcttgcttcaaagatcaacgagaaatcgaggcttttgattctctgctctccttctaatccaactggatcagtatatccaaaggagctgcttgaagaaatagctgacatagtcaagaagtatcctaggcttcttgttttgtctgatgagatttatgagcatatcatctatcagccagcaaaacacacaagctttgcttcattgcctggaatgtgggatagaacattaactgtaaatggtttttctaaggcttttgcaatgaccggctggcgacttggataccttgcagccccaaaacattttgttgcagcctgtggnaagatccaaagccagtttacttcaggtgctagtagcatatcacagaaggcagggctcgctgctttgaacctnggctacgntggtggtgaagca

SEQ ID NO: 394044 - DNA, 357 bp, Oryza sativa
  unsure (1)..(357): unsure at all n locations
tacagaacccaattcccctccctcctcctccacccgcccctccctcccacacacaccacaccaccaccaccaccacccacccctcgtatgcaattattcacgcccagtcgccgcctccaccgccgccgcctgctcgactcaccaccgcagggcggcctcctcctgccgcatgggtgactcgacggtggccggcgcgctggtgccatcggtgccgaagcaggagcaggcgccgtcgggggacgcgtccacggcggcgttggcggtggcgggggagggaagggatgtttctttttcntnttgcttttgtggggggccccggggtggccgcggccgccgggggcctcccctgcccgttct

SEQ ID NO: 394045 - DNA, 430 bp, Oryza sativa
  unsure (1)..(430): unsure at all n locations
aaaggnagatctattgcctcctcttttgccctccaagggggaggaggatcagggagaaagggagggccaaacaatacaaaaagaattactgcaggaaccctagggattataattagcgagttaacggcaaattaagatgccggtgtcacgtggcggcaaggccgcttcgtcgaaggccgaccccttcgactcggactcggactcggacctggtcccgaagaagaagccgggggcgtacacggcgcccagcggcgcggccgaaggcgcggtacaaggacgacttccgcgactcgggcgggctggagcagcagtcggtgcaggagctggagaactacgcggcgtacaaggccgaggagacgaccgacgcgcttgggcggcttgcttccgcattcgccgagaacattagggaagacgccgccaacacgctcgt

SEQ ID NO: 394046 - DNA, 397 bp, Oryza sativa
  unsure (1)..(397): unsure at all n locations
ttcaaaaggctaaacctcgattacgcctccccaaacccgccgcgaaacgaagcgaaagcgagttcctccgatcccgaccacttgctcttctcatggcgtcctcccacatcatccttccgccggacgacgacgacgaggagcagcgccggctggaggaggaggaggacgaggatccgtgggcgcggaggggcctccccccgcggcgccggagcacgcgatgaaggcggcgctgccgttctccgcgacgtgcgtgcggatctcccgcgactcctaccccaacctccgcgccctccgcaacggctcctccgtcagcctcgccgacgccgcctacgtgaagatctccgagggggacttcggctacgtcctcgacgacgtgccgcacctcgtcgaccactnc

SEQ ID NO: 394047 - DNA, 408 bp, Oryza sativa
  unsure (1)..(408): unsure at all n locations
tctcactttggttccttcaagaaacgaagcatcaagaaagaggagaggagaggaaaagcaagtgaggtttcagacttcagaggtgctctggaggagtttggtctcgatcatcatctctctgaagcctgagagagtttcagctccgattaccacttgaccatggcgagcaaatacagaggctactaccacgacgaggcatcgtcggccgccggcgggcgngcgcgcggcggcggcggcgacgggtacaggagggagaagcaggtgaggaagaagcggctgacggcgcagaagaggaaggagatcaaggaggcgttcgacctcttcgacaccgatggatcaggtaccattgattccaaaggagctcaacgttcgccatgagaacacttggggttttaanatgacaccaga

SEQ ID NO: 394048 - DNA, 391 bp, Oryza sativa
  unsure (1)..(391): unsure at all n locations
tcgttcggaggagcagccgtacgagtgcgtgcggtggttcgacgcgcagcccccggcgtccgggctctttctctgcttcggcagcaaggggctcctgccgccgcccaaggtgcgggagatagccgccgcgctggaacgcagcggcgctccaccgcttcctgtgggtgctgcgcggcccgcccaaggacagccggcaggggcagccgggtggcccacggacgccatgctcgacgagctcctccccgaggggttcttggagaggaccaaggggagggggctcgtgtggccgangngggcnccgcagaaggagatcctcgngcacgntgccgtnggcggtttcgtgacccacttgcgggtggaactccatcctggagagcctctggttcggcgt

SEQ ID NO: 394049 - DNA, 483 bp, Oryza sativa
  unsure (1)..(483): unsure at all n locations
taacctctcgcagaatagacacaggctttgcttcgtttcatggaagaacacacacagagatagaggtgacgagcgagagagggtaataaaccgttgtgtctcactgggggagggaatgatgtccgaaggcgaggagcacgggtcgctgctggagaagatcaacgacatgatccatgagttcaagaagggatcgtcgtcatcctcgtcctcggactccgacgacgacaagaagcaccaccacatgtccaagtccaagaagaagcggctcttcggccggacgaacccgctacatcacgtcctaggaggaggcactgctgctgatcttgtgctgcggagggacaagcagacgtcagggagcatcctggccggagtgaccgtgatctggttgctgttcgaggggatcggctaccacctcctcaccttcttctgcaatcgtcatggtcttcccaccgtctggnttcgtcttgggcnatgcggctcctt

SEQ ID NO: 394050 - DNA, 681 bp, Oryza sativa
  unsure (1)..(681): unsure at all n locations
nnnnnnnnnnnnnnttttgttaattagaagggctctgtaacaataatatgaataaataatttacagactttttagatactaataacaaaacacaagaaaacaccaccaggtaagtggcatccattatcctcccatcactagtcggctcgctgaaaagtacgaaacacatacggtgaaattgtacattttatcttggactatatgtatctctgtacaggagaataccccattattccattgagccacacaaatggcaacactggcatatctggccacgcaaaatgagcggctccatcaccagcaagagttcctcccacccccttcccaaaatcacggtgttagtaagaaacatgaccaccgatgatcaattaacccagattacccagagcaatgtgcccaccagaacacttttgtcatgtgaagacaacagctgaagattgcttgaagctggaaccgggttgctttatttgnagttgtgatcaccctatcctttgnaacaggggttacctaaaactaactccgaagagtttgantgntggattgttttcggtctgatcaggtcttacccagattttgatcagtccctcacgacaaatagtgagaattgattcgttagtgaacancagacctgagagtggatccacatgtactcggtgggnaacaagggggtgagagctttgg

SEQ ID NO: 394051 - DNA, 454 bp, Oryza sativa
tttgtgtttttttgaagttaaccaccatttttcgcactaacataaattagccaaaataattatttctgacaaggatagatatctcaacaatcagatcatagtccagctagttctatccagaaattgaattttacagtaatgttacaacccttcatcttagtgaagtatttgggcttaaagattgcatcctccttgcagttctatggaagagcagccgatgtcaccaccaagtataagaaagctctgagaacctagatgtgtccagcaaatttacatactcctagctaggaaagtagcaaggcctcagaaagatagcagtgctaccagaacacatactaggctcctgctaatctacacaatacaaatcactaagctagacataagccaagaagaagctaggaaatgattctaaaccccaggaggcaaaacttacaagcaagagcacttcaaaacc

SEQ ID NO: 394052 - DNA, 447 bp, Oryza sativa
cctcatgaggatgcacaatttcacatttaaccaaatagtaaatgacagggttacgtacagaagttacaacacaaattatacaaattattcgatctaacaatgtcagaaatggtcatacatgatagaagttctttttttggctattacagagtacagggtgcttcagctatttctcatccatgctcaactgcaaacaccgaagctaagtatatattggatcctacgatagcacaccgttagctccaataatattgttacaacgacttttgctaacaatttacaccgaaggaaatcagcgtaggagtacatcagcacagggacacctaagattcaccaacctgaatcctatgcagctctgctgctctttgttttcattgatgcccctccgtcttcggcggtatgctgcggacgttcttgaggaggtcgtgaatcttgagagcatggcgt

SEQ ID NO: 394053 - DNA, 422 bp, Oryza sativa
ggtctcgagaatcgggatcatatcttgcaccgcatatagcgcatactaatacagggttacaaaacatgtttttgttacacgcgcaatgcaaccacagaatgtccgtgaaaaaaaacaacgaataaaacgtcatgattggcctcatatggccaatacagaaacgtttctaaaactacccttgctattcctgggactgactatgagcaaattaagttcaatgtgcaccttgagagaatcgtttatagggggatatattgctgacggccataaaaatgtggtcgagaatcaaggatactcctaaaccatgtgaatatatatcattcccatgttgagattcaatagccaccggcaaagaactgcctccctgccgttgttgaaaacttgaagttgattctctactggcagtctgtcactcaagctat

SEQ ID NO: 394054 - DNA, 662 bp, Oryza sativa
  unsure (1)..(662): unsure at all n locations
nnnnnnnnnnnnnnnnnnnnnnnnnnnnnnnnnnnnnnnnnnnnnnnnncaaaaaccagaaccaccgtttacatgtgtagaagaaagattgttattacatatggtacttccacaataatgataactacactgctgcctcgatctcatggcatcctggcacagaaaccgcattaatgcgttctaatggcaaagaaaaatttacaggatgaactgaaatacagattccacgtatgtcccgtcccgcttaagattaacatagtacaacctggcattctttatggagttgttcttttctccgtttccacagttcccttggaggtaaactaaaacatcattaacagtaacaagacagcaggctcagtaaggtcggtatcgccaatcagcccttgatctgctactgctacttccgctgtgaccataaccgtaatcatagtcgataccactgcagaacctgccataagttcgcattgaaccataagccccataaagatccatgggttccatgtaaccaccaccagagtcaccctcaagtggtgcagcagtgtctattgcaacctcatgtcctagaatttcatgacttctgcgagctacccgatctgccanaccctcatcagcaaaggtgacaaaaccaaaacctcgatgtccacttcttttagggncct

SEQ ID NO: 394055 - DNA, 448 bp, Oryza sativa
  unsure (1)..(448): unsure at all n locations
aaccgaacaagtacacttcttgataccctgagtcggtgctgaacaaggagagttggctacattatcccattgtacagcataatccccacagggtattacagatttacagtgtttctagcaacattgctctgatttttgctctcaactcactcggcacttcagttgttgcctgggtggattgagcagtgtcaccagggggcttttcctggttctgggagacttctgggagaactatagtttgtttgctcttatctcggtcatcgtcctttttcctttttgaactggaacggtggtccctctggtgtctatgtgaactcctatgctcatcatccnnnttgtannngnnagcttgcctgngaccatgccttgacttggagctcctgtgctcatgctcatcttctgaagagctatcacggngcctatgatgcctgngttccagatccttgga

SEQ ID NO: 394056 - DNA, 482 bp, Oryza sativa
  unsure (1)..(482): unsure at all n locations
nnnnnnnnnnnnnnnnnnttttttntttaacacatgaaccgaaacactttgagatcagaaagcacaagagttcagttgcagtttcaggtttaacaagagaacataagcaatgtatgcgtttccatctgaatggaatgcaatactacagaggttaaatagtagtacagaatctgatttgtctaggactgactgcagggcatcagctcatttaatcttttgagggtacattattgcaaacagaactgatcaaaacaacggtgggatactcttgagacagcaccatgctcatttcattctgccagaactcaacgaggtgaggttggccaggtatgtaagcatctcaaactatgtgttccgctaacgctaggatcttgagatgcttctttttcctgagttcgtggggaacaggaccaaatacacgagtgccaatcagctcgcctttgttgttcacaaggacaatcgcgttgtcatcaaactggatc

SEQ ID NO: 394057 - DNA, 610 bp, Oryza sativa
  unsure (1)..(610): unsure at all n locations
nnnnnggacagccctaagtaaccattactttacaatatggtgctcaaatcacaagcttttacacgtatatatatatagtaatgatggattttatctttacatatgattctttaccctatcacccccaccatctaaccttatattacatttcctgctatacctcctcttctgtattaaatggcaactacaaagctacaaatcccatgccctttcaggcatgttattctcccactaggtgttacaaatgctgccccccaattctctctcttaatgtccatggtcctgattgtttctctgctgtcttcaggccacaaaatcatgcagaagaggtgaatgctacaaaccgttgccgttgcatccatctgatttcatcgaatccatagtccggaagatgcgacggtgcacaccaagaggagcagtagacattgtagatgtccaaccctcatttgaacaaccaggggaaaccgggatgaancattnaggnaacgaggntnactngcagngagtgnccgnnaanccccngtgntcaagggganacattggccaattggnngntanctccccaaggntctgacaantngnaagggccanggaaccggggngnttctnn

SEQ ID NO: 394058 - DNA, 713 bp, Oryza sativa
  unsure (1)..(713): unsure at all n locations
nnnnnnnnnnnnnnnnnnnnnnnnnnnnnnnnnnnnnnnnnngagacagaaaatacgtagatattattgtcggaattgcctgcaaaggctgttataggatactgaacatagcatactgaacaaaagaaacgaaaatgtagcctctcccaacctacagatgggtctctgaacagacgaacatcagcaggtcggccttctacttggacctaagagatgatgagatgatactctcagaaacggcagttaccgattccgcgaagcgacagcatttctaaacgccatgactagagtttcaagctctgcctgccattggtgacagcctcaagcttcaggaacaacccggactcagtttgacatcacgcgaggcgaccgcggacgcacgggtgtcttggaagggctcaccctgataggaagtgtgccaagaaccattccactatagttcagggctagaatggcgctttctgcttgagcaaactcaacaaatgcaatgcacgtcgagtgcaccataatcaccaaggagcctcagccgggaaaccttcccacaaagctgctgaaagaaaaatctttacatcttcttctgtaaccttcttaatccaatgttagtanaatatacagtccttgagaccaatctctttttncatctttccgtccgagggagaaattttggnttcaccagggagaataacctgttttggnaagggaaaactcttaac

SEQ ID NO: 394059 - DNA, 452 bp, Oryza sativa
caatccaatttctcataccatttcagattcaaacctaactacatcgcccatctcagattcaactaataccagatacaatcagaatacaacagaattcaaacaatatttcatctcagattcaacctaataacaggaaatctgaaaacagaaaacaaaacaaatctttcaaacattgaatggaatcactccttgcttctcggcctccactcatagcaaatagaggattgaattacagcaaggccttcttgttgatgtgcaaatgggaatttttcgctacaacttatacatagcttcttgagatgtgcttatcacagatttcccaattaccctcatatcaagttatcaaccatatagagccagtgatcttcaaatttatatcaaccatatacagccattgatctgcaaattgcaaacttccacacatccagagaaccaacctggaataacaatct

SEQ ID NO: 394060 - DNA, 407 bp, Oryza sativa
gtgtttttttttttttttcggtttttagcgacaatttggcactgccatggccaaaatgtgcacctaggttaggacttaggagttcttattccattgttcataagaagctaattagacatgcatacataaaagtggggctgttttttcagaggctggaaagcaccattttgccaagcagtgcctgctatcctcagccttatcagacaaaaaaactcaaaataaacccatgagcagaattcctgcatctctaattactcaagcatatatatatgtacaaattaagtagcaatctggctggcagatcccttcagctccagccgattttttccttcagaacatgctcccaatctgatgacaagcccttattcagaattgcactcaaaatgccgtctgctccggtgaacatg

SEQ ID NO: 394061 - DNA, 443 bp, Oryza sativa
gcataatgttcttcagtaatatatgtactcattcatgacgttgtttccccgcacataaggcctatgactgctcatatcaccccgtctcagctctagcagttacaatagaaaccatgctgcatctcttgctactaacgcactagaaagtagcacatattttgtgtgcatttataggctatttcaacaccaaaatttacaccaacacacagactcaactagtacacaatgaaatccgcatgacgcttatttgcatagttgctcaagggaatgctgaaacaaatgcagagaaacaagttcgatatgtgcaagaactaacgagatttatttattggcagttggctcgggagatttggcgagttacccccgagttagcttcccctttcaaaaccagcaactgtacattctcagagagcccaagtcttcaagcacttcagatccttgct

SEQ ID NO: 394062 - DNA, 300 bp, Oryza sativa
ttttggggttttttttttttttgggcatcctccaacatgtatttttctattcgattgccacgacgcgaaataaacaatgccaccacccttaagacccaattgaccttttctacagtttctatccatcacacaagggcagaaagtcataacagataatattacaccacggagaaaaagattaaagagaatgtactctggttcattaacttagtgatatctctaagctgccaacaaggtgccgtatctgatagcataacgcattctaaaaaagggaaaatgcaacaactaaccccagtaacc

SEQ ID NO: 394063 - DNA, 725 bp, Oryza sativa
  unsure (1)..(725): unsure at all n locations
nnnnnttttttttttttttttaggcaaacaacagggcaaaaataaacccagtgatgatatgatttcaggatcttcaaattttacacaaggggcagctcctcttttcttctcaacaagatggaatagaattcgggaattacaagcgtgcagctttagcctttaagcttgggttatcaaaatcgctcctcttttagcataccatagttcaccagcaccccaaagccttccggtcaatgttgggaaacttggaggttggagatcagggcatatatttatttttcggttattccatcccatgtaatcatgggacatcttttctttgccaacacatcctgattatgcttacattagctggccagacaataaaatatgtccatttccatacctgaatctgggcaccctttcatgaccccgggataaaggggatctcgggtagtgaaatgggaagggttaaagggggattttntngagccaanaaggggtgntnccggtgnnnacnggaggggnaacnctnccttgggnattccaaganncnctttccttccangagcancggtgnggcngtanntaacccgnncaaanggaagnnnaagcnctttggnntnnnaggggnanccccttntngggaaangggangttnattnngtggnnggnntgtnnntanngggnntnnannnngnngnnngntntnnnnnnaantggngntgnnnngnnngtgnnatttc

SEQ ID NO: 394064 - DNA, 567 bp, Oryza sativa
gaccatgagagggtacctcgtattaccaaatactcgcaatgttagtacaatgcacaaatcctggagcaaatttcttttttgttgaccaacacgcatgcaaaacatgagattatccattaacttagcaacataaaaaagcagcatcacgaaagttagctccacttctggatattttacatggtcaggatgctaagtttttctacaaaacagcacttccattctccaaaataaagatactagacctagagctaatttcagaataaatttcagtggtaagattttacaacatgcaggcttctgatggaattctgtcttcatgttccagcaattgttttacacggcatcagcgcctccaagcatgtggccaccatcaacagccatagcgtctgcatagtttgcttgatgctggctcccagcatatggtgcattccttcgcacacgattgggctcatcactttcaccatcagatgcctcagcaagccttgcgatggcatcaatcaacgattgctcttgctccttcagcactttctttgccttctctaccttaggggaactgattattaatac

SEQ ID NO: 394065 - DNA, 843 bp, Oryza sativa
  unsure (1)..(843): unsure at all n locations
acttcaaatgtgtatccgtatattcgatatgacaatcaaacctaaaaattttccccaactaaacaagacctttatatatatacatatttttcaaaaagtaagaatttttttttgcatgtttaaaatactcggcgtggcaacgacgccgtccagcttggagtagagcgccgcggccattctcagcgcctccagcttctttgaagggaagccctcgaacctggcaagcaccagcaatggaagccagtcaggccggccggccggcacggcgccgcgcatgcgcggcgccatggcagagcagccgagctcgaggggagtgagctggtttgtagtgcgcgcccggacgaacgcctgcgtctcgtcggtcaggcacgcgagctgcagtggaacctcgccagctcgcccatgtccatggattggaacgcgccgacggcgtctttcagctccaggatcgccgccgggtgggttccgacgtcctcctcgatttgccggaagtaggccgatctcttggtcatctcggccgatgcgtcggccatgccatgacctgcaccaccgcccttggcgccggccgccgcgacgcccgggctttcttgtcgcgcgagctcttgccgccatgcaggtnagaagcgccgccttctactagatcggtcacgcagatgccggtacatgctccccatctctgccgatcgcttcagcttcgtcgcggatttcttntccgcagcgctaacctcagaatnaaattacagctttggtttccttctgatctgctgtacatacagaggaagtattgtggtatgcagataagcctgataaacatttcgggtatgcgatcttcagcgcttcttg

SEQ ID NO: 394066 - DNA, 456 bp, Oryza sativa
gccggcgtgctgcttctcctcgtgctggtacgccgcctggtggtagctgtggacgctgccttggcggcttggtgggcagaggtcgtcgtcgtcgtcgctctcgtcgtcgtcgtcgcagtcgtcgtcgtcagaatcttcctcctcgcaaccgtaggattggtggcggtattgggtatggccgccgccggcagtgaagtgctgcttgttggaggcagtcctcccgtacgcggcggcagtggcggtggcgccaccgtagtggtgctgcccgccgccagccacggcgaccgcgtggtggcggttgtagttgtacccgccggcgccgcagccgttgacaccctcgatcgcctggtgctgcttgtaggtggcgtgctgcttcacggcgccgccgccgccgccgtggtggcggccgtaccctccggcggcgtcgtactgatcctctatctcgtggtaggagga

SEQ ID NO: 394067 - DNA, 498 bp, Oryza sativa
  unsure (1)..(498): unsure at all n locations
nnnnnnnnnnnnnnnnnnnnnnnnttggttggaaccgaagtgcccctacggaggacatgccataaacgaggtactgaaccatgattacatttagacctagattcgtagtgagacatttatagtcctagattcaaagtgggaaaaattacaaaattacagttgtgcttagcttcttacatattcaaaagaaacatatagaaaaggcggtaaaaaaaaagaagataaaaaaaatgtgaagaaagtaaaagagcccactgacttctactggtctacaccaagaaggccctatacacatcttatcttatagggtagtagtacaccatatgccagttccagtctagcttcagctgcagctgccatctgaattgttctctcatgttcggttcttgaaagatcacactgcaaaatgtttgcttcatgtaatgtttcccgctgaattgccgttgctggtctcgcctcaacctgcaggctatgatggagtatcatctacagatctac

SEQ ID NO: 394068 - DNA, 556 bp, Oryza sativa
ttcttttccatagctagcccactcgagcccttcaacttctcgcccaagttttgaagggatccagcgccgccgccgccgcgatggagcacgccgtcgttgagggggagtccttctcgcccgactgctccaccctcctcatgccggcgctctcgatcggcaacgtggggcagctcgccgtcgacctgctggtgtcttcgtcgcgcgcgaggcgggtggcgtacctcgacgagccgtccgtgctgccctgcgccggcaacgacgccttcggccccgacgccgtcggtgatctcgcgctcgcgctgggaagcttatgaatctccatcccataggctggccttcatacagcaacggtccccaaattattacaagggatggtcggtttcatttgcaaaaaatgttggctaattttataaagcagcattgtaaaaagaccatgttgctaatcctttcaagtttagattcaggcaagagaaggataattgatgcatccagtgatatgcaagtttattacctttcaaggtgcaacgaggacggttctgatccgaaatgtgagaac

SEQ ID NO: 394069 - DNA, 536 bp, Oryza sativa
tcttctaatcggacggcgatggtaaatcgtagggggtaatcaaaagtcgatggtgtattgtacaatgcgacaaagtcgatggtaaattgtagatgtgtgacaaagtcagtggcatataatggattctctcctatatatatataggacttatgaaatgacttagctaaatgatttatcattttagaagtgattgcaagactccaattaatgaaacaaactgttcaatcatccatatattaaaaatattactgaattttaaattggcaaatcatgatatatgggttcttgttctctcttgcagctaaccgctatcatatgtatgatatcgagttaccgatcatacatcaacgctacaaaatcactgttcactaaaccttaagtgagttgccatgtctcgtagatggcaccctccatctctaaatcttggcttcgccactgattattgttgcagcaggtacacctattagacatgcattcagttgatgagcattgaccacccaaccaaggtaccaatcaattttcgtccaaaacatatg

SEQ ID NO: 394070 - DNA, 221 bp, Oryza sativa
gttaggtgtacaagatgccaccggacctgaaccggacaaagctcttcccaccggccaatttcaagatcgccggtgcatcatcactgaacccagactacacctgtggccagccggtgcccgtcagtcccacagagttccctgatccaagcgggcttgattcaacgtctctggcgatcgcgacatggcaggtggtttgcacattaccacgagtagggggcgaa

SEQ ID NO: 394071 - DNA, 807 bp, Oryza sativa
tttttctactagtttagtttttgcgaagtgttcttgtccaaatcacctgagaaataggtgtcgattttcagaactagcgtgctagccactagtgtggccatggaagtggtttcttccagccactcctgcttggcatttaaccgaacacctagcagtgcttggaggtttccggggaatggtcttggtccagggcatgcaaagctcactcggccaagaagtgcaattctttgtgtgcggtcagggacagcttcgaatcctgctgattctgggaaagttcatgcgagccatgggttctatgtaagtgatgtcgatgcagctctccaagggatcccgaagaaagtcggtgagatcgagaagatgatcattccgagcttgccagaaggacctgaaagctctctaattagtactggtttctgggaatggaagccgaagctgagtgtatattatgaaaagtctggcatagacaatagcaaggcaccgtctgtgctctttctaccaggttttggagtgggaacgttccattttgagaagcaattgaaggatcttggccgtgattacaaagtatggacaatggattttctagggcagggcatgtcgttgccatgtgaagatcctgctcctaagagcacatcaggagagctagatgaggacacatattggggttttggacaagaattacaaccatgggcggaggagttggtgtattcgatagatttgtggcgtgaccaagttcagcattttattgaagaggttattggtgaaccagtatatattgtggggactctctgggaggtttgttccctatac

SEQ ID NO: 394072 - DNA, 395 bp, Oryza sativa
  unsure (1)..(395): unsure at all n locations
gaaaccccccgcacgaagcaaagaagccgcaaccgcaagccccaagagcgaaaccgtaacgaagggaaagtttgggatgcgcgttgctgcgacgacgcggcccgcctcctcctccgccgccgctccgctccccctcttcctcctcctcgccgtcgccgccgccgccgccgccctgttcctcgtcggctccgcgtccctcgccatggccggccacgtcctcggcggcgcgcacgacgccccctccgccgccaacagcgtcgagaccgacgcgctcgcccgcttcgccgtcgacgagcacaacaagcgcgagaacgcgttgctggagttcgtgcgggtggtggaggcgaaggagcaggtggtggccggcacgttgcaccaactnacgttcgaggcct

SEQ ID NO: 394073 - DNA, 460 bp, Oryza sativa
  unsure (1)..(460): unsure at all n locations
tttcttgcctctcgctcagatccgttcctccggcgaaaagcgacggcgactttgttgacgctgcggcctcttcccgaccgcgcagcaaagatttgaggtcaccaatggatgattcaacggatgacgattcgtatcatccaagaaaacactatgcttatgatcgtcaggtttcttcaagcagatggcgtaccagccgcgagtatatcagaggtcccggccccgaaactcatactactgagagtgctcaagatggacaggatccacctgctggagtatattcctatggttatttttctggcagtggtaatgatcctcaagttcaaggacactttgttccggagattcaaaaagtacaaccccttacgtggattttcaaaaggtggaacaacttcccggttcctatatggggactgccagaggaggaggtccaaggttttcatgtaggacttatttcaaagnc

SEQ ID NO: 394074 - DNA, 373 bp, Oryza sativa
ttttggttttggaatccacaagaacatatatttatttcagcatcatccatggacagacacactggagactggagagagatgggagatcagatcgagctcgtaggctcacgaattccaagcatataacaacaactacaatctttttcaccacgacggcccggatctcactacttacttaccgctgctaaaacgcaacgcccatgtcttcttggatcagttgggggcggcggacgtcgccctcgtcggcggcggcggcgtaccctcttctccggctccgggggcgccgggatgagctggaaggcggtgacggggagggcgcggccgatgccggccggggggcggaagacgagcttggtgccggaggggctgagga

SEQ ID NO: 394075 - DNA, 582 bp, Oryza sativa
  unsure (1)..(582): unsure at all n locations
ttttttttttttttttagctgtccaaccaggaaactggttcaagtatatgttggtggtacaagtatatgattgtacaatttctctttaccaaaaaactattgacactgacatgagcatatatggaacacaataactaaatacaagagagaaacataatcagacccttgaatatgtgacatgtccttgcaaattacaggttcatgacctaattttgataaccatgtgacagggctaagtccacatgcctaccaatttcatactgtaatatatttcaggatggatgagcgaacattctccatgaaagccacagcttcttcctgattgttggtcttggcgcttgcgatattttcatcgaggagtgttagtatggacatgttgagctcattccgttcaaccatttcaagaagtgtcgattttttgtcgcttgattgcaggatctttgtgaggcgttctttcgcgctgacaaggtcattttgcaacttgtcataggcctccacgccctcaagcagaaccntttgcatcgcntccaactcgatcaatcgggccgccatttccgatgtncgggtgatgagaacttgatc

SEQ ID NO: 394076 - DNA, 447 bp, Oryza sativa
  unsure (1)..(447): unsure at all n locations
nnnnnnnnnnnngtctgaaatattgtcatatcaaaatttatcaggttcaagagttcaggttaagactccctgtaatacattctcttcgaagaaaaataagctgatactgataggttacaggtggatgagccagccggaagtatggagggggcaatacgtgcacgattaccagatgacatggacagatgggctttagagcaacgtggtgccctttcactaatgggcgagttcattcacccattcttcagaaacagaatatgataaatcaaacaggaaaacggcgtaaatgccagaatcaatgaaaaatggcggctcatcgctcaactaataccggtaggcaaatgatggggcgatgttgtatccagctataatatgtggccttggatagcatcagcattcagcaggatttactccacctctttagcatctgcaatctccatgtcagat

SEQ ID NO: 394077 - DNA, 649 bp, Oryza sativa
  unsure (1)..(649): unsure at all n locations
nnnnnnnnnnnnnnnnnnnnnnnatactaaggcctccccgtgacatttcagccttttaatgcctgancttatatcgtaaggttagagttagctttgtccactcaatcacctagatggttttttacctatgtgcgtaccacagcttaaganttaacacacacagaatatgagaagttggtaaaaaccttttaactgcccaaaaaacggcaacaggttttttggctaccaattaacagagcacgaggctaccaattctaactaccgttaggcttatatacagctaccctataatcaacggactactatggtacattacataagcacaaggctagaatgtaggactacacggtaagtttcgccaacagataatacacagaaagacaagaagagaacacagagtctcccgcttttaatggccaccatcggggagaccaactccatcgtctcccccttttcctccacaagaccttgcaacagactcgaacagcttctcgatctcaggtgcacagcgagtaaatgatcgagcccaaaaactgtagcgtggattctttataagctcaatgaaagtaattagtagcccccacgggtgaaggcgggttaactattagccggttccagaagtancctagttattggcnccggactaatt

SEQ ID NO: 394078 - DNA, 561 bp, Oryza sativa
  unsure (1)..(561): unsure at all n locations
cattgccagtcctgacaaaagctgaaccaagcacacctcgctgcgaggaccaaacatgtcttttcgattgcccaagcaaaagataaagatagaactaaacaaactttgaaatatgatcgttagaacagccacacccggcacaacctttcgaagaacatttgtgttgtacgatcctccatgagcgtacaaatagcttttagccccaaaaaggaaggcctacaatgtccgtgctgcagcaagctcgttcaactgtctgagcaaggttaggctcgctcctgatgctctcgatccatctcgcgctgatacggaccctctcgaggctctgcttcagtgcacgctcgaaccatgggttgggtttacccgcgaagaaactcggaaacttcagcagccttctcctctgtggtgaaccgtgaaacagtagatttgacgaagtccgatatgagtgaacttgatggccaggtcttcaananatgatcccagttttccttcaaccaggcccatgcaacttctcgtccttctaagctgataccaccaagganattaaatgcatcttgantccgt

SEQ ID NO: 394079 - DNA, 369 bp, Oryza sativa
ggcaacacattttgctttgcacattgttcatctaccatgcatcaccacaacaccttatggagcaagaaggaaaccaccaccaccaccttccttctcgaattataaagcaccatcatcatcatcatctcttatgaaaaactatagataattactatacctaccttcgccttcaaggaagttgagttctcctttaaaagaaaggtgaaaacgagctaagtaaaaaagaaaaaagaaaaagaagaaaaaaagaagagcgatctagatgggactcatttcccatggggtatactggttgactgatcctgagagcatctctcaaccatcatgatggcgatcacctgtgacctgatgagcttcttcctcagactc

SEQ ID NO: 394080 - DNA, 887 bp, Oryza sativa
aatatagacagcagaacatcactgggattgccattcaaaaactgcaaacaccacatctaaagtaaactgccaactgaagacaccaccttgtagtacaaaattacatatcgggagcataaatagggataattatcataacgtcccaaggaaataatcagatgagaagctataagcctataatgctcctcagcttcaagcatattagtacacttgaaaccacgatacaatgcgttcttgttttggaatttgctgtccatcagaaatgagcaggctaaatctgagaaaaatgttcaacaatcatgtctacatcgccttgtcggttaagtacaaactatccaaaacagcaaatcctgcagcaacgccaccttcatctgacgatgaaacttttgtccgcatcaagtaaccactctgttcattcataaccaccttatcattgttccgcaagtaagcaccataaattcccaagctcagatattgtgagggcctcatggcaaacaccaccacgaaccagattagagagagaggcttttgggaagattctttgcatcagtatgtaggctgcaagcgcatcccctccttccttctggagtctgatcaaagtctctcgtacatcaataccgtatatgttgttccctccgccttcacgttggggcttcaagacaaacaactcgggtttttggattgcggatttcacaatctcttcatcatccaagctccatagtcctgcaaagcatttacggatctttgtgatttcctccttgttttcaagaaacctttcaagaacattaggtcttgctaattcttgttgaatcttcttggtccccactaaatggtatgatatcgaagggcactttacagcagatgattgttccagcaatagccttgca

SEQ ID NO: 394081 - DNA, 510 bp, Oryza sativa
  unsure (1)..(510): unsure at all n locations
gaacacaagaacaaattctgacattcattgctttaattttttttatacaattacaaagctacaaactgttccactcacttccacagagtaggcatttagctcagcgacattggagatatacaactttgataaatatcatctagctatgtgaaactagaacctcctcagtggaaaaggacataacttaaaacttcacaataacatcaaagccgagtttttcatgtgagcttttctatttccaaggtttcagatctgctacaggccccgcagtccagttgagatgcttctcgcctggctttaagtatacactgtctgggtgtgggagcttccgagcaaggccgttgaggatctgatggaatgcatctctaggttgtgctggctgcggaaacaacatggcctgtttcattgatggattggcgagtaatctttgcttccttaggatatcatcaattgggatggatgtgaggattgagtctagccttggaacatcctcctncgtncnaccgtccg

SEQ ID NO: 394082 - DNA, 488 bp, Oryza sativa
aacaacagaaactctcacatcatattaaaaacaacacaaactcttcaatgcacaaatcctccgggctaaacgccgcgcaactgctaaaatggaagatcaaagcttcctaatcctaatcctatgacaacaattttctttcttgtgctagtcatattccctttgctgatacatacatggaacggaatgcaaagtagtatatagctgtgtaaagttgcaaatgaaatcccctggaatgccagtgctgcatctgcatgtatataaattaaccggggtgtccttcacgaggcgcacccaccgttggggaaagggacgtcgttcctagccattccacctccttcttgggcgcgtctcgcacacgtagcaagcatacactgcttggccccggcgtcccggtcaccgtcgtagccgcgaaggttcgttcgaccgcagtccggtccaccccgcttcgaaagccctctggtccattctggtttcggccgtgattgagg

SEQ ID NO: 394083 - DNA, 397 bp, Oryza sativa
gcctattgctacaaaacaaatgtttccattccaagtaaacattctcacacaaagattacctattacactcaggggctgcctctcgctaaagaaattcaagaactattcttttaacaacatatgtatgcttctactttctatcctgaaaatgatttctcattgatcaacttgaaaaatatgtttcctagtgagtcatgtgtcaactatatgagcacctccacatcatcctcggcgctttcttccaaaaggagatcatctctttgctcagccttcttccttctctcattcttcttcctggtctcctcacctatagcattggcgatggcgatgggtagccaaaatccaggcctttcgaggaactgagctcggtgaagaatcatcgcattacgccgtgtca

SEQ ID NO: 394084 - DNA, 753 bp, Oryza sativa
  unsure (1)..(753): unsure at all n locations
ttttgttatacaaactgcaccacaggggctccacgttaagtattatgccttaattaatacactcgaggaaaatttcacgtctaagtgacaggaaaaatgaactatgttgacgacagaggcgcaatgatagcctaacgcaataaacaggttggaatcaatcatctgtaggctatcaattgtacaaatccgtgaatccagctttcaaccagaacaatcgaaggcataaaatatacattactgtggagcagtatatgcataaccgagggcgcataaccttgtgaacccttctggccaaactattttgtaaacctttcgtgcacctccaagtctttcttgctcactgtcgggctctgccctgccgaggactttctcgaaatctgtccttgagactggtggtggaaggatcttcagtgccggtcataaatcttgctaatcatcagaagcctcttctaacatgcgcagtggaggaaatgtcaatcaatcttacctttgctgcaaggcccttggatgcgagctcctgcatggttgtttgtacggcaccagattgctttggtccacaaggcatccacatatcaccatcagccttaaagaagaacatggcatcctgtgttttgcggacaggttcaaataacacatcctttacacaaacagcaatatccgaaccannaaacccgtctgttcgacgagccaagttcttaaaatnactttcatttaagttgtgtggtgtatcccncgagatgngancncttgncc

SEQ ID NO: 394085 - DNA, 489 bp, Oryza sativa
aaaaaaatccgcacacagcaaaagcctctccactacctctccctccacctgtcgcctaaaccctagctcgcatctcgaggcatctcgcttcacctcgtcgtcgcggtcgccggagccggagccggaggggccggaggagatgggcaccggaggcggcgagggggacaagtcggccgtgctgccgctggaggcgctgctggcgctggggctcgaccagcgcacggcggagaacgctctggtcaacagcaaggtcaccgccaacctcgccgccgtcatagccgaggctggtataagtggatgtgataagacggttgggaacctcctgtacacggttgccactaaatacccaaccaatgcgcttgtccatcgtcctgtactcattgactatattgtgtcacgaagataaagaatcctgcacaactaagatgcttgctctgtaatccttaataatactggccctgactttttagatacttggaagttttaaga

SEQ ID NO: 394086 - DNA, 507 bp, Oryza sativa
tttcacagttcacaccaccttccttccttcccgactccccacaccggccggtctccttctcgctgcagggagagagagctcgagctcttctctgctgctgctgctgccatggcgattccgttgctgctgctgctcttgctggccatgtccacaggctcagatggggcgttctgcgtgtgcaagcccgaccagagcccggcggcgatgcagaaggccatcgactacgcgtgctggcgcggcgccgactgcacccagatcatgcagtccggcgcgtgctaccagccgagcaccatcgtcgcgcactgctcctacgccaccaactcctacttccagaagaacagccccatcggcgccacctgcgacttcggcggtgttgtcacccttaccaacaccgaccccaggttcggcacctgcaagtacccggccaccgctagcggcgtaggcaccggaatgggaaccggtaccagcaccggcactggcactggagttggcaccggcggcacccgc

SEQ ID NO: 394087 - DNA, 487 bp, Oryza sativa
  unsure (1)..(487): unsure at all n locations
cactaaggcaattaattaacagaatactaataaaaattgtttgtaaacttggccttcaatttcccacccactcgcgagctaaccgcattgaaaannccncccgccccaaaatctccaatccccaactcgccctccccttgcctgggaaaatcttctactactccccccgcgggttcctgagccccgcgcgcgcgcgttcaggaaccctcggggtactcggattccgcccgcacgggggtcgacgaattccgcaacccgttgtttcttttttttttcttttcctcgattggtttttctgcgcgattccgattccggcggaattttttttctttttggtctccctgttccatctgaactgcgcagctgttcggtagagaaattgttcttgggggcttttccccccaatcctgcagcgatttcccgcagaaaccttctaccatctatcaaaaatacccctcttgtgcttttcttttctcatcggggggaa

SEQ ID NO: 394088 - DNA, 375 bp, Oryza sativa
cccccctcttcttccccaactcgccgccgtcctgcccgcctccaccctttcgcctcctcgttccccgcacccaaaccctaatcctagccgccgctgccgctgccgctgccgccgccatggccagcagcaacgtctccacggtctatatctccgtcatcgacgacgtcatctccaaggtccgcgacgacttcatctcgtacggcgtcggcgacgctgtcctcaacgagctccaggcgctctgggagatgaagatgcttgcactgcggcgcaatctccgggaccatcgaccgctccaaggcggctcccgcgccgtccgcaggcacccccggcgctggaaccaccccgccggtacacgacctaaacgtgccctacgag

SEQ ID NO: 394089 - DNA, 751 bp, Oryza sativa
  unsure (1)..(751): unsure at all n locations
gaggaagaggaggaggaggagaggagcgcgtgaagcatttcggctcaaaggggaaataaaaaggggaagattttttttgcatctcatcctctcgctctcgccgtctctcgccgctcccccccctttccaggctccaatcccgccgccgcgtaggatggccaagacgcggcagccgcagaagcgggtgctggagtcgttcaccatcaaggggcccgacggggtcatcaagcctggggatactgtgctaatgatggcacctgactcatcaaagaaaccatatgtggcaagggttgaggaaattgaggcaacaggacctcaagcctctcaagtgaagatcaaggtgcgggtggtactaccgcccagaagagtccattggtggccggcggccattccatggttcgaaggaagtatttctttctgaccactatgattcgcagagtgctgacaccatagagggcaagtgttatgtccacaccttttcgagattacaccaagcttccatctgtcngcgctgangacttcttttgccgctttgantncaaatctgccacaagcagctttgtgcctgaccgtatanctgtgttttgcnaatgtganatgccatacnatcctgataaccttatgatccnatgtnangattgctctgactggtttcntcccccngtgttgaaataaccctccnagaaacgaaaaaactanaacatttttacngtnaaaactgttttgctgaaaatggaaangatctacnaaa

SEQ ID NO: 394090 - DNA, 506 bp, Oryza sativa
agaggccattgttggggccaaaagatctaccgctctgcatcaataagctgcccccgatgatcgatcgtgagcctgcgggtagtagtaggcacggaagtaatatggatccatccatcaacataccggtcaacagagatgccatcaccgaagaagtcgccgccgcgttcgcggaatccgaggtgatccccgagaggtattgccgacctgatgaggtccatgacggcatcgtcgttggccatgacgatgacgaggcctacgagctgccggtggtggacatggagaagctgcttgacccggagcttgcggaggcagagattgcaaagcttggttctgcatgtcaagattggggtttctttcagttagtaaaccatggagtcgacgaacaagtggtgaatgaaatggaagacaggacggtcaaattcttcagcttgccacttggaagcaaaaggacagtggaaattcaagacaatgggtttggagggtttggccaccatttcaaaagggca

SEQ ID NO: 394091 - DNA, 463 bp, Oryza sativa
  unsure (1)..(463): unsure at all n locations
ccgatcgagcgtttcccgagcagtagcgacagaaaatggcgtgtgacggtggacaacgtcatcaggttcatgttcatccttagccgtcgtctacggcgccgcatatgccaaaaagtctgaggccaaggccgctagtgctcctggcctagcagcggcggtcaacacggtcttcgacatcaccgagctcggcgccgtcgctgacgcaaagacagatagcaccaaggcggtccaggatgcatgggacgcggcgtgcgggttggccgggtcacagaaggtggtgatccccaagggagaattcatgaccgggcccctcaactttcagcgggccgtgcaagggttacgtcaccgtccagatcgntggcaccatgtttngttccaacgcatcccaagtacaacaagggaacttgatccggatcctccanattgcaaagtccttgtaaaggtttcgnaacttgaaggccag

SEQ ID NO: 394092 - DNA, 565 bp, Oryza sativa
ccacctcaagctagtagccaccttctccccaagcacacactctcctcccaaaccctagcacaagaacgcactaataagaaagtgcaagaaagggaagacgctttaagggcagaacttgctagccaactgtctgagaaggaagaggagatcgcaagattaaacacaaaaattaaccaaaccgaaattcatgccacaaatttgatctcaaggcttgaggctactgaagcaaagttgaagaaccatgagtcagattcgctggctttgaaagaagggatcagatcactgactgttagcttggagtcttttaggactgaagctcagtcacgtgagaaggaagtgaagatcttggaacaaggaaaaaaccatcttcaggagaggtatctaacagagtgcaagaggtttgttgaggcagacagcccgtgcaaggaagctgaaggggaggctaaacgagcaacggaattggctgacgtagctcgtgcagaagctgttgcttcccagaaggataagggtgaagcgcataggctatgcaatggagagatcttggttattgaaagcatgtagtgac

SEQ ID NO: 394093 - DNA, 612 bp, Oryza sativa
  unsure (1)..(612): unsure at all n locations
gacagaaaagaaccacaaaactgtcaagctttggatgacgtgttttaacatttcatgtttcccgttgcaagacaacgcagagatacaagagattcatgcgtgaataaacatgccatgtatttttaacaaatgctggctactgttacactacagattcaattcaacaggtgataactggtggcagcggctacaaccgtgttgactgctccgacggtttttgattctgcaaagaggattcatcaccaccagtaccagtgtcatgcgatgaagttgattcgcttgaggaaggctttgcgccattcgaaatgatgttcttgaaccaagtcccctggaaagttgggccatttctgcttttggttacttggggactctggttgtgggttttgattttttcgatgccaggcctgccataaatctgtatgctactctactggcattgactatttctgttttagcctgtctgaacttaactgctgngttctcagcaactaccacagcggtatcaccagcattggcaaaacgattaacccagcctgggagcttggggacggcgagcctctcgcagagcacgtcgcagaaatgggttgcagttncctggagaaggaggtcgta

SEQ ID NO: 394094 - DNA, 465 bp, Oryza sativa
  unsure (1)..(465): unsure at all n locations
ttttttttttttttttcttgcacacctgcatgaacgtcagtagatgtctctgtcgtatacattggtcaacccctcaaccccttgaaatggtacagaagattctcagctctacaaacccagaagccgaaaacggcgggctactcaagcgagagcccagtttgatcaaaatatatatgtacactatgtgataatacatgcaaaatatcgtgccactttttaatggcgacctggtgggcttctatgcgccccgaacaggttgtccatgtacgtctgcttcaggttcgtcatgatgttggggcagcttcatcagccttccgtcctcctgtgnggccgggttcaggcgccgtcggcgaggggcctatcggcgttcaacgtttccagtcatccatgaatcgagcagcgttccggganctgggtcgaactccaagggggggnccggtaacccaattnggccccatagtgagt

SEQ ID NO: 394095 - DNA, 407 bp, Oryza sativa
  unsure (1)..(407): unsure at all n locations
ttttttttcattgncnaaacagaacttgctctaattcgatcatcacgtacgtttgcgtataaggagtgcagattattgtatcacaattctatcgtcgtatcgagaaacccatgtataaacctattagtgatgtcatggctcatcacaacggggggccgtaaaatacaatgttaacatacaaagtgaaaccaaaatttgtttatgtaatctctgaagaatcacttctactatgtgatgtacctagcatcattaaggtgccacaaaaatgcaactgttaactaagttgactgtattcttttttttcttgtattacttctgtgccccctgctggccttgtacgtattcactagttgcatctgtacatcctaaaaccctactggtctgtttggtcgagggagctgggccgt

SEQ ID NO: 394096 - DNA, 512 bp, Oryza sativa
acctctcctcttcttcctcctctctacgacctcttcccgccgctccctccccctccatttcctcttctccaccgcctccaagaacagcaaacccaactcctcccccctcctctcctcgcatttcttcgacctgccattccacacccgcgcgcgcctcaaactctatgtgagggaagggaaacaatcgacttcccagctgagaaaccaagaagcagcagcagcagccatgcgtccgtccttcctcctcctcctcgtcgtgtttgccggcgtcttggccggcggggcgcgcgcggggccgccgttggcggacgagaatctgccggggcagctgttgccgggcgagaagccgccggggcagccgttgccggggcagccgttgccggggcaaccgttgccagggcaatcgttgccggggcagccgttgccggtgcagccgttgccagtgcaatcgttgccgatgcagtctttggtgggcgagaagtcatcgtgacaacagttgtctatgcagctta

SEQ ID NO: 394097 - DNA, 345 bp, Oryza sativa
  unsure (1)..(345): unsure at all n locations
nngccttactctntttcttgaaataccctttgccctctgccctccctgccccctgttttgaagcaaatgaaagtagaggaattccaaattgatcctcctttgggcccaccctctacgctcccacgattccgccaattcatgtaatagccccttgcaaaatgaaacttgttccctgaccatgctacttcacttcagtctatagcagaagccgtctcgatgatgaaatcatgtctgattttttgcttggttgtacctgacatctaacttatacaatatatatacactatgttgttcanggttccttgngtnnnnnnnnnnnnnnnnnnnnnnnnnnnnnnnnnnnnn

SEQ ID NO: 394098 - DNA, 756 bp, Oryza sativa
  unsure (1)..(756): unsure at all n locations
nnnnnnnnnnnnnnnnnnnnnnnnnnnnnnnnnnnnnnnnnnnnnnnnnnnnnnnngcaacgaaaaggcaatatatataatctatcaacaaagatacccgacaattttccaacagcaaagcagcaaggcaaatcactgacaatacaaataaacacgaagtaccaagattacatgaattctgacagaagggcagttcaacgacatcaactacaatagcacggaagacagaaagcccggtactccacgctctacgagctccttatttatatatagcacacgggagagggccataacaacaaatccaagcatcacaagaacatctggtgaaatgtgaaaacactagtttttcccgtccgtcacagcacaaactcttggaaacagatcaaaactgcgagccaccaatttcttgaagagaatctcactcccatgtcatcatggtagaagggcgccattctttgagttacctgcattcgcatggtttccaccccgtgaaagtaaggccagtagcccaccaccatgcactcttccttcagaaaatcgatccgaggtgatcgccggtacagcaggaggatgagcaccaccgagatgagactggtcgtcgctgcttgcctgcgcgtgagggatctcccttcactggggtggatttccatctcgtcgaatttgggcatcagttgcgaaactgggaaggttgcagcgncctgaatgtaaccaccacgggacacaatggtnctgggacttaaagcacagtgagctgga

SEQ ID NO: 394099 - DNA, 462 bp, Oryza sativa
acaactctaaacttgatgatgtctttaatcatatataaacacactgtccaatctcattgaccactatcattacaaaatgatcaccacaaacccaataaacaaaagaaaatgaaaaactctagaatcacacctctaattaagtttcttcttttttgtttcaattttttccctgggaactgcagcgataaatataaaaataaatagcccttcttattttttgcaccaacgagggacacgaattggacaaaagaagaagagggagaggagctgaagaactcaacacaaaatgcactaagctcaaaccaccacctcaagctgccaacgccaacgccgcggcgaccgtggcggcggcggtaacccacctggcgagcacggaccgcgcggcggcggccttgtccgcgacgtcgtccgcgggggtgccgtcgggcgagtcggcggcggaggagtcgtcggagggggcgg

SEQ ID NO: 394100 - DNA, 421 bp, Oryza sativa
gacatcaccagcttcatcgctggattgatcgtcttgcatacattgaatgattgattgctatactagtacatatacatacacgaagaacatagcatatattgtagctgctgccgtacccatctgctacctgttggagaagatggcctcaagaatccttgtagaggtcccttggacttggagctccactgcgaatgcgagttctcgggttcccttcgccttggagttccgacgacgacgccaccgacgacatgctccggctcccaccctttgctctgctccccgacgcctccgcctcccctccctgtccctccttgctgaagctcgcctttggccatttccctcagcttgccccagccacgaccctttcgtgccaccaccaccaccaaccaattgccactgcctccggctgctcctgctgctt

SEQ ID NO: 394101 - DNA, 708 bp, Oryza sativa
  unsure (1)..(708): unsure at all n locations
nnnnnnnnnnnnnnnnnnnnnnnnnnnnnnnnnnnnnnnnnnnnnnnnnnnnnnnnnnnnnttttttttttttttacatatagttacataagctactgaatttccaacatgtaacaagggattacagcttaattctcgaccggccgcgccgtgaaaaaaacaaccggcagctcaaccaggagatcagatcactgagtacaccaacgacacttgcacgacgacgtaataccaacgaccttactactactgagtactgactagttactgctactcgcagcagccatggccgacgtctaaaatgccaccgagccatggaagccacggaattcagagaagattacacagctagttgagttgagtgactctagcttgacgaagactactactagtactagtaatagactagtagtagctgcttctgcttgtttatgagaggattgagtcccagtcgatctcccaggacgggtacttgcgcaggtggaatgtctccgactcgtcccatggcgcctccgtgaagtccagcttctccatctccggcaccgggggcgacagcggcgtgggcggaggaggggagccggcggacaccgagtccttcccttccgtcgacgccgagcacttgggggaacttcgctccgccgcggaggccgctgactcggcgggggtgttcttggacgagctcgtggcgagggactggcagatggcggtgag

SEQ ID NO: 394102 - DNA, 1269 bp, Oryza sativa
  unsure (1)..(1269): unsure at all n locations
nnnnnnnnnnnnnnnnnnnnnnnnnnnnnngaagtcgatcaaattgtgcccttattactgacactttgaatagtacttttgataatgtttgatttgctatcggaatataccgataacatacacaatcagacaagatgttagcactacaaaaacttgtttaggttttgacatcactaacattttgacatggtagcaaaccaaacaaacccgtattgcattgcatctattacttcctctagtccattcatctcatttcatctgagagatttaagattgaattgcaaccacaaaagcaccttaacacctcagtgaatgtctattgtacactatgtacattttcatctattcaccgcatctacatatacagttatcgtacaccgatggctatgctacaacgtgtaggggatctaaaatttggacacgaaagaaacaaaaaacggggaagatatatagccgctgtggatgacaccaaaaaaatcacgggtcagctctcaccagtttatgcccgggactcaagcagtgccggttatcagtctctcctgttgatccaacttcttgaccttcaaaaggccgacaaggacttgtaggccgaagaacgcgcagagagagtatgctatggtcgctggcaaccggattgaattgaggtagagaacggtggcgaggtttaccaaactacctgcggcaactccatatccaattgttttctgtacagctgcaactctttggaatgctctttctgactccaatgttctgacacgaagcttgagatcaccttgctccaaacgctcaatgatttgcgcaagcttttcaactctgtcgggctggcgaaataaattgtagaatgcacgggactgcctttcccatctcttcctcgcatcctttacaataacttcaactccagcttcattaaatctaagcaactccatagcatatggtttagcaatctctgtgatatcaaatctaggatcaaggcccttcccgataccatctagtactgagaatgctctgaccacaaaagtaaaggtggcaggaaatcgaaatggttgatcagcagcaattgacaaaagatcctctccgatagcagcaagcctttgcttcttcttttcaaacttctcctccttagttaattgcttcttaaatccaagttcctcagtcgccatctctctttctttcctttgtgctgctaaacgctcttcgaagctatcaaggaaaaattgagctgttcttctgacagccgtcatatctccagtaggaacaaggacacccatt

SEQ ID NO: 394103 - DNA, 315 bp, Oryza sativa
tttttttttttttttttgttgcaagagctgcagattaaacgggagagggcacaatccagttcacgagcaacacagttaaaagggtcttggtggcatcatctacattttgcccaactacatggtagagactagagagagatagtattaacaaggagataaagcttgcaagctctgcgcagtgaatggcaaggcgctaccagcaaaaagtctacgacgctacataaacccagttaactgtcagcagcccaagtttttctgctactttgtacataaaccatgggatgatcagaggaaagatcgggttggtcgcctcgg

SEQ ID NO: 394104 - DNA, 444 bp, Oryza sativa
  unsure (1)..(444): unsure at all n locations
aaaaaagctagtaacttttcacattatgtgcatggtggttattcacatgaaagggaaaaaaaaagactagaagtgctttctcttctttctttttttttcttttttcttaatctgatctgaaagcaaaatttagacccgatccagaatcccttggtcctcctcatttgccatggccttgtcccctttcttgtactccccatagacgtaggacgagaaggcccagaggcagagcagcatggccaccgccttctccggcccgaactcgtcgccgaacaccaccacgccgccggccacgtttcaccgctcaacatgcgccgttcatgcagcatgcctgccgtgcaggggaccgtcgtcaggaaacaccgtttccggccgggtgcccaagaaagcacagcctgcccagctaagcaccgccgccccgaccaccgngtagtaggccgccgg

SEQ ID NO: 394105 - DNA, 439 bp, Oryza sativa
ttttttttttttttttttaggaacaaaaatttacattgcatcactaatttattggagattgataagcaggacagtcgtgacatatctccaaatactattttgctcattggccttcaattgaaaaattacagaaaccacatgagcagtgaaacagctaaaagaaaagggaaaataatagctgaaagagggaaacgagctttctccaacaaataattgccatcccatgacaaaaatctaggaaccaaacaaaaagattacactctatgtaccctatgaacctcctttgaaaaaaaaataaaggagactaaccaaagccccaacaaatttgtgacggatgcgtcttgcaaatgtataatacatcacaatcaaccaaaatgcatcatgaaatgcctttggatgctctcgaagggggccctggcaatctttgatgtccaaaagg

SEQ ID NO: 394106 - DNA, 507 bp, Oryza sativa
  unsure (1)..(507): unsure at all n locations
tttttttttaaagaataactcaatgggagttttgggtctttatttctctgtaccaactcaataggctgagtagcaacaaagaataataaaaccacagaagctcaaaagtgcaaagatgagctctgtgcgccatcacttcggctacaatattactgcaaatgcaaaaggagctaaacctgcaatatatcatctaatcgagaaccctcatctcatgcatcagctttctttagcttggcttcctctctgtctatctcttcaagtgcgctccaaagcttggggtcttcataatccttgatgatcaacgtggctcctgcatccagtagggacttctctgggttccttgttgccacagcaacaaccaggaattccagcagcaacggctgcacgtgtgcctgaagcagaatcctcaaagatgaggtgtggtccgangcaactgaggtccttgagagcttcaggtaggggaatggggcgggtttcgggttntaacatttgcctcccacgttgcgg

SEQ ID NO: 394107 - DNA, 750 bp, Oryza sativa
  unsure (1)..(750): unsure at all n locations
nnnnnnnnnnnnnnnnnnnnnnnnnnnnnnnnnnnnccgcaagaaccaagcaaaactgattcacacgaaaattctatacaaaattcatgctttccaaacaggtctttttggggggggaatgccatacttgggttcttcctcgagatcacaaacttgcctaattttgcaatctccatatttccccagcgctatatgggagcaaagcagccaggtacgatttgaaactatgcggccacaggataatccagaaatttacaatgggctaaatttgctaaacataagatcctcagagtgatactaccacacatatcgtcaggctgtgtgttcatttgcagctcatgatctccagtttttcacctcttctcatcccatttgagcaacatggggggaagttgcatgttttcctccctcttttcatagctcgatatggtgagaatgattgggaacatctccttggttgtccaaggggcatgttctggggccatgatggcgcggatctctgaaatccatgttcctcccgattctgtttttgtttactgggtttccctgcaatgcctggttaccactngggccaaaaaaatntcccccanaagttccccccaacncngtttgngccttttggttttnngtttcngcccctccaanaaagaacccccctggnnccnttcaaantcccnntnttctgggattgatncctggnaggggganccctcccngnttcnnaaantccttttggaccccccctnaacn

SEQ ID NO: 394108 - DNA, 452 bp, Oryza sativa
  unsure (1)..(452): unsure at all n locations
ggttaacccctctnaacccaattgggnaaacatgggggnaagttgcatgctatcctaactcttttcatagcncgatatggtgagaatgattgggaacatctccttggttgtccaggggcatgtactgggccatgatggcgcggatctctgaatccatgtacctccggatcctgtacttgtatacggcgtatcctgcaatgcctgctaccactaggccaaagaagatcacccacaagaacgttccatcctacctctgttgctgcatttttgcttatgcatgtatcatgctccttcatataaagcaagccgccactgcaaccgcattcatagcttccccatgtgttcttgcatttgcattccttgcactggcatgcagtcctttccttgcattcatcaatatcttcgcatttgtggactccatcacctttgaacccatccggacatttacaacc

SEQ ID NO: 394109 - DNA, 851 bp, Oryza sativa
ggttggagcaagtatagagagatttgattacatcgatcgccaagaaaagaaatggcgggaacggagcagattacaccgattagtgacgacgacgacgacgacgatggcggcggcgtgacgtcatgaggtcagatcgcctcgtcgcgcgcggggaagaagagcttccagtagagcaagctcgttccacgcgtcggggacgccggggaggcaccagtgggtgcagtcggcgtagctcctcgggtcggcggcgagctgctccgccgtcggcttcgcccaccgctgctccctgtacacctgcgtgtgccgtcgcggcggagctccgacatccgggtgacgttcaccaccccgacgggcacccgcgatgcccccagcacctcgccggcgacctgcaccatccgccggctcgtgctcccgcagtacgacgccgcgtcggccgcgcccaccggcgtcgtctggtcgtagcactcgccgccggcgccggcgtgcggacgcgacgccgtgacgaagaacacccgcgcgctcttggggtccacgttgccctccagccaccgcgtcacctggtgcagcaccagcctgtacgcctccgccgcctccatctccacgatgtccttgctcatgtcctcgtccgcgcctctcaggatctggatcttgtcgccggtcatccaccagaggtaggagttgaagacgaggacgtcggcgcccttccagaaggaggagtgcttgttcatgggggcgccgcggatgaggcggtcgtcggggacgcggcgccgtcggagttggactcggcgagcatgggcgcccagtagaactcgatggtggcgtcgtagtccttggccctgaagatactgagc

SEQ ID NO: 394110 - DNA, 457 bp, Oryza sativa
tttttggaaaatcaacgtgcatataatatccattcaacagaatcgcatctattacaagaccttccattataggacgccgatagtgcagtgctgcataagacaatttacactgtccacatgcgttgacattactacagacagtaagactcaaaacgacaacacgcatacattacgggacagagcacaaatataaaaaggttacgtttattcgccttaatttatcttaagatggtaggattatataatatatggcaaacacaaacggtgactgggcaaaccattgcacctataccctgacgagaattcaacagggagaaaccacaccacgttctgatatccatggccctgaaaagtaaaaattcaacagaacatgccctatcaagagggaatatacataagttttgacagagacatttggcaactgcctcagattacaaaacttgtgtgtatgtttttc

SEQ ID NO: 394111 - DNA, 467 bp, Oryza sativa
ggcatctgaacacagtatcaaaaatcaacgtgcatataatatccattcaacagaatcgcatctattacaagccttccattataggacgccgatagtgcagtgctgcataagacaatttacactgtccacatgcgttgacattactacagacagtaagactcaaaacgacaacacgcatacattacggtacagagcacaaatataaaaaggttacgtttattcgccttaatttatcttaagatggtaggattatataatatatggcaaacacaaacggtgactgggcaaaccattgcacctataccctgacgagaattcaacagggagaaaccacaccacgttctgatatccatggcccttgattttttccatcaatgttggaccatgcgtaaccagggttatgatgggcacatccccattgaatttttgccacggttctttagccttccttggattccccgtgcacg

SEQ ID NO: 394112 - DNA, 477 bp, Oryza sativa
  unsure (1)..(477): unsure at all n locations
caaccgcaaacgaaaaattaaagaagcagagaaaaaagctctcgcggcatggattcgcacgtaggcaagttattcgattcggtgggctcgatcttccgcggcagcgacaccctcccctggtgcgaccgcgacatcatcgctggttgtgagaacgaggttgcggaggctgcgaatgaagaacagaagaatgagagccttatgaggctttcgtgggcgcttgttcactccagacagcctgaggatgtgaaccgcggcattggaatgcttcaagcttctttggacaggtctaccagtccactgcagacaagggagaagctctacttactggctgttggacactacagaactggtgattatacaaggagtcggcagcttttggaaagatgcttagagatttcaacctgactggaggcaagctctcactttacaaaggcttgntgaggaccaaaccagaagagacngtatgattggcatggc

SEQ ID NO: 394113 - DNA, 510 bp, Oryza sativa
  unsure (1)..(510): unsure at all n locations
cccaaccactcgcaaccaaaggcgcaccaaaccggagccaatccgagcgctccgtgcggcggaggcggcggcggccggacctactcgctgccgtgggtgggggctgggagggagcgggctggtggctcgtcccgtccgcgatggactgggcggcggcggggtacccggcggcggcgctggtgtgcgccgcggcggccaccgtcatcgcgctcgtgcacatctaccgccacctcctccactacgcggagcccatctaccagcgattcatacggccgcctcatcttcatggtcccggtctatgccgtgatgtcgttcctttcccttatcttaccagataattcaatatattttaattctattcgagagatttatgatgcttgcgtcatttaccaatttcttttcactttgcttgcatgggtnggggggtactggtgctgggggggacagtttgattgggcgaaccctgagtccttcgtggtttctggggacatggcggttttaaccttttct

SEQ ID NO: 394114 - DNA, 507 bp, Oryza sativa
  unsure (1)..(507): unsure at all n locations
aacactgcaacctcaacccattattgcagcaacaaattctgcagcaagcaagccagcaacagataattaatcctgatgcccaaaatatccaaacgatgttgagcccaagtgctatacaacagcaactccagcaactacagcaaatgcagcaagttcagaatgatcagaagcagaagattcaaccagatcaaagctaccaagttcctacaagtgcagttctcccaagtccaacatcattaccgagtcatttgcgagaaaaatttggcttctctgatcctaatgcgaattcttcaagcttcatcacctctagcagtagtgataacatgttggattcgagcttccttcagggaagttcgaaagctgtggacttatctcgatttaatcagcctgtagctagtgagcagcagcagcagcagcaacaggcatggaagcagaagtttatgggttcacagtcagtgtcttttgggggctcggttntgcataactcacccacaagcaaagatggtt

SEQ ID NO: 394115 - DNA, 710 bp, Oryza sativa
  unsure (1)..(710): unsure at all n locations
gcgtnttggtcggcgacccattncaggacaggctttcgaaccaggggcctcagatcgacngcgagcaattcaagaagatcttgcagtacgtcaattcgggcgtggacagtggcgccacactcgtggccggcggcgacagggcgggcagcagggggttctacatccagccaacctctttgcagacgtcgaggacgaaatgaagatcgcgcaggaggagatattcgggccggtgcagtccatcctcaagttcagcacggtggaggaggtggtgcggagggcgaacgcgacgccatacgggctggcggcgggggtgttcacccagaggctggacgcggcgaacaccctggcgcgggcattgagggtcgggacggtgtgggtgaacacctacgacgtgttcgacgcggccgtcccgttcggcggctacaagatgagcggcgttggcagggagaagggcgtctacagcctccgcaactacctccagaccaaggccgtcgtcacgcccatcaaggacgccgcctggttgtagctgtagtaatcgatcctttctctcctccatccccatcgccattgctgcgtgctatgactgctatcccgtgctcttccatatcagttgtcacttgtcagcgtgatgtctctgaacaacgccagagattgcgatgaataatggttaaatcgggcaatcttttgtacaacaaaaaaaaaaaaaaaaa

SEQ ID NO: 394116 - DNA, 445 bp, Oryza sativa
ggaaatgttgtcaatcgtactttgcgatttgggttttagcacagcagtgatacatcaggaagctctagctgcagcatttggaaatggcttgtcgacatcttgtgtggtcaacattggcgcgcaagttacacaagtagtttgtgttgaggatggtgttgctttaccccacacagccctggcgcttccatacgctggagatgacatatctagatgccttctttgggttcaacgtcgtcattgcacatggccaaacttccaaactgatccagtgaacaagcctatagatatgctaatgctcaacaaactaaaagagtcatacagccagataagaagtggaagttttgatgctgtcagtgttgttcattcatatgagcatgaaaaatcagttggtcatcagaaaacaaagctatcggctctgaatgtacctcctatggggctactttat

SEQ ID NO: 394117 - DNA, 454 bp, Oryza sativa
  unsure (1)..(454): unsure at all n locations
tttttttttttttttggagaaatatgtttatatacaatagtagcaatggtagtacacccgagcaaagaattgtaaactcaacacaagcaaccaaaatcgaaaccaggatgatgaccaacaaaagactcaccgtctgtgccattttccttcaacccagaaacctaccgctacaagtccatcccaacaaaagatcactataactcaaaaggcagaaatatatcgcataatcacgacgcaaacaactctgctggcacattttccagcatttgcatccactttcatatcccaatgaagatgtccaaaccggtttttggcagatctataaatatctggcaaatcaaatggtcttcagtgagtaaaaaccactgaaaaagcatcccagtaggccaaagaantgaatataagatgttcctctgctgancatcatcctaattggcaaaatggatgctaaatg

SEQ ID NO: 394118 - DNA, 452 bp, Oryza sativa
  unsure (1)..(452): unsure at all n locations
cttacagactaaaaatccattattttntgttcaccaaaagaccatactcaggaaaccttacttcagagtgccatatagtgcatcctttacatttttttagataatggattaaaccggcctctacacccaaaaaaggatgtacacagtccccaacgaaacttacaagagtacataaatctcacactccttatcacaaggttttaacatccattcacaaggcatactatgaccccgagtcacttatggcttcttagcaaccagaatcattcttaaaaaggtttaataccaaagttttcaacccattacccactactaaggaataacccacgagagcatttannatctcccaaatcttttccctttaagtttccattccctttcattgggcgaannnaagccagaaaacttctctttctctagnaattccaagcaaaccttcttctcaccttttt

SEQ ID NO: 394119 - DNA, 406 bp, Oryza sativa
tttgtgggatactaaataaaagggaactctcattcacggccaaggtatacagtccaacatatcacctgaacttcctaaactcaaatgcggcaaggaagcttggggcttgacattgcggtttttatggtcttcgctgcctctttttgattgaacgaccaaactgactgtacatcaggatttgtagcaaaaaagccaccaccaacatgtgcccctgttggtgagctaaacttactagctgcccgaggtccatgcaccaccaatggctagttgaaccactaaggacctgtgggactaatggtgtgcaaattggctgaccagcttgccgagccaaaatccaaagcgtagcgtatagcattctctgatacatcatgtgacacgaacaaacttcttgtatcaagaggcattt

SEQ ID NO: 394120 - DNA, 492 bp, Oryza sativa
attagcagaaaagcaggtgacttctttcccaactcatgcatttgacgagatgtactgtttatggttctgccacaagcaataaactaagaacatggtattctccccaataaacaacaaaaagagaaaaactacaccgaccacaaaagcctaccatacaacaatggcagttttaacttgagagctttgtcttccccttggatcgctaagtcagaatctgagctttctttctctgcctacaaacttcttctatcaacagcgctgaaaggtgggtggatgggtgtccgtccaaccgactgcttgctgcttgtctgcaaccagcgaacgaagtaaagctgcctctaccggtggcgcccactcgcgatctgattctaccctgagttcatcacgcgagacatggcggcaatcaccttctccctcgtttgctgttcggcgccagggcacttgatgatgaaagactgcccggccgtgccgttgttgcttgtgataaaccga

SEQ ID NO: 394121 - DNA, 457 bp, Oryza sativa
  unsure (1)..(457): unsure at all n locations
nnnnnnnnnnnnnnnnnnnnnnnnnnnnnnnngagacatattcttagatgatcacaaaattgatgcgaaccacatgaagccagaaacagttttaccatactatctttaacctgaaggctcaggcagtcaggctagtaagctaacaaaaacaaaagattcaatcttttgaagacacctcctaggtgcacacaataaggtagaacatttctgcggttggtgggagatcttataaaggactacaaggctaccaaaaacttgacaggggcatagttcttctgccagcagataaactatcagattggcccagttaatcaacacaatgaacatcacgacactgtcgatcaaccaatattacaagcatcttttaggagatagagaataaaacctatacccttaatctgggccttctgttctccttatcaccatttgatttcttcacctggctggttttctcccc

SEQ ID NO: 394122 - DNA, 448 bp, Oryza sativa
  unsure (1)..(448): unsure at all n locations
ttcgtttcggcctttctttttttttttttgtggcttattattttggcattatagagatcaacataatctttcaacaatggatcatctttattcatgtagaacggagatgaacacaaaaacaataaaacataaacttcttaagggtcaacccctctagaaaatgaaggagggtccattcacaaggccaaattcacgttgggaaccctgcagctacgggaccgacactgggttagaatccaggtttcggggaggtttataaccacggctcccattccaccatggttattgggaaacccacnnctattgttgccgataggttggaattccccttataaccatacacttcctgggaccacannagacaaaatttatttaaacttctttccaaggaaaggggaaacaaaaggagtttccttccacttcttcagttaagcccccagtttgttcg

SEQ ID NO: 394123 - DNA, 546 bp, Oryza sativa
ggccgccggcgccgacgaggtcgcgcaggcgccaccgccgcgatgacgacgacgactctccgccggtggacgcgctcttggggaacctgtcgcggccgggcgagcccggcgccgagcgcggcgtccacgcgcagtaggtgtcggcggagggcgccgccgtggaggcgtcgccgggcgagaggtcgaggaggctgcggtcgaacaccgggtacgccggcacgatgcggccgtgcgcgaagaatgtcgtcggccggcgccagctcggccgccgacaccggcggcgcgaacgcgaagtcgaggtcgagcccggcgccctccgcgtcaccaacgtcgaccgacgcgggcgtggcctcatcgtcgtcgacgccgtcggcgccgcggccgaagctgatcagcgtgtggaggctgcgcggcgactgcgccatcgcggctgcggcggcggcgctgggtggcatcacgtcgtcttcgccggagacgagaggagaggagactcgcggggtggagtggagtggcccgattcgactcgacgcgctcgatgttggtgag

SEQ ID NO: 394124 - DNA, 683 bp, Oryza sativa
  unsure (1)..(683): unsure at all n locations
caaaagatgacgagtacacaatgaatgaatataagacgccgcgcacaaaagctcagtttggtcccccaaatgctactttacaaaatggctttgaaaaatactgagctacttgaccactatacagatcgctcccgtcgagtcttctggcgaccatagcatcaccaagacagacgacaggttggaggattttgaggaacagacttcccaaggcaaggcagctgttctcaatgcagaactcttgacttggtctttaacttttttggctgtgcagtcccctcaaatttcaaaacttcagcaaagatcaaaaccatctcggcgttcgaaatttggcaaacgccaaggccatccactttatttgtattgctgtcatactgttcatcacaacattctcaacaaagcattgacaattgacaaccccaatatacaaatcatctttatctccctcatcagccatantcttcaggaggctctgctcacgtgatgtcaacccatctaataacccctatgtttatactgcctcatgagttccgtggcactccgcttactatgccacgccaccctcggttcacttgtacgtggctctaagagccacgcattttnnggcagcattcattgtgaaaccttcagcactatttgaacccacctattagattccatggcgcttccattatttggtccttcaa

SEQ ID NO: 394125 - DNA, 440 bp, Oryza sativa
tatgctttagattgttcggcctttcttttttttttttttttttacgaaatagctacatttttgagcattaagtggaaaatgatatacatgtatatataggtaagatccaaatatattttgattcgtttgatcggatgactatgtgtaaaatcgtgtgctaagcaaaagcagcttctcatacccaaggagacatagtccctacaccacttattggagtatatcctagataactttacactgtttgttcaccacacgatcacttccgaaaaagtctaaaaattaaataaacttaccattggaaacaccttataaaaggacacttcatttttttgttccacatagctttttccctttccttgaaattatcgacacttatattgggcaccctgcattgtaagggatgttttcagagtttaatgaaaacagagcaaagtatacaa

SEQ ID NO: 394126 - DNA, 421 bp, Oryza sativa
gtagcatcaaaatgtatctattttattattacaatctgtgtttattcagtttttggtgcaagaatattatgaattatgtacaacaagtccatgcatgatatctctttatacaatcaatgaatacatgaatggtcactgctcggtatgcaactcctgcgtgtataaactcacaactaggttagtagctagggttagcaatgactcacaggcatcttcgatatactaggcgacctcaatttgatcaagacggcggcatgcccacagagattcctttgaacccactgccactgaattctttgggttattcttcttccggtttcttgtagtcctacgttagtattaaatccgaatctcgaggtgtatccagcggcccactcccagttgtcaagaagagaccatgcaaaaatacccggaacattac

SEQ ID NO: 394127 - DNA, 494 bp, Oryza sativa
ttttctcctctctcgttttctcgatctctccacaactcccccccccccctccagctctctccaaagtccaagtctctctcggtgctcacgccgccgccggccaccgccgccccccgtccgtacaccgcgtggcccgcccccgcgcaggtgagggagctagcggccttcgtctgccggcgccggaggcggagccagattgttgggaaacgagttttccgcccgcttctctggtttctcggcggtgtcttttactcctggggcggcgatcccgacgcggggatgcggcgggctgtggcgtgatgtgtggatcggagcatggacttgatcgcgtcgcacggtaggagctgcagcggtcggggtgggagcaggggtcgcgcgggggggtgcggccatgacgatttacatagcgcgggaggcttccaaggtatggaggaaggtgaccacggaaacgccggtggagctctcgctgctgcgcgagaagtggggattgctcc

SEQ ID NO: 394128 - DNA, 341 bp, Oryza sativa
  unsure (1)..(341): unsure at all n locations
nnnnnnnnnnnnnnnnnnnnnnnngagctgagaatttttttctgtgtttctgatttcattctggatgatttgaatgtattcagggtctaccacgttcttgatttttttttactgaactgcctatgatttccagtgaaattttgtgaactatcatacatgaatgcattattcacaactcgcctttcatatactctctgaactatacagggattgcctatcatttgcagatttaaatgaacaggctactgggatagtgaggggccacaaaaaataaagatgaatataattagcttgtcatttgactgcacctactgaacccacgcgtnccngtccancgtccg

SEQ ID NO: 394129 - DNA, 510 bp, Oryza sativa
  unsure (1)..(510): unsure at all n locations
nnnnnnnnnnnnnnnnnnnnnnnnatnggaacaagatcttgcgcaggactcgtacggttttggaggacaggttaaattataatcacattcctgatacagacaaacagtactactagtggtaacctcttacatcaacactttcttccgttcgttctgcagttctctccctcacatcagaggtaccctcttgccactaactgacagagttgacagcaaccatcaaaattaattccaaaaataacagataagtgtttttaggtggaggcatccggcttctactacttcagattcttggacacggtccaacgacgaggtggggatttgaccgactattcggaccgtcgcgccggagtccagtgtgggagcgccgggctgaagtggctggacacgacgcgcgagtcgagcagctcgacgatgggcgggaacgtgacgcagcgtggcaccttgtacnggttgatggacgcgccgcgggagatggcgtagtccatgagcncctcgaatgtgcccggg

SEQ ID NO: 394130 - DNA, 403 bp, Oryza sativa
ggccaataattggaacaagatcttgcgcaggactcgtacggttttggaggacaggttaaattataatcacattcctgatacagacaaacagtactactagtggtaaccctcttacatcaacacttttcttccgtttcgttctgcacgttctctcccttcacatcaggaggtacccccttcttgccactttaacttgacagaaccgttgtacagcccaaccatttcaaaattttaattcccaaaaatttaaccagattaagttggttttttaaggtgggggaggcatttccccggcttctctacttcactttcagatattctttggggaacacggtcccaaacgaccgaggggtgggggattttgacccgacttatttccggacccgttcgcgcccgggagttc

SEQ ID NO: 394131 - DNA, 482 bp, Oryza sativa
  unsure (1)..(482): unsure at all n locations
acccaacattaaaacttttagcaatgccttcattatcaacacgaaaaaaggggatatgatggactattacgaaaaaggggttctgggcaatttacaaccacctgttctctcgggggtaacgagaaagggattaagaattaaagaaggggaaaaaggaaaaaggaaaagggaaaaaaaaggaattgcggttttgctaaggaataatctaatcttatacctcgctatcagtacactaattaccaggtggggtctaaacagtttcataagagcaacacagaaggagtacagtacagttgataacggcagctgctttcacctccatctgtgttactgtagatgttcatgttctttgcagtatagctcctcaataggtgctgcttaacaccgtggggagttgagaaaggcgcaagggatttgcagggagggtgacaccaccccctctncagggaaacagaaggacctcggctcccagtttgcttgct

SEQ ID NO: 394132 - DNA, 575 bp, Oryza sativa
gaaattcgggaaaaaaacacatcacaattattaccgagcacctctatgtacattgtacaggatgggttccgttccatatggacataactctccattgaaggaaaacctcaatctacagttgccctaagaaaggtcgaaagaaagggaaacatctcaaagaccgccagatccgcataaataaacagcttcaaagactgacaaactctgcaccctaacgcataaaaccggttacagtagggcggctaagccaagcgaacaacacagcagcaaacataaacatttgtgcctctgatatgtgcaagctaacggctggaaatctggaatccccttgctgccctttgggtcctgtccagatttcttaatctgcgtacctgctctggtgcataattttattctgcacttgtggtattccacctgctgatgagattgccaggtgcattgctctctcatggttttggtaagctttggtgccaaccaaaacgggttttcatggcatgacaggatgactggttcatacttggtgctcgggcccaacatttgtcagttcagctactacaaacaaccgagcatcccgt

SEQ ID NO: 394133 - DNA, 760 bp, Oryza sativa
  unsure (1)..(760): unsure at all n locations
nnnnnnnnnnnnnnnnnnnnnatagagacacgaaaaactttcatgaccatggtgtgcaaatgcagcacaccggtttgtgggaacacaggtgcagaaaattactagttcaagtagaaaaatacagcacacagaaaatttatccagttcaagtatatttaggattttcctagaaaatcataggtccagattgtggccacaaacaattggcagagtcaacctagtccatcaatgtataccgacatggtctgatattcagatgtcttctgctgacacaatttagatcccacagagttttggcaggtaataacattcataagttacaacacttgtgcacaaatattagttatccccttcaaggtgttgtctaatcaaaatgcaaccttgctattaaatggctaaaatctattaatagatcacacacgtgtgcactggatgatggcagtggctctactttgaacaaaaaactactctcagcaaaagaattctcgccagctgctctcagcaaaaaaaaacctgcacccagcaaacttaaattcagtggatgctggaggagcaatcggcgaatcgaggccgccgttcgcagatgcctcgacgtcaccggagcagcatgggggttggattcgtgttgccgtgaatcacgtggaaaggtggcgctgctgccgaccaccgccggtgccccaccccaccccaccgccgtgccgccgccgcaccacccctcccccaaccccaccgtcgtgccgcagcagagagttgagtttgg

SEQ ID NO: 394134 - DNA, 575 bp, Oryza sativa
  unsure (1)..(575): unsure at all n locations
nnnnnnnnnnnnnnnnnnnnnnnnnnnnaagataagattcagtagcatatagtcatataacattacaaactgatcagtagtccaatttcaagttcaccgaagaaaaccttttctttccccctcttttttctacaagtatgattaaacggatttaacggtgccctctcatagtttcagcggcttcaacatcaaaacttcttatatcacagacaataacaatacaatgaacattttcatgcggagtactaacctacaacacctctcagatcgaggacaaagcccagagagaggaaaccacccatcgtcttcgtcgcattagatacacacatttgcaataccggcaaaacaccgccaaacgggatgctcctggagcacaaatgtcgctcagcagtcgaagttggcgcagctgttggtggtggtggtctcggagctgccgatgaacgggtcgatcttgacccagaggagggagaagaccgaggcgagcaggacagaccagagcacgacgatggtgggcgtccggttctggcgacccatgagacccttgaggaaggggtacaagtgcatgatcacccaca

SEQ ID NO: 394135 - DNA, 344 bp, Oryza sativa
  unsure (1)..(344): unsure at all n locations
nnnnnnnnnnnnnnnnnnnnnnnnnnnnnnnnnnnnnnnnnnnnnnnccaaaagcaacnncaaataattgtacaaacatgctgtgcccccacnccgccaccccatctcggataaacaactcaaggtttaagtaacagtgtagtaaccaagaacccgactgatacaactcaaattttgcctagcacaaacattcatccaaaagaaaacacaatgaaaatttgtgaaaggaagaactttgaccacacaaatgaatgaaatgacgctcatttaacacttnactcgcttcaggcatatcaaagctgccnagaggttgcgggtgctttcactctttagcgtccttctta

SEQ ID NO: 394136 - DNA, 462 bp, Oryza sativa
  unsure (1)..(462): unsure at all n locations
nnnnnnnnnnnnnnnnnnnngacctgaaactctgtgagcccttggacccttttagcagcttgattgccttgtgagtggcccatggggcaatcaccagctgtttaacaaggctcagcatccaagaagaacagagcacataatgtgttttggatgctaacttggcttgatgcatgggctggtgtttgtatgcatgggctgctagggccctcctgctccggctggccttgctgcgaagtggctgcagcgccttcaccacgatggtcatgttcggccggaaacctgcctcgtattgcacgcacaacgccgctgccgccgccatcttggcaactgcttttggaggatagtcatcccccaggttcggatccacgcaatggcctcaccttgtccttcggtcaacctgggcgtcgcccaggtaacaagactctgctgtctcttcggganggtanggtccatgggtttcct

SEQ ID NO: 394137 - DNA, 987 bp, Oryza sativa
  unsure (1)..(987): unsure at all n locations
tttttttttttttttggcttcgttgtatttttctggagtatgtgcatcacattcacaatctaacactctcacaagcatttgaaagcagtcaaattactccattttattcactctcacaacctgccatgaaaggaattcacaagccgtgtcatataaaaatcactcatgacatgcatcaaggcgagcggcaacagaatggttaaacctagatcgctcgtgcctatgatatccccaatcttcttgcaacaccttctaccctgtggaaaatatggcaatccggtggagatagaagcctcatcgttttcctaaaatactgtcaacattggcacgcaaggtccgttccgtctaatgctgccattttttaatcagtccaggaatctcaacaccattaggacctattttgttgcgagctatgaaatttagtatgtgcgatgcaaattcttcaggcacatcttcctgtatggcatgtccagtgtgtcgaaccaccaccatttgaaactttccttgcatttgaccaattgttaaagctctgtccaacctatcagttccagctaataataggaccttttgcactggacaagacaagaacttttcagaaagaccttcataccatcctttccagtatttttctgtttcctcgagaggagttcgatatgtatagcattcccttgattcatcatatttcaaggtagatggaatcgaaacacgagcagaatcaatgttcctgagtggcccacctttgacactccattcaatagctttttcaatgctagggaaatgttgcgctcgatttgctaagatcttctgcatatgaatcaatgaagccattgctgttccctcaactacatcaataacaacaagaccgtgaagattgcgaataactttctttgcggccacatgtatagccacagaaccgcccatgctatgcccaacaagtataatggctggtggagaatctccatacaatgtgcgtaanacagctatgac

SEQ ID NO: 394138 - DNA, 251 bp, Oryza sativa
agcgtggtcgcggccgaggtacaagcttttttttttttttttttttgatcttcaggatgtataccattgttgaaggagaatgtgcacatattcatcttttacattccgaatgcttaactattgacgtttgtattctacaggttattgctatcagctatatattacaaatgaaaaatgaggaattgggagagagcaatctacatgtcagctctcttcaaacaataaggctatatgtacctgcccgggcggcc

SEQ ID NO: 394139 - DNA, 507 bp, Oryza sativa
ctcttttcggcaggagtggaggccctcaccgggggacttccatttcctgctcctcgtgttctcccacctccaatctcaggatggagcgcgcacgccgcctcgccaaccgcgccctgctgcgccgcctcctcgcggcggcggcgtccaccacgtccccggccccgtcccgcggcatctcgaccctggccaaggcgcccgggggcggggtcgcgcccgcgcgccccgcgcccggcgccccaccagtacaccacggggcggcccgtgtcggcgtcggcgctgcagccgagcgacacgttcccgcggaggcacaactcggccacgccggcggagcaggcggcgatggcgtcggagtgcgggttcaacaccctcgacgcgctcatcgacgccaccgtcccggccgccatccgcgcgccgacgatgcactttttcgggaagttcgacgccgggtttaccgagtcccagatgattgaccacatgcagcgcctggcggccatgaacaaagcctac

SEQ ID NO: 394140 - DNA, 581 bp, Oryza sativa
gttagaaagagaaagagagagcaacgccccaagcaccaccccctctgcccaggccccagatccctccaccccatcgcacgccacaacataacataacaccgcaaacacgcaccctaccaacagacgcctactatggtgcgtttctgccacctacactccgctgcgcagccagcttcgctcgcccgctacctcactcactctcgggtgagcgcggccaccgctgccggcgacgaggtagggaggaggaggagggcaagatgttcgggcgggacccgtggggcgggccgctggagatctcgaatgcggactcggcgacggacgacgaccggagccgggacctggacaggggggcgctgatgcggcagctggacgagacgcagcagagctggctcctggccgggccgggcgaccaggccggcaagaagaagaagaagtacgtcgacctcggctgcatggtcctcgaccgcaagatcttcatgtggaccgtcggcaccattcttggcgtcggcctcttatcggcttcgcatgatgatcgcaggtttcgtcctcacaagcgcccccctcttcttcccccgaccagt

SEQ ID NO: 394141 - DNA, 606 bp, Oryza sativa
  unsure (1)..(606): unsure at all n locations
gagaagcatagctcgcttccacgcaagattaaaagctgcccctcttgctgctgcagactgcagtcctgcaagatcagcgcctgaagcaagaagcgaagaatcaaacgagagcctagcagcgtagcagatcgatcgatcgatcgatattatggaggcgcgaggaagcagaggaatgcggctgtggctcctgtccgtggcggtgatggccatggcgatggcgacgaggtcgcaggcgcagctgcaggtcgggtactacgacacgctgtgcccggcggcggagatcatcgtgcaggaggaggtcagcaaggcggtgtccgggaaccccggcatggccgccggcctcgtccgtctccacttccacgactgcttcgtcagggggtgcgacgcgtcggtgctgctggactcgacgcaggggaacagggcggagaaggacgcgcccccgaacacgagcctccgcggcttcgaggtcatcgacagcgccaagtcccgcctcgagacggcctgcttcggcgtcgtcttctgcgccgacgtnctcgccttcgccgnccgggacgccctcgcgctggtggggagggacgcgtaccangtgccggggggggagagaga

SEQ ID NO: 394142 - DNA, 374 bp, Oryza sativa
actttgccgtactcccaagcaacacaagtaacagcgatactatttgaatcaacgaacatcatcagtattcagcagtacatcatctctagttcactgaataaacgactactagaacacaagccatcgtctaatcttctgtaaacaggcacctaaatacttgcaaatcctatggttggcccagaatgacagtatatgcaatgcaatcccgattgttagacaccgtctgcaaaaattaagtatgttattgtgctcggatcgtgttccttcaaaaggcaaaacacattctccatgcagttagcctgaattccgagaagcaataagcaagtagctccattctgtggtatgctatgcaaaatgaccaagcaggaaaaaca

SEQ ID NO: 394143 - DNA, 395 bp, Oryza sativa
cccccccccttttgtagtttgaagaaaagggcttttttcccgacaagaacacaaccacggtaggtagtgcccagtttcatctatcatcatcgcttatgagtttatgaccaagagggagttggatccctttgctcgagctaactgactgactgactccaagctagtacatgcgacgacgctacgacgaccatgcaaacgatgcaaaaagaaaacactggtaaatatgtccacagtacactggtcactggctgcaagcagccttgcacaggaagagaagagagaagatctggaggagtgatgaggctttgctccccacagaattgttacatccactttggaggtattgagattctgtctccatggcatcacctccgccggtgtttggactgcacctt

SEQ ID NO: 394144 - DNA, 332 bp, Oryza sativa
ttttcgcctttttaacgccatgaggtccgacatacaacagcatctagttagctgaagttaagaagcgcatgataatgcacaaaaaggacttgttgccaaaagactgatgacaacaaggaatatgcacaacatatttacaaactaccaaataccaacttatgacactcacattctgccttgctaatgggagcggaccaatgctgttggattcggaccaatcttttcccgagtttctcccaagcttttccgacgaggcttaccggtggtcttgctagcatttgcagtaggggcttttttgcctggaccagtggaggattcttgacgcctctctg

SEQ ID NO: 394145 - DNA, 500 bp, Oryza sativa
  unsure (1)..(500): unsure at all n locations
nnnnnnnnnnnnnnnnnnnnttttttgtgtttgttgccacataaacacatacttaatttattctgagaaggttgcaaagattacagtcctcaacaatatgccggtaaaaacagggatctggtgaaaaaacaaccatacaaggctgtcatgacaaggctctagtatgcgccttgcaatggccagatcccccaacaccaggcattcccaagagtacctgtaacaaaaaatcaaccctctatgacccttacacactaccgaaaacatcatcacacatgacctcaagacaccaacagactcagtaaccatacacacagggtaagtctgcaggcactccagcgtcgtcggcagcctggaacaccggcgctgccgactactggtgacaccggcagttgagctgcggaactccatgacagcccccctgtgccgatgccggtgcctgcaacttcatgactaggaagcaagcaggaaagaaaaaaggatatgggacactacggcaacct

SEQ ID NO: 394146 - DNA, 1113 bp, Oryza sativa
cccaccaacatggaaaacatcatagtttttctcagctccaacaatttagacttttacaagatttttaacacaagcatactgatagaaaacatgatatagatatgaaactgtagaaagtcttgcccagcaacagtctctaccaaaattttgcaactacacatggtatctaccttaaaaggaatatttctttctagcgatttaaattgtgattacaaccccaccagaattacaggccaaaaggagtcaagcgacctacataacacctagtgctgtaagatccatgggaatttccttttgcagcatcaccaaatcttcggttgcccctaggaagaacagcatcctctctttgggttaacagcagaatcagtaacattgatggtggttccttgagtgggaggtccactgcctgctgcctcttgggcagcaagtgccttcttgctgaatgatttgatgaataatcttttaaggataggtcttgaaatgcccttctcaacattcaagggcttcccagaagctgaaggtctcgaggaatgatagaccttcctttctctgctagtgcctgaccatcttcctctggaaactggatctcaggtgggttaaggtctgatttggtgccctaccatcataaggacaatgttgggagtccgcatgatcacgaagttcacgaagccacctctggatgttttcaaacgtctgcttctttgttatgtcatagactagaagtgcccccacagctccccggtagtaagcacttgtgattgcacggtacctctcctgcccagcagtatcccatatctgagctttgatggtctgcccttctatctggagcgtgcgggtggcgaactcgacgccaatggtggacttggactcgaggcagaactcgttgcgggtgaatcgcgagaggatgttggacttgccgacgccggagtcgccgatgagcacgatcttgaagaggtagtcgtactcgttgtccacccggtgcgccatggccgaccaccaccacccctcgccgccgcccccctcggattcgattcgagtcgagtcgagtcgagtagctgctgatctctcgcgggcgcggcgggatgggaggaggagagatttgggatgagaaga

SEQ ID NO: 394147 - DNA, 364 bp, Oryza sativa
  unsure (1)..(364): unsure at all n locations
nnnnnnnnnnnnnnnnnnnnnnnnnnnnacaaactgagccattttttcctttttcattgcagtggggtaataatacatcctacattattatacctctaccacccaaaccctccacatgtcaataaaatgcttgggccgtcctttccctagccgatctcctcaataaaacactattggcttctccaggatcatgctcagtcccatgctaacctccgtcctatattgttctgctaacttactactaaattgatgtttactttggttagtatacaaggaagaactttcatcgccctgattccaaccctccctggcaccctgaagcctgtgctcgtcaggcctatactgatccacctcttgacccgat

SEQ ID NO: 394148 - DNA, 464 bp, Oryza sativa
  unsure (1)..(464): unsure at all n locations
nnnnnnnnnnnnnnnnnnnnnnnnnnnnnngccaagaatataactaagtatgcaattaaattcatcttatttatccacagcgatggcaatctcttggtcacaaagcatatgtgatcccagaagtaaaaaccaggcatgaatgacagcaacacatcagccacaaagaaagctcgctgccccgctacttcagtcttcaaccagctgatgatcgatcgatcgaatttggcatctatcggtcacaaggcgcacacgaagtccccgctgttctcgatggcaatgtcgccgatatcgtcgatgtcgtcgagatccatgctccccaggcaggcgacctgcccggcgccggcgagcttcatggcgtcgcccggtttccgggcctcctgaatgatcgccatgacctcctccaggctctgcgacggcgtgttcatgtccgccagctgcatgctcctctggnactcgtcggtcat

SEQ ID NO: 394149 - DNA, 401 bp, Oryza sativa
  unsure (1)..(401): unsure at all n locations
nnnnnnnnnnnnnnnnnnnnnnnnnnnnnnnnnnnnnaaaaacgacaatatccaataacatgtcattccaatcttaattaagattcgtacacgccgaatactagcgagaaaagaaaaaggtgtacaaacattcataagaaaaccgtacaactaggctgacaactgacaaagcatgctaaataagctaccgattgagaaaaataaaaattagctacctgacaggccaagccatgcgctggggctacttatttgttcctgatctcttttgttcaggcattgtgatactgattactactagcgcaccggattattggccaacgctgccggtggtgtcggtgcaggaaacactgaatccctgatccctacactctactgggttaacagctaacagagcttaaaaa

SEQ ID NO: 394150 - DNA, 620 bp, Oryza sativa
cgttttgctcctccaaaatcgaagagaaaatttccaacaccccaccctcccccatcgcctcctcctcccgtctcggccggggcggacataaatacgagccgctcgacggggaaccgccgcgccgcgtccaccacccaccacaagctcgccgccggcgtcgcggacggcggctcatcccggtccggcgtgcgatccggctgactggccggagacctaggagcttcgaccccccccccccccccccgcgatctgggcggcccatggtggggtcggtaccgcagggcggcagccgcggcagcgagatctagggttttcggcgcctcgggggtggggagggagcgatggggcgtcggaaggtcgccgcggcggcggctgcgacgccgccgcgtggctcgtcgaaggccgggggcggcgtcatatccgaaatccgtgagaaacacaaattggacctggagaatttgacactaacaaagcatccattcaggacattacgttttttcatgttagctatgttgcaatacttgaaaagattagcaacatatatcctgagtaagggtgctttgtttgttggcctcattgtgttggtgctagctcctggaattttacttgccgttacagat

SEQ ID NO: 394151 - DNA, 510 bp, Oryza sativa
  unsure (1)..(510): unsure at all n locations
ngggcatantnctaattttgcaagcaatttctccatcacagaagtcaccaatgggctccgccaagctcattgctgtagtcctcctcccggcccttctggccttccaagctccaatggccacggcagtaaactccaacctcttccgggactacatcggcgccatcttcaacggcgtgaagttcaccgacgtgccaatcaatccgaaagtccggttcgacttcatcctcgccttcatcatcgactacaccaccgagacgaacccgccgaccccgaccaacggcaagttcaacatcttctggcagaacacggtgctcaccccgtcggccgtcgcgtcgatcaagcagagcaaccccaacgtgagggtggccgtcagcatgggcggcgccaccgttgaacgaccgcccggtcttcttcaacatcacctccgtcgactcgtggggtaaacaacgctgtcgagtccctcaccggcatcatccaggacaacaacctggacggcatcgacatcgacta

SEQ ID NO: 394152 - DNA, 525 bp, Oryza sativa
tttctggattgcgtgcagatgtggtccgatttgtgcaaagttgtgacatctgtcagcgcgccaaatcagaacatgttcagtatccggggtttttacaaccattgccagtccctgatcagtattggcaagtggtttctttggatttcatcgaaggccttcctcgttccgcgtcattcaattgcatcttagttgtggttgacaagttctctaagtatgcacactttgtggccttggcacatcctttcacagctcttgaggtggctgaatcttatgtgcaaaatatacatcgactgcatggtttacctcaagttatcatctctgatcgggatcgcattttcactagcacattgtggacaactctttttcgattggaaggttcccaattaaagatgagttatcaccttcagacggatggacaaaccgagcgagtcaatcagtgtttggagacgtttttgcgttgctttgtgcatgcttgcccttccaaatgcagccgctggctggccctcgctgagtactggtataata

SEQ ID NO: 394153 - DNA, 501 bp, Oryza sativa
ttttttttttttagacccaggcaagacaaacatgccaagaatgcttgtattgcaaaaccgtacactttttcttcaatgatttaaagcctcatcatacaatccttggataattttatagcctcatgggacaaaatatcgaatcataacttgtttattgctacagagctaagtgtagaaggttaaagtaaaatgcaccactctgtcgggttcgctatcaccttccaaacatatgactcacttctttccacctccagtgcacgttaaagtttttgaaggtgatatccccgtcctgtaccacgtaggtcttcccttcctgcctgtattttccagcagccttcacagcagattcactacctagttcttttagatcgtcgaacttcattacctcagcgcatatgaagcctttttcaaaatcagtgtgaattgtaccagcagcttgaggtgctttagtttgacgtttgatctgccaacactttaccttgttagggccagcagtgaaaa

SEQ ID NO: 394154 - DNA, 524 bp, Oryza sativa
ttttaaacaaaaaaaaatgcgtgttctgcttgctagcgagtacaaaacaacatacatctccagtgagtagtcacatctgaaagtagtacgacaccaaaaatatctccacatctaaatttacagtgtcatcatgatctgctagactacaattctacaaaacgctctcctctcaccagtattgattttccgaaagtccacaattcgagaggcccatcataacagataaactcatttgaaacaattagaggatacttttgaacctagtgctaatctagaataaatcagcattgaagttatacaatagataaaaaaagggttctgtatacagttcagtaattgtttacagggcatcagcatctccaaccatgtgaccatcgatagtcatatcatttgcatagtttccaccatgatggtttctccatccacggttgtgttgcaagggttgtgccctttcttttgcactttcgccatcagatgccttagcaagccttgcaattgcattaatcaaaagatggtcatgctcc

SEQ ID NO: 394155 - DNA, 594 bp, Oryza sativa
  unsure (1)..(594): unsure at all n locations
nnnnnnnnnnnnnnnnntttttatccgatcattatgactatgcaagaatattattaactatggcagccatggatacatcatacattgaatcgcaaagaaaattattatcatacaacttctctacaaatctaatgtcaatgtttgatcctggtctataaatgaaggcaacacccgctgtcaatcaaactgagggtacatcaaagggtatcattctgtaaattggaccagggaatcggtatgtatatatatgctctctatcatttcttcttctcaacatactactgtcagtgccacgcagaagcagatatcagctttctgctcctccagccgagaagcatcgcgccgtccttctcatcccaatgtgtatttatcggagtagcaggcgagaagcttcctttatcaccgagttgacgtacggagctcaacgggtaaggcctgaagccggccatggtcagcctcgacttccacttgccaagcagctcatgcctctccaccctgtccttcccctcgcaggcgatgatgttgacgatgtccttggcgaggcagtgctgctccacgctgatcctctccttgttgtcccgcggcaggttggcg

SEQ ID NO: 394156 - DNA, 713 bp, Oryza sativa
  unsure (1)..(713): unsure at all n locations
nnnnnnnnnnnnnnnncaacatcaacctaaatgatcatatatatatatatatatacaagttttctgcagcaacctgaaagggcactgcaattgacaaaccaggagcagtactctcaaaagaggaagaagatgaatcacactaaacacataaatacaaatccaagggggggtttgaatcaattacataacttcaacgcataaacacccagacgattttcagtattgagtagatgatgccccagtgcattcattcttcactgatgatgatgactcaagtgggtacatattcaggagatgtctcataaactgagcatgttggcgggacttggtgagcataatcagctcaatcgagcatgtccatggatagctggagctgggtgattgttggcaacaaggatgtccttgatgcgattcaacggtcctacagctttggttaattttctcattgcttgctcgggatacaatttgaccggctgatgctgcaacttgcccttctgccagcgcctccaaaaacatgtgactcccaccaaagcagtagcaacaacgatggggccagaatttgttgcttttcctcacattcttgtacagtgataagagttgcttcttccatgaagcttcgtgtggaaattccagaatcatcaggtttgttttgttcactangatgcaacaancttggatgaatcaatggacacgggtcacatttggcacagttt

SEQ ID NO: 394157 - DNA, 743 bp, Oryza sativa
caccaaaaatttactatgccacaaccccttttgattctgtaatcctagccaccaacttcacaatatatccatttctgtttcagttctcaccaaaaaatttactatgccacaaccccactagataagaagagtacctaatatctaccacagccaaagaaaaggctgcatcacaatatccttacagatctcaccaaaaaatttacgaagtcacggacctaccagagtactagatatggtcaatcaaaaggacattagctgacatttcaaattccttaccacagccaaaaaaacaagcacaggcatagtagcagttggtcacatcgcttgacagactcttttatccataatacctcacggaggaagaacccgctcagaagcatcagaaaactccaatggataggtaatagatctagtagcatgtctaactgcatcatataccacaagctctaaacctacattccaacttgggatcgccacttgcaagtaattcccagccaagagagagaagaaactcttcaagcttgtgtagagtgaaatcgtgcaatccattgtaggaaagaattatgtctccctgagaaatgcctagcctcacagcagtagaatcatcataaaccacagctacgatgaagccatcattaatattgtgatcaagttctatctcctcttgatgggaaacttttattagctcaaaagcttttaaaaacatcccagcactggacgagcaatacgactgaactaaagtc

SEQ ID NO: 394158 - DNA, 495 bp, Oryza sativa
gccgaggacgacgacgacctctacggccgcctcaagtcgctccagcgccacatggagttcgtcgagatacaggaggagtacgtcaaggacgagcagaagaacctgaagcgcgagctgctgcgcgcgcaggaggaggtgaagcggatccagtccgttcccctcgtgatcggccagttcatggagatggtcgacggcaacaacggaatcgtcggatccaccaccgggagcaactattatgtgcggatcctgagcaccatcaaccgcgagctgctcaagccctcggcgtccgtggcgctgcaccgccactcgaatgcgctcgtcgacgtgctgccgcccgaggcggacctccagcatctctcttgctcggttcatcggagaagcccaacgtcactttatacggatattggaggattgtgacattccaaaaacaagaaattcgggaggctgttgaattacccgtggcacatcacgagctgtacaaagagattggttttg

SEQ ID NO: 394159 - DNA, 511 bp, Oryza sativa
atgatgagatgtctagctcaagcaattaatggtacatgtacatagtataaagctttataaagctagcagctagctggctcatcaaatgccaaattaatcaattcggaaatgatcaatccacccctaatctacaccccattgattgtagtataatcaatcatcatgctactagacacaatcaggataccccgtacttagtagtagtaattgtatttacatcagatcaagacatgaagaaacctagctagctaggattaattaacaaggagtcctagctaatccctggaggtctggatggatgataaataatctgatcatccgaacccatcccgagaagaagccttcgatcggaaggaggaagagaaggatgcattaacaaactgccactaattaacccaagcatgaaacaccaagttaattaatcaaatcaagtaattaatcaaccagcctgaagcaaaatcctgtagcgcaaggtcggtagggagcttgctccggatcatttaggcgtgga

SEQ ID NO: 394160 - DNA, 795 bp, Oryza sativa
  unsure (1)..(795): unsure at all n locations
gctcagatgcataaacgcagacttcgacaaggtgaaggccactctgaaaggatcaatgaagagaagatttgaaagatccgatgacccatttgatcggattatgacttcggaggccatcagaaggctgatcacctactacaagaactcacagtactactttgctgcgcanaaaaagtcaatgagatggcacgggttaaagggacagttctggatgcaggagggagccaggctagcttttggatgcaggctttcacactcacgaagcgatcgtccatcaacatgtcgcgggacttcgggtactactggctgaggcttatcatctacattgttgtgacagtctgcatcgggacaatctacctcaatgttggcaccagatacagctcaattctggcaagaggtgcatgcgcttctttcgtcttcggctttgtcacgttcatgtcgattggaggattcccatcttttgtggaagacatgaaggtgtttcagagagagaggctcaatgggcactatggcgtgctggcattcgtgataagcaacacgatctcggcgatgccattcttgatcttgatcaccttcatctccgggacaatgtgctacttcatggtgcgcctccacccgggcttcacgcactacctcttcttcgtcctctgcctctacgcaagcgtcaccgtcgtcgagagcttgatgatggccattgccagtgtcatccccaacttcctcatgggcatcattcatcgtgcaggaattcaggggatattcatgctggtttcaggatacttcaggcttccccatgac

SEQ ID NO: 394161 - DNA, 532 bp, Oryza sativa
  unsure (1)..(532): unsure at all n locations
nattntttctcccgcaactcactgcgccgccgggagaggcaaacccgaaggagactaggagaggaagagcttcaccgcctccgcctccggcaaggaaagccaaagccaatcgaggccaagagcgagggggaaggaagaagaggggggaagggagagatgccgacggtgacctgcaacgcgtgcaacgcggggttcgatgacgaggagcagcagcgcctccactaccgctccgagtggcaccgctacaacctcaagcgcaaggtggctggagttcctggagtgactgaggctctgtttttggctagacaaactgctttagcagaggggagcaactctgatagcactccaatgctctacagttgtgctctttgtggaaaggagtacaggagctcaaaagctcatgcccaacatcttaattcacgatcacatctcatgaaagcttctcaagagcctaatgcatncattgctggaataccatagtcaagcctcgtcctgagcgaggtcaacgcagggctccatctgcagtagaaga

SEQ ID NO: 394162 - DNA, 488 bp, Oryza sativa
  unsure (1)..(488): unsure at all n locations
catgaacctcaagaaccctagacaattggcgacctcgaaaagccctagagccgtctccaatggcggaccaccagcccgccgcctcctcccccaagaggaagaagaagcactccaagaagccggaggacagcaatgccaccgtcgacgactccctcgccgccgccgcctccccctcccccaagaagaaggagaagcactccaagaagaagcgggaagccatcgatgccaccatggccgctgcctcccccaagaagaaggagaagaagcactccaagaagcaggaagacaccaatgtccccgagaagaagcgggaaggtcgtccatgtcaccgtggacgcctccctcaccggcgccgccgncgcgggcgcagcccccgtcgtcgcctacttcccgaccggctacgaccccctggccgccggcggcggcaggaagggtagagaggccccccgcacgaggctgttccgccacacgaagcacccatcccgcat

SEQ ID NO: 394163 - DNA, 549 bp, Oryza sativa
  unsure (1)..(549): unsure at all n locations
ccgttttcggcggcggcggcggaggggaggcgtggggggctgtgcatgagcgggaccgggtggcgcgggtgcccgggcaggacttcgacgtcgggttcgcgcagtacgccgggtacgtcgccgtcagcgaggagcgcggcgcctcgctcttctactggttcttcgaggccgccgacgacccggcgtccaagcccctcgtgctctggctcaacggagggccaggttgctcatcaattgcatatggcgttgcggaagaagtgggaccttttcatgttaatgcagatggacagggtgtacatctgaatccctattcgtggaaccaagtggcaaatatcttgttccttgattcaccagttggtgttgggtattcggactcaaacgcctctggtgatatattaaataatggggatgccaggactgccaatgattctttgacgntcttaacaaagtggattgaacgatttcctcagtataaggggcgttagttctacgntgacaagaganagttattctggccactatgttcctcaattagcacaagctataaag

SEQ ID NO: 394164 - DNA, 777 bp, Oryza sativa
  unsure (1)..(777): unsure at all n locations
aggaattcggcacgagctttccttcatcaatgaggcgactgaccccacggctccccctcctgcccccaccacccttcactcgcgggcagcaatgataggtcttccaacctagccaagcaggagaaggagaaggggacgctgggatgacaccaccacaaagccacaccggccttgagcttcgttctacccagtcagaaacccagtgttgttctagtctaagctcgtagctagtctgcaagaaccccgacagaaaaccggcaggaacgccggccgccgccgccgcacgcacgcacgtcgatcgggcggcgccggtgtgctcgtgatggggaactgcgccggcgtgcaggggaacgccgagatcaacccttcgttcagtgctcccaactcgtcagggacaggttccaagaacagcagcaagaacggggccgattccagcacgttcggcaccaaggcgtcggcgtcgtcgtcggtgccgccgactccccggagcgagacggagatcctgcagtcgtcgaacctccgcaagttcaccttcggcgagctcaagggctccacgaggaacttcccgccggacagcctgcttggggagggcgggttccgctccgtgttcaaggggtggatccatgaacgaacctgaccccgtcaagccnggcaccggcatgatcgtccccgtnaanaactcaacttgacacttccaagggcacanggaatggtngctgaagttaattaccttgggcactctcccaccaaatctttcaactcatcggtaatgttccc

SEQ ID NO: 394165 - DNA, 449 bp, Oryza sativa
cccacgcgtccgcagctgtctccagagatagtacagattgaaggaaaggatgggactgctttatatggaactctttatctccctgatgagaaaaaatatggaccacccccatacaaaacactcgttaacgtttatggcggtcccagtgtccagcttgtaagtgactcatggataagtacagttgacatgagagctcagttcctgcgtagtaagggtatattagtttggaagatggacaatcgaggaaccgcaagacgcggtttgcagtttgagggacagctcaaatacaacatcggtcgtgtcgatgctgaagatcagttagcaggtgccgagtggctaataaagaaaggcctagcaaaacccggacatataggtctctacggctggagctatggtggctttctctcgggcaatgtgcctcgcggggttttcccgacacgttcagttgt

SEQ ID NO: 394166 - DNA, 486 bp, Oryza sativa
gataatacgaaacagccgagatggagaacgcaggggccaccaccacctcactccacccaagacggcggcggcggcgccggcggccatgtcttcctcctcgctttccccgaggcgcaaggccacgtcaacccgatcctgcagttcggccgccacctcgcggcgcaccacggcttcctccccacgctcgtcaccacccgccacgttctctccaccgtcccgccccctctcgcccccttccggcgtcgccgccatctcccgacggcttcgactccggcggcatggcggcctgcggggacgccagggagtacaccccgcggctggccgatgtgggccctgagaccttgggtgtcctcctcttcttcatgggccctttagtaggccttaccttctttccgtctttattttcctcctctgctctctctttctttaacgcgtctccttctcccttttttctctcccattcccccccttttctcatattccctt

SEQ ID NO: 394167 - DNA, 432 bp, Oryza sativa
ctttcctttgctggcttcagcttatgcatttaggtttgtgggtgagtggctgaagtggctgtacacggatgtcacacataaactggaagccaaggatttctcaacacttcagagaggcccatgcctgtactgctgggttgaaggctgtgacaacatctgcgacagctgatggaattgaagaatgccgaaaactctgtggtggacatggttacctgaacagcagcgggcttcctgaattgtttgctatctatgttcctgcttgcacttatgaaggagacaatgttgttttgctattgcaggttgcaaggtttctaatgaagactgtatcccagttagcttctggaaaacagcctgttggtacaacggcttacatgggcaacatacagtacttgatgcaatgcaaatgtggtgtaaatacagctgaagattggc

SEQ ID NO: 394168 - DNA, 500 bp, Oryza sativa
  unsure (1)..(500): unsure at all n locations
acgcgcgcttgtctctctttatatagtgtcacagtgtattgaggcagaaattgatccaaaccgaaaccaaaagtgaaaaaagacagtcccaagacgaatataatcaacacaagagtacagggctgtagcaatggcggcggcggcggccggcggcaagatcaagacggtggtggtgctggtgatggagaaccgctccttcgaccacatgctgggctggatgaagtctctcaacccggagatcgacggcgtcaccggcgacgagatcaaccacctcgacgccgccgacccgacctccagggccatccgcttcggcgacggcgccgagtacgtcgaccctgacccgggccactccatgcaggccatctacgagcaggtgtacggcacgccgttcgtcgacgcgcgcgccacgccatcaaccctcccggcgtccctcgccgccgatggccggcttngcganaggcggagaaggagaagccggcattgcggaaacgttattaaag

SEQ ID NO: 394169 - DNA, 499 bp, Oryza sativa
ccggctcctcctctcttgcatcgcctcactcactgctgctaccactcctcctccttttcctcctcgttgccgctgccataggcagctaccgaccccaaggcgttctgctccaagacgacagacgtagcatcgtgccttagggtgttcccgacactcccagacatcgtcaccaaggcgcaggacaaccaagagttgtacaaacggctggtccgctactgctctttcaagacctacgaggccacgtcgctcgcggaatccatgattgccaccaccaccgctgccgaccccaagatcagcgcccccttcttcccgcagtggaaaagggacgaggcgatgacgacaaaaacacctccaggcaagtgcctcctgagctgcaacaagaccatcggcgaagtttgacgccatcctaacctgcggacacacctacatgggagacaggccccccattattcaccagaaccttaccgttttgttccatggcgggcaccccgccgtactc

SEQ ID NO: 394170 - DNA, 547 bp, Oryza sativa
attatttccatttctcccgtatcctctctctccggtccgctcttctcgagcgcggcggcggtggtggggaggaggagggccagcggcagcaagcggcggcggcgacgcgatgatgatgacgcgggcgtcgatgggggcgatggaaggcgcggcggtggacgaggtggtgcggcgcctcgtggagggcgggcgcggggggaggcaggtgcagctgtcggaggcggagatccggcagctctgcgtcgaggcgaagcgggtgctcctgtcgcagccgaacctcctgcgcatccacgcccccgtcaagatctgcggtgatatccatgggcaatttgttgatcttctgaggctgttttgattttgggcggttatcctccaacttccacttatctttttccttggagattatgtggacagagggcaaacaaaagcttggaaaccatatgcttgcttctggcatacaaagtgaagtatcctgataagattttctgtaaggggaaaccatgaagatgcgaaaattacagagtgtatggttctatgatgaatgtaa

SEQ ID NO: 394171 - DNA, 501 bp, Oryza sativa
  unsure (1)..(501): unsure at all n locations
tcgaaaaataggcagccgtagcgatcgaccttcgccgacgagttctctctttcttctccttcccccggcaacgagcctgacgccgctcgcgcccgcggaggggaggggaggggaagatctagaaccgcggggaagacgacggctgatggctagctatagctgattgatttagcggctcaacatatataccaaggcggcgcggccggccggcacgccggcagggtggtcgccggcgaacctcgcgtagagctcaccctcccctcctccggtggtctgcctccccctgcattggcggatcgaggacgcacgcacgtacgactcgttcgttcgttcactgccatgccggcccgtgccctcgccgtcgaatcgtcgtcgtcgtcgtcgtccctgcgcgtttgtaacgtctgctgctgactcgtggatgtagcttgattgctcgccgtacgtcgtcgacatgttgctgtaacgagccgaaannaccagcgaagtccgttgcgtagc

SEQ ID NO: 394172 - DNA, 524 bp, Oryza sativa
tcgtttaggcctcgacctcccccctcccccacacacgtctccccgactcgatctccccctcctcctccgccgccgccgccaacgcctcctcctccgcctcctcccccaacgcatcgccccaccccatccatccagattcctccctcctcctcctcctcctcttcctcctcccccgatcccgccccgatgcgatgcccccgcggcgcgatcgcgtgacgccgccatgatgaatcccgacggcggcgacggcgaccgcctcgaggcggcgggggcgggctcgtcgtcggcgcagcaggggcatccgacgatggagtggcggttcgcgcaggtcttcggcgagcgcgcggccggggaggacgtgcaggaagtcgacatcatctctgcaattgagtttgataaatctggggatcatcttgccaccggagacagatgaggacgtgttgttttatttgaaaggacagatgctcgggataatgccagtcggagagaaatggaaagacaagatgctccgattactagacacc

SEQ ID NO: 394173 - DNA, 595 bp, Oryza sativa
  unsure (1)..(595): unsure at all n locations
ttttttttttttttttaattcatcaatgagacagtgccgcctattaattatttatctttcagcaacgccaataaattacaagtgttttcagcgtttcatgttgcacttgcacacaaatcaatcgatcgatcgaatcccctataagtttcaatttttttttcaggttaattttcagcggagggcgcatgaattggccactcgtacgccatcaaccaatccaaccaacaaatcttatagctactaccgccatgctgcatgatcgttctatctgcatctgaattctgaagaagattagaagatgtcgaggatttcttggtttgcatctgaattctgaagaagatgattagaagatgtcgaggatttcttgggatggaaaccgttgcagagaggggcagttgccgcggctggacccagagctcgcggggagcagaggcggcagaaggtgtgggccgcacgggatgaaggcggcgcccttgtggcgcaccatgcacacgcagcacacgtgcancatctccncctcccgcccctcgccgtcgtcctcgtcgtcgtcgccgtcgccgtttcttgcgcgcgccgcngccgccggccgccgccg

SEQ ID NO: 394174 - DNA, 534 bp, Oryza sativa
tttgttcttgcctgtgcctgcttgcgttcgctggcctcctcctgctcctcctcctccctgcaggatcaatgactgcaggccaggacaccaccaaccacgacaccattcacatataaccataaggagctcaagggctgaggggtcgtttttcttggacactgaaagcacaagcagagagggagagggagagagagggaagaagaaggtgagggagctgggcaatggcgacttcctttcaggggacgacgaccaagtgcatggcgtgcgacaagacggtgtacctggtcgacaagctcaccgccgacaacagggtctaccacaaggcctgcttccggtgccaccattgcaagggcaccctcaagctcgcgaactacaactcgtttgaaggagtgctctactgcaggcctcactctgatcagctgttcaagaggactggaagtttagacaagagctttgaaggaactccaagagttgtcaagccagaaaaaccagtgagaatgagaatgctattaaagtctcgagcgcatttgctgg

SEQ ID NO: 394175 - DNA, 498 bp, Oryza sativa
tttgtttttagaaggtggatagagccaacacagattgggttaattccaacgtcaggactaaaaggggtatagacccttcttcagctggagatctagtcgcaacttctgccttgatatcgtcctgctctgtgttattcttgggattgcggcttatctttacaatgttctaaaaaagtgagaccggactgtgccatggatctattttccacgtcttccggtgatggatggatgagtttcgacgtgtccacgagctgttccctttatttttatctcatctgtgtaatagtagtatggtgttcttccgggacttgcgaacatccttgttgaaagttgaaacagtgagcattgtgcgtgcgaaaacctgacgtcttctgtacatctgcgagtttaattcttagcaagagcgtatcaaacattctgttatgaactatgtaaaccttctcatgtatattcattgcatcagttctttggttgtgccatcaaaaaaaaaaaaaaaaa

SEQ ID NO: 394176 - DNA, 565 bp, Oryza sativa
tgtttcggagccgagcgtcccggacaccatcagcatcctgcgaggcctcaaggagaagtacgaggggcaccacggtgtgaggatccaggaccgcgcgctcgtcgtcgccgcgcagctctcggcgaggtacatcatgggacgccacctgcctgacaaagcgatcgacctcgtcgacgagccctgcgcgaacgtgagggtgcagctggacagccagccagaggagatcgacaacctcgagaggaagaggattcagctggaggtggagcaccacgcgctggagaaggagaaggacaaggcaagcaaggcccggcttgtcgaggtcaagaaagagctggacgatctgagggacaagctgcagccattgacgatgaagtacaggaaggagaaggagaggatcgacgagatcaggaagctgaagcagcgccgcgaggagctccagttcacgctgcaggaggccgtagcgccggatggacctcgcccgcgtcgccgacctcaagtacggcgcgctccaggagatcgacgtcgccatcgcgaagctcgagagcgagacgggggagaacctgat

SEQ ID NO: 394177 - DNA, 939 bp, Oryza sativa
  unsure (1)..(939): unsure at all n locations
ggccgccgccnggcggcatgaaccaccaccgccaccacacaaccgccggccacgcccaccaccgcgctgtcaggaattcagaggagtctggagcaatgagatcttcagcgcanagcatcagatgaacgggatccgggcagtcgcctcacctgaaagagaacgccctgcaagggcagcaacatcatcaacaacaatggaggtccgccgacctccccagatgacaagaagggttcgtcgtcagggagcgaggggtcgatctggcccaaatttgcagtcgccctgacgaacaaagagaaagaagaggacttctgggtgttcaaaggatccaagcttcctcagaggcccaagaagagagccaaagtcatccagaggacagtgaatcttgtatgccctggaacatggctttgcgacttgacactggaaagatacgaagtccgagagaagaaggtttctaaaaagcgccccagggggttgaaagcaatgcacaacatggacagcgactctgaataataggatccactgaacacgaagtagctgaacattagaaaggagataattgcgcatacccatttagctgaagatttttcagctttctgatggaacaatcacgggctccccgcttctcgcgcttaatttgaggagatcaagatgactggactgtcgtaatttggaagctgcacagaagaacacagaggctgcaggaaatatgtttgctctgaacactgtctgctgtctgcctaccagcaacgcggctctgaatgttttccaagtttctcatgtatacgtcttgctacctaaaatgtgaagcacactgctcaggccagtccagtttgatcgatgtgtagcttgccctgtgcatgacaatngcagttaacacgaatctgatagtcttcnnnnnnnnnnnnnnnnnnnnnnnnnnnnnnnnnnnnnnnnnnnnnn

SEQ ID NO: 394178 - DNA, 416 bp, Oryza sativa
gcctcggactcctctaattctctctcttgctttctctctcctcgcttcccgggtttgatacgtggggtagggaagcgattaaccggcggtcgatcgatcgatgcaagtggtcgcgctcggttgatccaggaattggagagcatcggctgatcgagagatggcggggaacgagtggatcaatggctacctggaggcgatactggacagcggcggcgcggcggggggaggtggaggcggcggaagaggtggtggtggaggtagaggttacctctttcctaagcaggagggtaaagaactagtctagaagggcaaggagatatggatggatgaaagcaatgttcagcctggaaaaacaccaataacgatttgtggaagtattacgtggaatttcatgatgtcgataaagttcttcagtt

SEQ ID NO: 394179 - DNA, 358 bp, Oryza sativa
tccacacgaatcgaaaccgccattggagggagcagctgccgtttcttggtttcatttcttgggagttcaattggagagcgcgcttgaggtgctttgttgttgttgcgccatgcaccataccagggctggcgccgccgatggcgccggcggcggaggagaggacatcgtggaggccggggcggaggcgccgccgccgcagagggagcggctggtgccgcacagcgggccactgagcaagaggtccgggatgaggaagagcgcgaggttcgcggagtcggtgtcggcgccgctgtccgcgccgtcggggtggcggcagatcggcgcgccgcccacggacccatactctactacgaggggg

SEQ ID NO: 394180 - DNA, 500 bp, Oryza sativa
gttggtaccctgctgatatctcagacaacagtctccatgggctgcaggcttaccaggttttcatatccattgctttgatccttggggatggtttatacaacttcctcaaggtgcttatccgcacaattgcaggctttatatcaatggttcagaacaattcaaaaggcatgcttcctgtttcagacaatggcatgtccatgtccactgctgaagaggtatccttcgatgatgagcgtcgcactgaaatcttcctgaaagatcaaattcctaagtcagttgcatatggaggctacgtcgtagttgctgctctatcgattggcacccttcctgagatcttcccgcagctcaagtggtactacattttggttgcctacatcgttgcacccttgtgcttgggcccttctgcaatgcctacgggaagtgggtctcactgattgggtcttcttggcctccaacctatggcaagctttctatcttcgtgttcggagcgttggcggggc

SEQ ID NO: 394181 - DNA, 541 bp, Oryza sativa
  unsure (1)..(541): unsure at all n locations
ttcttttactccggtaggctaccacccgaagccaagagaggaaccacgaaatttccacgaacaaacaccccaaattccaggcagtaatttttccggaatcaaaaatcgaatggaaaaacaaaaattaaaacaagagaaaaacaaggcgtaggcaaagtggcaaaccacgaatcgaagaagagcttctccttccctttcctcctccattccaaccttccaacccaacaacctcaaccctcctccctcagtatccccccaagaacgcgaggagccgagtccgtactaggcccaggtcatcttttgttgtagaggcgatgcagaccgcggcggcggcggccgtggcgtgggcgccgagcccatcgccgtccacctccacctcattcgccgccccccttcaaggtggggatcgcgtcgccgtgtgggacggctgctcacgnctcctccgcgccgaggttggttgctgcggccactcaccgggggcggcggcggcanaagcaagtgggttaaggctatttccaaacccaganccagcagttgagct

SEQ ID NO: 394182 - DNA, 481 bp, Oryza sativa
gggtggttttttttttttttttttttttaaaatggcacatgattattcaccatgaacaggagaatacaggttagtgccttgttatcagcctctattactattacatgctcatccttctctcctttcgtcttatttctccatccatttgtgtttaagagtacagactttatttggatggcaacagattgtcattcttcacttacacagtactggtgacttgaggctagcaataactttctccaactccatcagtgatacatccaattatgattaagcggatgtccagctcatggttcaaatgtgagggatgatcatggaaaggaagacataatagacttggggctcctactacatgatccacggatccaaccaagctgtgctttctcgttatcatatatcaccatctgaccctgcattgtaatgtctccaattatgctgaaactcagcttagcagcagatccatcaaggatgcccaagcaca

SEQ ID NO: 394183 - DNA, 586 bp, Oryza sativa
  unsure (1)..(586): unsure at all n locations
cggacgngtntntncaaccaaaaaaagtcnaattctgaaaacaagagagagatcacagcagccgccgccatcgccatctctcggacggaaaccctagacgagcgaccatggccaccatgccaagcacttgcgcctcctcctcctccctcttcctcctcctccgcagggacaggaggagcagcaggagtgccagcctccccggacccgcccgccgtttgggggttgtgcgcgcctccgccaaggagatcgccttcgaccagggatcgcgatcctccctccaggccggcgtcgagaagctcgccgccgccgtcgccgtcaccctcggtcccagaggaagaaatgtcgtcttggatgagtttgggagccccaaagtggtcaatgacggagttaccattgctcgagctattgagctcgctgatccaatggagaatgccggtgctgctttgattcgtgaggttgccagcaagacaaatgactcagcaggtgatgggactacaaccgcatctgtcctggctcgtgagatcataaaattgggcctgctgagtgttacttcaggggcaaacccagtatctatcaaaaagggcat

SEQ ID NO: 394184 - DNA, 556 bp, Oryza sativa
  unsure (1)..(556): unsure at all n locations
gtgggctaggttttcgcggcggcggcggcggccgtcgttcgcatcgcggcggcgctgcagcgagaacnccgtctcggctcgcgtctggaattnctgctcggtggcatcgccttcggatgtgctcgacaccaccagcgggagccggggaggtagtgcgccacccgggagcagacagcttggaaatggatcgtctccaccgccggcgtcatcgtcggctgaaaggagaagctcgaggtgcgttcagtttggaaacctctctgaagatccatgccatcagtttgcatcctggtgcttccattgaacaccaacttagttatgttttcgccaattgtggatgtaattccattttcaatgtcagtgttgcgagccagagtttctgatatcttcttgaacttgtctttaaaagctatcgacatatcgggcgtttcgatggtggtcattgatggactgaaatgtttcatggaccttaaatttccattacagacgacattcttagcggaagttcctctttgccaatccttgactggggttcttaaaatctgtggtcagtttagta

SEQ ID NO: 394185 - DNA, 683 bp, Oryza sativa
  unsure (1)..(683): unsure at all n locations
cgttctttcagagcatccattgcctcgattttctattccaaattcccccacgcgaagaacagccagcgccctcctcctcctcctccttcgccttcctcctggtttcttgccatctttccagggaaggaggaaccgcggcccggccgcattcttggacaagaattgttggcataaaggaacattttgttgatgttctaatggagtcaaaaggtggcaaaaagaagtctagcagtagtagttccatgtacgaagctcccctaggctacaagattgaggacgttcgcccagccggaggaatcaagaagttccagtctgctgcttactccaactgcgctcgcaagccatcctggatattcccttcacatgcctttccccgtagagtaggaatttcctgcaatttttcctttgttttgttgcaataaatctcccttggctggctgctttctcaatctcttcccttgtcttctccgatctcttctttcctgtcttgtccactgctccttgcaacacttgatcaaatgtcgatgtccttggcctgattctttggggctctgcccttgccctcggcccattgggttttgaaggctatgagaagcgccttgaggataacattggtctgatgcgcccgtctttgtggaccccctgttggtcgcggcctttggtgnccttcaacggaagaagac

SEQ ID NO: 394186 - DNA, 560 bp, Oryza sativa
tccagcttcaaaggaagtcgttgcgaatctaccagttgtaaccgtgacagaagaaatcatagctagattgggcaaagagactcagtgtgctgtttgccgggagagcttgctggtggacgacaagatgcaggagctaccgtgcaagcatcttttccaccctccatgcctcaagccatggctggacgagaacaactcctgcccgatctgccggcacgagctgaggacggacgaccatgtgtacgagagccggaaggagcgggagcgagaagaggaggaagacaggaagggcgccgcgaatgctgtcaggggtggggagttcatgtatgtcttgaacatcttgaattttcaaccgaacgtgattatctctctgtaacgatttcctgaaattcacgagtgcactggagttgaaaattcatgtacaaacaacgtttgcttcggttcaccaccgtatcttcgttgaatgatactaccactatacagccagcttattacagcatcattgttcgttgatgtgcatgtgatgaagtacttgagttgagacattgttaaaaaaaaaaaaa

SEQ ID NO: 394187 - DNA, 489 bp, Oryza sativa
  unsure (1)..(489): unsure at all n locations
nnnnnnnnnnnnnnnnnnnnnnnnnnnnnnttggtggctcgaaggattcatgcattgcataaagtcaaacggatacatacataacaattcctacataaataaccgtgcaattttgaggcagggtatctagaacctagaggtggacaagttagttgttctggataaacgggagaacaatcgctttcagtgccagatcgggctgcaagatcaaatgagcgaccgaaactgaatgctaaagctgtgatgaactgttgttgagcatgctaagatgaccagagattttctccttgcacgccggacagatgaagccaagtgaatcagcctgctgatcggcaacggtgccaaaatgctggaactgagtgttgcaccatacacacatggacgactggagcacacacccgccaaccatctttgacatggacatgtcccatcctaactggacaggagggcagctgccaatgtgcggcgcataacctaacatcagtgttg

SEQ ID NO: 394188 - DNA, 788 bp, Oryza sativa
cacacaccttggatcgcggcctcacgcgcgtgaggggccgcaacgcaacgtgcgaccccgacctctcctcctccacctcggcttccccccaaattccatctcctcgcctcggcgaatccgattccgagcactcacaaccggatcggagcgagttccatggcctgaatctcagggggggtgactggccgaggagcgggctctctctctcactgccttaggctgaaatctgctataactttggaggtactaaaacgagtctgagatgggtgtgattagtacggtgcttggtttctctgggtttggctttggattctccgctggtattgtcatcggatactacttcttcatctacttccagccaactgatgtcaaggacgtcaaagttcgcccacttgtcgaatatgactcaatatcgttggacggtatccttcctgaaattcctttgtgggtcaagaatcctgactatgatagaattgatgggctgaatagatttttggagatgatgtggccttacctcaacaaggcgatctgcagaactgcactggatattgcaaagccaatcattgaagagaacaggaagacgtataaactagaatctattgagtttgaatcacttacattgggtagcttaccacccacctttcaaggaatgaaagtgtatgtcacagaagaacaagaattgataatggaaccatctcttaagtgggctgcaaatcccaatgtcactgttgttgtaaaggcttatgggtcgaaagcaactgtccagattgtggatctgcaagtctttg

SEQ ID NO: 394189 - DNA, 508 bp, Oryza sativa
tcctcaatgccctggtgcccggagcccgcgcccgcggcatcccccgccgccgcctccgcctccgccgcgggtaaatccctcctcgtcctctcctccgctcctcgtgccatctcgcggctgaacaggggaggggatcctggttgctgttactgccatattttcacatggattcgactaagcaagatttccaaccccggacattctccatcaaactgtggccaccaagtgaaagcactcgtctcatgcttgtggagaggatgaccaagaacctttccacagagtccatattttctcgcaagtaccgccttttgggcaaggaagaggctcacgatatattgtcttataatagtgatcgaagaggtatgcctcgcctctgcagacgagcatttcaaggaggagcctgatggggatgggagttctgctgtccagctgtacgcaaaggaaactagcaagttgatgctggaagttctgaaaagagggccaaggaccactgtggaaccagagtacc

SEQ ID NO: 394190 - DNA, 558 bp, Oryza sativa
tcggcttcacaagaaagctcactgcgctgcaccaccagccaacccaagatcaacaggaaccagagagagagagatgaacgccgacttcgggcgcccaaggacctcgcggggggcctccagcagcggaggtctctctaccagcccaccctccctccctgcctccagggcgcaacggtgaaggtggagtatggcgacgcaccaccaccatcgacccaacctgcgccaacgtcgtcgcgcaggccttcccccgcacctacggccagccgctcgtcagcttcgtcgcgccgccgcccgacgccgtcgacaaggaccgcgccccgatcagggtaggggtggtgttctccggcaggcagtcgccgggaggccacaacgtgatctggggactccacgacgctctcaaggcttacaatcctcatagtggtctctatggattcgtccgtggcactgagggactggttgcgaacatgacaatcgagatcacggatgatgttcttgctctatacaagaaccaggtggttttgatttgctcggtagaagtatcgatcagatccgcagcac

SEQ ID NO: 394191 - DNA, 975 bp, Oryza sativa
tattatccttattacctcagcgataacacaaagaatgtgctgttatcatgtgcattcatacacttggaaaagaaggaattcatcaaacaattctcagaaatttcatcaataaaccaacggattctattatctggtccagcaggttcggagatttatcaggaaacattgataaaggcacttgcaaaacatttcggtgctaggctacttgttgttgattcgcttttgttgcctggggcgccttcaaaggacccagagtcgcagaaagatgctgcgaagtctgataagtcaggggataaggctggtagtgagaagttggcaattcttcataagaaccgctcttccttggcagacgctatgcacttcaggaggccagctgtacaaccttctagtgtgcatgctgatatcgtgggtacatcgactctgcattctgcatctttgcccaaacaggaatcatcaacagctacatccaagagctatacttttagagaaggggatagggtaagatatgtgggtccagctcagcaatcgtcattgtcgcaaaggggacccagttatggttatcgaggcagagtgatgcttgcttttgaagaaaatgggtcttccaaaattggagttcgatttgacaagcagatccctgatggtaatgatcttggtggtttgtgcgaggaagatcatggtttcttctgctctgctgacttacttcgccctgacttttctggtggtgaagaggttgaaaggctagcaatggccgagttaattgaagtcatctcagaggaacacaaagctggccctatgatagtgttacttaaggatgtagagaaatcattcactggaattacagagtcactttcatctttgaggaataagcttgaagcgcttccatctggtgtgcttattataggatctcacactcaaatggacagccgcaaagagaaggcccacccacgtggatttttttctacaaagttgtagtag

SEQ ID NO: 394192 - DNA, 627 bp, Oryza sativa
  unsure (1)..(627): unsure at all n locations
caccggcggtcgcagagcgatatccccttcgggttctcgcacctgagcccgcccctgccgcctcccgcgcccgtnaagcggaaggccgccacggcgcggaggggtgcagatcggacggcgatgacttcgccttgtacgacctcgtcaactcctacatggacctcgacgggatggaggctctcaactcctccgaggagcggcacgaggaccgcgacagccgcgccagcggcacgcgcaccgggagcgtggccgacaagcagccagaacgaggccgagagccactcgactccagtggagaggaaggacggaggaggcaaatcccggcattgccgcagcttatcggtggacagcttcatcgagaagctcaacttcgacgagtcaccgaagctgccactgccgtctcccagcggtggcctatccagaagcgggagcgggtccttggatggcggcgctgcatctctgtttggtgctgagtttgccaatggggagttcactgaagctgagaagaagagatcatggcaaatgagcgccttgccgagatcgctttgactgatcctaagagggttaaaagaattttggcaaatcggcagtctgcggcaaggtcaaaggagcgtaagatgaggtaca

SEQ ID NO: 394193 - DNA, 795 bp, Oryza sativa
gttcatgttcgcagttcatcgaactgtggaagcgaaagcatgaaactggacaatggattgaagttgaaccagaagcaatgtctacacactctgaatttcctccttttaatccatcgggtattgtttttgttggagacaacatgaagcaaaacacggaaactatgtctgtttccaatggagaggcaaatggcgaggatgcttctaaagctgagcataagtctggtcaacagatggggtatcaggctgcatatcctccatgggcaatgcatcctccaccttaccatatgcaaggaatgccttactatcctgggccgtactaccctccatatcctccagtggatgaccccaggtatcactactcgggaaggaaatcatcgaggaagcactcttcagacagtaaagagtcagaagtacttgacgaaggaagtgatggtagcagttctgaaagagggagttctcatggtcacaagtcacataaaaagggtaagcgatcagggaaaaagaaacctagtgtagttgtcataaaaaatgtaaatgtaacatccaaaaagcatggctcgtcggaaagtgagtcgcagtcaagttctgaagatgggtctcaagacagtgatgacacacactacaaaaagagacatgggaagcataagagctcaggttcaaagaaaaaggagggtgcaaaaactaactttgactctggagacgactataataacaaggatgaatcatcttatgggcaagatgctgaccaagggaactggaatgcattccagagtttcctgatgagagcaaaaaaaa

SEQ ID NO: 394194 - DNA, 521 bp, Oryza sativa
  unsure (1)..(521): unsure at all n locations
cccacgcgtccgacggcggcccctctcctcctcgcggcggccttgttcctcgtcgtcgccggcgacggatcggagccgacgccgacgccgacgccatggccggcccagttccacgcgaagctcctgatggagttccacggcaacctgtcgctggcggacctgtggtacgactggccggggggccgcaacctccacgtcatccgctaccagctcgccgccgacgagcccttctacgacaacgagtggaacaacggcacctccttcttctacaccccggcccgccgcgcctgccgctccgccgccgtcggcgtcgggcatcctgcccccaaactggctcgttcctggcttcgtctacctcgggccggcaccccgtcgacgggttcgactggcacgtctgggccaaggccgacttcatcacctactacgaggacaccctgaccaaacgccccgtcaaatgggtcctctacaccgngaggactagccatgtgatgagctttgaggaaggtgctgagctggaggac

SEQ ID NO: 394195 - DNA, 411 bp, Oryza sativa
  unsure (1)..(411): unsure at all n locations
cagtaaaaaatggtgaggcactcattcaagtggtacttgctgaacagaggaaaaagaccgaactgcaaatacacacccaggttagcacgacccagagagccaaatgggccacatcgaatgcagtatattcacatacggcaggaataaaccctgatgcctattcctaactcctaaatcctcctaatccaatttatgtaactcgcattttctttacaccttttgtggagcccctgcctttaaaaccaacaatttttccttaccgctaaagcctttcttccccttcacaaaaggncttggcctgccgatgttagttttaaagggtttaggaccaaaaacacaccattctcttccctttacttgcccagttaattttgcccacaaaccgtcagcccgtgggagacaggccaacaa

SEQ ID NO: 394196 - DNA, 641 bp, Oryza sativa
  unsure (1)..(641): unsure at all n locations
gnaattgtaatacgactcactatagggcgaattgggtaccgggccccccctcgagtttttttctttctcttttcatagaagcacgacaacttgctcaagattaaaacagcaagcacctttgatgctgtacatcatatcatcattcttaacaatacccccataattatctggtgaaacattaacaggaagacgcacaccatcaacatccacatgtcaaaacaataccacatcccgttactcagggggggcaggggcacaaaaccaaaatgagatgccactttgcactctagggtaacttctgttggtgaccacggtcgcagccgcctaaacagtggattctcataatctatcaactaattcacttttatttagcaaaccaggcagcctgataacttttttttatctcttttgtagatacatggcaccgctaacctgcgaacagaantcagaaccagaactcttctttctctaaaaatattttcacccatctctgaataattgaagtcgtgtttatccccagggtctcaaaaatanttaacactgtcncaaggtatgatccacctaatcttccttgtccaaatacacctgggccatcatttccccaacatcaaacaccaatggttnttatccntgcgtancnc

SEQ ID NO: 394197 - DNA, 489 bp, Oryza sativa
  unsure (1)..(489): unsure at all n locations
acctgctgcaccagctcctcgggccggcactgcgcgtcctgcggctgctcgtggttgcgcatctccacgcacgtgaagttgagcaccgcgccgtggcgggccagcatgcgcgcgatcggctggtacccgtcgtggtgcctcgtgttgtagtaccctgccgtccagctccgcggcgtgggaccgcgtgccgtagtgccagtggatgccggccaccttcacggagatcttcacgccgggtgtgcccggtgtacacgcccgacgccgccgacaggatgcgctcgccgtgttccaggagcatctgcgagtaccagctcatgaaaaactcaccgtagggagtgttccacccaccttcacggcggaagaagggcgagtcctccggccagtcgttgtacccgccggagtctcccggcccgcgttgcccnactccggcttgcccaccgcctccgccgccgccttgagactgctcagcatgtactctcgtgccgaatt

SEQ ID NO: 394198 - DNA, 789 bp, Oryza sativa
  unsure (1)..(789): unsure at all n locations
tttttttttttttttgcaaagaagcttcagttgcaaacatgcaattattctgaagcaaaactggaattaatagtgccaggtgaaacagggtaccacatcctttcaagcatcatcactagatttaattaaaaattacaacatgcgaaggacggattagatcataagcacttcaatgaaaaataaaggttgctcggaatacatctaataacctaaacaaaatatttctaagccatcctttcatacatcagcttgcatgcaccaaccctgttcagaaacacaaaggaaagcaaacctagaagaactcgaactctagataattgtctgagcccttctggttggcagccggggcaaccttctcagtagctggtgctggctttggtgggcgctcgagctcaactggcttgggtatctcaggagggcttgcacatcgtatgagcgcccaattcacgccctcaaagaatggatgctgctttatctcccgtcgccccacgcttgtaggcaagacggtgctgcgggtccttgaccagcaatcctcttatcaggtccctggctgagaagctcaccattggggattccgggaaccgcagggctggccaacaacattgaagagtgtagcccggtttcctgatcccttgaaaggggtcttaccgaacaagagttcatacaggnatatgccaaaggtccaccaatcccacagcactgccgtgaccctctcccttgatgatttctggtgccaagtactccatgagtgccaacaaaggncatggaccgagcatcagttcggctcaa

SEQ ID NO: 394199 - DNA, 577 bp, Oryza sativa
  unsure (1)..(577): unsure at all n locations
nnnnnnnnnnnnnnnnnnnnnnnnnnnnnnnnggntcaatttgtagcggaaacaattggagatttgagtttatatgttgctgcaattctcagtgaccaggaatgtacagagaacaaaccaaagcatttgcatgacagtcctgatgaagtaccaccactccaccagcacgtccgaggcaaacttcagtcaaaatcaactccatatgttatgatgaaaaacaaggaaaacgatacattaatacattttgcccaactcttccaggtacagtattgattacccacaagatacaacatacttactttaaataccatggcatcatactggggcaaaaactgtacctgcccacaacatcttgggacctgtaccactagggactcggaatatatccacagaatcggctgtgaaattcaagaaaggggagctatctagtctgtgcaaccccgatttccagcagggtaattcacctttaacaacaggaactcttcgtttcgattgcactggctgacatgcaacctctcatgccatggataattcctttggaaactggatgttcaactaaatttgcataaatagaagg

SEQ ID NO: 394200 - DNA, 447 bp, Oryza sativa
  unsure (1)..(447): unsure at all n locations
cggangtggnntaggaacacaaagcaaatccaacacttcttccttgagctcctttccatcgtcaacttccttagctggttacacttcgttgtccaatcgaaaagcatagttagttccaaaatggctgcaaaggcagttatgcttgcactgcttgtgcttgtgagcacggctcaggtatccatgggtgcaaggcggcgcatggagctgtacaagccagacccggctgacatgctctcctaccacagcggcgccgtgctccagggcaacatcccggtgtccatctactggtacggcaagttcacgccggcgcagaagtcgatactcttcgacttcctcctgtcgctctcggtggcgccctacgccgccgcgccgtccgttgcgcagtggtggagcagcatcgacgagctctacttatcaaggnggtgcaaaccaactccacggccagan

SEQ ID NO: 394201 - DNA, 633 bp, Oryza sativa
  unsure (1)..(633): unsure at all n locations
caaggattttggaattcttcaccagagagattcctcatgcattcctgatggggccagatatgaatctncggaggttggctgaattagttgtctttattctgaaccacatcatattagcagccgatgcagagttctttgacatgactctaagacggccagggcaacatcaagaaaaaacaaattgcactatgatcttggctcctcttgttggcattatcctcaatcttatggaaagcagcagtacttcaggccatagggagttaaatgatgtgattacagtgttcacaagcatggattgccctgccacaatccattttgggttgcagtacctactgagctacaattggagcaatgttctccgaggtgacgcttcccttgcaaagctagctcagcttgaagaattctcccattactttatgcacatcactatgtcagcgggatggcaatgaagagcaaggtttcagcactgccagtaatgaagaggacaactgctgcatatgctacaattccgattcggataccacattcgagccatgccatcacaggtcctgctacggctgcataaccaggcacctnctaacagccaaaggtgcttcttctgcatgcagtggtgacttcagttaccagatagct

SEQ ID NO: 394202 - DNA, 640 bp, Oryza sativa
  unsure (1)..(640): unsure at all n locations
ttgcttgtttctattactactaggaaaaactgaaggaagtggaaaggcatgcagaacttgctgaaaacactgttgatcaccacattcacagtccaagagatttaagagcagagttaaaaaaactaaagcacgcctacaagactttgagctctgaaaaggaaaaggaagtttctgcattacgtgcagaaaaggattttgtgtggaaccagttgaggacaatggagaatgattatactgatctccttaagaagaaaaaaatagaggcagcacaagctactgaagctgcacaaaagcttcagaagaatttagaagagctgcaagatcaaaataagggcaacgagatcggcagattacaagcagaagctgttgatgccaaaatgaacatatcaattcttgaggataagctccaggaaatgctttccttggtgaaggagaaagacttggaaattgaacaactcaaacatggtcagcctatgaccagtcagatcaacaaaaaggatatcaaccagaagaacagaaaatgtaggtcccaagaccctccttcaagggacaaatcancaaatttgcaagccacaccgcctgggagaaaagtgaggttttccaggacagcatgcatcangttcaaacaggagcaagnttn

SEQ ID NO: 394203 - DNA, 599 bp, Oryza sativa
tcgttcgctctccgccgccatcgccgccgccgccttgctctccgccgccgccgttggtactcgcgcttgccgcccgtcgagctcccctcaccgataaaggctcaccgaaggtttcgtcgtcgaccccgggagtttcaaatatgtctggccgaggactgatgaagcaggacttaagcaagcttgacgtgacgaagctccaccctttatcacctgaagttatctcacgccaggcgacgatcaatatcggtaccatagggcatgtggcccatggaaagtccactgttgtgaaggctatatctggagttcagaccgttcgcttcaagaatgagctggagcgtaacatcactataaagcttggctatgctaatgcgaaaatctacaaatgtgaagacgagaaatgtccacgaccaatgtgctacaaggcttatggaagcgggaaagaagatagccctcactgtgatgtgcctgggtttgaaaacactaggatgaagctactgagacatgtttcttttgttgattgtccgggacacgatattctcatggctacgatgcttaatggagctgctatcatggatggagcattgcttctgatagcagca

SEQ ID NO: 394204 - DNA, 672 bp, Oryza sativa
  unsure (1)..(672): unsure at all n locations
tttttttttttttttgaacaaaattagcaagtatcacattaccattgaactgaacgcaatatggacatgaagtacagacagttaagactacggtaaaattgcacaagccatcaacttttgacgatgtagtcagtatcgacaggtacacgagttctgcactcagaagtcaagctactactggtctccaagagctggattgttttattagtagagctgaaggtcatcacagctgatagcagcatccaacaccgatctgctttccatgctctgacatgcctactcaacatgcgagaaaccacctccagtctcagacttagttttgtgatcagatggattaggcattatttcatacacaattgtggccacaacatcccttttgttctgagtagcttcaccacggcaacccaatgtaatatatcttagttgtgtcacctccaaagttctcagggaaatgtagagttaggttagccacaccctggaaccttggaataccttgtttggnactcaagaactccctgcaaattctctgccagctcccatcctggcacagttgcatattttggagnatcatgaagtcaatgcctctcggttggataaangctctcattctagaggggnttgttccatctgnaccaccaacaacagagaggctcttggatctggacgtctgga

SEQ ID NO: 394205 - DNA, 368 bp, Oryza sativa
cacaaatgatctagatccattcctaccaacaatttagtcacaaaacatcgtaattagattgaactaacaatctataatctttgacacaacaatgccacaaaatcctactaatatacatcatcatacatgtgacaaagtccatgtcctacaaaagaatcccttccttgtctttcttcccgccatcgcagccatgccatgccatcaccacgtcgtcgccgagctccgccctgagctcctcccacccgaactcctcggcaccgccgtcgccgtcgccgtcgtcgcctccctccagcctcagctagacgagcatcatcgacggcgacacctccgacatctccatggacatggcgacgaggcccgagaggccg

SEQ ID NO: 394206 - DNA, 674 bp, Oryza sativa
atcaaaaaggacgtgttccatttgaactgacccacgtcatgttggaaaaaattacaaataatagctaggctataaataaatagcacatcccatattacagttcaaagtgttaaacctaaaaggaaacaaaagaccacgttgacaaaactagctgccatccaaagaatgttcttttccatatatcaagacacgacacagagactaactgacaaatgacgtttggcaccaacctatttttcccatgaactggaggcgaacttgaaacaaattttgaccagtttcagatgttgcgatgaccagcgtgcggttagatgatggtgatcatttttgtacagggatagaccacaatggatggcaaaaatagtacactctttttattggacagcagtttgcttcggacatgtccatgcctgatgagcaggtgaggcttgcttgtctttctgaccgatctgactaacaactgttctggtcaactatgccattttagcccatgagatttcctgccccttcactcatttgctttgatttcatcggttttagtttcaacatccacagacggaacttccttagttggtaactccacgtcttcgttatccacagtttgctcagacgatactgctgtgttggctggatcaatgctactatcatcaggatctggcaaaaaatgaaagaca

SEQ ID NO: 394207 - DNA, 408 bp, Oryza sativa
gctaggatcctctagtttggttggccttctttttttttttttttggcattaacctttctgctggctataacatttcgtagaacaaagagatgttgctgttgttatgtacttatgtacacaaatatgaatgacatcattgcacaagtatagtttttttttttaattccctttatccccatatatacaatcgcaatggcggaatatttacagttttacagttctggttatacacccttcgggtgtaacttcaacagcagcactgtgataaagcccagcacagcgtttgtttcctttgctatggttatgtggatcctttcattgttctttgtgtacctctggaaacaattgcagcacttgagtcgctcgtcccgtagccggcacgagctcgtgccgaagtccctgcagccc

SEQ ID NO: 394208 - DNA, 428 bp, Oryza sativa
  unsure (1)..(428): unsure at all n locations
nnnnnnnnnnnnnnnnnnnnnatatcaatcaacaatcccatcagtccatttatttctggcaaaattgatcttacatcacccaacgatcccgattttagttttctagcaccgacaaatcccaggtcacttgaatagcatggaaccaatttcgcctttatttatcgtatacatttgtatgtctgaaacgcatcctccgaaagactgcatcagtgaatgttagtgaacctcacagtttggatgcgttggcagtagcaaccttgcttcccaaagcgatagctgccttggacccagactggcgccccagatggttgcagatgaactcgccggcggccatcaccttgcccaggtcgacattggtgctgatccccagcccgttcagcatgtaaaacaagtcctncgtcggcaaattggccggtgcacttttcggg

SEQ ID NO: 394209 - DNA, 561 bp, Oryza sativa
  unsure (1)..(561): unsure at all n locations
aattgtaatacgactcactatagggcgaattgggtaccgggccccccctcgagttttttttttttttttttgaatggaaatggcatacaccttgcacgtttttatgatataacaccagatacaataaacatatcatggcatggatcggcttagatgtgcaatgaatccaagcagagcaccccacacatgaagtttctcaggtctccttgttgcttagcctcagtaagcgatacagtacctatacacactaggggtttggagatctatacaagggggacaactgtaagtatcatggcttcccgagcctagatgcttctatccaatggtgctccacagaatgccggccctcaactcatgttacagaatctaacacaacaatagctccccgaaaccaataaataccacaaactaatacattaatcgaatcaaccctaacctcacggatcattatttggacnngantaccgcggaatttctttcagaaggtttcctcatgttctccgnatanttttaatgctgataaggttgcgcaaatccactgcctcctcccccnattctgat

SEQ ID NO: 394210 - DNA, 384 bp, Oryza sativa
caggaagttatcatcttagcatctgccaaagttctagtgaaatgtgtgtgtgcatactgcgagttagagatacaaaaccggttatatctagcaggaaaaggaaaggcttatatgatcaatgaaaccttagttacaagatttacaattacattcttaataatttcttggtctttgaggcttaattaagccttctgtgttcgaaacagcaaatcagggttgcgagatcaaggaattgaatcgcttccatctccaacaacacccctgaatcaccatcttcctcgatgttcagcaaactgaatttcgacgcaagtagcaactaggccagacatagggttggtagtgctcacaattccgccaacttatttatgaacctcctctcagttc

SEQ ID NO: 394211 - DNA, 569 bp, Oryza sativa
  unsure (1)..(569): unsure at all n locations
nnnnnnnnnnnnnnnnnnnnncaccaacgtcaacaacaaaaatgacgggtagatgacatctagtctcaacattggttcataaatatcaccaaattccaaaatgcagcaatcttagtaacaaaacaatatcgcataaacaatatgcatgcgacatcttacagatcaaaaatcaaacagcgatggagcaaagcatgcgctgcagctgcatactgtcgtagcgcaagctacttcagctactcccatcaagatcagacaacaaaagagccatacacaacacaaggcaataggtgacagcagtgcatctcaagaaccacaacccaaccactactatcacctgccacgaggcactgcatcacctcttcctagtgcttcttgtctttcaaggggccccttggtactttactcaggaccttagcatcgagcacagcatactgtttcttaatctcaacccaccccttctcaccatatgagtcaatctgatcttcatacttctcatacagaattggaactgtgtgcagcaccacaaacacaatataaaccaaggtcaagaagttgcagcagcttccaan

SEQ ID NO: 394212 - DNA, 365 bp, Oryza sativa
atataagacagtatgatttactagccgttaagtaacagatgttttcttgagtgaaccaaaatcaacaagcaaccacatataggttgacagctgatgacaaattagaggttgtttcaacatttgtgttcatcatctgatttcataacggtggtcggcaacaatataaaacctaaagagtcagcttgcaaaacagcaagacggcacgaagaattacgagccctaccctaccaagtaagcagcagcctggcaaaatgaagtctgctccagcttcacgagccggccactgacaaagatgtcactacgggaatgacgacctccttctcttggttgcaaatgggcgtccctgtgtcttggctggaacagac

SEQ ID NO: 394213 - DNA, 471 bp, Oryza sativa
gcttgcaatgggcatgatttttcttgttcttggccaaacatttgtgatatttctgacctgattaggcctccatgaaactctctacatgttactagatacaaactgattttatcaaattggctactctaagtattacaaagtattatctgggagaagatctgtacaaaggggggcattggattattcttccagagcaaaaaaccgatgaaattatctggccaagcctggccacaatcaagcaatacctactttgatctaatccctctacatttccaatatgtatgtcatcatacttgtcatatgtatagaactttgtatgtactaaacatggccgtgcgaaaactttggttttgattccagataactagaaattctccttgtggaagtcggatttcgcgctcggctttctcggggaatcttgagcgagctcacgcagttccttcggcagcaccgggggggcacagtaggaca

SEQ ID NO: 394214 - DNA, 545 bp, Oryza sativa
cggaaccgacaggagcggattagcgatcgataactggagggagtatacagttggaaaattcaaactagacgctgatcatatcgagggagagttcaactcaactggagcgcggagatggcaacgcccaagctgtcccctgtatcgccggtgcggccggaagataagcagcgcgcgtcctcctcgtcgtcgtcgggggcggtggctgcgcctctgagggtgcaggacgatacggcggtcgaggagtacgagcagtacctgcggcttccggagctcgcaaggctgtggaaggataggtgctgtccggagtgggccgacgagggcctcgtcaagccggcgctgcaggcgctgggagatcaccttccgcttcatctccgtcgcgctctccgacccgcggggctacgccagccgccgcgagcttcgcgcggcggctggaggcgcttcgcggcaagggaggtggagctggtggccagcgctctgcgagggcgagcagtgcccgccgctggccgagctgagcgcgtccaaagccgtgctcccgcggagcggag

SEQ ID NO: 394215 - DNA, 631 bp, Oryza sativa
  unsure (1)..(631): unsure at all n locations
acgacaaacaccacaagctaagtaaggagtaagtagctttgcaagattcagcacaaatgggatcgttgggccctgctgttgtggtgagcgcgagcgcggcgaagatggccggcggcgggcagcagccgtcgacggagaggaaggagacgtcgtcggcgttcggcggcgggtgctgcggcggcggcttccagatgccgctgcactacccgcggtacaagaaggcggactacgaggcgatgccggagtggcgcgtggactgcctcctccgggagtacggcctccccgtcgacggcggcgtggaggagaagcggaggttcgccatgggcgccttcctctggcccgaccagtactgaagcttgctgtgttcgccttggagatattcagaagccgatcgagcagggtaccagtaactgcatgatgctaatttgattaggagcgctctatatatattaattaatctattatgtgtttttattatgctgagctcgtgttaatctgtcatccgcatataatggcgccatggaaatatggaatgatgatgttgtaaatatttcctactactacgttcataaagatatggaagaatacattattttgctcttaaaannnnnnnnnnnnnnnnnnnnnnnnn

SEQ ID NO: 394216 - DNA, 889 bp, Oryza sativa
gtatacaccaaaaaaaaaaaaaaagaaaatcatatatagtcctagctagtctcctagactcctagtcctagctgcaagaaagccacattggccatgggatcgttgggtccaagcgtggtggggctgcagcccaaggccgagaagacgacggcggcggccggcggtgagcagcagcacggcggcggcggcggcgggtgtggcgggtcgtcgttccggatgccgctgcactacccgcggtacaagaaggcggagtacgaggcgatgccggagtggcgggtggactgcctgctccgggagtacgggctccccgttcgacggcgaccttcgacgccaagcggcggtttcgccatgggcgccttcctctggcccgaccagtactagctctagctagctacatccatggcatcagctactacgtacgttgctgcagctaagctactctcccctccccgtccgaaaaatttgaagagcctaaaatcgaaagggatatttcctaataccacgaatccggatatgctgctcaatagcaacttaattttcctcctctccgacccgactacgctgcactatagcccctacatttacggttcttcttggtggacgcgagctgaccgatcgaccaagccgtaaacgtttttgcatccgacgtacagtacggggtatgttagatgcccttccaagtgtgtgtttcgactaagccatatcatattttcttatgttgtgctgcacattatatagtgtactggacactgttgtattatataggcacgtgcatctatgtacgtatgttatcaacttgtggtgcgggtatcccccatatgtgttatcacactgcaaggaaaaaaaaaaaggggggcaataataggagcaagctgcgtagtgtgcgtgc

SEQ ID NO: 394217 - DNA, 558 bp, Oryza sativa
taccattgcgctgggtaggattccaatgtgggggactagggtttagggtttggagtcaatcccagaccgcgcccatgacgtcctcgtctcgagtaagggttggcaatctagtccccctcaatgaaggaaatgcgagctcgtcaaatggatcggtgtcaagcattcctatctatctgggtgccaatgttgtagggaggaatcatttggtggtcgtcgacaagagagtcagccgcaagcatctgagcctacatgcctcggcggatggttccattgaagcggtagtggaaggaccaaatcctatcattgttcgatctgtaggggccagaggaggaaggtctgttgctcaagagagagtaaagattgcacatgatgatgtcctggaactcatccctggtgaatattttgtgaagtatttgaatgtgggcgataaccataaaagttccacatcaatgggttcaagtgattttaaaaaggggaagaggctctgtgaggatgatactgtagttatcaaaagaaatcgtcagattatggaagatgaggctttggcaagaagtttac

SEQ ID NO: 394218 - DNA, 548 bp, Oryza sativa
  unsure (1)..(548): unsure at all n locations
gttggaacgaaacccaacccaagcgaggcaaaagcggcggtggcggaggaggagaggagcaatggagagggcggtgccggtgaggaagccgcacacctcgacggcggacctgctcacgtggtcggcgacggggcccgacgccgccgccgccgcggcctcgccggtcgcctcctcccgccccagcctcaagccggccggggggatcacgccggcgatgttcggcgcgccggtgagcgagaaggaggcggaggatctgagcaagagtgaacgaaaattttgctcgggctcaaagttaaaagaaatgactggaagtgggatattcgctgagaatagtgaaaatgatgattcagaggcttcaaatcctgcaaacaaaacttctgtaaggatgtatcagcaaactgtaactggaataagccaaatctcattcagtgctgatggaagtgtttctccaaagaagccatcgtcattacctgaggtggctaagcagcgagagttagtggtacanttngagactgattgctgnaggctaaaatgantaagcagcattt

SEQ ID NO: 394219 - DNA, 449 bp, Oryza sativa
aataattcgaacgcggcatcggcttggtgagtgtgagagtgagatcgatggcggcggcgtccatctcgcggagcctcctccgccgatcccgctgcggcggcggggagcaccacctcctcctgctggcgcgcggcttcgtcacggcggagtgccaccgccccgtcgtgctccacaagcgcggctccgacatcctccacgacccatggttcaaccggggcacggggttctcgatgacggagagggaccgcctcggcctccgcggcctgctcccgcccaacgtcgtctcctcccagcagcagatcgaccgattcatgcttgacatgcaacggctgcagaaaatatgcgagagatggcccatcgggatacttacccgttagcaaaatggcgtatccttaacaggctgcatgacagaaatgaaacaatgtattacaaggtcctaatagataata

SEQ ID NO: 394220 - DNA, 543 bp, Oryza sativa
  unsure (1)..(543): unsure at all n locations
nnnnnnnnnnnntttttttttttttacaaaaaagaatgtaaactacgtgttgatattatgtcctgctggcaagttgttacaatgctgaagcagatgctgaagttgaacacatgaaaaatattacaaagagatctagcccttttgtgtctagctttaaggccaatctgccatctggagtgtagaggtaaataatttcctcttcaaagtgagatttcatttactgacagcaccacatggtaagcaaaaagaaaaaaaaaagaccaaaaatggaacagacatcgttcattacactcagggttggcttccttccaaccctagtactatctgcctactaagctgaactctgtatagaaccatacactagtatcatcagagcagtttcttcatgcctttgagtacttggagctccacataggtaccttcagagcctcgtcgtcgcctgcgttgcccccattttcagcagtgctcaaagagtccgagatcaaggggtccgattcgctttctttactggtggtgtgggggttatggtttggtggcctttgt

SEQ ID NO: 394221 - DNA, 468 bp, Oryza sativa
  unsure (1)..(468): unsure at all n locations
nnnnnnnnnnnnnnnnnnnnnnnnnnnnnnnnnnnnnnnnnnnnnnngagcagaatgatgagataaactagatatatattcgatttccacgcttgctgtaaaagcgcaccgcacagtcatcagttcatcagcaaccataaactgatagtactccatataatacggaactggttcaggtttccttccaaaggcatgcatccacccaaacagaatgatgctttcgcatcgctagaagttttacgggtacttaggaaatgggagtcttagctattgtagatgagcaggaaatgtatggtaagccgcagttcttcatgtcgaaggcgagggggaggatttgaagatgtccggcttgtgtttatccatcagggaagtgagggctgtgtccagctccttctcaagctcaaattccttcgccaggtactccttcttgagcttcaccttcttctcttcatgcaatttgatcagttt

SEQ ID NO: 394222 - DNA, 431 bp, Oryza sativa
  unsure (1)..(431): unsure at all n locations
nngagagaggacagcattgatttcgatctcttgataattcacaaatataaatatacatcagaggatgttaattcatggataagcaacagtcatgtgacttcctggcggcgacaagataaaccctacaacgggacagaaatgtactgcttctacaagtaaggattattactcaatgtaatcacattcaactcacaacagattataccctctcgcttctacatgcatatacaactaccgacaggaaatatctctaagtattatatatatcctgtattcatgggcatggcataggttcttgatcatatgcctttcgacgcttacgaaagaaacaacacgttgcttgtcttgccaatgcaggtgatatttactttaagtgctagcctcattcataaggtggcaacctttggactgtattaagtttattttgctgc

SEQ ID NO: 394223 - DNA, 615 bp, Oryza sativa
tttttttttttttttaggagttcgacaagcacgtgcattcattcattagtagttcagcaccagactggattctccgttcacccatacatagcacagggacctggcttctcagatgagaaattccagttttcaagtagcgttcgtagaattttccaggaagtattaagtgtaagaaccatcttctagatactatatagccacccacgataaactgacaagtcggcaaacttacagacaaactaatactactatatatactaagatggcaccaaaacaaaacaaggaattgtcttgttctaactgactatttcaaggtaatgctgaatcgcacacctcatatgacctcccagtgagcgactcgaagatactcttttgatgctttagcatgtggcgcacatagtacagaccacgaaaatctgctatgaaaaacgcctctagcaaccacagatgcaaatggaagacaactgacagctcaggtgggtctgtggatcctggttgacatggcaaaaaaatgcaaggcccttcagggggcatgggacgagatggactctgggtcgttcatcccagcgagaaatgcaatgaagacccacagcattagaacaccaatgatggcag

SEQ ID NO: 394224 - DNA, 535 bp, Oryza sativa
  unsure (1)..(535): unsure at all n locations
nnnnnntttttttttttttttttacaccaacaagcagatgttattaacataggaaagctccattagatcctgttaacatacaaggcaacatctatattccagaagagattacttgagctgtgcaactcacacaagatagaatcgaataacacagaagctcaaagcctaggaacttctgtgggcacacagaccctatgagctggtactaatgaatacattgagattgcctctttcttcatcctcccttgcttcctccctcgatccatgttgtaatcatctacattgctttaatttcagtcggttgtcatgggctcagtgatgcaacagcggaagcgttgctttacggacattgctcagaatctccatctctgcactctcaagcatacaaacgatatcagtaaatgcggggcgaacttcagggttcgcatcccaacaaagagtcatgatgtggcttagagcaggcaggcagtcctgcgggatcactggccgagcacccttgttcaccacagcaaaagctgcctgaacagccgtcatg

SEQ ID NO: 394225 - DNA, 611 bp, Oryza sativa
  unsure (1)..(611): unsure at all n locations
aattaagaagcatccatatcactatatcggcactgatcattcagaacacaggttatggtattgtactaggtagtgtttaattaagaactccacgagagtagtaagaagcatgcatttggattgagctaagctactgaaacggtgaccctaacccatacatgcatggtgatctaggcccttctgggcacgagacgagcgcgcagcggcttcgccatgacggttgtgaactcgatcttctcggcgaagtccacctcgtcgccggcgacctccttccactcgaactcgctcaccatgttcgccacgaagtactcgacatgtagcatggcgacgccgagcccggcgcaaatcctccgcccaacgccgaacggcatcatccggatctccctgctgcctgtaacgtcgaccccctcgccgtcgccgccggnaggaaccgctccggcatgaactccattggcttctcccattctttctcgtcccttcccatctccgccaccatgaagttnaccgtggtgcccttggggatgaggtacccgccgatctccatgtnctccgccgacctgtgagggagcaacatgtgccccggtgggtgcttncggaggccctcgaagcac

SEQ ID NO: 394226 - DNA, 599 bp, Oryza sativa
  unsure (1)..(599): unsure at all n locations
aagaatattatgaaatgttcatcgttttcagaaatgtttaagacacattcgactgcagtctgcaaaaccatatcttggtgcacagcaagcatatatcttggtgcacaacaagcatacatttattagtttttcttttggatacacatgttgcccctaagngccaacactgcttacaatcacccatggccttctcactgttgcagaactgccacttttacaatgggaaagccacacctacatggtcctttccttccatcttattcttgggatttccacacctacatggttctgccaccgttacacaacacatcaactggaactggaagcatgtacatggaaagagttggctgggctaccggtagcatcatgacatgaatcttcttgcgttgaggatggcagacggctttggtattcagggngcagctctcagagccctgacattgcatagtccatggcatccaccaggtaatctgcatcatcccttgtaaagcacattgggggttttatcctgaagacataccatgcagaccaccttttccaactaaaatgttgagatccttgagtttctcaaacaataaattggtctcggccttggcagg

SEQ ID NO: 394227 - DNA, 713 bp, Oryza sativa
gatgatggaacctacatcctcatttaaatttcttatgcacccatccaccgtttcttgttaatgttacaaatgggtaatgacaacagatatccatatcctgaggtctttttaccttacctcccaaaatgtacccagtgacggcaacagctacaaaacaccatactgaacagaaagcagaaccagaaagctacataccatgatcaaagttaatgatggaattgcttgctcgcacttccacaaaataacaaagaaaatggcagccaaacaataacagttcagctccaaaatttgagcacagcaattgaataaaccgacatccccccctaaagcaccaataagaacacagaaacatgttgaccatgaaaggtcccccactatagcatcacttgagactgttgaggttgttgccttgacaaggcaggacgcccacatcaacttcctcgtttctcctgccaagcaaaaatgttttgcacaactggacaaccgatactatcgaatcagacctgcacagtaaatcctgtaagaagtctttggtgttactgaaacttcctcaagcctgcaatggtctccacaggctagcgaacaactttacatttctttgacctccaaaccaattccatccatgtcccacaagattcagccagcaagagatatttcaaaatggagcttcaagcgattcatcccacacatcaccacttccatttgaagcatct

SEQ ID NO: 394228 - DNA, 335 bp, Oryza sativa
aatcaaagtatcaacccagtagtactatgattatatattaagctctaccaaacaaatctgagaagggtccattgcccaagctcaggaagtggtagggcggggattgacaaggcaacactatgctacaaagtacaaaggatcacacctcagaaacgaccaagtgcttgacatggttctccctcattggagttgacaacccaggcaaacaacaggaatacatgatttaaaagaatctgaaacagggaatgtcagcgggaacacctttagtagatcgcctcctatgaactacagatagctttacgacctcaacgactggaaaagagcattcgaaaacg

SEQ ID NO: 394229 - DNA, 712 bp, Oryza sativa
  unsure (1)..(712): unsure at all n locations
nnnnnnttttttttttttttttttgtttgtgcttaagcaagttttatatgtttcgtgaagctctcaaaggcgagtggaagtgcagtaatttgttattggcagtacattattagaaccgcagagagcattcacaaggcatacatttaacaccatccagcacatacgcagggagaatagcaatcaggcaatatctttgatatactaatatttttttagctttacttctttggcgtgtcagcatacttccaggtgtaatgtgcaaatgaggtatactgtcttccaccagcgacatcttcttcgcgtacctggctagagatctctttcaggtcatcatccgtgaggttcacctttaaggagtcaatgttggcatctaggttttttatcttggttgttcctggtattgggaccacatcatccccttgatgaagaacccaagctaaagctagctgagcagggctgcactggtgcttcttggccagctcttccgttttcagataaagctgtttattcttctccaaattttcagcagaaaatcgtgggatgtccttgcaaattaggattcagcagacaattgttctgtcactcctctccctccgaaaaacccgcgggcganaaggctgtaggggaacaatccaatgccccaactccctgcagagcgggcanaaatttcgggttcaagtcagagcccagagagaccantccatctgaactg

SEQ ID NO: 394230 - DNA, 428 bp, Oryza sativa
ttttggtttttttttttttttacatctccacacacaaaaacatatatatacttctcattgcaatccaacaaattccacgtgagtggtagtctcagacatattgttgggcatatatgccagggcctcatatgacgtacacacactgataaaaccattccacccaggagaacaaagccgagatgaaaaccatggtacatctttaaaaggctgcacattttgatgagtagcgcagaagtgatgcgttgaacaaacgtcatggatccattttacatatacttgataagaagccacacgataacagcaaggatcactattgcgacgacagatagcagcaggcacatgcatgagcagccacctttggtgcgcttgttcagaattgcaagccttttttgcacacgctgaagacgcgagtttgtaacattaacatg

SEQ ID NO: 394231 - DNA, 517 bp, Oryza sativa
  unsure (1)..(517): unsure at all n locations
cgcttatggcggcggtggcggtgaacgggggctcgccgggggctgtcaccgcggcggcggcggcgggaggggtcggcgtcgccgtgggcctcgggggcggcggggcgcagtcgctgtacgtgggcgacctggaggcgtcggtcacggactcgcagctgtacgagctcttcagccaggcggggcaggtgatgtcggtgcgcgtctgcagggacatcagctcgcgccgctcgctcggctacgcctacgtcaacttcaacaaccccgtggatgctgcaagagcactggagctgctcaactttgctcctctgaatggcaaacccattcgggtaatgtactcaaaccgtgacccaagcagtcgcagaagtggatctgctaacattttcatcaagaaccttgacaaagcaatagaccacaaaactttccatgataccttttctgcatttggtaacattctctcctgtaaggttgccacagatgaaatgggccaatccaaaggcttttggntttgttcagtatg

SEQ ID NO: 394232 - DNA, 461 bp, Oryza sativa
  unsure (1)..(461): unsure at all n locations
agaaaacctcccgtctctcggctcctccgctccttgcgccatctcgcggcgggacaggggaggtggcgagcggggcagcggtgagcaggggaggggatcctgcaggttttctttagaatggcgacatctttggatatgtcactggacgatatgattaagaacaacagaaattctagggggagaggaaggggtaggtcacagggaggaggtccaggcacaggtgatggccaaaggttcagctatggttcagggcgtggacgtggtgctggcaccttccgtggaaggggagtaggagtgccttcacgaaggccacttggtgttagtactcggtcatcatcgtatgctattgccaagtcattcaacaaaaccaaggatattgtatggaggcaagatctntttnagggacagcatngttgctgcttggcctttctgtgacagaatctagtacaaagctgtatatt

SEQ ID NO: 394233 - DNA, 372 bp, Oryza sativa
  unsure (1)..(372): unsure at all n locations
cggcggcgggnaataacgcaagacggcgtcagaagccctgggccggccggccgccccctcggcgagggtatacaggtatacaagcaataatacccgtacacccgtgtgttgtgttgggggggtaagtaaagtgatcgaagtaggggtgatcaggggtgtaattgtaaaactgtatatgagaagggggtgtagcttgctgtaaagatagattggtatttttgctagcttgcagatttctctactgattgatgcatggatcattcatatatatatatgtggtgatgtgttgggtcagattggaccagatgttcaatggattactgtgaattgcagctcccnncaaaaaaagataataattaaaacattcaaaaa

SEQ ID NO: 394234 - DNA, 580 bp, Oryza sativa
ctttatctttctctctctctctctctctctctctctctctcccaatcgaggaggcggatgcaggcggcaaggcgatgccactactctcggaggcgagccacggggtggctggatccggcgtcggcggcaggcggggtggccggatccggcatcagcagcagacgggggtggctggatccggcgtcggcagcaggcggggtggccggatccgacgtcagcatctgttcccgcggcggatccgcgttgacagcgggaatggtacagcggcagcgtaggtgggcgccctcctcagcaagctaccgtggcagcggcgggcgccatccccggtgagctacgatagcagcggggctcgcacgtgcatgggtggatccggtgacgacaggcgccatcctcggtgagctacagtggcgggcatgcaatggcgaagttctcaaatcagtgatttgtattatatgtttgcgattctgttctagccttgtgatggttgatggtgattctcgtggctcttgtgatgatcatcaatctagatgtgctgatggtttggggattaaaaaaaaaaaaaaaaaaaaaaagggcggcg

SEQ ID NO: 394235 - DNA, 642 bp, Oryza sativa
  unsure (1)..(642): unsure at all n locations
cggacntgagntncncacacnccacgcagctcactggaagcatgttaagctggagagtggtatgtacataagcagcagagcttgatctgcccccaaatccaagctttgctcccaaaagctcctttgcatctatctatcaaattattctccctttctcttctccatggatttttgcaaggcgagatggaaggttccggcgctgtgcctggtgactgttcttctccaagcaagcctctctgcttgcgcgccaactcccaagacttacatcgtgcagatggcggcgtctgagatgccgagctcgttcgatttttaccatgagtggtacgcttccacggtgaagtcggtgagctcttcgcagctggaagatgaagaggatgatgcttccacgaggattatctacaactacgagacggcattccatggcttcgcggctcagctcgacgaggaggaagccgagctgatggccgaggcggacggcgtgctggccgtgatcccggagacggtgttgcagctgcacaccaccaggagccctgacttcctcggcattggcccggaggtcaagcacaagatatggttcgacagcctcgccgaccacgacgtcgtcgtcggcgtgcttgacaccggcatatggccggagagccc

SEQ ID NO: 394236 - DNA, 496 bp, Oryza sativa
gatctttcttgctcgcgatcgattcgatcgtcgtcgacgcttcgattaattctcgctcgcagagaccaccaccagtagcagcatccagctgattaaattaagctcgcggcaatggcgcaggtgagcaggacggtcgtggcggcgctgctcctcgtcgccgccgtggtggcgggtccgcccgtggcgtcggcggccacgtacggctgcttcgaagactgctacgagcgctgcgcctccgggaagaaggacgaggcctgcaccaaaatgtgcaaggaggcttgcggcggcgccgccacggacggccatgcccccgccgctggcgctggtgctggcgccggcgctggcgcgccgtcggggctggcgctaaggctgccatcggggttggcgccggagctggcgctggcgctggcgccggcgtccgagcttgcgctaaagccgcatcggggctggaacgcgagctggcgcttgcgctggtgctggcgccggcgtcggggct

SEQ ID NO: 394237 - DNA, 558 bp, Oryza sativa
ggcgcgccgcggcgcgccccgcgggccacccgcggccgtcggcgctggtgtgcgggacgtacgcgctcaccaaggaggagcgggagcgggagcggatgtgccagctgttcgacgaggcctccgagcgctgccgcaccgcgcccatggagggcgtctccttctcgcccgaggacctcgactccgccgtcgagtccaccgacatcgacaccgatatcggctcactcattaaaggaacagtgttcatgaccacttcaaatggtgcatatgttgatatccaatcgaagtctactgctttcttgcctttggatgaggcatgccttctcgatgtcaaccatatagaagaggcagggatccgtgcaggtttggtagaagagttcatgattattgacgagaatcctggtgatgaaactttgattttgagcttacaagcaattcagcaagaccttgcctgggaaaggtgcagacagcttcaagcagaagatgttgttgtcacgggtaaagtaattggtggaaacaaaggaggtgtggtagctcttgtggagggccttaaggggattt

SEQ ID NO: 394238 - DNA, 815 bp, Oryza sativa
ttatttgggtcctccctcctccgcctcctccgccgccgccccctgtatcccaccggctcgccggagagtccgcctcgccgccgcggcctcacgggcgcgtatccagcctcgcggagagcgtgcggaaccgcgacccgtactagggcagcgcgagagagaagctgctgcgcctgcgctgcaaaggtctacagttggagctcttgctgctgcttggaagacttcggacaagaacctaagatcatggcaagccttgctgattctttcttagcggatcttgatgaactttcagacaatgaagcctatcctgaggaagaaaatgctgaggcagtgggcacggaagagattggtgatgatgatatgcctgacctcgagtctcttaattatgatgaccttgatagtgtttcaaagcttcagaaaacacaacgttacaatgacattatgcaaaaagttgaaaatgcacttcagaaaggtacagatttttccaatcaaaggtcgatcctggaggaagatccagaataccagctgattgttgattgcaatgctctatcagtagatattgagaatgagatcattataatccataatttcatacgtgacaagtataggctgaagtttcctgaactagaatcccttgttcatcatccgatcgattatgctcgtgttgtccagaagattggatatgagatggatttaacgctcgtagatctggaagggcttttaccttctgcaattataatggtaatttcagtgacagcatcaacgacaagtgggaaagccgtttccgaggagaaccttgtaaaaactattggagcatg

SEQ ID NO: 394239 - DNA, 599 bp, Oryza sativa
tttcgtcgttcttgtcgatctctgtgtgtgttcttcgtcgtcgtcgtgttcgttttggattttggtttcagtttagtatatgcacttcttgttcttcactgctgctgctgctgctaagcttgtagcaatctagtggtgcttgttgttcttcttctcccgaaatctttgcgatcgattgattgatggcatcgccgcgcgcctcgcctccctcaacgacctcccctccggctccgccgccttcgacgacctcttcagatcctcccccgagctgttccagctttgctagctcaaacactgaagctgaagctgccatggcagagaccaagaagaagatgaagaaaattccagtacttgccactgggggtaagcaactaagcactgcacctaacgaagctaagctagctgctagggctaattaatggcctaattatcttgtgtaattggtaaatcaagtgatggttaagttaagccttctgcatgcatcatcatcatcatgtgctccaactatgtaaggattaatgaggcagtaagctgtctgtttctctgtcgaggcaagtcaaggaagtgcaatatataattactactactattactctctc

SEQ ID NO: 394240 - DNA, 648 bp, Oryza sativa
ctgagtttccccatctctcgctgactcccctcctccacgtgtagacgtcgacgacgagttatatacgtacgcacgcgcgcacgctcgctcgctcgctgccaccgccttccttcgttgccaccatctccttcgccgccgggcaccatcgccggcggtggccgggttcatgctgtcctgaaggagtggaatgctcctcggtgattagtagggcaccagaatatcttctctcctagcctcccgggcgttggttacccaaatttatcatcagcttcctgaaatctgaagaaaataaataatcgggtttaccaccaccctggggtgccctggcgtgggcttcaagcaaaaaaaaccggggatcacaagaaattggggcctggatataccggcgttaccgcggaaaagttttgagcaatgcacctatagtacgcgccagtgatgcagggagccgtgctgctcctggagaagttgttcatgtggaggctaaatctgatggctcgaatgtaacatttcatctcacacagttgcagtggcatcatagtgagctagactcagaaaatggaaatgttgtgtgtcaagaagaagcatggttcgactctctcagtattttaggatctgattctgatgaagatttcacagtgttaatggaga

SEQ ID NO: 394241 - DNA, 814 bp, Oryza sativa
ttgttccttcagcctcagcttcctcctctccggcaccgtggaggccctcccgatcctcctccacgagcggcgcgtcctgatgcgcgaggcgtcccgccgcgcctaccgcctttcctcctacgtggtggccaacgccctcgtcttcgcgccgtgcctcctcgccgtgtccctcctcttctcggcgcccgtctacttcctcgcggggctccgcgccacgacccaggccttcgcctgcttcgcgctcgccgtgtggctcatcgtgctcatggcgagctccctggtgctcttcctcagcgccgtctcccccgacttcgtgctggggaactcgctgatctgcatgtcgctgggcgtgttcttcctcttctccggctacttcatcccgagggagagcatcccgaggtactgggcgttcatgtactacgtgtccatgtccaggtacccgctggacctgctgctgatcaacgagtacggcggcagcagctgcggcaggtgcgtggcgtgggcgggaggcgtgtgcttgaggaaggggggtgatgtgctgagggggagagggatcgacgaggggatgaggtgggtcaatgtcggggtcatgctagggttcttcgtcttgtacagggtcatgtgctgggctgtgctggtcaggagggcagccaagaccacgctgtgatttttcacataagtgtgtgttgtaagtagtactcgtatatggaaaatgggacgtgactacgcgtcggacgtccgatccactagagagctgagatatactgttcctagcagtcttgtttgttgaaatccaaagatgtgtagctcccct

SEQ ID NO: 394242 - DNA, 507 bp, Oryza sativa
gtctttcaggttcttttcttctcgtgccactgcactgcacctaagggggagagagctgaagttgctgccattcccatcttttccctgcagctctagtttcagctcctaacacttgttcacagcatagtcatctcctgttagtttcatctgcaggacctagagaacaaacattacttccggctgattcccgttcttctctccctcatggcatcactgataacggtacaagaaaggaaggaaggaggaggaggagggggagaaagaggaaggagacagcaaaagatgaaggggagtgtgttccatctgcggaggaagtgtccattagggttaatactctttatgagagtggcggccccattgggaagaaggagttgggccggtgcgtggtacattggctaaagcagggtatgcactcaatggctttaaaatttgcttccacagaaatgctggacgatggagtcacatttcttactggatggtggatcattctgagaccacctcggtttt

SEQ ID NO: 394243 - DNA, 527 bp, Oryza sativa
cacacaccatgcatctcaaacaaatttctatgggccatccggacatctcatttgtctccatggggctgggcaagacactcttggtcgtctttagcttgctacatgccttagtgttagcaacatcagtaggtgttgagcatgcaacagatgatgtatccacctacatcatacatgttgcacatgtgcatgcgacacctccaactcatgcctcgcaatgcatggaccagcacgccattgcacactacacctcctttctccaagggatcctcccttctcacttaagcgagccaacaccacgccttgtctatgcatactcccacgcggccacaggctttgccgcgaagctagcgaagcaccaggctacacacatcgtgcaccatcccagcatccttgccaatcttccccgacaagcgcaatgagttgcagaccactctgtctccctccttcctcggcctctcaccgtccaacggcctcgtacaggcatcgaacgatggtggcactggtgcagtgatcgaatggtagacact

SEQ ID NO: 394244 - DNA, 468 bp, Oryza sativa
  unsure (1)..(468): unsure at all n locations
atcatcatcagtagcacagcacaaatacaggagcggcccggctatggcaatggcttgtgcagcactagtgccgttgctactgttgcttcttgttgtgctctctggctctacatctctcgctgaccacagtgcaggtgtagatgaggtcaactacatcgtggtgctaaccagcagctggctcaagccaaattccgtctgctccagcctgatgagcccacaccccaacgtgaccaactgggtcccgttgagccgaccgtacgggccgtgcagctcctcgccggcgaagggtagggcggcgccgtccaccgtcgacggcatgctctggtcggaccagcaccgggccgactacatacagtggaggctctccggctcggtcgccgcgtgcttcagccgccgacgacgtgccgttntcaactaactacgancagcagtccatagaaggagatcttaatattggacgtactaccc

SEQ ID NO: 394245 - DNA, 523 bp, Oryza sativa
gattatccctacaccggccaccaccagtcacacaacacaacaatttaggattggtagagcccatctctgagccctgccttgctggccctgagctctctcttgctgcttcttttaatgggttttttgtctccttggatttgtgcttgtgctcacctgggcgtggagttctctgcatgagagagagagagagagagagagagagagagagagagagagagagagagaggacacctctgagctgtttcttcaacaagtcttcaagatttggcagagctactgagagagagcaaaggagaggagggctatagggaaaaaagtattttttttttgggggtacaaatttcttgcttgattctcttcgatcccggagagcagccaccagttgaggcacaatccttgctgttcgtgtgcctgggtttgatagctggccagatctgcggcacttgcccgatagattccaagaatccgagcacaaactctcgtttgctgcgaaaagatagtaggtggaataagttgagcaata

SEQ ID NO: 394246 - DNA, 508 bp, Oryza sativa
ggaaaaaagaaaagaaaaagaaaaaaaaaactcgagctcacgcgcacacgcacgcgacgcgacgcgaccccgaatcggaggcgaggccgccgactccgagcggatcgggccgaggtcgacggcatgggcggcggaggaggcgaggccgggggcggcgacggaggggagtcctctcctgctgcggctgcggcggcggcggtggcgggggccgcggcgctgcacatccggtgcgcgaacgggtccaagttcaccgtgcgggccgacctcgacgccacggtgggggcgttcaacgaggtggtggcggggagctgctacgtgccggcggcgcagcagcgcctgatctacaagggccggatcctcaaggacgagcaaaccctagaaagctatggtgttgaaacagatcataccattcatatggtgcgtggcgctggtcccccagccggatcagctgcacctgctgcagccagcccccaagcttcagctgctcctagcagccgcccaacagatg

SEQ ID NO: 394247 - DNA, 572 bp, Oryza sativa
  unsure (1)..(572): unsure at all n locations
gtgtcttgtaatgtaatctagggttttgctccttctctcatccagtagcggcggccggcggcgagggcagcggcggcggcatggcgaaccgcacggaccccctggcgaagagcatccacgggacgaaccctcagaacctggtggagaagatcgtccggtccaagatctaccagagcacctactggaaggagcagtgctttggcctcaccgccgagaccctcgtcgacaaggccatggagctcgaccacaccggcggcacctacggcggcaaccgcaagcccacccccttcctctgcctcgccctcaagatgctccagatccagcccgacaaggacatcgtcgtcgagttcatcaaggaacgaggattacaagtattgtccgtgttctttggtgccttctaccttcggcctcacttgccaccgtcggccgacgtcttaccaataacctcgagccgctctacaacgactaccgcatgatcaggcacatgctcagtgatggaaagtttaccctgacccacgtcgacgagttcattgacgacctnctcaccaaggactactnctgcgatacggccc

SEQ ID NO: 394248 - DNA, 533 bp, Oryza sativa
  unsure (1)..(533): unsure at all n locations
gtgctgttgtggacgacgacgacgagcaaggcgaacatgggcaaggtgatgggcgtggccgccggcggcgaggtggccggcgggttcgtggtgtggcagaagaagccggatctgtggtgcgtggagatggtcgtcgccggtggcgtcaagatgagcgccggcagcgacggcaaggtcgcatggcgccagacgccatggcaggaagcccacgcctcccgtggcccgccacggccgctccgccgatgtattcagggcttggacccgaagtcgacggccgacctgttctcgagcgcggcgttgggtgggcgagaggtgcgtcgacggcgacgactgctttcgtgctccgcgtcgacgccgaccacgccgcgctgcgcgcccggagcagcggcgacgtcgaggtggtccggcacgccgtgctcggctacttcagccagaggacggggctgctcgtccgcctcgaggacagccacctgctgcgcatcggnctcgcccacgccgccgccgagagcgcctactgggagaccaccatggag

SEQ ID NO: 394249 - DNA, 667 bp, Oryza sativa
  unsure (1)..(667): unsure at all n locations
ctcttcttcttctcctcctcctccccctcctcatctcccatcgcaaatccggccgcgagngcgcgcgatnancnantgcaccccacgttcgcgcgcggcttaaattaggcaagaggcgcgccacggtcgcgccttctttgtctctcccttgtttttttttaaatttttttataagctgcgaggccgcgtcgtccgccattctcttcttcttcttgttgcacaccgccggccggccgtgcgtagtgcgtggcatgtccgtgttccccctagcagctgattgatttgatttggtttttttctttgcttgattacttccttcgatcttgccctggttggttggtggtggtggtgggttttgctatctctgcgtgcgtgttccggccgtgtcggcggcggcgagcgtgaggaggcgcggcggcggaggcggcggtgagcgaacggcgggtgccacgtgcccacgccttgcgcgcgaactcgaggcggtgggctgggtgatggtgcggttcctccggcgccatagcctcgacaagaacagcgcgcagttccatcgccagctgagccacgacagcagcagcagcagcagcgacaccgccgacatgcacgagcctcacggcaatggcagcgggggcactcccccgctgcccaangggaggagccgccgccgcag

SEQ ID NO: 394250 - DNA, 528 bp, Oryza sativa
  unsure (1)..(528): unsure at all n locations
cccaggaaactcgattctncttctgaatcggattttcccagggatttcgccggcggctaggatcgggtcgggggtccgccatggccgacgtgttcgagggctacgagcgccagtactgcgagatctccgcctccctcgcccgcaagtgcaccgctgcctccgctctccaaggagagaagctgaagcagaaggcgtcggagatcaagtctggcatcgatggggccgaggcactgataaagaagatggatcttgaagcaaggaaccaacagccaagtgtgagggctgggctgctggcaaaactgagggagtacaagtcagatcttaacaacctgaaaggaacgttgaagagggtcaccaccggtaacgcgcagcaggggtcgagggaagagttgctggagtcaggaatggctgaaacgttgggggtatctgctgatcaaaagtcatgactgctcaggataactgaaaagcataataaaacaaccgataggatcagagatagccacagaactatgctggagactgaagatc

SEQ ID NO: 394251 - DNA, 610 bp, Oryza sativa
tgtttttgacactgatggtgacatgaacgaggacaatcatttgctatctgttatgaatgtggagacttctgttgcaaaagtgggatttttcggcaacacataccagaagatctggtgcttgagccacattgaaacattaagtacctgggactggaatgatgggagtagagaactgaatatagatgatgctcgttccttggcaactgataggtggaaccttgaccatgtggactattttgttgattgtcactactctctgcccgacgacaagttatgggtgattggcggcacaactgcagggacaataggttacttccctgtaagagctggtcttgaaggggcaataggttccgcggaagctatccttgaaggaggccatacagacgttgttagaaccgtatatccagccgcaaacacttcatactgggcaaaacaggggcatttttggatggacaggtggcgaagatggtcgtctgtgttgttggcgctctggtgaaattgctgagatgaacaagtcttggatctctagttcattagtgtcaagggttcaaaagaaagctaatgccgacacagccatactaactgatgcgatatatgtccgacacatatg

SEQ ID NO: 394252 - DNA, 545 bp, Oryza sativa
catgacttgtctctaaggcctgagctcagtctgggagacctcaggtcgtcttcttgctccaatctctcgtacgaaagaagaaagtttttaggaagctaggagcagcacacagtccttctccctctcttcttgctatttagtgcagacctcaaatccaaagtgcctctattttccatcaagaaagcaaacacagtgtattcaagagtgcttctgttcctgaaaattaaacaaattgataataattttcaaggaagtatgaaactaatagcttttgggctgttattactggggtatatacaatattttgctacacctgattccgaagtcatagcattgtatgaaataaggacaatgctcaatgacagtcgcggcgtactgaatggctggaataataatcaagttagtccctgctattttccttccatcagttgtaatcaagatcaaaaggtcatttcaataactttgagctcatcaggattatctggattcttgtcacccagcattggaaagctactatatttacaacagctattattgaatgataa

SEQ ID NO: 394253 - DNA, 565 bp, Oryza sativa
attgtctcctccaggatgagctctcatgacataaatactgctcacacaagatttcagtcagcagctgagctccatgacttgtctctgaggcctgagctcagttctgactgccgagctgagacctcaggtcttcttcttcctccaatctctcacacgaaagaagaaagtttttaggaagctaggagcagcacacagtccttctctccctctcttcttgctatacagtgtgtattcaagagtgcttctgttcctgaaaattaaacaaattgataataattttcaaggaagtatgaaactaatagctcttggcgttgttattattgggggtatatacaatattttgctacacctgattccgaagtcatagcattgtatgaaataaggacaatgctcaatgacagtcgcggcgtactgaatggctggaataataatcaagttagtccctgctattttccttccatcagttgtaatcaagatcaaaaggtcatttcaataactctgagctcatcaggattatctggattcttgtcacccagctttggaaagctactatttttacaacagc

SEQ ID NO: 394254 - DNA, 289 bp, Oryza sativa
ttttaaatccctcacacaaactgccacacatatcaagaacaaaaccaaatttctcttaaatatatatagctttaatggagggcgaacgatcctacgtcactccgccgccccctccgccgccgccgccgtcgcctacgacgcacgtcacggtgatcgtcatcgtggtcccgatcgtgggcgtcatctgcctcggcctcctcgccgcgctgctgttcgtcgtcttcaggaggcggcggcgcgcgcggcgcgactaggaggaagaggaagcgaaagctgaggaagtggagga

SEQ ID NO: 394255 - DNA, 416 bp, Oryza sativa
gtccgcggagggtgtccgcgtccgagtcggaggctgctgctgctcctgctccagcggaggagtaaggtgtttggtttggccctgcgcttagatccaccaaagaactgctgctattttggcatttccttggagattattcatgatttcctccgcttatgatcactagtacctttatataagtattaggaatgtgtgcttgagatgatgaattgatgtttgttacttgaacctggtaccttgttacaaatgtttaagctatatcataggtgcatgtttgccctcgcatatgtgatatgtataaggctattcttgaatctgtttgtgcatggttgcatgagctcatatgttctgattatttagctgaatgcagttgaaatgtaatactagtggttccagagttccaggagtaaaccaaa

SEQ ID NO: 394256 - DNA, 365 bp, Oryza sativa
cccttcccttgtttgcttggaaggagagggggaagaaaagtaggaggacgcggttgcgggttggtccagatctagggcaaggcggtggccggagtttgagctgggcccgccggcggcgagatgaagcagtcgatgcggagccggcaggagccgcggcgggtgagcaacggcgtcatcatcgccgccatgctgctctccctctgcgtcctcagcatcgtcaaggccagatactgctccacccccttcgttaagcccgacgaccagctacaggagcagatgaactccagcatcaggatggagaccgacgagccggcgaccatggcggcgggagagcaagaggaggacgaggaggaaggagagtttgc

SEQ ID NO: 394257 - DNA, 603 bp, Oryza sativa
  unsure (1)..(603): unsure at all n locations
ccctantccattttcacgccaccccaccacccgcacacccacactccacgagagacgacccaaaccggtcgccaccgccgccgcgatcccccacctccgctcgccggaaggggcgccgtagccccgcccctcccctcccccctctccggtggctggcccctctccggcgatggggagcgccgacctggtgctgaaggcggcgtgcgagggctgcggctcgccgtcggacctctacggcacgtcgtgcaagcacaccacgctctgcagctcctgcggcaaatccatggcgctctccggcgcccgctgcctcgtctgctcggcccccatcaccaacctcatcagggaatataatgtacgggccaatgccaccacagattagagcttctctattggaagatttgtgactggtttaccccctttctcaaaaaagaagagtgcggaaaacaaaatggtctcttcataggaggggttacaaggtcgccagattcctgagaatatgcgggaaaaatacaataggaagccatggattttggaagatgaaactgggcaatatcagtatcaaggtcaaatggagggatcacagtcatcaacagctacatacta

SEQ ID NO: 394258 - DNA, 596 bp, Oryza sativa
  unsure (1)..(596): unsure at all n locations
agaaggcgagctctcgaccgccactactgtacacggcccagagcgagcctcctcctcctctgcaccaccggagatggcttccgccgcgctgccggaggccgtcgcgccgaagaagaagggcaacgtccggttcgccttcgcctgcgccatcctcgcctccatgacctccatcctcctcggctacgatatcggggtgatgagcggggcgtcgctgtacatcaagaaggacttcaacatcagtgacgggaaggtggaggttctcatgggcatactgaacctctactcgctcatcggctccttcgcggcggggcggacgtcggactggatcggccggcggtacaccatcgtgttcgccgccgtcatattcttcgcgggggcgttcctcatggggttcgccgtcaactacgccatgctcatgttcggccgcttcgtggccggcatcggcgtgggctacgggctcatgatcgggccggtgtacaacgcctgaggtgttcgccggcgtcgggcgtggctttcctgacgtcgttnccggaggtgttcatcaacttcggnatcctgctcggggtacgtnttcgactatgcttttcttcccgttt

SEQ ID NO: 394259 - DNA, 671 bp, Oryza sativa
gactctatgaggatcgcctactttagggaaaatacaccgaaaggagaattttgcttagtcattgtcttttctacaccggaggacaggcccagcttctgtgaagaaaatctacgggacgaattgagaagtttaatggctaaagggttaactcgctcccaggctagtcggcaattggcagaagaaactaaactgccccgtcggcaactttatcaactcagttttggaattgcaagccgatggttgaaacctgattctttgggaacattcatggcaacatccacctctggaaattcactaaatttttcgctcaggtgtttcagattgggccgctagccattgttctaattctgcgaaatcagagcagtccaacagcacttctcccaactgttccaattgaggcactgtgagaatgtcaatcctcgacaaattaactgcattcaactctccaaaacgatgtctaatttgtttgagtagcagagatttttgtccacgttcgatgccctgttcaatgccctgaagcatccaactggcttgttaactgcataacctcctcctgttccaggggggaaaattcagcgatagcttctttaaaaattgtctcttccgcttggttaagggtgagataggtgtccacaaagccagagattaatgcattctgccggatcccgggt

SEQ ID NO: 394260 - DNA, 553 bp, Oryza sativa
cctgtaggtctgactgtagaggatcgccaaattttttctgccagggaccattgggatttcccgctaagagttgctggcaaaaattttcttcccaaggggtcaggggtcgccattgccccggactcaaaccttctagggttaagcaccaagttgctgctgacttacctttgccctgttggggagagcgaccagtaacctgtatttgcacccgcaccaatcgtagggtagggaagcccactgccgctgtcattcgacgtacctgacgattgcgcccctccgttagggtaatgcttaaccaactggtgggaatggaggctcgataacgaatgggaggatttctggggggaaaatctggttcagtgataattttggcgatcgccggtctggtagggtaatccgcgaaagttatgccccgccgcaggggttctaggtcttcgtccgttggagagccttctacttgggcaaaataagtacgttggtgggcaaactccccgtgggccaaacgatgcttgaagtttcccgtggctggtgagcagcaatagtccttcgctat

SEQ ID NO: 394261 - DNA, 640 bp, Oryza sativa
cctgccggttgactctagaggatcgccggtgaacgatacagttcctgttgcttgcttgcccggaaacgatgttttgcttggtctatggtaatgaagctgtccttggcgtcgatcgccgcctgaagtggttctacactattattaaggccctcatattcaccgatatttttggccaggatgtaacggagtccaactaatactaagaattctttcttgccaaatttttcgttgtcgagggcttccgcattccgacccaaaatccccgcctcctccatggcccgctgatggagaaacaaagaactctccgaaactaactcttttccctggaagtaacgaccgaaaacccgttgaaaccaacgaccgaatccattttccgcactaaaaacccctttttgccaccaagtcttttttagggtaggcacaatgggaggacgtatagctctaaccatgggaggattttggtaattggatcatggcggcattatataccaaaattcttctgccatcatccctttggtagatatttaaataatacttagtaaaacaagtctgggggctaatatttatctctctatcgggctaaaacccattccgaatcaacctgataggtgtaaagcggtcataacgctgatccccgggt

SEQ ID NO: 394262 - DNA, 597 bp, Oryza sativa
atgcctgcaggtcgactctgaggatccgccccacttaaatctgctcctaccagattagcttcctgcaaattagctctcccgcagattagcttccaacaaattggcccggaaaagattagcccgaaaaagattggcattttccaaattaacttggtgtaaaaaactgtcgctcaaatctgcattacttagattggcagacaccattttccgtcctgacaaatccttctcttttaaattagcccaacgcaaatctgccccggttaagtcccgatagtagggtcgattgtggttttcttggtgatggtgctgggaactggaactgtggttgtggttggtctggtgatgatggtgatgggattgaggtggacgatcgccggggggcgggtaaggtgcagcagatgtggccttgggcttggatttgggtttagctttgggagctttgctggtctggtcctttttaggaatctgggaagttttagcgcttaactccagctccaataattccttgaggcgatcgcgggcttggttaatttctttgagattcctggccgctttggccaataggcggggattgtccctgggcaggcgatccccggg

SEQ ID NO: 394263 - DNA, 727 bp, Oryza sativa
gggaagtagacttattttttcaccagtgtaggttaattccacttccgttaaaattagaccctggttatcccccaaaaactcgtctacttctcaggttttaccatggtaatcgaggcaataacgatattttcaatcaggggcggtgaacagagttctgtcaaaatttaattggcttccactgcaagaatttcatactcaaatccaagcgggcaatgctggcatttttacccttaatggtgagataggcccgatcgccaatggtacgcactcccagcgtagttaaatctggggtggcaatgtaaccttgacggtacaaataaccctggactaaactccgccagcggtcatctttaaccaggaatttatgttcaatctcgatggccacaacctccgccccccgatgttgcaagttttatttgatgattaccggtaagctcaacaatccgataggtttccattgtcctatacatttctgggcaaacgagtgggctttcatctgtattcttccatggcccacaaaattttgaaggccaccactgacaggattggtgttggggggcatcaacccattcttttcgccggactacgttaaccataatgtgtcggaagggaatgaatctccgggttattcaaaaaattagtggtcacaagaatttgaatgtgttgtcccactatctggcggcttctgaacaggagaaggagcaagccttatcaatgatccccgggt

SEQ ID NO: 394264 - DNA, 672 bp, Oryza sativa
tcgactctattaggatcactgcactaacgctttgccctccgcaatccccggtttattcgtcttaaattactccataattcgccgtaataggcactggtaactttcaaaccacctaaggctcccctcagcttcaccaagggattttttccgtagtaaaactcaaacgcgttctgcaggggattaccacccctaccccccaccggagcatagatttgaatgtcccgccaggaaaaaaccaaaattgtcggctgaaattcatcaatacattcatcaagggcccggttgaaatccaggggaggaatggtgcctaaatcgaaaatccgctgggcggtcgccggaaaacatttatggacatggtccgccagataaatcaccccaatggggaaaatcgggttacagggaagacgaacgtacaaaaggcgatcgatcatggcgttggggcactggtagggtgagatcagcaacgggagggactacccccacttactcacaattgtaatatatcttaacgattgctcggagccgccaccctcagcattctgaccgttctagccccaagtaatcaccaacgccaaagtgcaatgcctcgcaaaaattttcttgagtccagggacaaagccagagtcaaaaaatttgattgtaattatctttacagcggatcgggatccccgg

SEQ ID NO: 394265 - DNA, 751 bp, Oryza sativa
atgcctgcaggtcgactctgaggatatgacctccacattggttccaaggtaattgaaaaaggtggcggtggtttgggctttgactttgccgatgaccaagcggagtctcagtacaatcgcattcgttccttggtgaatgaagagttgaaaaactacttccgccctgagttcttgaatcgtttggatgaaattatcgtcttccgccaattgaacaagggggaagtccaggaaatttcggaaattctcctacgggatgtgtttgcccggttggtggaaaaagaaatttctctccaggtcaccgacaagttcaaggagcgcattgtggaagaagggttcaacccagcctacggtgcccgtcccctccgtcgggccattatgcgcctgttggaagacgtgttagccgaagaaattctttccggccgcctcaaggaaggtagccaagcgctggtggacattggtgaagacaaccaagtggtggtcatccccggtgaaacgagggaactgattgcccccggcgttgaataattaggtcccccaagcgggccattaccataggatgaagggaggactagaggtcttccctttttttgttggagagtcattgccatgttaaaagtcctgcatctttctgatattcacctgggcagtggtttttcccatgggcacattaatccggccacggggttaaatacgaggttagaggatttcattcagagtttacggctgtgcattgaccgggcgatccccgggt

SEQ ID NO: 394266 - DNA, 688 bp, Oryza sativa
gctaccctaaaagcagaaacgggagagcctttaactccctacatctatgttcaaatagaccgactcatcaacaacccagaaacctagttccctagttggctttgaataaatcggattcctatgacaggacacgaaattttgataagggatgagagaaaggccgatgccggtctcattactgaagtgactagtgcggccttcgcgcccctacagattagtaaccacacagagcagtgcatcatcgaagctcttcgttccgcaggtgctttaaccctgtcattggttgcacaagtgaataagtcgcgttgtgggacatattgcattttcccctgtggccatctcggacggcacaaaaaactggtatggactcggcccggtctccgtgttacccctataccagcgtagggggaattggtaaagctcttattcaggaaggactgtcacagttgaagggcttaggagccaagggctgttgccttgtcggacacccagaatactacaaaaaatttggatttaagaatgtggcggggcttgctctcgaaggggttcccgatgaggtattttttgctctttcgtttgacagtcattatccccagggtgatgttaccttccatgaaggattcagagcaaatagctctagcaacgtgaagttatgaatctttggagccaggaaaggcgatcaccgggt

SEQ ID NO: 394267 - DNA, 616 bp, Oryza sativa
cgttaaaacccacaattaccatggttttatcgcccaggagttactcttacgggaaatgttaaattatcccccctacggcaagttaattttgctccgttgtctggggaccaatgaaagggaggtggaaaaaacgatccaggcgatcgccgttgggtgtcaacaacttttacccaagaccgtggagattttgggacccgccccggccagtattctccgcattgcccaacggtatcgctggcagttgttagttaaatatcccagcttcatcaaagtaattttgccgctggagagaattaaacaaatttgccctagctccgtttacctggatattgacgtggaccccctcagcattgattagggtcggcacaaccattatttaacgaacaaacacgccaatggcattgctcacccgggccgccgtcactggcgatcgatccagcaactgaccccccagggccagggaggtggaactgccgccatctaaattcaacgcattcaccgcccccaactgttgcaaaatttgggcaaattcccccaagctagctccagctccccccaccaggttatggctagccaccaggataatgttgccgtttctgtccacggcgatccccgg

SEQ ID NO: 394268 - DNA, 720 bp, Oryza sativa
gtcactggcttttcacttagtaacttcagcaccagagtggaacccaaatttagtgaccgcttcccctggttgcgttgcgccactggctaaaaaagcagcaatgctgtccgtggtgccggcacaaaccaaataatttttagggaatttttctgcgttggcaatgctgggagataagcgggaaattgctttaccgggggcaattactgcaggtaaaagggcaaaccaagaagcattttttaaccaatcaggataggttaaattgtggggattgtagcccagcttgagggcattgtgataatcactaacgggtctgccaccatggagcaaacttgctaaccaatccgcttgatgacaaaagtaattagctcgttcaaactccggttgttgggagtaccaaagcagtttggctaggctagaagtagcactttgcactaaatgatctgctggagctattgctgataataaatgcttaacttctttgcccccgtcatcgttatacaacagaggctccattaacccattgccttggctatccaacagtaaaaccgtggaggaagtgccatcaatggcgattcgcctggatttgactgcttagttcatcgggaatttgatctaaaagatgaaacaaactttcccgccagatggtaaccaattgggggccgggaacctgggaaaactggactttttcctgccaaatcaactctttatttgaacccgggg

SEQ ID NO: 394269 - DNA, 601 bp, Oryza sativa
  unsure (1)..(601): unsure at all n locations
gggangcgggngaancgtgtggnccgccnacgnaccantcgaagccaagccctaggctcctcctctcctcccaatccccaatccctgttcggcttctccttcctcccctccgcggccgatcgcgatggaaccctgagctacgtggttggtgcttcaccgctggagtagagttctactatagtagggtttgggggcggcggtctcggaggagggaggaagcctttggccatggcgagcgacgtgcccatgagcccggagctcgagcagatcgacggcgaggtccaggacatcttccgcgccctccaaaatggatttcaaaagatggacaagattaaagattcaagtaggcaagctaaacagctggaggatctcacagcaaaaatgaaggagtgcaagcgtttgatcaaagagtttgatcgtatattgaaagatgaggagtcaaacaaccctcctgaggtccacaagcagctaaatgacagaaagcaatatatgatcaaagagttgaattcctatgtcaccttgaggaagacatatcaaagtagcctaggtaataataataagagggttgagctctttatatgggcgctggaagtagtgacct

SEQ ID NO: 394270 - DNA, 895 bp, Oryza sativa
aatagggccaaaattctagaatattatttttgttttgaaaggaatttaagtttgtgtggtgtgtcatccatggcggacatggtgaagttcaccatggagtggcttcaggatcctctgagcctggcgatcgtcgtcacggtggccgtcctaatcatgcggatgcagcggcggcgcgcggcgccgttcccgccggggccgaagccgctgccgatcgtcggcaacatggcgatgatggaccagctgacgcaccgcggcctggcagcgctggcgaaggagtacggcggcctgatgcacctccggctcggccggctccacgcgttcgccgtgtcgacgccggagtacgcgcgcgaggtgctccaggcgcaggacggcgcgttctcgaacaggccggcgaccacggcgatcgcctacctcacctacgaccgcgcggacatggcgttcgcgcactacgggcccttctggcgccagatgaggaagctgtgcgtggtgaagctcttcagccggcgccgcgccgagacgtggctcgccgtgcgcgacgagtccgcggcgctcgtgcgcgccgtggcggcgtcgcgcggcgaggccgccgtcaacctcggcgagctcatcttcaacctcaccaagaacgtcatcttccgcgccgcgttcggcacgcgcgacggcgaggggcacgacgagttcatcgccatcctccaggagttctccaagctgtatcgcgcgttcaacatcggcgacttcatcccctggctcagctgggcggacaccaacggcatcaacgcccgcctcgtcgcggcgcgcaccgcgctcgacaggttcatcgacaagatcatcgacgagcacatggagcgcggcaagaaccccgacgacgcctacgccgacatggtcgacgacatgc

SEQ ID NO: 394271 - DNA, 408 bp, Oryza sativa
  unsure (1)..(408): unsure at all n locations
tgtctgcgttgcgtggattccccttcccgccgatccggcgatggattcggcggcgagagcctcgcagtcggcggcgccgccgccgcccggcgccggggtccgcgtccgcgccccgctgattagatactggtctgaaaactgttgttgatgctagaaagtttgttcctggagcaaagatgtgtatgcaacctgatgtcaaacccaacaagtgcaaatcaaggggctctcgtaaggagaggagccgaactcaagcaccacttttgcctggtcttcctgacgaccgtgctatcgcttgtctcatacggggtcctcgagtggaacatcccaatcttcggatagtttgcaaaagatggaaccgtctcttatcttgggattactattattccttgcgcangagaaacgggatgg

SEQ ID NO: 394272 - DNA, 636 bp, Oryza sativa
  unsure (1)..(636): unsure at all n locations
ctcgcggctcgacgcgttacccttttcacccgccgccggctgcgtctcccttcttgtcacccaccgtcacggtggcggtgcgaggggcacgaggctggggacaccacaaggcaggcacgattcgacaggccggcggagccaagcggagggcgccagcctcgttgtcgtcggcttcttccgccgcgcggaccggccgctgccggcgcagggaggcgcccccgccgccgccggcggcacagacaccgtctccgctgtgggagatgggggtcgactactacaaggtcctcggcgtcgaccgcggcgccggggacgacgacctcaagaaggcctaccacaagctcgccatgcggtggcaccccgacaagaaccccaccaacaacaagaaggaggccgaggccaagttcaagcagatctccgaggcctacgaggtccttagtgatccccagaaacgcacaatctatgatcaggtaggggagaagggtcaagggnagcgccctggtgcgggaggtctgganatctcccttctncctggtggtgccattcaactcttttcacttaacccaagggttcagacgcatttttgcgattcttggattcgtggtctttnttagatgggtggatgcaagttaagtggag

SEQ ID NO: 394273 - DNA, 900 bp, Oryza sativa
ttgacgcgtgggcggacgcgtgggggccaagtggtcagcttcaacaacaaccttcgccgcgatcgccatcgccgtcctccttgccgccgggcacgctctgccggcgatggtcgttcattgcgcggcggcgaggggcggcgccgcaacgaccacagccgccggcgccgtgcgcaggctgctggtgcgggtggtggtctcgccgccgaccggcgacagctacctcggcagggttaacacgaaccccggtccaagccccggccccggtcactccggagcggcgcgcggatgagccggtagatgtccctacggcggatttaattagcgatcgataataagctacttgctccgtttcatattataaaactttatagtattgcctatattcatatatatgttaatgaatctagatatatatatatgtgtctaaattcattagcatatatataaatattaaccatgctaaaaagtcttttaattaagatgaaatggacgtagtacatgattaagtttattatacatgtgtgttaagaacacacacatatacgtacgtgttgctgcgtggtttacggtacagattctcgctatgtatgctaattcctctgttttacaatgtaagtcattttagtatttttttcacattcatattaatgttaataaaactagatagatatatatgtctaaattcattaatatcaatatgaatgttgaaaatgctaaaatgacttacattgtgaaacggatggagtatttgccgttaattagtttgtgctatatatacatatatatgcatcgtgtgaataactcaggcttcgctcttgaagacgaggagctttgtttgtacgtgagatatatgtttgttgttttttttctgaaatatatgtgagatatttgtattggtgt

SEQ ID NO: 394274 - DNA, 589 bp, Oryza sativa
  unsure (1)..(589): unsure at all n locations
gtgaaggagagggactcggaagtggtgggacatggtgagtagcccggattacccggactcggagttcaggaaggcgttccgcatgtccaaggccacgttcgaggtggtctgcgacgagctcgccgccgccgtcgccaaggaggacaccatgctccgcgccgccatcccggtgcgcaagcgcgtcgccgtctgcgtctggcgcctcgccacgggggagcccctgaggctggtgtccaagcgcttcggcctcgggatctccacctgccacaagctcgtgctcgaggtctgcgccgcgctcaaggccatggtgatgcccaaggtggtgcgctggcccgaggccggcgacgcggcagccatcgccgcgcacttcgaagccatctccgggatctccggcgtcgtcggcgcgatctacaccacccacatcctcatcatcgcgcccaagtccaacgttgcctcctactacaaccgccgccacacggagcgcaaccagaagacctcctactccatgaccgttcagtgcgtcgtcganttcaacggcgcttcaacgacgtctgcatcggctggccggggtcaacttcgaagaagaagt

SEQ ID NO: 394275 - DNA, 2633 bp, Oryza sativa
atactgcttcgcagaatgttgaatttttggatcatgctggattttataaagtagatccttcaggtgaattagatgacacatttaaacttcaagatagtgatgatttaccactgaatgagttttttaaaagacctatacaaattgctggttttggatggggtgttggaactccattcgctctcacttttgatccatggtcgtcttattttaataatccccgtgtagttaataggatttctaactacaaattattgagagctaagctgcatgtaaagtttattttgaatggtaatgctttttattatggacgtattatggcgtcttatcatccagcaaagtctttagactcttttggtaatagtcctcttgtgtctgaggatgctgtgattgagtcgcagagaccacatgttttcttggatccaactaacagtcagggtggagacatgattttgcctttttattggcgccataattatatggatatagtaaatgccgattggggtagtatgggtcagatcgatatgagatctttacctattttacgaagtgtgaatggatcaaatgaaactatttccattattgcgtatgcgtggtgtgaagatattgagttctctggtattacacagtttgagcctgcaacaatcgtgcctcagtcaggttccgagattgacgaagctaatgctaaaggatttatttccaaaccagctacagctattgctagttttgcaggtaagcttgaaaatgtaccagtgataggtaagtatgctaccgctactgctactatagcaggagcgacagctgatgttgctaggaattttggatattgtcgtccacctgtgacggagaatgcagctccccgtagaccgacggttgtttctaacatggcattaaccaacacgccagataatgttgaaaaattaaccactgatgataagcaagagcttagtatagatccaagtattatgaatttaccaggagtagattgtttcaatataaaggaaattgcaaagaaggagagttatttaactacattccaatggtccgatggaggatttggatttttatggaattcacgtgtttccccgatgttgtggcgagctgtggcaggacctcctgcccaagcatggtttcctgcttgtgcgtatgccgtcatgccgtttgagaattggtcgggatcaatgaagtttagatttcaagttgtgtgttctagttttcataaagggcgtttgcgtattgtgtttgatccaacaggtgctcaaacaaatcctgagttgaatgtcgcgtattctcacgttattgatatttcagatactcaagattttaccatagaggttcctcatatgcaaacacgaactttgttaactagggctgaaccgccatttacactggttaccacacaatacggcactactttgttgccaccgttgtccactggtaatggaactattgctgtttatggtgagactattctcgccactcctaatagcacagtggatgcaccagttgatattaatgtttttatatcgatgggagatgattttgaagtatataatccaggtaatggatttcaatattatggttttgttccccaatctggaacggagttacacccagtttcaaacacgaccgaggagctaaatgctccattaaaggatgagtctttaatgattgggggcaaacatgtcgtgaatgataagattccattagtgtatatgggcgagtctataaaatcctttagaacattgttgaagaggtataatatgcatagacgtgatatgttttcaaatactgttggagttaaggcttatcacggcatacgaccgcagtttcctccattgcgtggccaatatgggggtgctgaggatttgactgcagcaagtgatccttatatgtatgttaaccagttacttttgcactgggttcgacacgcatttcaaggtcacagagggtccatacggtataagttgttggttgggcagtatgatgcgagttacaaccatatgactggggtagtgatgcgtagacggtttgatcaggataatagttggtctgatactaggttggatgtcgcattgaatacatctcaatcagttatggcacgtacatggatagctgaaggcccgttagattatcctgatggaccgaacggtgccgtctattttaattcgagagtaaatcctactgttgaatttgaagtgccttgggaaaatgacgctcgttgttattttgcccgtaacaccaactacaattctacaaatggaactgcccgttcgcaacccgggtacaaatttgcgttgcagggtaactcgagtgattatgatcatttagagacttgggttgccgctggagaggatttccaatgttatttctttattggattacctcgctgttttcagtatttgtcgccacctgcggcagcaccttaagaaatcgtctatcagacgttaaatgaaccatactgtagccgtatgggtgcgcattgcgtgaattggctacgccgtatctgttgtaattacagttttctcggcgtagccgagtttttatggagttacaattttaattagcgtagtcaacattgaagagagctgaagttttgtacaagctctcacgtttggcttcttgtgcaaacaaaa

SEQ ID NO: 394276 - DNA, 558 bp, Oryza sativa
ttctttgctgggttcttgtagacccatttcagagacatggattttgcagccgagcagactttagtgatgagccagctttcagttggatacgtaaactcccagctgaaaccaagacagctattcatcactccaaaatattgttctgtaatggctatgcttttgatgaacttttccctgatgtgatctcgtccgctattgattgcgcaattgatgcgggaacagcagtattttttgatcctggtcctcgaggaaaatctctcttacatggtacccttgatgaacagagggcacttgagcattctctgaggctcagtggatgttcctgcttttaaacatcagacggaggctgaagtccctgacgaacatcagaaacccaatccaggcagggcaagagttgctgaagagggggattcgcacaaagtgggttgtcataaaaatgggctcaaagggatcaatcatggatacgaagagtgctgtctccagtgcaccttcatttaagattgacgttgtggacaccgctggatgtggagatagctttactgctgctatagcttttgg

SEQ ID NO: 394277 - DNA, 475 bp, Oryza sativa
  unsure (1)..(475): unsure at all n locations
gaaaaaggaaaataaaatccccaatccaaaacacactccgccccctccgatccccccctctctcaaaccctagctccccccctccccaccaccaatcccccacgcgattcgccggatgcgcccgcccgacgcggcctaggcccctgcggttcaccggcggcggtggggcgagagagcgcgcgccggcgaccggcgaagaggaggggggggcggtcgatggagccgcgcgtgggcaacaagtaccgcctcgggcggaagctcgggagcggctcgttcggggagatctacctcggtactaacgtgcagaccaacgaggaggtcgcgattaagctggagaatgtgaaaacagagcatccacaattgctggacgagtcaaagctgcacaggatacttcagggtggaactgggattccaaatgtcaagtggtttggtgttgaaggtgattacaatgttttggttatggacttattnggnc

SEQ ID NO: 394278 - DNA, 346 bp, Oryza sativa
  unsure (1)..(346): unsure at all n locations
gaaaagcaaaangggaggcgaacaaagccaacccaaccacacgccaatccactcggaatccgcctagggtttcctcctcttcctcttcccctcgcggctgctgctcggcggattctgctgcggcggaggagggcgccgggggttggggctgcaagctggtccgatcagcttttcctgctgctgaggtagcgggagcgacaaccagggcatttcttgtacaaggatgaacagcctgccccggctcaaataatatttgcgggttgggatttatttttttttccgacatgaacgcggcagccaagggtttcacgatatgataggcggtggtggcaagggaatgcaagat

SEQ ID NO: 394279 - DNA, 764 bp, Oryza sativa
gttcatagagtttgcttgcaatggcaggcaccaagcttgcagctcttgggttcgttgtcctcttgagcattggactagccagtgctgcaagagtagaaagatactccagttcccaaggttcaggtacaggaggtggagagggaggaggatatgtgaacggagggggagctgggaaaggagtcggggctgggtctggtagcagtaactcttatggtgctcatgcaagtggtggaggtggcggcggaggtggtggttacagccaatacggtggatcaggatctggtagcggatacggcacgggctcaggctcaagccaaacttcacaaaatggatactatggttatggtgggtcatccagtgctagcggtgctggtgttggtggtggtgccggacaagccggtggttactggccatccaatggtcatgggtccggcagtggtacgggctatggctctagcactgctaataactactactatggaccatatgcaaatgcaaatgctggtggcaatggtggcggtaatggtcaagcccaatatggtgccagtgccggtggtgcaggacctggagttggatctggtgacgccagcccttaatttccttcgtaaaggaaattttaaaaatggagccccctatgtttcgtcccatggctatgaagtagaatttgttctcatttatttggacttgtttcatgtgttgtgcaccaagaaataaggggcttcattgattcagtaaaatttggtagcatgcgactttccatgaac

SEQ ID NO: 394280 - DNA, 792 bp, Oryza sativa
  unsure (1)..(792): unsure at all n locations
ttttccatcgctcccatccgcgtcgctcccgtcccaggggcggcacggacggcgcctcatcctcctccgccgcctcctcccttctcctcccctttgcctcgccaccgcccgagcggcgcgtcggcaaagccgaccggccacaaggacggcggtggcggggccctctcccctcctcgaggaagccagcggcggcggacaccggggctgctcgggagcggcggtccgcggcgcgggaggcggcgccggtggggttggcgtggcggatccggccacgccggaggcggattccgtctcccccggcagcggatctggcccctccgtgtccaggggccgagcaacagcgagcggcggtcagcggcgcgggaggcggcgccgagggggtcgtcgcggcgaatccggccacgccggaggtggatccgcctcccctggcggcggatccggcctccccgcatccaggggccaagcgacggcgagcctcgcggacgacggcggccggaaggaggcgatggatgcgcgctgctgtggacggatgtggcgaaggcgaaggcctaggggtgaggccggttccggtcctcccggggcgacggcaggcggcggaggtccacagccccggtggcggcgatngcgacggcggtccacggccgcgatggcgcagcggaggactgcagaggcggtggtgacgganggcgacgaggcagtagccgcgttggcggtggcggcggctggtgttggcggttggtgacagcagcggcgacaacggccggcttgcagcggctgtgaatttggaggcac

SEQ ID NO: 394281 - DNA, 525 bp, Oryza sativa
ctccacgcgtccgcggacgcgtgggctgacaagctctctctctctctcttctctctttgggggtggttcttggtgcagagccgatctgcggcggcggcgggtgtggggggctcgaggagccgctggtcgggaagaggaggaggaggaagaacggccgccctgacacaatggcagatgtcttaggatgttacactataaagtcccatggaaccaaagtggcgagacttcacatgtacgactggataatacttctactccttgctgttatagatggactgttgaacataattgaaccttttcaccgtttcgtcgggagggacatgatgactgacttgagatatccattgaagggcaatactgttcccttctgggctgttccgctcattggaattgtattgccttgtgccatctttggtggaatttacttcaaaaagaagaatttctatgatttgcaccatggcatactggggatcctatactctgtgcttataactgcggtattcacagatgcattaaggatggtgt

SEQ ID NO: 394282 - DNA, 694 bp, Oryza sativa
gcagggcgccgacgcgttcggccgagccagcccgcgcgggcgtcggctccgcgcgcggccaagccggccgcacgggcgccacctccacaaccccctcccacctccgcctcggcccccaccgaaaccgtcatcttcatcctcccccgggccggcgtcgcggcgtggccgactccgacagccgccggacgcatcggccccgccttcctccacctcggcgccttccctccaccgccgcgacagccgccgtcttcgtcttcctccgttgtgccgccacgccgcgtcgagcaccgcctcctcgcgtgcccctctgcctcgttgcattccccgtcgccgcatcggctgtcgttgccgcgccggcaccggtcccgcctcgtccgccgtcggaacgccggctgccgccgcagcgccccgcgcccacgcccgtcttcgccctgcgccgctcggtggagaggagcagagagggggacgagaggagagatcaagaagaggagcaggaaagaaaaggggataaaacagagcaggtgaggcacggacatgcgggacccatggttccttaatcatgtgtgcacagtaatcaccttgttaatcctcctctaaggtctccatgacacgtgggccctattgtgcttaatctttgttttaatcccttcttaatccatgtgctaatgacatacgggtcccaccgtatccatcc

SEQ ID NO: 394283 - DNA, 530 bp, Oryza sativa
  unsure (1)..(530): unsure at all n locations
cttcgcctctacctgctgcatgccgctttaccccttctcgatgcggggttggattccgacgagatacttgagccgacgagagtttgattcgaatcgaagctcctagtcttctttaccatgtgaagaaatcaactggttcagcatcaagaagcagccatggccgccgttcgcgtggtggcgccggcgccttcggtgctgctgcttgtggcggcggcggtggtgctgcttcacctggctcgcgccattgccggcgcggcggacgaggccgcggcgctgctcgcgttcaaggaccgcgtccgtggccgccgacccggggcggcgcgctcgcgggctgggccaactccaccacccccggctcgccgcggccggtgggcccggctgtctcgtgcgccgccgctcgcgtccgggcgctcgacctcagcggcatgtctnttttcggccgactccgcttcgacgccctcctcgcgttttgggcgctccggcgcctcgaccttcggggcaacgccttcacggcgacctctcgcgccacg

SEQ ID NO: 394284 - DNA, 654 bp, Oryza sativa
tttatttgtgtccaataagtggtttggcgctttgatatttggtggagttttatgtggacgacttgtatcatgataattatgagccacgagtttattatggttcatggtagtgttttcagtggaaaattcgtaattttgatagaatagaaagactcttgacataacttaggatgcgcaaacctgcaaagaatggaaagttgattcaaaaagaaagaaagaaagaatgggagttagggcttgggtttcctctgtggcgcgctagtcccaatttcatatcatgcagtgcagtctcatttctatttttattggatgaaagcccttatccatgttcaggactgctatgccctgctttatgcatcaagttgcagaatgaacttttgttatttcctgagcactttgtgacaatgttccccatcttctgttcaaaagataaaccagggaacatgataaaatattgatgcagattgttgtgcatttacgagactcttctgaattctgatgctccttattcatgacaaggcttaattaattcagtctaacaccaaacatatttttacgggactaagatgtaaattgtgccatacatttttttcccatggatagcagttggacagaactatcataatgtatttaccggttataccgattagttcc

SEQ ID NO: 394285 - DNA, 602 bp, Oryza sativa
  unsure (1)..(602): unsure at all n locations
cttcttcttcttcttcttcttcttcttcttcctcgcgcanctccaaattctccaaaaccctcgcgttttcccgcggcttcgcttccggggagaggagattttcaaaaataaattcctcatccacatcctcctcttcccctagctcctaggcagggtctcgtctcgactccgaatcttagggtttctcctccccgctccccgccgcgggcgccatggaggcggtggtcgtcgacgcggggtcgaagctgctcaaggccggcatcgccttgcccgaccagtccccatcgctggtgatgccgtcgaagatgaagttggaggtaagaggacggtcagattgggcgacggcgcggtggtggaggagggtggtgcagccggtggtgcgtggcttcgtcaaggactgggacgccatggaggacctgctcaactacgtcctgtacagcaacattgggtgggagattgggatgagggccagatcctcttcacagagccgctcttcacacccaaggcacttcgggagcaactggcgcaacttatgttcgaaaaattcaatgtttcaggcttttatgactctgagcaggctgtattggcactttatgcagttg

SEQ ID NO: 394286 - DNA, 555 bp, Oryza sativa
ttttcgtacgtacttgctgctcactatcatgaacaaacagtagctaagctagctatagctacgtttttgttcatatgctgctgttgctgccggctgcttggccgcggggaagcatggcggcggcgatggcgttcctcgcggtggtctgcgcggcggcgatggcggcggtgagcggagcggaggaggtgtacgagttcggctccggcgcgtcgttcatcttcggggactcgctcgtcgacgccggcaacaacaactacatcccctcgctgtccaaggccaacatgacgcccaacggcatcgacttcgccgcctccggcggcatgcccaccggccgcttcaccaacggccggaccatcgccgacatcatcggagaaatgttgggccagacggactactcgccgccgttcctcgccccgaacacgaccggcggcgcgctgctcacggcgtaactacgcgtaggaggcgctcggattctcacggcacaggagaattttgtgacaggatcggatggatctcaggtggatacttcacatacgaggagcagctgacatctct

SEQ ID NO: 394287 - DNA, 473 bp, Oryza sativa
ctcacctgcttgtttgttcgtctctccctccctccctccgactcgcaccgcacccaggccccagcccacgcggggttcggattccctccgccgccacccgcgagagggagacgccggcgccggcgatcggtgaccgatggcggcggcggcggtgcgggtagacaaggccacgagcgagctgctgctcggccccgactggaccctcaacatcgacatctgcgacgccgtcaactccgatcacgggcaagcaaaagaggtgattaaagctctgaagaagcgtctccagcacaaaaattcaaaggttcagttttttgctttgacgctattggaaactctaatgaagaattgtggggatcatgtgcattcacaagttgtagagcgtgatatactgcaagagatgatcaaaatgttaagaagagactgattgcagttgagggacaaaatctagtactcttgaatcttggcagagcatt

SEQ ID NO: 394288 - DNA, 539 bp, Oryza sativa
  unsure (1)..(539): unsure at all n locations
agctggccgcctcgcccggcccgatccggaccggccgggtcggcccgccccacgacgccatctctctcgcgctctctccggagccaaggcgaggaggcggcggcggcggcggcggcggcggtgcgagacgagatcgtcgagtccggcaccccacccccgtccttcgcttcacacgaaaaggaagggaggaagatgagctccgagtctgaggcggcgcccgggaccgggaagctggtgtgcgtcaccggcgcgtcggggtacatcgcgtcgtggctcgtcaggctgctcctcgcccgcggctacacggtccgcgccaccatccgggacacctctgacccaaagaaaacactacacctgcgtgccctggatggagccaacgaaagactccatttgttcgaagcaaatctgctggaagagggctctttcgatgctgcggtcaatggttgtacattgtcttttccatacgggctttctcctctttaccacaatgtttaaagatccttaaggcttgagttactttgacccgngcagtcaaaggg

SEQ ID NO: 394289 - DNA, 926 bp, Oryza sativa
ttactctctggtacggtgcaactgtcggtggcgtatcccaaagacatgtctgtgaacccgacgactcagaacaaggcgtaccactacagggggtacaacttcaccgtcagcatgttctggtcgccgttcctggtgaaggcgcgtgagcccgaccacgacgggtcggcgcacacgggccactggagcctgtacctcgacgagcccgaccagtcgtggatgttcgagatctcgcggatcgactacgtgctggtgtccgccggcaactggttctccaggccgtcgctcttctactagaagcgacggctggtcggctgcagcttctgcagcaggcagtacggggtgccggacctgacgctctactactcgcagcgcctgacgtggtgcgtggcgctgaaggcgatcaacgacctggagagcctccacggtcgggtgatcgtgcggatgctgtcgccgatgtcgcacttcgagaacgggacgtgggaccagggcggcaactgcaagcggacgcagccgctccggagcaacgagacggtgatggaggggcgggacctgcacttctacacggcgcagatggaggagtaccgcgccgcggagaaggtcgcggaggccaagggccggcggatgatgctcatggacgccacggcggcgatgctgatgcggcccgacggccaccccagccggtacggccacctgccgaaccagaaggtgcagctctacaacgactgcatccactggtgcctgccaggccccatcgacatctggaacgacatgctcttccagatgctcctcgtctaacgcgatcgatcgccaattcgccatcggtaaatgcgacttctactgcacagacaggattgctcttgctgttgtttcaaagcagttttgacaaggatttattcgaacttccccaatagattctttttttctct

SEQ ID NO: 394290 - DNA, 507 bp, Oryza sativa
  unsure (1)..(507): unsure at all n locations
tcgttaacagttgcaggctaatcctccctcccttcatatctcagtatgcaatgaggttgaatcttctcttggagagacatcaaaagctctggagtctaatgtgactggggcagaaaacattgactcaaatatatctgcagatgacattgattgggacatctctttggatgataatggaattgattgggacattggtgctgttgaacaacctgtagaagaatctggcaatggttttggatcgtatgaaattattgatgccaatgtagagttggcaggttctgaaaattataattttggtatttcagatgatccatctgtgaacaagtctagttcatctgagcctggtatttgctgggacatcactgatgttaatcctgaagaaaatgctagtatacagaatgcttctgaatcaggacagtctcaaagtttagctgaagaaagaagccagttactagagaaggaatatagaaataatattcttgatgatttacttgangtaagagcatt

SEQ ID NO: 394291 - DNA, 914 bp, Oryza sativa
gttatcgaccccttgcttccgccctttttttttttttattttttttttttttttttttttttcgaagaatcaactggggggctgtaataagccctgttcattgtatacttgctgtacattgcaaaagtttcagtatatatgccgggtttttgtgacatcttattattaccaaacattacagtcacatctcactgtatttctcgccagaaccccaatcttcaggttccggtgggaaatcaattcaccttgttgtcatccttcagtatttttactgtttggattctgtcttcctacatatatgcacatcagcacacatgcaactttaattagccttcgactaaatttagatgtctcaatcacaggctcacagccccaacagaatatattaaacaattgccacaggaagtgatataaatatcccaagaataacccctgtgctcatgatgtctgcgtgcaccttgtactcttcagcgtacacaaatgatgtcactgccagggggagagccgcctgcacaacagcgatgtgcagaagtgtgccgtgcatgccgatgacgagcgaggcgaacagcatcacaaccgggcctatcagaaacttgatgaccatggagaacgacgctatcttgtatccgcacggcacgaaccgcgactgccgcgctatgaacgtccctgaagaaaacatgcttaggcctacagcggtggtacgaatggtgaacagagagtcctcgacgatttttggcatcgagaatccacacttgaatgcgattagagaccagatgaggccaaggaagcttgcataggtattcggaatctgtagcagcttcttcaccgccatccagatgacgtgcttcatcgacggcgctggcgcagacgcctcctcctcttccgccggagcaacttcaccagagctcacctcc

SEQ ID NO: 394292 - DNA, 635 bp, Oryza sativa
ttagtagtgtatatcatgatgaattagattgtcatatcggcgctttgagcgaaaattctatatttaaatcgttgcattgttatatgagacccaagaaatgtgcattgaccccaatggaagcgtgtgcggtgaatatagacggagcgcttcgtgaatggtttaatcacggtgagacaatttatgagcgtcgtcgtgaggaaatgatgaaggttgccgtagagaatcaactcgcagaacggtgcgtgatgttgagcaggtcttatatggattgtgttagtttgtggaagttaaacgctttggagtcatcaccaatgaatgcggaggatgattttaacgtccaaagtggatttgagtttgaagatttatatttgagagctcaagaagagataccaatggctttgttatctgtgaatcaagtcattattgcaccaagattttggtgaagctgatttagtatttaaaaggagttttgatggtgtacctcattatcttatcattgaagtaaagcattcttattgcccaaatgtgcggcgtagaggccgaattcaattgaggagagttgcccaagctcttaattttttacaacctcgtgcaccattgttggctgttttatatacgccttatgggtatgagat

SEQ ID NO: 394293 - DNA, 547 bp, Oryza sativa
gaaacgcgcaaaaaccctctccgactctccccttctcccactcttctccggcggcggcggcggcggcggcgggagcgcatcggagatgatcatcccggtgcggtgcttcacctgcgggaaggtgattgggaacaagtgggatctgtacctggatctcctccaggctgactacacagagggggatgctctggatgcattgggtttggtccgttactgctgccggcgaatgctcatgacccatgttgacctcatcgagaagttactcaactacaacacgctggagaagaccgagacagcaggttaagttgacccagcatgctccagaactcttgttccttattgcctttgttcacgaatgttccaaggaatttgtgtgatgatccatgctgcatttcaactatgtaactgttaccgtgatgtcagatgatggaagtgatataactagtgggcagagtacctctggttgtgtgtgaacttgttttcaagacttttatatcaaggggggtatgttcctgcagtacccaaataatattaaaaaaccaaataa

SEQ ID NO: 394294 - DNA, 833 bp, Oryza sativa
aactcgctatgaatcattcctggtagacctgtagtcaagggtcgtggagcggtacatagatatatacagcatcacaagggtcttggcttgggcgtgagttgcgtacctcagaacttgtacagtttaaactgttggagctacttgtgttaaattaattaattgattctacgagaccaatgtatagtgctaggagcctgcttccagctgaagaacctgctcttgctttcctcttataaatgaggtcaattcttttggtgcaacaaccgacttgagccactcttgaagctcctcgccctcaaccttttcattctcttctaaatatgctccaaggccttccaatactgcaggattagcacggtcaactgaaagagccacatcaagggctgactgatgaagggcttttacttcccgctggacaaggtcaactagatggccctgatccccttccccatggagagcctgcccgattccatctagcccaccatttgacaatgttgccaccgatatcggacctatgcgctgattaagaccatactctgctacagccttgtatccatgtcagtggcacgccttatgtcatcaagtgctccagtagaaacacgccctgacagtactacttcctctgctgcccttccacccaaaagtgttactagacgtccacgcagttcatcaacaaagagcaaatatctatcttctgttgtgggaggggtgtatgtaaagcccaatgcaccacctgaccttggcaatatactcaatttctccacacgtggctgccctggcaataggtttggtacagcagttcccacaacggcatgaccaacttcactcgtgcc

SEQ ID NO: 394295 - DNA, 528 bp, Oryza sativa
tctttgtgctccgccggcgccgcctacgacgacgccgccgcggcgaggtgcttcggcatggagcgcgagtgcgagagggggctcgtgaaagggtgcggcgtcgcggtggccgtcaggaacgcgctgtcgtcggtcgtcggccacaagtccggcggccacggcggcgcgccggcggcggcggcggcggcgtattaaatccctccgctgcacatgcacgctggccgctagtatgtactgctatctaatttgcgttttttccggggtgttctttgcattttgtacgccatagtacaaacatgtacgtacttactctacgtgataatatggaggagaagtaattaagtgtaaggttttagccgtgtacgtatttctctgtagccgtatacgtatattatacggtcatgcatgcatgtcctgaaaatatgtgtgcttgttcagttgttccaaaagttgatgggtacattaccatggatatggtgacgatgagcagaatagatttgatctaaaaaaaaaaaaaaaggcggccgc

SEQ ID NO: 394296 - DNA, 979 bp, Oryza sativa
tcgtccacgcgtccgcccacgcgtccgcccgccgtgccgcccgccacggcctccctcctcagctgcggcgccaccaccggggtcggagcagcgtggaagctggctaaagtcgagccggggtcttcggttgctatctttggcctcggcgccgtaggattagcggtagctgaaggggccaggatttgcggtgcgtcaacgatcatcggcgtggatttgaaccctgagaaacatgaacttggaaagaagttcggtgtgacgcacttcatcaatccacaagaacttggggacaaacctgtcagccaagcgatcatcgagatgactgacggtggcgcggactactgcttcgagtgcatcgggctggcgtccgtgatgagcgatgcatttcggagctcccgagagggatggggcaagacgatcatttcttggcgtcgaaatgcacggtgcccctttgtccattccttcgttggagatcctcaacggcaaatgcgtaatggggtccctcttcggaggggtgaaacccaagcaggccattcccttcctggccgacaagtatctgaacaaggagctggagttggacaagttcataactcacgaggttcccctgaaggacatcaacacggcatttgaccttctgttgcaggggaagagtctcagatgcaccatttggatggacaagtgatgtggctaagtgaaattgcaattgagcaaaccagttgtctacttaagtttgctgcccacttcagtaggttccaatacaattatacaaataactggtttgactgctgccccaaaaagatttgtgtgtataatgactagtgaattttaacatcgtgtgtcaaatcatgtgcgttcagactttattgatatacaaaatccctctctgaaattcatctgtgtattctcagtcatctgaattctgcctgtaacagctttctcaaaaaatggatctccaggtgaataaatgattgctttctttagc

SEQ ID NO: 394297 - DNA, 684 bp, Oryza sativa
  unsure (1)..(684): unsure at all n locations
ccgcgcgccgccttacttctctcctccttcctcgacgcggcggctgctccagatcttctcttcccctcgcggcggcgtctcccgtccaatccagtgaactatcggctcagtaaaaggggaaaaaggagggatcttttctggacatttgaagcttacggacgacaagatgcaccttcttgcatcatttcacggccctacaggttttaagtctgtagctgatctgtcgggatggactccaagaagttcctacagctgcttgaagagaaaaagaagagaatccttgagaagaaagaagccccactgaaatgggagcaaaagctcgaagcagcagcgaaggcaaaagctgatgctgaagcaaaggaaaagaagcttaagtcaagaaagcacagaaggaggggccattcttcctcagactctgaaagtgattccgacagtgatggtgatcggaagcacaggaagaggaaggaccgcaaaaggcacaggaaacacggtcactctgattccgatgaagccaagaggcacaagcgcagatcaaagaggagaagctcagactcaagcgatgatactgatagtgatgaatatgatagtgggtcttgaagaagaaaatcgagggaagaagcctcacacaggagaagcatcgccgacattcatcaaggtctgttctgttcttcagctntagcagcc

SEQ ID NO: 394298 - DNA, 418 bp, Oryza sativa
tcctcctccgcgcgccgcttacccctctcctccttcctcgacgcggcggctgctccagatcttctcttcccctcgcggcggcgtctcccgtccaatccagtgaactatcggctcagtaaaaggggaaaaaggagggatcttttctggacatttgaagcttacggacgacaaggttttaagtctgtagctgatctgtcgggatggactccaagaagttcctacagctgcttgaagagaaaaagaagagaatccttgagaaggaagaaggcccactgaaatgggagcaaaagctcgaagcagcagcgaaggcaaaagctgatgctgaagcaaaggaaaagaagcttaagtcaagaaagcacagaggggggggccattcttcctcagactctgaaagtgattccgcagtatggtgatcgaa

SEQ ID NO: 394299 - DNA, 974 bp, Oryza sativa
  unsure (1)..(974): unsure at all n locations
tttngggctgcaggattcggccagagaggccacacacacacaagcacaacacaaaagtggccatggctctcctcctctcctaccccaggcgccacccatccatccacctcctcatcctctccgcctacgccctcttcctcctcccaatcttggatggattggagctgggaggagatgggctctacagggagatcctcagggatgagacggtgctcaggctcaaagaacttggcaagatatctgatggggaaggttaccttgagaggacatttttgagtcctgcctcaatcagagcctctgctgtcattatcagctggatgaaagatgccggacttaccacgtggattgatcaaatggggaatattcatggtcgatttgaaccgaccaactcaaccaaggaggccttgttgatcggatctcacatggacactgttattgatgctggcatgtatgacggagctttgggtattatctctgcaatctctgctttgaaggttttgaaagttactgggagacttcagagacttactagaccagtagaggtgattgcattcagcgatgaggagggtgttagattccaaacaacttttctgggaagcgccgctgtagctggtacactacctgaatcaattttacaagtatctgacaagagtggcacgacagttcaagatgtcctaaagctgaattctcttgagggcactgctaatgctcttggtgaagtaaggtacagcccggagtctgtcgggagttatgtcgaggttcacattgaacaagggcctgtcctggaagcccttcgttatccgcttggtgttgtaaaaggaattgcaggacagacgcgattaaaggtaattataaatggttcacaagggcatgctggcacgggttccaatgaaattgcgccgtgatcccaatggttgcagctgcagagctcggtcctgacactgggagacgctctgcaaagaacccaacaagtt

SEQ ID NO: 394300 - DNA, 409 bp, Oryza sativa
ctgtctcgtgggcgcgccgccaccttccccacccggtctagccgccctcgccgccgccggagcccgccgccggaaaccgcgcggacggccaggaaggcggcggtggggaaaaccagtcggcgacgatcctccccctcggcgtgggaggtggagtggcgagcgtcaggcggaagacggcgtccgaagaggtccacagggcgaatccggccacgccggaggcggtattcggccccctcggcggctgatctggcctccccgtggccggatcgggtgctggcgactccggtggcggcggaactcgcggcgcggctgcgtcgactggctagaggaggctgacgtcatcgacaaggacagctatgaccggcggagctcgcagggacagagattgtagcagctggctggcggcagc

SEQ ID NO: 394301 - DNA, 661 bp, Oryza sativa
ggcacgagctttatcgccacaactgtggggatccgttgagcaattatcacgttccaaattcactcagtcttttgaaggtttgacaattccgatattctcaatagcacatcgaagtgcaagatgccaaaaataaagagcctgtctaatgcttgtaaagtatcattttctccggatgggcccatatccgatgaagcacttgagagagttcgtgcattgttagatgagataagacctatagatgttggcctagacaatgaagcacagattgctcgtaattggaataattcaacgcgtcaaccaaatggaagaagaggacgtaatggggctaaccagttcacatctccaatcaaatatttacacattcatgaaagtgaaagtttctctatgggtatattttgtatgccgccgtcatcagttattccacttcacaatcacccaggaatgacagttctgagcaagcttctctatggcacactgcatgctgaatcttatgattggattgatgtaactgatccaaccgatcaattacaggaactttcagtgagaccagcaaggcttgtcagagaccgtgaaatgtctgctccagagaccaccattctttatcccaatagaggtggtaacatccacactttcagagcgatcacaccttgtgctctctttg

SEQ ID NO: 394302 - DNA, 478 bp, Oryza sativa
gcaggattcggacgagtacactctacttctccttgcaacatcgtcgttagtcctctaacccaaggcattgacctgagcttgttgtgcgcttctgccttatctgcatcccctcccggccgagacgcgaccatctttctttcccgcttcgttagctgtctctgccgatcgatcggactggacggggagacatgaaggtgcagtgcgacgtgtgcgcggccgaggccgcctcggtcttctgctgcgccgacgaggccgcgctgtgcgacgcgtgcgaccgccgcgtccacagcgcgaacaagctcgccgggaagcaccgccgattctccctcctccaaccgttggcgtcgtcgtcgtccgcccagaagccaccgctctgcgacatctgtcaggagaagagggggttcttgttctgcaaggaggacagggcgatcctgtgccgggagtgcgacgtcacggtgcacaccacgagcgagctgac

SEQ ID NO: 394303 - DNA, 609 bp, Oryza sativa
ctcgcctactccttcgaccgcctcaggccgccatccaaccccgccggcgtcgaggtcgcccgctcatcatccttctccaccgccttccccgtctccgagccagggcagtacacgctcgtcttcgccaactgcctcggcggggggctcaaggtctccatggacgtccgctccgccatgtacaacgtcgacccgcccaccggcgagcgctcctacctctccgcgggggccaccgcgctcccgaccatcttcggcttcttcggcgtcgcctacgccgcgctcgccgccggctggatcgccatactcctgcgcaagcgcgccgccgtgttccggatccactacttcatgctcgccgtgctcgtgctcaaggcggtcaacctgctcgccgaggccgaggacaagtcatacatcgagcgcactggcacggcgcacggctgggacgtgctcttctacatcttcagcttcctcaaggggatctcgctgttcacgctcattgtgctcatcggcaccggctggtcattcctcaagccttaccttgctgaccgagagaagaaggtccttatggtggtcatccctctgcaagtcgtggccaacattgcgcaggtggtgatt

SEQ ID NO: 394304 - DNA, 508 bp, Oryza sativa
  unsure (1)..(508): unsure at all n locations
cacgtacacatctatccatcgatccagtccgccccgcagcagcagcagatagctagctagctagcaaacaatggcggcggatcatgaattgcgagctgcagcagtggtgatggtggtggtggtggtgctgggcatggtgtcgacgtcgtcggcgcacgtgttcgtgggggcgtacaacacgacgtgcccgaacgcggaggacatcgtgtacaaggagatgaccagcatcctcgccaagtcgccggagctcgccgggccggtgctgaggctcttctccgtggactgcttcgtgggcggctgcgaggggtccatcctgctggactcgacgccggggaacaaggcggagaaggactcgccgctgaacaagggagttaaagggtacgaggtggtggacgccatcaaggccaagctcgacgccgcctgccccggcatcgtcttctgcgccgacaccctcgacctcgccgnccgcgacgtcgtgcgcctgacgaaagggccgtacatcccactt

SEQ ID NO: 394305 - DNA, 607 bp, Oryza sativa
tctctctgtcaccgaacggcacgccgtggcggcgacgctgctggcgaggctgccgtaccagaacatcacgctcaacctggcgctgctggagcagggagcagtgccgacgttgctggccaagatagaggagatgcagcgcggcgaaatgcgagtgagccgccatgccaagacgtacatggagggcctcgtcggcgcgctcgtccggatgacgacgacgctgtacgaccccgacgtgctcctggcggccatggatcacaacttcacggcggtgctcaccgatctgctcgtgcggtcggcgggcagcgacgaggtgcagcggctcgcggcggtcggcctcgagaaccttagccaccagtcggtgaacctctcgcagccgccatcagaggagcagcggcgccccaagaagaagaacatcctccggcgcctgcgcgacgcgcacaccgggcgggtgcacgacaacaaccggaaaccgccgccggcggcgcagcagggacgcctttgcccggtgcaccggggcgtgtgctccccagccaccacgttctgccttgtggaggcccgcgccgtggaggcctcgtcggcggtctcgagagaacgagacggccgcgtg

SEQ ID NO: 394306 - DNA, 562 bp, Oryza sativa
gcattcttcttctccatccatccatccatccatctacgcgtagattttgcttttctttgctttgctttccagttgtaattttgtgtacgagtacagcacaagctcagctcagctgcttcagctataaaagcttctcactctctcacacacacactctctctctctgctagctcagctctagatccagcaatggcgcctcctccggctgcagctgcggcgttggcggcgtgcattctcgccgtcgccgccaccctcgccggcgccgacgacccctaccgcttcttcacctggaacgtcacctacggcagcatcaaccctctcggctccaccccgcagcagggcatcttgatcaatggccagtttcctgggccgcgaatcgactgcgtgacgaacgacaacatcatcgtgaacgtgttcaacaacctggacgagccgttcctcctgacatggaatggcatcaagcagcgcaagaactcgtggcaggacggcgtgctgggcaccaactgcccaatcccccctggcgccaactacacctacaagttccaggccaaggaccagatcg

SEQ ID NO: 394307 - DNA, 483 bp, Oryza sativa
ggtggaggcggcggaggacggcgagcggtcagtggcggagaggggagtgttcggggacgcggggtttgcgaggtggggggagctcttgcgcctcggatcggctcacttcccgacgcctcagcccccgccgcgccgcggtttattgctgttaggttaaagggattgtggtagcgagaagcggtggggttgatggagtgcgtggtgcaggggatcatcgagacccagcatgttgatgctcttgaggttcttctccagggcctctctggtgtcccaaaagaacgtgtcagagtgcatgagccctgtcttaaaagtcgggccaaatctaggagttgtccccatcagaggttcgtttattgtgtgacttagctcagtccacgccatcctggaccataagacatgttggaggtgccatgagaggtgctggtgcagagcaaatctcagtccttgtgcggtcaattgtagagagcaaagccagcaacaatg

SEQ ID NO: 394308 - DNA, 475 bp, Oryza sativa
gcccggtcggtcagtgtgtgtcactgtctctcaccctcccaacgcttagacatttcaacgttctcctccacagcagcagcagctgcagcagcatctcctcttcttcaccgcatctgccagcctagcgagcctaatcaggtcttcgtcttcttcttcctcatccccgtgccaataccgatttcgcgagctccgatggattccgcgagagaggagacgtccccatgagaggggaagccgagctgtgcgtgtagctcgctgcaatcgctgcgcccggtcaagaaaccagccggaatcggcggctgattcccgtggaggaagatgcggcggaaggcggccggagatgctgctctggtaggcggctgcttcttgctgctcctcccccctctcctctcccatggcgcggacatgccgttgggctcctccctctcgccggcgaaccaggcgttgtggtcgtctcccaacaacaccttctccc

SEQ ID NO: 394309 - DNA, 666 bp, Oryza sativa
ccccgtggtaatccatgtagcttttatcgggcggagtcatccaaagctactggcacataattagccttgctttgctatctcctcctgctgcgcggattgcgagaccatagacggtgagccatgactcgggatctgtttttgcgtcatacttctcaatgccagtcggcttaaaaacagccggccaatccactcgacgcaggtcacttgtaaaggctgcaactccatcttgatcatcttcgtagcggtctggtgaatgatgtcgtcgattgcctctttctgcatggtgacggttgattgtatcgtgaagatcgatgggttgccggtgacgtggcgagcaaggctactctacgtggtactccctgtgcctgtcagctaacgaatgaacagagcgttcagcatgatccctgctcctgcgattagatcctgatgcggcaacgctgaggcttggctggtgccgtgcagagaggcttggctagtgataatcttgatatcagagaggcggaactcggctgctagttgacgttcggacgcttaccgagttgactagaacagacgcagtgatcattgtcttcgtctgattaatgatgttgaggacgtggttaggcgcgtcctctttaaggagagtatccagaagcgtgattctgctaccgcgtttcgctgtgggct

SEQ ID NO: 394310 - DNA, 619 bp, Oryza sativa
  unsure (1)..(619): unsure at all n locations
catgaggcctcacagctgcttccaacaaacccatattcagctacaaaagctggggctgagatgcttgtnatggcttatggaagatcttatggccttcctgtgattacaactcggggcaacaatgtatatgggccaaatcagttccctgagaagctcattcccaaatttattcttttggcaatgagaggctcgccccttcccattcacggtgatggctcaaatgtcagaagctatctgtattgtgaggatgtcgctgaagcttttgaggtggttcttcacaaaggagaggttgggcatgtgtacaatatttggtactgtgaaggaaaggacgggtgatttgatgtggccaaggccatatgcaaagctctatggcttggacaccgagaaggtcatcacatttgttgagaacaggcctttcaacgaccagagatacttgttggatgatcagaagctgaagaaattgggatgggcagagcgcacactatgggaagaggagttgtagaaaacaattgaatggtacactaacaatcctgattactgtggagatgtcgcatgtgccttgctccctcatacaggatgttgatgacaccttgagctgaaaagcataactggactgatg

SEQ ID NO: 394311 - DNA, 1001 bp, Oryza sativa
  unsure (1)..(1001): unsure at all n locations
caaagaaaaagtctacggccgcgttcccttctcttcctccttccttcttncctgctgcctgcctagtctagtctaccaccctcctctccaacctttctccttcctcctcatctcctcctccaagccgagccaccgaaattcctccaatcctacagttcgctcgcatctctccctctcctccccgtcccaggcgcggccaggacctccggatcggtgaaaagaggccgccttggtgcttcttggcgccgaatcttggggaggaggtcgctcagattcggatttagggtttttggtggtgagagggggaaaatggcgacggccgtggcgtgcgcggagagggcgacgagcgacatgctgatcgggccggattgggcggtgaacatcgagctctgcgacatcatcaacatggatcccggacaagccaaggatacactcaagctcctaaagaaacgcctgggaaacaagaattcaaaagtgcaaattctgacgctgtatgtgctagagactctaagcaaaaactgtggggatgttgtttaccagcaaatcattgagcgagacatattaagtgaaatggttaagatagtaaagaaaaagccagatttaaatgttcgggagaaaatattgagtttgattgacacatggcaagtggcttttggaggtgcatctggcagatatccccagtatcacgctgcttaccaagaactcaggaatgctggtgttgattttccacctcgtgaggagaacacggttccactgtttacacctcctcaaactcaaccattgaggcaaccacatctatatccacctccaggtcaaagctatgaagatgcagcgatacaagcttctcttcaatctagcgccccttctgcacctgccttgagtctaagtgagattcagagtgctcgaggaattgtggatgtgttggatgagatgttaaatgctttggaccacaggcaccctgagggtgtgagggagaagtcattgttgccttgttgggcagt

SEQ ID NO: 394312 - DNA, 536 bp, Oryza sativa
tcagaactagctagttttatcttgcacttatctctgacttccttctcgtttttgtttcattccatagctgaagcaaaatgggtgacaagaaacaagtgaagctaaaggttcggggtgcaagcgagactgaggtcaagaatgtacttcgtcaagaattcaaagaatctatcgactatagaaactacagcaaaaatccagagagcagcagtttgaaggtggaggtgcgagggactgtggatgtggggaagctctacgaacgcctcaagaagatggcatccagtgtcaagattgaatcggttattccggatgatgtaaaggaagaaatagagagatacaagaaagaccttgaaagtatgaagagacagaaggaagatctagagttaaagctaagggaaaaaagggaagaaaaaaaggctctccaggccgacaaaacagcagccgaggaagagcagaaaagattgaagagagacaaagaaaatctcaatctaaaggtagacacacagaggaaagagtacaggcgtctcgaggaggagaac

SEQ ID NO: 394313 - DNA, 803 bp, Oryza sativa
ttttgatttccgcagcaccgcaccagagccaaggcggaggtagggttttagccggcggccatggcgctctcctcctcgctgctccaccgcctgcctccgcggctctacccccgtctcttcctcctccgccgccgcctcctcaatactccgcgccaccttctgctcctcctcctcgtccgcccccttgcccaccgagtcgcccctttcctccgtcttcggcgacggcgccgaggtcagcaacgtgccgccgctgaccgcccccaagctcttcatcagcggcctttcaaggttaacgacggatgagaagcttaaaaatgcctttgctccctttgggcagctacttgaagcaaaagtcattacagataggatttctggaagatccaagggattcggttttgttagatatgctactttagaagaagctgagaatgctcggcaggagatgaacgcaaagtttctggatggatgggttattttcgttgatcctgctaaaccaaggcagcagaagcctgctcctcgtcctgacactgattcatcacacactggcttcacaacaaacaaaactgtaggatggtgtggttagtcactgtggtgttatagctaaaaaactttgggatacacatgtttccatgcctcattacattccacagttgtctacatgtctcataatattctgtagttgtctgatagatatgtcattcacatggattataagatgttcatgatcattgttctaaatattgaacaccaaatttaccgccaattgtagaaaaaaaaatgataattgatgattggtggagccc

SEQ ID NO: 394314 - DNA, 682 bp, Oryza sativa
tcgtgtactgtattcattttatcatgaggttcctgagcatatgataacatgcccttcaacaccagaatggaaaaggtcatccgatcttgatttaaatggtgaagccaagcaagatgatgatgatgagaatggtgatcttgcaccagtacataatgaggtggaagataaagttatcactaatgatgatgtgctaggagatgctgtaccatatgatcagcaagatgctctgcgtgtcgtatgttatcgcttgctggaaatgccccctgtgagagggcatgcacagtttcctggatcacatcctgtctctcttaacagtgagaatttgcaactactcagacagcgatactactttgctacatggaaagctgatggaacccgatatatgatgcttataatgagggatggctgtttcttgattgatcggaatttttgcttcagaagagttcacatgcgctttccccataggaatcttaatgaaggactacatgagatgactttgattgatggagaaatgattatagacacagtaccagattcaggattgaagaggaggtatttagcatatgatctgatggcacttgatgccgtgtcaaaaaccaagttgccattttctgaaagatggaggctgcttgaagatgaaataattcgtccacgttattatgaaaaaaaacagtttgagagt

SEQ ID NO: 394315 - DNA, 594 bp, Oryza sativa
tttcaacacgctcaccaaggtcgacctggtggagaggacggccaagaactggcacgaggagggctccgtgccgtccgagcccttcttcgtgccacgccccggcgccaccgaggaagacgacggcgtggcgatatcgatggtgagcgccaaggacgggtcgggctatgcgctggtgctggacggcaagacgttcgaggaggtcgcgcgggccaagttcccgtacgggctgccctacggcttgcactgctgctgggtgcccaggaaaaggaacagcaagtaacacacacgccggtccatcccaacatgtcaccgccagtactgattcgtctctgctgcttgcgtcttgggtctgcgcatcgaatcacagtacaagtggaggcttggatttgtagctacgaaaatggcagcatgaatgcagtcaccgcttggtaggtggtctcagaaggaaagaaagacatacatacgctgcacgtggtgaactgttagtacgtgatgtatgaggtacccgaagatgtaatatacgtggaaatgaaactatagcgatctgtacgtgttaggctgtagtaattcacatgatgtgtaaaatgtgtacat

SEQ ID NO: 394316 - DNA, 479 bp, Oryza sativa
tcttccgtttgagtatggtcacttcttcagttcttcctaaggtggttgatgatgccggcgagggcgaggccaaccctcgccgggcgaaatggtggtacgcgacgttccacagcgtcaccgccatggtcggcgccggcgtgctcagcttgccgtacgccatggctcacctaggatgggggccggggacggcggcgctggtggtgtcgtgggggatgacgctgtacacgctgcggctgctgatcgagctgcacgagtgcgtgcccggggtgcggttcgaccggtaccgcgacctcggcgcgcacgcgctgggcccgcgcctggggccctggctcgtcgtgccgcagcagctcatcgtgcagctcggctgcgacgtggtgtacatggtcatcggcgggaaatgcctcatgaagttcgccgagtcggtgtcgtcgtggtcgcgcgcgccgcatctgcaccaccagtcctactggatctgcatc

SEQ ID NO: 394317 - DNA, 609 bp, Oryza sativa
ttccgatctccaccaccaccaccaccacgcgggcgcgcgcaccaaccgggggggcttcgatgcgggcgatctcgtcggcagcgggggggatgctgcgggcgcggctgcgcggcggggcgcgcgtccgcggcggcggcgggcacggggaggggggcgggcggtggacgaccccggggcacgaggagcagcccaagggctacctattcaaccggccgccgccgccggcgggggagtcgcggaagtgggaggactgggagttgccctgctacgtcacctcgttcctcaccgtcgtcatcctcggcgtcgggctcaacgccaagcccgacctcaccctcgagacctgggcgcaccagaaggcgctcgagcgcttccagcagcaggagctggcctccggggaggcccaggccgagtgatctgcgcgcctcaggtcacctcgaaccctagaatactgcatctgttttactcccaataagatgtttgagatgtgcgggatgaacactgtgctcttgtttctgtttttgttctgtttcctcgtggaatttgtccaatgatggcgaatgccctgaacattttgaaatgctttgtaattctattattttctcttccttt

SEQ ID NO: 394318 - DNA, 644 bp, Oryza sativa
  unsure (1)..(644): unsure at all n locations
cgctgctcatcaccatctccttcaccttctctttccccacactcacgccgccgcctaccacgccgtcgtcgtccttctccgggaacggccgggaactgcacctccattcccaccacctcagccgagcccctcccctctcgacctctcgcggctctctcccaacgctctctctctctctctctctcgctgtctctctccctcccttttctcaagccgtctcatggcgcctgcccacggtcggcggctggccagcaaaggcggcagcggcaaccacgccctcccctccgccagatccggcgggagggcaggcgcagtgagagggcctcctccgacgtcgaccgcaagacggcctccgcgccgctatctcatctgtccgttctctccccaccccgagcgatccatccattccccctcccctcaagcgattccccggttccccttcgcaatccgcactcaactcccttccaagatccgattccccaaccactgctcagtcgcctaaaccctagcgccgccatggattcggctacgctctcgcccaccaccaccagcacgcagcagctcgccgccgcgctagatctgggactgggaggatgaggggtgggtgggtgtggctgcttctgcggtcatcgacgccgnccccg

SEQ ID NO: 394319 - DNA, 646 bp, Oryza sativa
ctctctctccgggccgccctttttttttttttttttttttttagactatgtttctgcttagcgtaagttttgcgtagaacttgtaaatgtcatttaaagttctggtccttattttcatgtggaatttgtggagctaggatgggttggattatgtggtttatatcgttattaagttatcttataactgcctgtcgtggatgctcgtatttttaggggagactctaccgaaatttctaataattttgggagttagtggtttttgagtgtattttggtgtggcactctaggtaggtggctacctggagtgttacaccgtcgtcctcgtcgccgctgtcgtctcgccaccgctgctcccgttgtcgtcgctgtcattgcactgccaccgctctcgtcatcgtcgccgcgcagccgctcgtggtcaccgtcatccttgtcgtcaccatcgttgcgccgccgctgctcccgtcgtcatcgccgtcgttgtgcagccgatcgtggttgccgtcgtcctcgtcgtcaccattgtttccatttatgatggataaaagatcaaaaaagaattgatggatgaaaattgtattacttagagatgtggttcaaaaactatttattggtttttacgaatatattataacaaacatttacc

SEQ ID NO: 394320 - DNA, 503 bp, Oryza sativa
gtaaaccctgtctctccacctttccacctcactcctctcccaccatcattcacagccgtgcttcgctcctccaaacccaaaaaatttctcctgcttttgtttcctgcacaccggctagttctcgccaagaactcggtaatcccaagccctgggtgagtgagatccagcttcgcaagaaggttttgggggttcttgggcagctctgccagcagagtgacactggatgattgcataaatgaagcttgctgaatgtagattgcgaaggcctcctttcctgcgtacggccatatacacttttatcatggcaccgcgccacaggtcttcagctagaaggcctctctggattgtcatcttgattgcttttgtctgtgcagcaggcattggagcctatcctttatacaccccagcatatacacacctggttacttggaggcatcaaattcctgtagatctcggactgctccagaacctgctgcggtttacgctgatgatgagattgctgc

SEQ ID NO: 394321 - DNA, 583 bp, Oryza sativa
  unsure (1)..(583): unsure at all n locations
gctgcctggctgtcggttaggttgcggtcggggtgggcgaggctggtggtggaggaggaggaggggagaaggcggatcgtgaggtggaggaggggaaggaggatgtggaggagggcggtgtgtgtaaggatctggtgctcgtcgaggacgccgacctcgtcaaggatccggaggaagccgtagcaactgcagcacttcaggaagaaatgaaagcgctcgttgaatccttctcagttggtgctggggcggcgttcaccgctatgcaactacaggagcttgagcagcaatctcgtgtctaccagtatatggctgcccgtgtgcctgtgcctactcatctcgtcttcccaatatggaagagtgttactggtgcatcttctgaaggcgcccagaagtacccgacattgatggggtgggcaaccactctgcttggactttggaaagaacccagaaccagaacctgggaggtgccggcgaactgatngaaagaagtggcggtgctggagaaatgcaattgcaaatnagaaatattgcgaacggcatatgcaccgtgggccgcangcgtcctgtacagcttgttgtcgag

SEQ ID NO: 394322 - DNA, 732 bp, Oryza sativa
caatgtcttccccttcctcggcccattggctgagcttggtaggaagtatctggctccagaccatcaacggccccaactccgacttcccggtgtactcgtcgcagctcaaggagctcaagagcatcagccaggtgcagctcaacttcctcgccttcgcgtccgacgcgggcaagctcttcggatggttctccggggtggcggcgctgtacctgccactttgggtcgtcgcgttcgtcggcgccgcgttcgggctcgtcggctatggcatccagtacatgttcttggacagctccggcctccggtactggcatctcttcctgctcaccgcgctggccgggaatggcatctgctggatcaacaccgtctcctacctcctctgcatcaacaacttcgcgtcgaacagccgcgtcgcggtgagcctcgccaccagctacctcggcctcagggccaaggggtaaaccacctggcccagacgttcccggggctggccaactccaagacgaagacgtacctcctcctcaatggccgtcgtgccgctgttcgtcaccgtcatggtggccgccgtccctcagggtgttcgacctcaagagcgctggcggcgagctcggacgcggcattcctcgtcatgttccgcgatcacgctcgccacgggcgctgcgcgggtggtcggcagcatcggctcgacggcgaacgggctgtcctccaggagcacatgatcagcttcggcgtgct

SEQ ID NO: 394323 - DNA, 855 bp, Oryza sativa
ctcacacgctttgccttttgctgcccgctgcctgctttgcccacgaaaagacaacccaacccggcgagtcgtagcagagtagagagagaaagaggaggaggaggaaaaaaaataaaattaaggcagttcgttcgttccccacttttgcctgctccaatcgccgccccccgccccgccgcctcgtcgcccgcccgagatccgctccgcgtttgcctcccgccgccgccgagatagaggcatcgttcccagcattgggttccacggagaattgccaatttggatatctgatccaattgttagttggattgaccgtttcagagtgcctgcagttggctgctggattggtcaatataaggaaaaccgttggtttcggagatgatgccattgtgagtggaaatggattccgcgagaagttggttccagaagttccagccgagggacaaatcgaagagtccagcggtggctgccagtcatggaaaggatccaggaaagccaccaattgatgacgcgccatctagtgcaacaaaacagagggttgccgcggcaaaacaggtcattgagaatcattacaagacccagatgaagtccctgcatgataggaaagaaaggcgctggatgttggagaggaaactacaggatgcagaggttcctgtagaagagcaaaataattattctaaagcatttggagaaaaaggagaccgaatatatgcgggtgcagagacataacatgggggttgaagattttgaacttttgacaattattggaagaggtgcatttggcgaggtgcgtctttgtagagagaaggcgtctaagaatgtatatgcaatgaaaaagcttaagaaatctgagatgct

SEQ ID NO: 394324 - DNA, 511 bp, Oryza sativa
tcgcggacgcgtgggcgaatgaagactagtagctgtgctcttcgtccacctcgactcgtcggctcgcctcggcttccttcgttggtccgcaccttctcccctcacccgccgccggggatccgctccgccgtctcgcctcccgccccgtggatccaccttgccgctccagatggaatcctgcccttcggtgaagaacatccttctgctggattccgaggggaagcgcgtcgccgtcaagtactacacggatgattggcctactctctcggcgaagctggccttcgagaagtcggtgttcgtcaagacccagaaagccactgccggagcagaagctgagattgtaatgtttgatggccacattgtggtgtataagttcatccaagacctccatttttttgttactggaggagaggaggagaatgagcttattttagcatcggcccttcaaggattcactgatgcaggtgacattattctcagaaataccgtcgacaaagacagcactcgaaaa

SEQ ID NO: 394325 - DNA, 743 bp, Oryza sativa
ctttttcaaaaccccatttcattccaacctttcaaatccgccatcaccacctttttttccccacacacacacacacacacacacacacatatacacattgacacatagcagtagtgtgtgtagtactagtacaaacacacacaacacaagcttctctcttcccttcttggttttgcccaagaaacgaaaaccaaaaccaaacccaagaactctcctcaaaagaaccacctcacttcatagctctcacaaggctcacgcacacatagagcttgtgagagcttcttctttctctctctcttgtccttgtggtagctggtgcttaaaggaggaggaggtgaggaggaggcgcaatgtcggagcagccattgccgcagcctcggagcagcatgcgggaggcgctggagaaggaggacaaggagaaggcggcggcggccaaggagaaggccgccgtccccaagaacggcggcaacgggggaggaggcaagaacggcggcggtaacggcggcggcaacggtggcgccggcgcccagcccggggaggagacgacgagggagattcaggtggtgagggaggcgtaccggagggagccggcggcgccggcgtacgtgatgccggaggagccgccggccatggtggagctcgtcgggtggtacctctacggcttctgctcctacttcatcacccacctgctgctccccgtgctgttcccggccatcatcacccaggtcgccttccccgcctcc

SEQ ID NO: 394326 - DNA, 683 bp, Oryza sativa
ttctgttaactcgataaatcaagatgctcagtaagttgttggtcgtcacagcggtcgccctgtcgatcgccgtggccgtggacggccgtaatcacggtctgaaacgcgatttggcgttccgcgccgggccccgcgccaaattcctgtctgagcccgagccgtgggaatacctcaatccggaggacattccgtcagactgggactggcgcaacgtcaacggaaagaattattgcagcacttcacgcaatcagcacattcctcaatactgtggttcgtgttgggcgttcggcagcacttcggctttggctgaccgcatcaatatcaagcgcggaggtgcgtggccttcggcttacctgtcgactcagaacgtcatcgactgcggtaacgccggctcctgtgacggcggtgacgacattcctgtctatgcctatgctcacgacaacggcattcccgatgagacctgcaacaattatcaggctcagaatcaggactgtacgccgttcaatcagtgcggtacctgctcaccggacggcgggtgcaaccccattcagaactataccgttttcaaggtcggtgactacaactccatttccggtgtcgatcagatgaaagctgagatttatgcgcgcggcccgatttcgtgtggcatcgacgcgactgatcagttgcaagcgttcagcggc

SEQ ID NO: 394327 - DNA, 489 bp, Oryza sativa
ttttcgcgtccggtcataggttcccagctgcaatgcagagcactttgcgcactccgtctccagctgctgcttacaggagcaggaactctgtcgtgtcaactcgcttgccgcggcctaggccaacggtcatgcgcaggttcaagggtgcagacagcccagcacaagcagtagaagcgcctgcagcagaagcacctgcaggggcacaggaagacgctgcacctgccagggccaaggtcaatcatgcttacctcatcttcaacccagcagctggtcaggagaacccggccagcatccttggtgacatcagcctcaagctgagtgagcagatgaagctgacaatcctgctgacacagagggatggcccatcacccagagagatggcccagcaggccctcatggagggggctgatctcatcatgggctcaggcggcgatggcacagtgggagcttgggctggagcttttgtggacacaggtgttccgatgggca

SEQ ID NO: 394328 - DNA, 473 bp, Oryza sativa
tttcttcttcctctcggccagctgcggggagcatgggctggagcggcggcgggcgggggctggagtggtggcagccggcgggagctgaagcggtggccgccccgatcccatcgccgtgctccacctccagccgggaaggcgatgtcgtccgggagcgccaccccgaggaggatttccgactgcgccgccaccgctgttgacgccgacgacgccgttgccggaggttgcaaagcctccccaaaaccgatagcaacggcgtactggtcatggcgcttgaatgcgatagcaacagctcatgagatctctctccaccgattatcttctcctgtatgtgccgctcgtcgattagttcgtttcagagcttcagactactcacgacgacgatcgccttgccgatctgcctcctgagttccgcgtgctgaaaacgactgccattgatgttaatccattttccttggatcattgtgtgtgct

SEQ ID NO: 394329 - DNA, 525 bp, Oryza sativa
  unsure (1)..(525): unsure at all n locations
actagttctagatcgcgagcggccgcccgagccactacactatccacctcgccgccgccgccgccgccggaaatggccgccgccgcgcgccccctggtgtccgtgaaggccctggagggcgacatggcgacggactcggccggcatccagatgccgcaggtgctccgcgcgccgatccgccccgacgtggtcaccttcacccacaagctcctctcctgcaaccgccgccagccgtacgccgtgtcgcgccgcgcggggcaccagacctccgcggagtcgtggggcacgggccgcgccgtgtcccgcatcccgcgcgttcccggccggcggcacgcaccgcgcggggcagggtcgcgttcggcaacatgtgccgcgggcgggcggcatggttcgcgcccaccaaagatctgtgcgccgctggcaccgntcgcgtcaacatccgcctccgccgcatagccctcgcgtccgcgctcgccgtcaccgcgtccngtcctcgtcctcgcccgcggcaccgcatcggggcgt

SEQ ID NO: 394330 - DNA, 599 bp, Oryza sativa
gctggcttcgcttctctctgacttgttgctcccttcccgaacttcgccattctcgatctccatctcctcctcactctgctcgacgccggcgcccagcaccagcagcctccgctctccatctccgtcgccgccgccctcctcccgccgccggatcaagaaatggaggccactggtgctgaagctacattgtcacaggttacagcagttgatggagaagataaccttttccaagataaggaaagtagggctactgccaaggagcgtggggaggcagctgtttttggtttggaaaacattgttactgcaaatggagccacaagtgctgctgatcttgcacccccaaaagatgttgtggatgagtggcctgaacctaagcaaactcacacgttcttctttgttagaatccgttcatatgaggatcctagcctgaaggcaaaacttgaacaagctgacaaggagtgccagaagaagattcaagctcggtcccatatttttgaggctttgaggaccaagaggagtgaacgatccaatattatatcagagctgaagccattggctgcagagaataaacaatatatgacagtgtgagtggaaaattg

SEQ ID NO: 394331 - DNA, 523 bp, Oryza sativa
agggcgaccgcgtctccctctctctctctctctccgccgccgacgccgagggctccacgagagggaggtgggcggcgcggcccttcgccggagggagcgctctccgccgccgccgctcccgctcccgccggcgcgggagatccgggcgtcgtctctcgggcctttggctttggacggacaagagctgacatggaaccatcctcacagcctcagcctgtgatgggtgttgccactggtgggtcacaagcatatcctcctcctgctgctgcatatccacctcaagccatggttcctggagctcctgctgttgttcctcctggctcacagccatcagcaccattccccactaatccagctcaactcagtgctcagcaccagctagtctaccaacaagcccagcaatttcatcagcagctgcagcaacagcaacagcagcaactgcgtgagttttgggctaaccaaatggaagagattgagcaaacaaccgacttcaagaaccacagcttgccactcgcaaggataa

SEQ ID NO: 394332 - DNA, 530 bp, Oryza sativa
tttttgacggccatggctgctcttccgcggcccgctccctggtcatctctcagaagacagtgggtgtgaggtattcatcaatggacgccgtggtgttggcatgcgcagagcaaacatcgcacactactttgttggacctggactggatgatcggattgtgcatttaacgcagaatgatcgaccagggccgccacctgccactcaatcatcgattgacgctatgcctactgtgatgatgacacagaggcatctcagtggggactcacattgccctgtgctgcaaggacaagttcgagctgggatcagaagcaaggagagatgccatgcaagcatttataccactctgattgcatagctccttggctggaacagctcatattcctgccctgtttgccgatatgagttgccaccacagagccctactggtgctagctgctcgcacacaagatcaaccaaccaaagtcagagttcaagtagcaatgggagaaccaatggacgtcaaaggaagaggaatccgttctcgttcctat

SEQ ID NO: 394333 - DNA, 622 bp, Oryza sativa
gaaggatcagtttggtttctatgttgtacagaaagtactggagacttgtgatgatcagcagcgtgagttgatcctgtcacgagtaaaggttcatttaagtgcactgaagaaatatacatatgggaagcacatagttgcccgggtagaaaaacttgttgctgccggtgagaggaggattgggcttcaggcacaatatccttcataatggcatgaaaatgacaatgtacagctaaccatggctagccagatctaccctgtgtctcctgctttgggctgctacaagccaactttaaaaataaacgtgttgtactaacaagattgtacattttgtagtttttgcttatagtcatgtcaggggtgaggctcagagtttatttacctgatgacgctgcagagaagataggcgttttgtataagtcggttaggtgtaaaaagaggaagaaagtctatattttgcgatgagactgtacaaatctgcgatcctgagagagctaccagctgttcctgtttaggataagattttaatgatctcccatgtttatcactgatgaatgtactcaatactaatgtaattgttccagcttctgaaggcatgtgccttttccacccttgaatccttaac

SEQ ID NO: 394334 - DNA, 779 bp, Oryza sativa
tctttgacgcgtggggcttagaggtccctcaaaatggaacttactttgagtggctgaaaattgtttctagcttagcaactcctgcttacacatctctctctcaagttattggaccgattctacctaatactttccctgctctatcctttgcaaacaccgtcccaggttctacttttgtacaagctcctgttggtatgattcctacttccctatcaatcactggtttcactttcactttttggataaacagagccgttgatgtcagcaatcaaaatatcttctcttggcaagataccaacctccagaatcacatcatattacaagaatctggcacagacagatttactttccgcatcagtaactctacgttcctatcttccttcgatctactttcagtcggaaagaacaggtggacccactggactattatgaacaccaacgtggcttgcgtacaaaccaacacccggccaggagtaacagttacttggcatgagtatgacttacaaacaaccacgctacgacccagtgttagcgcttgtttggaacgtcccactgattttaatcgtcctaacgctattttcgggagggaaggtcaattttctttgggtgatttcagattttacggaagaccaatttccgatgccataaggacttgcatctacaccactggccacacttgcgaagttcaatgattcaatacaacaacttaactctcaacttcaccccaaagcataagtacgtggtactgtaaataatacttcaatccattgttttatgtt

SEQ ID NO: 394335 - DNA, 582 bp, Oryza sativa
ttcactcgtccgcccacgcgtccgcccacgcgtgcgcccttgcgttcgcccacgcgtccgcgctactccaaacttaattttgatttctcgccggagaattcctcctccgcctcccggctcctcccctccgccctcgcttccgcaggcgaactaaaccatggcgacaggtcaaattttctccaaaaccacccaagcgttattctataattataagcaacttccgatccaacggatgcttgattttgacttcctatgtgggagagaaacaccttctgttgctggaataatcaatcctggttctgatgggtttcagaaacttttctttggacaagaagaaattgccattccagttcatcctacaattgaagctgcctgcaatgcacacccaactgctgatgtatttatcaacttttgcatcctttcggagtgctgccgcttcttcaatgtcagctttgaagcagccaacaatcagagttgtagccatcatagcagagggtgttcctgaatcagatacaaacaacttattagttatgcacgtgccaacatcaaggtaatcattggaccagcaacagttggaggaat

SEQ ID NO: 394336 - DNA, 549 bp, Oryza sativa
tcgtcctcctcgcctccctcccctcccctcccctccccgtccggccatggcggcgtcgctgcttctccgagccgcccgccggcgagacctcgcctcgcccctcggaacgttgaccgccaatgctcaatcggcatattctgcgaatatttgttcacaatggggtagttttgcaagagctttcagtgtaaaaccaactggaaacgaggttattggaattgatttgggaacaactaattcttgtgtttctgttatggagggaaagaaccccaaagtgatagagaattcagaaggcaccaggacaacaccatcagttgtggcctttaatcagaagggagagcgacttgttggaactccagccaagcgtcaagcagtgaccaacccacaaaacactttctttggcacaaaacgtctgattgggagacgcttttgaggatccacaaacacagaaagagatgaaatgggtccatacaaaattgtgaggctccaaaggtgatgcttggtggaacacagatggcagcagacttaccagtcagatgcgcattgtttgac

SEQ ID NO: 394337 - DNA, 538 bp, Oryza sativa
cgccaatcgcccatggagtccccaccccaccccctcctcctccttctcacgctcctcgtcgccgccggcgccgcctccgccggcgccgatgacctggtcgccgagctgcaatccctgcggtcccgctccccgtcgggcgtgatccacctcaccgacacctccatcacccgcttcctatccgccccggcgccgcgcccctactccgtgctcgtcttcttcgacgccgcctcgctccactccaagaccgacctccacctcccccagctccgccgcgagttcgccctcctctccggctccttcctcgcccacaaccccgcctccgtcgacctcttcttcgccgacatcgagttctcggagtcgcagcactcgttcgcgcagttcggcgtcaactccctcccccacgtccgcctcgtccgccccgagcacacccggctcgctggctccgagcagatggaccagtcccacttcttccgcctcgccgactccatggtggagttcgtggagtcccgcaccggtccgaggtcggccccatcgtccg

SEQ ID NO: 394338 - DNA, 496 bp, Oryza sativa
tctatatcacatcacactaccactgatgatagtgtgctcttggtgaggcctccaagaagttgcctgaccacacaagcacaaagcaagcactatcaccaaaaggatcagagaagaaactgatatcactatctgatcagtgtagcattgcagcctctcttcttggtaggagtgagctagcacagtgaagagctaattaagccatttgtgtgagcttgcgttgagtgagctctgagctaatatggatgttgagtcaaggcaaggccccaagggtggtgacaccatggctgcctccgaggtctccgtggactggaggggcaggccttgcggctctcgcaagcatggcggcatgaaagcggccgtctttgtgctagggatccaggcgttcgatatgatggctatcgcggcagcggggaacaacctgatcacctacgtcttcaacgagatgcactacccgctgtcaaagtcggacaacatcgtgaccaacttcattggcacc

SEQ ID NO: 394339 - DNA, 222 bp, Oryza sativa
tcttctacaatgagttaggaagttagcagatgaaaaataccaataattagattagcggttgcttggtaggaggtccatgacagtccaaaatgctgagttcaaatgttatgtccccggtttggtaatggctgttgtagctgcagctttttctgtatttctccgtgtaatttgctccaaagagagacaggaacaccgccaattttattagcaaggatgagtttc

SEQ ID NO: 394340 - DNA, 634 bp, Oryza sativa
accgacgcggcgttttttttttgttgttttgtgttgagcggaacacattgggccccacagaatcagtcaatttccaatctctacgtatatgatatctccatacatagagcagtaccgagtgccgactccatctcgcacgagaagcaaatgagcaatcgaccaatgagtttggtgcgggcatggcaatgtcggcaagatcgaccagttgtagcttttccttttttttcagagcttctccaccttggcgggtctcacgacggggttggcgcgggcgatggcgtcgcgcccggcgcccctgtaatcgtagccgcagtcgtgcctgtccgagtagcgatgcgcgccgcagaacacggcaccgcagcggcactcgaaccccatcagccccacgctcctcccgcacgcagcgcacctgctcttcgtcttcgccccgtgccgcggcggcggcggcggcatcgccccctcggccacgggtacgccctccggcgccggcaacaccacctggtcgtgctccgcggactgtgctgcggccgacggcgcggaggcctgggacatcacggtctggcggtagcacttggagcagaggccacgggtgtcggcagagccgaagaagccgcagccgttcgcgcacgggagc

SEQ ID NO: 394341 - DNA, 562 bp, Oryza sativa
gagaaagcttgttgtaatagcatgaagctttgaaggaaaagcttgatcaggagtatcatcagctggcagaaagaaaaagggaattccagcaggaaattgatgcactcgagacacacaatgagcgtatcaaagggtacctgaattcaaagaagggcgagaagcttaatgaactacaggaaaaacatactcagttgcagtctgatctacagaaaagtaaggaaagaaaagaagaaaaatcggcggagttaagcaagaacaaagagctattgaagagccaagatcagttgaaaagaaacattgatgacaaccttaactacaggagaacaaaggatgaagtggaacgccttactcatgaaatagaattacttgaggacaaaatactttccattggcagcctgtctactatagaagcggatcttaagcaacattcacaagaaaaagataggcttctttcagagtataataggtgtcaaggaacgcagtccgtttatcaaagtaatatttcaaaacacaagcttgaacttaaacagacgcagtacaaggatattgagaagcgatactt

SEQ ID NO: 394342 - DNA, 576 bp, Oryza sativa
tgctgttgtttggaacccttgggacaagaaggcaaaagctatgcaagattttggagatggagaatacaaacacatgctttgtgtggagcctgcagctgttgagaagcctattactctgaagccaggtgaagagtggaaaggaagacttgcactctcagctgttccttccagttactgtagtgggcagttagatccattgaaggtccttcaaggttgagaattctcatttctgcgtcttgtacaggagcacctcattgcccttaatatttgatgctgggctggcgcgcgaccttttctttctttgccattttaaatcccccgtgcttcgttctttttttgtacctagaagcgagtagtagggcacctccgaaataacagactgtgccacctgcttcgaccctagagcggatcatctccttggtgaatgaattcgaccagtggacacaagccattcgtgccctggtgatatgattcatcgtccatattccaggaaatattcgccatgctgcataaggtacgtagcattctcagttaatctgtagctatgatcattgcgagcaattgaattacactgct

SEQ ID NO: 394343 - DNA, 730 bp, Oryza sativa
  unsure (1)..(730): unsure at all n locations
gcggacnnnagagnancgtgtgggngcctcnantcgantttntttcccccgccgccttccgctcgtcgcgcatctggcgagcagagcaggggagggggcgccgccgccgccgccgtccttgtgcatcctcatcccggttttgggggtggttctttcccaaggttggatccgcgccccctggctgtcaccgtaatctttcagggttttcgcgaggatgtcgtggtgcacgattgagtctgatcccggtgttttcaccgaattgatccaggagatgcaagtaaaaggtgttcaggtggaagaactttactctcttgatgtggactctattagtgaactgcggccagtttatgggctaatttttctcttcaagtggatggctggggaaaaggatgaacggcctgtcgtcaaagatccaaacccaaaccttttctttgctagccaggtcatccctaatgcatgtgctactcaagctattctgtcaatcctcatgaatcgcccagaaattgacataggtccagaactatccaacttgaaggaattcacaggagcttttgcacctgacatgaagggccttgctattaacaacagtgattctattcgcacagcccataacagttttgccaggcctgagccatttgtctnagatgagcaaagagctgcgggtaaggttgatgaagtgtaccntttcataagctatttaccttttgaaggagtcnctatgagcttgatt

SEQ ID NO: 394344 - DNA, 518 bp, Oryza sativa
tttttctctcttaatttgcaccacgtagctctaagatgtccacgagagtttggtttatccaacttcttttgctggtgatccaactgctcaccgtcctcttactcgttgccgcctccggtagaggctacagctgctatgtatgccaacattgcgatccccataattgtccccacaagaaatgaatctttacatctggtctggtaatctacttgaactcttccgtctttgctttgtcttcagtaatcaaccggagaaaatttttggttgcaaatgttatgagttttgttctcgtttaatgtttcttttaaaagaactttaatatatcagaacttagtcaattggtataacttgcgtgcttcaattttgtatatttggttgaccaaaggaaatggcatctttattaaatgcagttttgatcaaactggccaaacctagctttaatcaataatgggtatattgaaaagtataagattacctgaaaaattaagatacctcttaagattaagattttatgtgct

SEQ ID NO: 394345 - DNA, 504 bp, Oryza sativa
  unsure (1)..(504): unsure at all n locations
ttcttcttctagcgagaaagcaacagcggaggagccaaacgcgagatctttggaggctccgccgcagcggggcaaccgacagattagcggaggagagatggccgcggcggcgccggcgaaggggaggacggagatggaggtcggagcggacggcgtcgccgtcatcaccatctgcaacccgcccgtcaactcgctctccatcgatgtattgctaagcttaaaggaaaactatgctgaagctcttcggaggaatgatgtgaaagctattgttgttacagggaaaggaggaaaattttctggaggatttgatattagttcctttggtagtgttcagggtggcaaagttgaacagccaaaggttggttacatatcaatagatattatcactgataccctagaagctgcaacaaagccatcagtggctgcaattgatggtcttgctcttggtggaggattggaagttgctatggcatgccatgcacgcatttcaactnccacaagtca

SEQ ID NO: 394346 - DNA, 1113 bp, Oryza sativa
gagatgctgagcaggttgcaccaccgaaaccttgtgaaactcattggttactatagtaaccgtgagtcatcacagaacctactgtgctatgagcttgttcctaatggaagcctagaggcttggcttcatggggcattgggagctagccgccccttggactgggacactagaatgaggatagcactagatgctgccaggggattggcataccttcatgaggattctcagccttgcgtaatccacagggatttcaaggcttctaatatattgctcgaggatgactctcatgctaaagtgtctgattttggcttggccaaacaggcaccggaaggttgcacaaattatctctcaacacgtgttatgggaacattcgggtatgtagcacccgagtatgcaatgacaggacacttgcttgtaaaaagcgatgtatatagctatggagttgtcctacttgaactacttactgggaggagccctgtggatatgtcacacccttctggccaggaggatctagtgacatgggccacgcccaattttacgagataaagatacgctagaagaactagctgatccccaagcttggtgcccagtatccaaaagatgattttgtgcgagtatgcacaattgcagccgcctgtgtttcaccggaggcaagccaaaggccaacaatgggcgaggtggtgcagtcactgaagatggtccaacgctctgagttccaggaatccataccaacacctccagcacgacccaatgttaggcagtcctcaaccacctatgaatctgatggcacttcatccatgttctcttctggacccttttcaggcctcagcccctttgagactgagaacatatcgagaacggctttctctgaagatcttcacgaagggcggtaacagtggtggtttgtgaagctgttttgggtagagcctcagagtctctgaccacccatttgaaggctggtggtgcaagtgacctaaccagttttattgggaggtaaatcctgtaaattccatttttattcaccacctgcgaaagaccaaattgttacaagaacattcggtggctttgtatgatggaaatgattttgttccaagttcttttttgctcccataa

SEQ ID NO: 394347 - DNA, 348 bp, Oryza sativa
tgcttctttgttcacctcggaaaagaaaaaagaacagaaagaaagacgatctagagggagccaaagattgcaagatcgatcgcaaggtaacgtacacgtacaggtgagaggaatcgatgccggccgacgcgcgagctgctccgccgtcgggcccgttcccgtacgatacggtcgcttgagcgccgccgtggccaggtcgcacgcctacgactggctcgcgctgctcctcctcgtcgccgtcgacggcctcctcaacgccatcgagccgttccaccggttcgtcggcgccggcatgatgaccgatctcagataccccatgaagcgcaacaccgtccccatctgggccgt

SEQ ID NO: 394348 - DNA, 573 bp, Oryza sativa
gaaacagagaagaacagaagagagcagaacagagcaaagggaatggaatggatcattaagagagagatgatgatgagtgagcagtgagcagctgccgacggaaagaagccatcattaggcaccaaatgcagcatgcacatgcttagcagcatcagctgctgccggccaggggagacaagaaaacagaggagaagaagaagaagaagaggaaagccatcgtcatcatcgtgtcgtgattagaatccggccatgtcgacagcagaagcagccgtgtggaggggccatggcagcagcaacatcacgcggcaaatcctcaagtgcacgaggtggcagctggaggagaccacggacttcatcacatgcccctaccactactactgcgacagcgcctaccccggcgactactcccccgccgtcggcgcgctcgtcgccgccttcgccgcgtactgcctcgtttccgccgccgcattcgccgtactggacatcggcagggccggcggcggcggcgggaggaataggcggaagtacatggtgccgtcgggcccattcttgctgccggtggtgctcctggcg

SEQ ID NO: 394349 - DNA, 518 bp, Oryza sativa
ttcttcttcccccaatatactggcatatccaagggaacggtgagacggtgaaacaaaaagaggatgattcactctctgctgacttcatcaccgtggtgcgacaagattactttgtctaaagaatagagaccgtcctgaatgctcggtaatctcctcaatatcgtctttcagcagtgccaagaccaaatcaactgcaaattgtaggattgtaggattagctcgtgcatgatcatgctgcatccaagccaacaccctccaaaggagcatcgaagcagcctggcttttttttgcccatttgcacgaaacaaggtcttctgcttgtttatcaaggtggtgtgacatgatctgctatgtgtatctgttcctttgattcgaggagcaagtttatgaggctgctctcgctagtttgacggatgtttttttggcttttagtttttgaggtttgtctgttgatgcatgtatattgtacagtctaaatgaatgtaagaagctagatctaccctccttcggtgaggttg

SEQ ID NO: 394350 - DNA, 401 bp, Oryza sativa
  unsure (1)..(401): unsure at all n locations
actcgatcatgctttcagcaactgtggtgaaacttgccctctacatatactgcagaagctcagggaatagcattgtccaggcatatgcaaaggaccattacttcgatgtcgtaaccaatgttgttggtttagtggctgctgtgcttggagataagttcttctggtggattgacccagtaggggctgtgctacttgctgtgtataccattgtgaattggtctggaactgtatacgaaaatgcagttacactggtgggtcagtgtgccccttcagatatgctgcagaaactgacatacctcgccatgaagcacgatccacgtgtgaggcgggttgacacggttcgagcttaccagcttttggagctcctctantttgtccgaggttganatcgagctatctga

SEQ ID NO: 394351 - DNA, 498 bp, Oryza sativa
gtcatctcgatctttttacccaattcttgatcactcttctgggtcgttcttgcacattcttgggccgcgaagcgagcttacctgcaacctgcaagatcgagctagctagctagcaatttatctaggttggtgagagcaggaagagatcgatcaagggctgaggggtgatggagagcatggagggccatggaggagggcggctggtggtgacggagctgtgccacatcaaggagctcgtgaggcagctggagggacacctgggtggctccggctcccccgacctctgcaagcacctggcctggcagatcttctccgtcaccgagcgctccatgagcatgatcaggtccgggcacttcgacgggcaccgcaagcgctccagcgccgctgtcgtcgacggtgacctcgactcggcgactcccaggcccctcagcgacgtcttcgacttgcctttcatggccaccatgaagaggaagacgtccccgggaacaagaggcatcc

SEQ ID NO: 394352 - DNA, 622 bp, Oryza sativa
agcttcctttgcaaaacagcgagctagttcctcctgacaaatatgttcctagtgaggatgcaggtcaagcgcacaatctcgttgcttctgatggggctgaaagcctggtgtctcctttgtcaaactccacggaaccttccatcggtgcttatgactcgcctgacaaactttacggtgtaggtccctctgagggaactccttatgtagaagatacattaaactgcgaaattactttgccagaaaaccagcatctgggtgaaaccttaacgtcagatacaatgctaggttcaggtgatgcttcgcttatccaggaaatctctgacactgcagcttcatctgatgcaaaggacaaagatactgagcagaatcctgaacttcatagaaaaaatgggatttcaccatcaagaatgcctgattatacagaatatggacatgctgatcagttgctttcatttggttcaaatgatgtgtccacagaagcaaataagccaggatacggggtggagactttagcatccaatcaaaatgaaggagcagacgaattagaaaaccaaaacagtttatacgagtctacaacacccgacaaatcttttgcctcttctggaattcctgcttccacact

SEQ ID NO: 394353 - DNA, 325 bp, Oryza sativa
ctccagtctcccctcctccttccttgcgcccccaacctcctccttggaggggcgcggcgccaatgacggcgaccacggctggcgggatccccgctgccggggaggaccgctgcggcgaggacagatccgccccagcggcggcgcggatgtgcacggcgacgacggcgactggtgacggcgacgacggcgacctcgacagaagcggcgacgacggcgaccacgaaggaagtggcgggaccgcgccctcccatcccctcctctcccctctcccagatcggtccgaggggaggaggctgccgccgggaagaacgggcgctgggaggac

SEQ ID NO: 394354 - DNA, 513 bp, Oryza sativa
  unsure (1)..(513): unsure at all n locations
cgcgtaatacgactcactatagggcgaattgggtaccgggccccccctcgaggtcgacccgcccgtcccagggttgtaaattggtagcttcggttgcgagcggccacttccgtcgcaatggcggcagctgcgcgggcggcggcggtggcggtggtggtggtggtggtggtgctcggcgtggaggtggcggctgcgctgaacacggacgggctggcgcttcttgcgctcaagttcgcggtgtcggaggatcccaatggcgcgctctcgacgtggagggacgccgacaacgacccctgcggctggtcgggcgtcacctgcgtcgacggcggtggcggcagggtcgccggcgtggagctcgccaacttctcgctcgcgggctacctcccattcgagctgtcgctgctgtccgagctggtgacgctgtccctgccctacacccggggggtgcaaatccggcgggataaaggtntttaanaagttnngtgntgnantggtnaaaaatttttnttgnna

SEQ ID NO: 394355 - DNA, 537 bp, Oryza sativa
tttattacactactccattaaatcaagcgagggaacatctttaaagctatattcagttaacctaaaactctgtacctcgtgtgtaatggtttttctactaagaagaaaacttctttcacccgaaattaactaagctatgagcagtttgtttagaacttactaacatttgtttcattaaatgtttcaaaactggtcataaaagctacatacattttgcagttaattgtacctggctcttacaaaaaaacttatcgaaggtaaagttaactacctagtcaataaaattttcggggactagcttgaaaattcctctctaaaactcttataaacttagttctttttctatgctgtaaagcagctatgcgttttagcacattttagggagtattattcgtagctttgaaacctatttggagcatattaaaaaacatacctaataaagattacgaaaatataagtttttttatctatataaagaaaaataactcggcaaacttttcctcgactgtttaacaaaaacattgctttatgaatttt

SEQ ID NO: 394356 - DNA, 541 bp, Oryza sativa
ttccgggcttgcacgctccgcctaaagaaaaacacgcacacacttcttctgcttccctccccttgtttccgctccacttcccttccaagcaagaaaaccgaggcttcagcttagctaggaccgaccgatccgatgtgcggcggtgcaatcatctacgactacatcccggcgcgccgccggtttgtgcgcctccgacttctggcccgacgccgacgactccgacccccacacccccgctcccgagaaaccgccgcgcgcgaagagggagcggaagaaccagtaccgcgggatcaggcagcggccgtgggggaagtgggcggcggagatccgcgacccggtgaagggggtgcgcgtctggctcggcacctacccgaccgccgaggccgccgcgcgggcctacgaccgcgccgcgcgccgcataaggggcgccaaggcgaaggtcaacttccccaacgacttcggcgccgcccccgcgccggccgcggcggcggcgaaggccgttcctcgcgtcgcgcccacgccggccgtgctcccgccgccc

SEQ ID NO: 394357 - DNA, 489 bp, Oryza sativa
tgtgtgtctgattcgtgttcgcttctccgactcgactcgatcgactcctccctcctcgccgtggtgcggcggcggcggcggcgaagcgcattggtggtccactccggcggcggggggagtgagaagtcaccagtaaggaggagtagaggatggcggcgagcggaggcagctgcccggcggcgatgaaggcgacgtcgcagggggcgttccagaaggagaacccgctggacttcgcgctgccgctcatcatcctccagatctgcctcgtcgtcgtcgtcacccgcggcctcgcctacctcctccgccccctccgccagccccgcgtcatcgccgagatcatcggtggtatccttcttgggccgtcagcgctgggccggagcagcaagttcttgcacaacgtgttcccgccaaagagcatgaccgtcctggacacgctggccaacctcggcctcctcttcttcctcttcctcgtcggcctcgagctcgaca

SEQ ID NO: 394358 - DNA, 484 bp, Oryza sativa
acaaaaactactacgaacttcttcaaactctacatcctcaagtcgcacggattcgtttttcgttaatttggcaaataggtatggttttgccgatgtctcgcgcgacgagggtggccgggaggctgatgccagagatatcgttgctgagacgggggaggaagtcggcggcgagaggcggcgacgatgcggaggtggaggtgtcggtgccggcgaacttcgtgtgcccgatctcgcttgagatgatgagggacccggtgacggcgccgacggggatcacgtacgatcgggagagcgtggaagggtggctggcgagggggcacgacacgtgttcggtgaccggccggccggtgaggctcgccgacctggtgcccaaccacgcgacgcggcggatgatccaggactggtgcgtggcgaaccgggcgcgcggggtggaacgggtgcccacacccagggtgcccgtcggtgaggacgacgccgaggaggt

SEQ ID NO: 394359 - DNA, 462 bp, Oryza sativa
  unsure (1)..(462): unsure at all n locations
agagagaaaaaaaaggcgaataattccgctgttgcttcgctgccttttgccttcttcctcatcctctccancaccaccgccaccggccgacgcatctccgattcgatttcgccttcccacgaatctatctccccccgagtccccagcgagatggccacgtcgttcgaccgctgggagaaggaccccttcttcccggccgccgaggaggtgcaggagtccgccgaccggatggagtcggtgtacaggaggtggttgcaggagaggaaagaagtaggtggcggcgcggtggagacggcggcggaacgtggtggtggtggatgggggcgagccgctggggatctccgccgcgagctgcacacggcgctcggcaccgccaagtggcagcttgatgagttgcagcgggctattaaatcaaattatagtgttgtgttagctggcaaagatactagagctccgcatgat

SEQ ID NO: 394360 - DNA, 405 bp, Oryza sativa
  unsure (1)..(405): unsure at all n locations
caacaaactaaacctatttcaccaaatcttgaaggtgtttgtggttggtgtccatggccatggctgccatggacgcgaggaagaagaagagcggcggcggcggcggcggcgagccgcttctcggcaagtatgagcttgggcggatgcttgggcgagggacgttcgccaaggtgtacctggcgcgcgcggtggccggcggcgaggcggtggcggtgaaggtgatcgacaaggcggaggtgatgggcacggcgggcatggcgccgcgcgtgctcgggtagggtggcggcgaagccngcggctgcgccacccgcacgtgctggcgcctcacgaggtgctcgccacgcgcgccaggatctacctcgtcatggagctcgccaccggcggcgaccttctgtcgaggctggc

SEQ ID NO: 394361 - DNA, 779 bp, Oryza sativa
cagccgcaaccatgttttctaacagagtgcagaaaacccgatcgtgccgttcttaccaaaaacgttctgctgaatccgctttgtccgtctacattgcggtttttggttcaaattcccccatgccttgttccaattgtttccgtaaccatcgttcctgcgtggttgtttcaggttccaagcgttgtaaggagtgtattgaccgcaaggtctcttgcgacgggaatgactttgcttccgccctcttccgaagtctggaggactacaaaaccctcgagcgcgaggaggacgagcttcaggagaggctcctttcggtgatgcgccgcaagcgtctggccaagagccgggccgacgagcttttcaagcggggttcagcgacgacggaggcttccctcgcctcttcttctactccggtactggagtcccaagcctcaacgggcggtcagccccagtcgtcctctgcggtcgttggtagccctgactggcttgctggcgtcgactggtcgacgattgatccggacttgctggtccagaaaggtcagggttctgtcggtggaactgctcgagcttctccgggcaattcaggttctcgtgaggttcccacgagttagactctggatcttctcgacgtcgtaactctcgtcgtcttctgcttgtacctgtgtttcgagtctggcgtttcttggtgctggttcaagaagggacacgtggaaaaccttagatcgcaaccgcattccttcgggcaatgcaagttcgtagtttgaacttgagatttttttcgt

SEQ ID NO: 394362 - DNA, 322 bp, Oryza sativa
tgtcacttcgtcgctctcgaggccggcgttttaaacgccccccccacacggctcctcgctgccgacacctgtccggttgcctctcctcgcctcgccgcggcgcccgcgtcctcctcaccaacgccagagctccacatcccacctctcctcaggttcccgtctctgatccctcgttgcgttacggggaagcaggcgtggcggtcgctccccgtgcggagttttcgattggttcggttgggtgagtttggtgctggggtgttggggattggttggttggagtttggagatggattttccgggagggagcgggaggcagcagcag

SEQ ID NO: 394363 - DNA, 504 bp, Oryza sativa
ggacaggttctacgtctccaaccgggcgcacacctacctcggcaatccggtggcgaacggcggcggcgaggtgtacccggacttcgtggcgatcgccggaggcttcggcatcccggcggcccgcgtgacgaggaagggcgaggtccgcgccgccgtcgaggagatgatggcggcgccggggccgtacttgctggacgtcgtcgtgcctcaccaggagcacgtgcagccgatgatccccagcaatggcgctttcaaggacattatcgtcgacggtggtggtcgccggacatgatcctgatttgggacgaacacctagcttacgatttgtctttattatgttcaaagatgtgagcccttaagagactttgattttagtacttttgccctgatatgtgctcttgtagttattatcttggataaaaagctggtaatttaggccaatgtgttgtgttggtcctaactcctaaatatcaataaatcagattggcaaatggtttatgcctc

SEQ ID NO: 394364 - DNA, 459 bp, Oryza sativa
ttcgattctctatccggcgagcagggggacgccgtcgtcctgctgtttccgccgcatcctggtttgggaggttcaactgagcccccatgtcgcaggagaggagccagtcgcagagcccccggtcgccggcgtcggcggctggggtgccgttcctgtcgatctccgtcacagatcctgtgaagatgggtaccggagtccaggcctacatctcctatcgcgtcatcaccaagaccaacctgcctgactttgaggggcaagagaaaattgttatccggcgctatagtgactctgagtggttgcatgatcgtcttgctgagaagtacaaaggcatttttatacccccccttccagagaagaatgctggtgaaaaattccgggttagcaaagagttcattgaattaccggcgtaagccctggatctatttggcaatagaatagcttcacattctgaactcaagc

SEQ ID NO: 394365 - DNA, 1186 bp, Oryza sativa
  unsure (1)..(1186): unsure at all n locations
gatccagtgggaaaaacagcggctttcctggcttctgaacggggacacttgggccttgcagcctatctttcagaagtgtcactaactagttatcttgcgtcgctcactatacaagagagtgatacttcaaaaggatcagctgcagctgaagcagaaagagcagtagagagcatatcccagaggaatgcccagctgcatggtggtacagaagatgagctctcgttaaaggactctttggcagccgtgagaaatgcagctcaagcagcggctcgaattcagaacgctttccgtgccttctctttcaggaagagacaacaaaagactgctcgacttaaggatgagtatgggatgacccaagaagatatagatgaacttgcagctgcatcaaggtcatattaccaatctcttcttccaaatggtcagttttatgataaagcagctgtctcaattcagaagaaattcaaaggttggaaaggacgaagacattttctcaacatgcgcaggaatgcagttaaaatacaggctcatgtaagaggccatcaagtgagaaagaaatacaagactttcgtcagcactgtcagtgtgctagagaaagtgatactgaggtggcgtcggaaaggacatggtctacgtggcttccgacctgagcaaacagcaatggctgaagcagaagaggatgccgaggatgatgatgatgacgacttcaatgatgatgaagcagtcaaagtgttccnccgacagaaggttgatgaatctgtcaaggaggctatgtcaagagtactgtccatggtggactctcctgaagcaaggatgcaatatcgtcgaatgcttgaggaatttcgacaagccactgctgaatagggtgcatcagatgaagcggcatcaacactcgacagtgatttactaacaagaatcgacgacttcatgcactgaaacaatgcatcagacaaggggcgatcacggagctgtctacagttaattaggaaatagatagtctgcagcctaatttatgacctgatagtgttccgtttgtacagtctttgcctgatggatctatctaatgttctgagtaaattattgctatttaggaacactttacatatgtaattcgaggggaaataatataatgttctgagtacattattgttgcttaannnnnnnnnnnnnnnnnnnnnnnnnnnnnnnn

SEQ ID NO: 394366 - DNA, 1366 bp, Oryza sativa
gttgaaactctgaaagcagcagcagatacaggaggagataagataagtaaattaattggaagaaagaaatcagtggggaggaggctatagaagggatctttcatgcgaggaaagcgcctttctttgcgtttttagtggggagagcgtgtgagcattggtgtggggggagaagaagaagatgggaagagcggatgcgccatggctgccgcttctgctcctgtgctcctcctgctgcttctgcatttggccccagaagcaaatcttggtcgctgcagacaccgaccctaatgatgttactgtcctcaatacgctcttcactagcctgaattctccggggcagctcaaaggttggcaggcaagtggtggagacccttgtggccaatcatggcagggtatcacgtgctcaggatcatcagttactgcaatcaaattaccaagcttggggctctccggtaatttggcgtacaatatgaataccatgggttcattgattgagatcgatatgagccaaaacaaccttggtggtggccaacagatacagtacaatcttcccactaataagcttgagaggctcaatctcgcaggaaaccagttcactggaaatttaccctactcgattttctcgatgtctaatcttaagtatttaaatctaaatcataaccaattgcaaggaaatataactgatgtattttccagcctctatagcttgacaacactggatctttcctttaattctcttgctggtgacctaccacaagggttcacatcattgtcaagcctgaagaaattatatctgcagaacaatcaatttactggttatatcaatgtccttgctaatctcccccttgatgatctgaatgttgcaaacaatcatttcactggctggattcctagtcaacttaagaagataaacaatctacaaactgacggaaattcttggagtaatggaccagcaccaccaccttcaccgtattcagctccacctccaccaaaccgtccaaacagcccaggtcaaaacaatggtggttcaagttctggtggaagctctgggataggtggtggaggtgtagcaggcattatcatatcattgctggtagttggagcagtcgttgcattctttgcgataagaagaagaaaacgcagagcggcattggaagaacattttgaacagcaccagccattcacttggttcccttcaaacgaagttaaagacatgaagcctattgaagagtctactacaatagatgtagagtctttgccatcccctgcttcatttagtctgaagccaccccccaagattgaacgccacaagtctttcgatgatgatgatttatcaaacaagcctgtcttgaagaaaaccaatgtg

SEQ ID NO: 394367 - DNA, 928 bp, Oryza sativa
gtgcgggcacgactggctatagatagatccatggggtgggcggtcgcgctgcacggcggcgccggggacatcccgcgctcgctgccgcccgaccgcagggagccccgcctcgccacgctccgccgctgcctcgacctcgccaccgccgcgctccgttccggccgcgctgccctcgacgtcgtcgagctcgtcgtgagggagctggagaactgcccgcactacaacgccggcgtgggctccgtgctcaccgccgacggcaccgtcgagatggaggccgccgtcatggacggcaacaccttgcgctgcggcgccgtctccggactctccaccgtcgtcaacgccgtctccctcgccaggctcgtcatggagaagacgccgcacatctacctcgccttcgatggcgccgaggccctcgccagggagcagggagtggagacttaagatccaagccactttattacggaggcaaacaaagagaggctcagacaagcaaaagaagccaacagggtgcaggtggattacacccaaccaattcccaaggacgacaacagccgggtcggcacggtgggctgcgtggccatcgactccgccggcaacctcgcgacggcgacgtccaccggcgggctggtgaacaagatggccggcaggatcggcgacacgccggtgatcggcgccgggacgtacgccaacgcgctgtgcgccgtgtcggccacgggcgtgggcgaggccatcatccggcacacggtggcgcgcgacgtcgcggccctgctggagcacgccccgccggccggcctctccctgggggacgccgccgcgcgcgtcgtggccggcgtgccgccgggcaaggtcgggctggtggccgtgtcggccgccggcgaggtggccatggcgtacaacaccaccggcatgttcagggcgtgcgccacgg

SEQ ID NO: 394368 - DNA, 463 bp, Oryza sativa
  unsure (1)..(463): unsure at all n locations
ttcatgcgtccgcccacgcgtccgcaggaggaggaggaggacgcggcgcccgcgagtggggtgctggatccgcatcccgcgccggctcggcggcggctgcatgtcgtcgcgctccaaggtcgactcctccaccaccaccagcggcggcggcggcggcggcagcgctcgcgtcggcggcgaaagcaaatcagcgaatgatggttgtcgagaccattcagttcaaccaatggcctctggttccacaacatccaggtaacactggaagcatctcaccttcgtccatagtcggagaggaacttaaactagctttccaactccgtaggtttacatttaatgaacttaagtgtgccacaagaaacttccggcctgagagtctccttggtgaaggaggttttngctgtgtctttaaaggttggattnaggagaacggaatgctccgtaaaacctggcacagattaacggt

SEQ ID NO: 394369 - DNA, 312 bp, Oryza sativa
atcgtcacgcgtccgcccacgcgtccgaccacacgtcacgcttccacctccacctccacctcactgtcgatctcctcccgcttcgatccatccatccatcgccatggcggcggagcgcgtggtggtcgacgagtgccgcggtgtgctgttcgtgtacagcgacggcgccgtggagcgcagggccgcgcccggcgttcgcgacgccggtgcgggacgacgggagcgtggagcggaaggacgcggtgttcgacgcggcgcgcgggctcggcgtccgcctgtaccggccgcgggagcgcggcggcgggcggctgc

SEQ ID NO: 394370 - DNA, 493 bp, Oryza sativa
ctgtgctcccggacgtctgttgctttggttttccacagtcaatcaaccacctttggagaccaagctctcgcagcagcgcccagttgcagcaccaagactccttccctaaaaggtccccactccctttttcaaaacaatcagcaaagatgtcttgcacagcaggaggacagatgtacaacgagaccctgatggaggtggagcacacccctcccgtccacaagcgcatcctggacatcatgcctggtgtgcctggtggtggtcgcccgcatcatggtgggccagccctttgacaccatcaagacacgcctgcaggcgctgggcaagggcacaatcggtgctgccggcatgcccccggagatggtctacacaagcggcatggactgcgtcaggaaagatcgttcaagggctgagggcccccttctccctgtacaagggcacttgtcgcccccctgctgggcaacatggtgctgctgggcaattcactttcccacat

SEQ ID NO: 394371 - DNA, 584 bp, Oryza sativa
ccggagagcgagctaaaaaaaatcgccgcagaaaaggagagaagagaaaaaaaactttgggcgagaggagaggaggaggaggaggaggaagaaggcgcaggaataggaagaatatctccagcaagactttcatctgcttatcatcagtatgtccatcgaagagagaacattaagtttgataaacaagaccactgcgttaaatccaaatgcacaagaatttgtaccttcatccctcagatctatcaatgatgtttcaaatagatcagacacatccaggatttctgtatcaggatcctccaaagacactattgcagatcaacaagatcctgttataccaagtaaccctgatgaagaagcacatcggtactggcaagaacagcttccagatgatattacccctgatttcaaagttctgggacaagatgagatgcctggacctgataatatttcactcactgggcttgtcaataaatgatagcattggtgcttcactattttctccaaaccagacatcgaatttgcaacaccgtgcttctccttgttattagggacactctgagcacacgatcaaagatcgagtttcc

SEQ ID NO: 394372 - DNA, 614 bp, Oryza sativa
  unsure (1)..(614): unsure at all n locations
ccacaccactctccaaatccatccatcgatcgagaattcctcttctccctcttcttgttcttcttctcctctctgaatttaacaagaaatcaagaactaggtgtttgttttgactaacaagaactcggtcgaacactctgcgtgcgtgtttgtttgtgtgtgtcatgtgctctgggccgcgcaagccgtccacaccgccgctgccgcagcagcagaaggaggcgacggtgatggcggcgtccttgcttcttgagctggcggcagcggacgacgtggcggcggtgaggagggtcgtggaggaggagaaggtgtctcttggcgtggctgggttgtggtatgggccttcggcgagcggcgtggcgaggctcgggatggagcggaggacggcggcgatggtggcggcgctgttacgggagcacgggggtgcttgggtatgtcgtggcggcagcgccggcggaggccgcgcgcgcgttcgggagacggatggggccacgccgctgcanatggcggctgccggtggcgcggcgaacgcggtcgcggccacgcgcctgttngctcgccgcggggggcgtcggtcgacgcgctctcggcntcggggctccgcgccggtgacc

SEQ ID NO: 394373 - DNA, 506 bp, Oryza sativa
gggctggatcacatcatggtgtctacgccggtgagaagggacgtgctgggtttgtcctatcctccctctgctggtgctccctcctcagcgatggaacagtacatggcacctattgtgcagttcttggccaagattggggctccacttctggccagtgtgttcccttactttacttacgtgcacaatcaggaaggcatcgatatcgattacgcccttttcacctccccgggaactgtggtgcaggaccgtgaacatagctatcagaacctcttcgatgccacttgtggatgctctgtattcggcgatggagaaggtgggtggctcaaccgtcagaatagttgtctcagatagcggctggccatcggctggggctccttgcagcgaccaaagatatggctagggcctacgtccagaacctgatttaccctgtgagcaaagggacaccccagagggcccgtacctattgagacatacatttttgccatgtccatgagaacgagaaaacc

SEQ ID NO: 394374 - DNA, 474 bp, Oryza sativa
ttctcttttcttcttcatcgcaagctagtaagagtgaatcgaagatgatgaagaagctggtgaggttgctgatcatggtggaggtggtggccatggcggcggcgccgcggcgagcggcggcgctgagcatggactactacgggatgagctgcccgttcgcggagatggtggtgaggagcgtggtgagccaggcgctgatgggcgacccgtcgctcgccgccagcctcctccgcctccacttccatgactgcttcgtccagggctgcgacgcctccgtcctcctcgactccaccccggacaacaccgccgagaaggacgcgctcgccaacaagagcctccgcggcttcgaggtcatcgaccgcatcaaggacgccctcgagtcgcggtgccccggcgtcgtctactgcgccgacgtgctcgccctcgccgtgcgcgacgccgtcatcatggcggggggcccgtactacggcgtgg

SEQ ID NO: 394375 - DNA, 394 bp, Oryza sativa
gggaagctaagcgttccttgcttaactatttctatacccaagtgggcaggaaagatgctaagcagcttgcgcaactccttgatgaggatcctgctcttatggagcgaaggcagcagtgctttaagaggcttgagttatacaagtctgccagggatgagatcgatgctgtgtcatggtcacgttaaaggtaacattctgtttgctttgcaatttgacatgcagaattaatagccagttgatctgcacttctcgtgtcaaacatttgagattgattactaattgttgtgctatatatgagtcttgattgcaatgtgttttcataatatgtatgcagacttttaagcacaagcatgaatgaagtctgtctgtatatttgtttaaaaaaaaaaaaaaa

SEQ ID NO: 394376 - DNA, 331 bp, Oryza sativa
tcgtttataagttactctattacaggacgtgccatatcttagaactacgaatctggacatgtctttgtccaaaatcgtagtactaggatatgccacatctcgtactaaattaacttattatgagacggagggagtgtctacttgttcccttactgtgatcaatatacatggcgggccttatctgctctgccatatattgataagctttctgagcgcattcagtggtttaaactttggtgtacaaaataattaggtacaaacatcgtcacatgtaatctttaatcgagtcaagagagaactgctcagcccagtcacatggatttcttgcaat

SEQ ID NO: 394377 - DNA, 690 bp, Oryza sativa
  unsure (1)..(690): unsure at all n locations
gtcgtcactctcactctcctctctctcctctctctctctctctcactctctctctctctctcctctggagactgcagttttacagctagattctactagaagcccaccaaaagcacaagcctctgcggcggcggcggcggcggcgtgctccgggaagcgagccccgtggtggcggcggtggtgcggagcacggcacggcatctctctctcgcgagcgcgcgagcgagcgaacgctagatctgcgaacgcggggtttggttccttcttcttccgcgatcgcttcgggttgatctggctgatgctgcttcggcgcacgccgccctgattaattgctggaggggagagagagagagagagtttgcgtcgatgcggatggcagcgggagggaggtgctgcttccggagaggggctcccgcggcggtgctcgtgctgccgctgctgctgctgatcgccgcggcgcanttgccccggcggcgctacgcggccaccgtcgccnccgatgttgctgctataaatggactgtatgttgcacttggatcaccggctcttcctaaatggacttcgaatggtngtgacccctgtggtgatggttggcagggcgttaattttcaatgctgcaaattttgaaggcangtaggcagcctggggaacttaattcaataaccactataaatttagcacacaatattn

SEQ ID NO: 394378 - DNA, 681 bp, Oryza sativa
  unsure (1)..(681): unsure at all n locations
cagcaaagcaggcagacaacacaaaagaacaagaaagaggagtgggttggctaaagggtgaagaaaccaaataagaaaaagataaaaaggggaaaaggtcgcccagcggctgaaaccgncctgcattgctcctcgctgctttggattcgcacttcgcagcttgagaccgggagcaggacgtgcggcggaatgggttccggatccggatctttcctcaaggtggtggtaaagaacttggatgttcttgcggggcctatagtttcacttgcttatccactatatgcatctgtttcgagcgatagaaacaaaatctgctgtagatgatcagcaatggctcacatactgggtgttgtactcgttttatcactctattttgagctcacttttttctccggtacttgattggcttcctttcatggtcttatgctaaattgtttttcaattgctggttggtcttgccctacttcaatggtgctgtacatgtttatgaacactttgtgaggccaatggttgtcaaccagcaaaaagttaatatttggtacatcccaagaaaggatgagtcagattgaccctatgatgtgatatcagctgtgccaagataccatgaacaaaatggatcaagagcgtttgaaagtctgggtaacaagtttaaggcttaaacacaaggcgctccattctgga

SEQ ID NO: 394379 - DNA, 484 bp, Oryza sativa
tcacgaccgatcaatcaatcagttcggcttagttagttgccaccttagctaagctagctagtatagctctagcttcttcttgctcgctcgcatgggtctcgaggtgctcatggcgagagaccagctgctgcagcgcccgaggtggcggtacgagcggctgcgcggcgacggcgacggcgacggcgaggaggcggcggcgggggtttgcagggtgaggcggcagctgcggctgaggaggagagtggtggccgccggcgccgccgggaggatggcgcgcggcggcggcggcggcggcggcgggaggaagaaggtgaggctgatgcggctggtgttcctgctcccggcgcggcgggtggccgcgcttgtcgccgagctcgtgcgccggctggccgtcgcagctgcggcgagcgtcgttctacacgcggaggccgagtgcccaaccattgtcttcttctccccagtggggccctcccgttctttccac

SEQ ID NO: 394380 - DNA, 475 bp, Oryza sativa
  unsure (1)..(475): unsure at all n locations
gacgccctccaccgcttcggaatcttcctccccaaccacacgaaaaccaaaaaaaactcaccttcaccctcgccgtcgcggcgccccccaaaaaaattcacccctttttccccacgctccggtggctccacgccgccccgcccgccgccgcgaccacccgttccaccggcgaatccgcggatttaatctcccacagctccccgtgagatcacaaagaccgggcgggcgtgggctgtgggctgggatggtgggcgacctctcctccctcctcgccgccgcctcctccgcctcccccgtcgtcctcgcgccatcaaaggagctccatggcgtgcacttgccgatgccgctccaggggaagaggccgccgctgcagccgcaggacgctgccgtccacatcgaggccgtcgtcgtcgtcgtcgtcgtcgnctttcaggggcaggtgatggtgcccggccacgcgcatgccggcgcttcc

SEQ ID NO: 394381 - DNA, 364 bp, Oryza sativa
  unsure (1)..(364): unsure at all n locations
gactagttctagatcgcngtgaattgcgcgatcgatggcttccttcctcttctcgcgcgggttatttcttccttcccctttccccctccgccgcgggtgggctgggctggtaagtcggtaggtaagggatccatcggtttcgatctcacctggttcgctgcccttttgttgatttgatcatcaggtggtgctttgatcggttcggtccggtttctagtttcggtgactgcttgatccgttcggttttgggggtctagtttcggcgattcgtctcttgctgttgcgttagttctctcaacggcccttctttcgattgggtttatggctaatcgtgattttgttggttctggcaatactgatttcg

SEQ ID NO: 394382 - DNA, 520 bp, Oryza sativa
  unsure (1)..(520): unsure at all n locations
atcgcgagcggccgcctaanttttttttctcttctaaaaattaacatgttgctgaatgagaatccatggatgcaatgtacagacagatatacagatcagcaacagctagtcttcagttcttccttccacagttccctccctcctgtcctgacctcaagaagacaagaaacatcaccatctcatactcctccccccaccttctcccacctatctctcatagaacaagctcactttggttttaagtaaacacatacaaatgtgaaccccccagaagaacagcaagccaacaaattaaagaacaaaaccacaaaagaccacctaaaaatcttattgttctcttctatgatgcaacatgttcaaatggtggtggtatggacctgtggaccttggttggtgatcatatctatagagccaaatatctcgaaccttaggcaagattcaggggagctcttgaccttgaatcggtaaagaagttgcttcttcttctttggatgctncgttgtcgcctttgaggacgttt

SEQ ID NO: 394383 - DNA, 515 bp, Oryza sativa
  unsure (1)..(515): unsure at all n locations
cgattgctccatggtgtgcggcgacagcgcggcggtgtcggcggtggaggggaggctgtcggagctctccaccaacagcgacgagaaggggctccccaggaggggcaagtctttatcaggaaggacagttaaacaccgcacagattcaactcgttgcagagccatccagaggtgtatgaaccatgtgatgattcctttgcacttgtcgatgcgcttctttctgacagagcacagcttttgacgctaaagccaagattatgcatggagataggatgtggcagtggctatgttatcacatctctagcaatcatgctcaggcagttaggctcaggaacccagtacctcgctactgatatcaatcaacatgctgtggagacaactcaagcaacccttgaagcccatggcgtccatgcagacgtgattgctactgatattgtgtcaggtcttgagaaacgcctgcatggtttngttgacgttgttgttgtgacccctccttatgtacccacacctgggga

SEQ ID NO: 394384 - DNA, 401 bp, Oryza sativa
  unsure (1)..(401): unsure at all n locations
cacctctcctctctcggtgcagatcccggccggagctgcggtcggagggcggtggcggcggcagctaccggcgatggcagaggcggctcaaggcggtggatgcgcggagggtggaaccagcggcggctcccctcctcccagatccggtgtagacggctgcggaggatggaggcggcgtggagggtggacacggcggcggctccgccgggagggcagtggcggcggccgtctcctccagatctggcgccatcggacccaaaccctatcctgcccaacgctcggccgccgcctcacccacacggggcgcaggacttcccccgccaccttacgacctacccaactcgtcaacgtcgtcgtacgacctacanccgacgacgacgagtattncgtactaccccgtt

SEQ ID NO: 394385 - DNA, 308 bp, Oryza sativa
ctcctcctccgcatcgcatcgcatcgcatcccaccccccacgcggagagaacatcgccagcaacggcgcttctccccctccccttctccccatcccatccaatccatccatggcggaatgctccattgatcacgaccagtagcttcctacaaccccagatcgggaggaggaagaagaagaagcaagaagcaagaagaaggagacgccgtcaatggggagctacgcgtcacaagtacttgcatgtgcttcacccgcaagttccgctcgccggcggccgacccgcccgcggacgtccgcgcccacttcct

SEQ ID NO: 394386 - DNA, 400 bp, Oryza sativa
  unsure (1)..(400): unsure at all n locations
tcgtaataatcagtaggtcgtcccagggcagggccttgctccgatccccaatccgtccctcgagcgagcagaggcgccgccgtcgctcgtcctgctgcttccgccgccaccgccgccgccgcctgcgccgatccccatccatcccgcgagcgagcatcctggattaggatgagttcgaagaaggttccattccaccgacataaggagaacgaagaggcgaggaagaagagagagcaagatgaagcggcacgtgtgtacgaggaatttgtggagtcattcaagggtgatagcacatctgggtcgaagtttgtccgaggaggtgtgattgatcccaatgcccaagctgaggattgattccgaagtggaaagtccaaagatggggggtctgttccaaagangg

SEQ ID NO: 394387 - DNA, 780 bp, Oryza sativa
  unsure (1)..(780): unsure at all n locations
ttggttttggaaccccactggatgagaagtttctcttattgcaacgaaggaaagatgttgcatttttttttcttttgggcgaggaaaccgtgtcagctcagttctcagctagttacagaatgtgtcacaanaaagcaaaaataaacangattacagaatgtacaannaatttccttatgagtcacacaaggttttacctcctacacanncccttagttgagtacaccccttcacccttttccttgtcaagcagagcaacctatgccggcttttcgttgtcttgaaatgctcgaaccactatctgcggtagagctatcttcttacctcatcaacacagtttctacctgcttcctgcaggagatatcttgaaggcccaactaaggaaccccccatatcttgaatatgcgaatgcacttcagctgaagatgaataagatgggacatgaaatgcagtctcacaaaaggatcttttccttgataccggtgagtttgctacagagctcgttgcttccatctttgaggacctgatcatatcaacacaaatagaacttctatttgaggccttcaatacctttgactttaaattatgatccttgctgctagcatggggcactctttgatcaatgggcaaagcacatggagatgtttccctcaaaacaacttttgggatgtcaaaagtcttgatattgctcaagttgtcctccacaacctcaccatctaattctgcaagtttctcagctgtatccaattaaccacatcgtgaagatggaatcatctaaac

SEQ ID NO: 394388 - DNA, 396 bp, Oryza sativa
ggcgccctttttttttttgtttttactgaaatatggatataccacatagataagtgccaaaaggtgagaattcagtagcttaacaaattgcacgattctctcttaatctgattaccacaatgagtgcaactgtgcgaatcaccatggttaacaattgagaatgaattcagaagagtatcgactctacacagtatctaagagacgccaccacatgagttctggtacgcggaccgtcatttcactcgtcaatagtgttttttatcagaggaaaaacgttacagcatagcaaatactatgcatgaaagaagtaccacatatcggagaggatgttgccctcgtgtgtgaagtatcggcctgtacctgtatactagcataccaatactcttttcaaagaaa

SEQ ID NO: 394389 - DNA, 556 bp, Oryza sativa
tttgttttatcaaatttggaagaacaggtgctcatttgaagcagtagttatttacaggttacaagccaatcgtgtggtaaaagttactccaatgtctaagaacagaagaatttttctgttcttctaaactgcaccctctagtgtacaaatacacaacccatctgtacagcgctgcaagcacctgtagctcctgcagcctcttgcgataccttgtgttaatacgatgaatcttcacagccttctccaagccaatctatagcatcaaaatataggtactcaaattcttccgcaaagttcatgccacctagcactatacttgagacatcagtaattggaatacagtacatggagatgccactcaattatccaggcaaaccccacagctgcgtgcacaaaactgttgtttgccagttgtagcatcagcattctagctctatgtactgctgaattgcacaggttaacaaggctgcagtactgcaccagactgtttaaaatgttgcagatgcagcatcagcaaaactggtatatgaagatgattgttcagtttctctgggct

SEQ ID NO: 394390 - DNA, 424 bp, Oryza sativa
tttttttttttttttttggcccaagaaagatcctgcaatatgcaaataccattacatggtagcttcttttttacacgctgtcttaacagcttttgcatacataggacgacatagcggtatatgtacatatacggatgcacgtatgtacatacactgatgcaaaatgacccaaagaacgcaaatttaatttactagtaccatcatatctctctctagtcctactctgctgtagcgtggggtaattatcaaacgtaatacgtactatgaacacacaccaagccaagccccacgtcactcgcactggctgatcgattggatcaatactactactaatttatgctatatgcgatggtcgaggggttgtggcgttgttcatgcgttgccggtggcgatccggggcgacgtggaactgcggcgcgtattc

SEQ ID NO: 394391 - DNA, 383 bp, Oryza sativa
tgcttctcatctcacctgctcgcaatggcgagcaagaagagctcgacgcaggcgtctcccatggccgccgccgccgccagccttctcctcggtctcctcctcgtcctccccgtgccagccgtctcgtcgtcggacgcggaggagggcggtggtctcccggttccgggagtacctccgcatcgacacggcgcagccggcgccggactacgccgcggcggtggcgttcctccgggggcagcgccggcgccgcggggctcgaggcgcgcacgctcgagctcgtcgccggcaagcccctgctgctgctccggtggcccgggcggcgcccgcgactcccttcgctgcattctaaacttcacaccgacgttttgctgtcggagcccgta

SEQ ID NO: 394392 - DNA, 499 bp, Oryza sativa
gcggccgcctccctcgccgccgccgggagtagcgcccctccagcgccgggtccatgatccggatgagccggagcgggtcgcgcaggcacggccgcgcgtactccacgaggctctgctccctgttcggcccgcgtcttgtcgacggcgcgcccccccgtcaggatctccaggagcaccacgccgaagctgtacacgtcgctcttcgccgtcaggtggccggtcatgatgtactccggcgcggcgtagccatgggtgcccatcacgcgcgtcgacacgtgggtgtcgtccccctccggcccgtccttggccagcccgaagtccgaacagcttcgccttgtaatccgaatcgagcaggatgttggaggccttgaagtcacggtagatgaccggcttctctgcgtcgtggaggaacgccaaacccttcgcggcgccaaccgcgatgtttaatcgggtcgaccacggcagcactgcaggaatctgtttgaagaggtggttctcg

SEQ ID NO: 394393 - DNA, 540 bp, Oryza sativa
cttcgtttcacaaaaattcatagctcacccaactctccctccccttcctctcgccggagtcgccgcggccctagccatcgaccggcggcggcggcggcggcggtagccgtgggatggacgaattcggcggcggatccgtcgggccgttctccaagaagccgaggcacctgtcccggtcgctgacgtaccaccaccaccaccacccctaccagggccaggggcgctcgccgtcgttcaacgcgcggcgccagcatcatccgcagcagcaggaccacgcggtggctgctgtacacgacgtcgctcccgcggggtgcgccgcacgttcgcggactgcgccgcggtgcgcgccgtgctgcgcgggctccgggtcggcggtggacgagcgggcacgtgtccatggacgcctcgctgcggcgggagctccagtcgctgctcccggcgcggggccgccccttctccctcccgcagctcctcgtcggggcccgccttcgtggcgggagccgacgaggtgcggcagctgcacgaggccggcgagctgcg

SEQ ID NO: 394394 - DNA, 655 bp, Oryza sativa
  unsure (1)..(655): unsure at all n locations
tttttttttttnttttttnatgcataatcctacttgtttgcatttgttagcaactcgacgatttaatgatggttctgctttggtacctcgttgatgccttacaaatgtcaaatcaaatacaacctgacagttttcaaactgacaccagcccaggtgaaaaggaaaacaacgaagaaaactgcaccgattctaagaaagaaccgaatccaacacactataaaaaccccagtgaggggagagaaaagaaatcccgggttagtctactgagccagcagcatctcttggacggttctgtacagatgtaaaagctgttctatgcacgcaggcaattggtacctttgttatatgcaaaaccataatggctagtgaaatacgatgctaaggaatgctcccctttcaagattgatgcgtagctgccctccaattcttgtgacaaactgaagtgtccagctgatgggtttttggaagaacttgacctcataagcgcaggaggtaacccagagaagtaccaagaagtgccacataaaccacaaacagcaaggggaaaccaacttgattccttggtgttcccttctttcgtagaaacatctagccaagccatgcatcagaaagtagacatgtccgganncgtgggcggangcgtggggcgactcnt

SEQ ID NO: 394395 - DNA, 532 bp, Oryza sativa
ttttttttttttttttatactaaaacaaccatttcattcattttactgtttatgttacaacctacgaattcttacaacatttcaatactagcaactatacaactctccaatgcaaaggaatctcgtccaactctccaatccgaagttccaagcgtgtcaaagcttcaccgtctcagcagagcatcctacaagggtttccagaacggaaaaggaggacatgaaagtatgaaacaacacacacgctattcttgtgagttgtgcctatttaaaaaaggaaaaaaaaacacctatacggttggagggtccacggatgttgaactctttcgaagaaacccaagtacgtgggctttcttgtgtgtccggctgatggaacccaaaaagttagtttgtatcttcacagagtgttgataaaggagtaacaccaacgtttgtctttgatcttctgctttcttgaattcagtcttcgtcctttactaaatagcactccattctacattcaggggtagttattccattaaccaagcttcaatgc

SEQ ID NO: 394396 - DNA, 711 bp, Oryza sativa
agagggcacatctcagggaaatctttacagttgcattgtaaacattgagtttgtacatgaatccatattacagtaaaaaaaaagctactattgcacaatgctgcaatattcattgcagtgcaacaaactgatgtcatgatagtaacaagcagataagaaattctgcaaccagaattcagagagcttcacttatatttgataaaatgaagcatcagaagcacaacgcgcacatattctcaagccttgcaagataagtactaatttacatccccattttgttttcatttcctggggttctccctaacagcaaaccgagtaagacattacccattatctaaaaagtaagacattaccactactttctcagtgatattctacatgaaaaaagatgacaattttttcttgcagtctataaccacttgagacctcaactccgacccggctgagattgattcccttgttcaacataagggccgtcacgcaaagtcctcttccaccacacctccaaaggccttctgcagattgggggcagctatccccaaccttcaagaagctcccggagccatggaaagcaatatcgtctggctgatcctcgagcgggagtgtcaagatagtacgcccgatcccttcctcgacaactttgcggtcaaatgacctggcacgccatgctgtaaccagttgtagtccatcccatgcagaggctgcagccag

SEQ ID NO: 394397 - DNA, 689 bp, Oryza sativa
gctgattgatttcgccagggagaaggtcgggggcgccgcggcggaagtgcggctcatggccaccgccgggctgcggctgcaggaggggcgcctccaggaggccatcctgtcgtcctgcagggacgtgctcagggcttccggattccggttcgaggactcttgggccgaggtgatcccaggctctgatgagggtatctatgcttgggttgcggcaaactatgctcttggcacacttggaggggatccacacaaaaccattggaataattgaacttgggggcgcctcagcacagctgacatttgtttctgatgaagtacttcctccggaactgtcaagaaatttcacttttggtggaacaacatatactctctatagcaacagctttctaaactttggacaaaatgctgcacaagaatccttccgtgaaatactgcggtcaaaagactccaaaaatggtacacttgttgatccatgtgctcctaaaggatattctcgcatcaaagaagtaatatcaagaccaagcagtgcttcaaaatcaaaattagagaatcaatttgctgatagtgggggatggagactttacagtgtgcagatcttcttctttggcactgctgaaaaaaaggcaacgaagagtgccgatatcaacaatgccaacttggaccaacttttgtacctcggccgcgaccacg

SEQ ID NO: 394398 - DNA, 545 bp, Oryza sativa
  unsure (1)..(545): unsure at all n locations
nnnnnnnnnnnnnnnnnnnnnnnnccaatccaagtcagagtaattatttctgataattaattaggaatactcgagaaggggcgttatggttcacatcctctttgagtaaatatgacagttctaacaaactaacatagccacagaactccttcactttctttgcgagggtaaaacattatttacaacaaaaagaaaagtacctgccttcacaaaagaagaagacaaatagcatgtgattgacaattaggcgtaaactttcaagcggttctatcaattaaatagcaggtaaatgaagtgggctctcttgacatcaacatctatgaccaaaccttttccagatttttcccgaattgagaatctggtaacctgttgccaatgagctcccgtagctcaaactcgctgggaaatctctgttcggataattttgagaaaaccaattgtccattgcagtaaacttcaaaggcaccagaactttgtagaaatgactgggcgaaattgccaaacagccagattgttgccattgttccaaatctattagcacggag

SEQ ID NO: 394399 - DNA, 860 bp, Oryza sativa
aactactggtggttcgtgtaggggacggaggggtggacggggctggtgatgctggtgctcatggcggtggcgttcaccctcgccacgccgtggttccgccgcggccgccttcgccttccccgcccgctcaaccgcctcacggggttcaacgccttctggtactcccaccactgcttcgtcatcgtctacgccctcctcatcgtccacggctactacctcttccttaccaaggattggttcaagaaaacgacgtggatgtacctggcggtgccgatgttcctgtacgcgtgcgagaggctgacgagggcgctccggtcgagcgtgaggccggtgaagatactcaaggttgcggtgtaccccggaaatgtgctgtcgctgcacttctccaagccacagggtttcaagtacctgagtgggcagtacatcttcgtcaactgtgccgccgtctcgccgttccaatggcacccattctccatcacgtcggccccacaggacgactacgtcagcgtccacatcaggacgctcggtgactggacacgggagcttaagaacgtcttctcaagggtctgccggccaccgacggaagggaagagcgggttgctccgggcggagtacgaccgcgacggcgccatgaccaacccaagcttccccaaggtgcttatcgacgggccgtacgggcaccggcgcaggactacaagcagtacgacatcgtcctcctcgtcggcctcgggatcggcgccaccccgatgatctccatcatcaaggacatcataaacaacatgaggcagctggacggcgacctcgaggacggcgacggcaacgataactcggtgtcgtcgtcgtcggcggcgttcaagacg

SEQ ID NO: 394400 - DNA, 602 bp, Oryza sativa
ccgggatcgccatgaagagttcctgctccttaatttccccggtttctttgtaatcagacgggtcggcacatacatctggaccgaataactagcatcccgtcgcttggattcatcaacatcatacttgggttgtttgagcttgtaatctttgcccaaaaagtggagttccagcttgcctgtgtagtcagaaatcggcgaaaaactattcaattcctcgattaaaccttcctccaaaaaccagtggaaactagcgtgttggatttcaattaaatcgggcaacatcgtggtggcaaggtttgtcatggtggctcagaagtctccggaaatttgcggtggttggggttagggaaggccggggagaggttaccaggggggcgatacccccagattaggcaggcaccggtagtttaaaaaggttgcgggcattagtagtggtttgttgggcaagggtttctagggggacatggcgcagggcagcgatcgcctcggccacatggcggacaaaggctggttcattgcgtttaccccgttggggcactggcgccaaaagggaacaatcggtttccaccaacaggcgatcgggggggaccatctgggcactg

SEQ ID NO: 394401 - DNA, 684 bp, Oryza sativa
ccggggatcatcgtcggggaacgccacgtagccccccaggggaatagcccggatggaatattccgtttcggcaccttggtatttcaacagcggtggcccaaatcctaaggcaaagcgagtgacatggatgccctgtaaacgggcggccgcaaagtggcccaactcatgcacagcaattagtactgcaagtactccgatcgccgccaacgccgctaaaactgacataaatttctcaaataggaaaaaactggggacgaaaatcccgccgaacgtgtaattcccccgattttaacccaacggccgccagaccgtgttccctggcccatgcaaacccctaagtttctgttaacctgaagaaggtgagggtatctgacaaaaattccagattacacagttatcaatatcaactctatccgttagtcaatggcggctctcagaattatatgggcgatgagcaccaagatattggcaaggtaatagcaaaactggaaacttcaaaggaagtcgttgctaacctaaaactccagacctttcttcgttctgcttttctctcagaggcatcacatattaacagtggtgaggatgtcggcaaatttctagaggctaacattcaagaaggggaagaaatgtttaattaccttgccaaccacgccccggttttatcctctagagtcgacggcagca

SEQ ID NO: 394402 - DNA, 527 bp, Oryza sativa
cgagttcggtaccagcggatccccaaaagtgtcctccggattgtcccccaccctgtgctcaggtttgtccagctcgggcgatcaccagtgatgctgatgaagttgcccccacaggagcgcgggcggaacaatggtacggttgcggccgctgtttacccatctgtccccagggaatcatgactacttattctcatcaagcaacggcgactagtctggtcccttggttggagttggggcaaatcgctgccctggaaatccatacccaggtgggacatgaagaacggttatcagcacactactcggcgtagtctggctccggtattgactcaactgcaggcgatcgccattagttgcccctaccatgctccggcggtggagtatctcacaaaccatctctggctggctggggccatgagcaatgccgacaatttggcgaaccgatggcaggcccatgagtggggacattggccggggtactacccatctttgtctccacagcggtgatcctctagagtagactgcaggca

SEQ ID NO: 394403 - DNA, 680 bp, Oryza sativa
ccggggatcgccgatgacccgacaacccatcaacaatgacagagtgtgccccaacctgtttccatgcgactggggggagaaggccatcgagttactctggtccatcggccagccctagaccaacaatggcaacgtctgcaaacattatccgaccagaactatcaacaacggcaaaaggcggtcagcctatttgatgactccaggcatttttgagcggggccgggatggggtttccacctgtcggccctatccttgggagtggaaactcacccacaatcagggttcctttacctctcatgccgacggatcgggctgtggccattagcccccgcattcgggatcgtcagcgcaatccagggcctagtatccccgccccccaggtgtttgccgccccaccaggcactgcttattacctgaaccaaccccagggtttatttgccgaccaagataatgctcccaaacatttacatcaaaccagaaaagtaggttattcccatttgctttgggttaacttgcaggaggttaataggtgaattaccaaagcttattaagtcgtttatttggcgatggaagtggcaatattaggactgtggggattaacagccaatcgtctctcactgggaatgatagtcaaatccatatcttccatgggaatagcgcccaggaaagcgtgatcctct

SEQ ID NO: 394404 - DNA, 455 bp, Oryza sativa
cataggcatagagaggcttctcccccccagatccgatccccgcacagagcccagatccaccgaccactcccccagatccaccccccaccggcggccgtgcagcggcgggcgtcggcggccatggagaagccatgcaccctcctggtccacttcgacaagggctccccctccatggccaacgagatcaaggccgacctcgagggcagcgacgtcgccgccaaggtcgacgccatgaagcgcgccatcatgctgctcctcaacggcgagaccctcccccacctcttcatcaccgtcgtccgctacgtcctcccctccgaggaccacaccatccagaagctcctcctcctctacctcgagatcgtcgacaagcgcgacgtcgccttcggcaaggtactcccggagatgatcctcatctgccagaaccttcggaacaaccttcagcaccccaacgagta

SEQ ID NO: 394405 - DNA, 761 bp, Oryza sativa
  unsure (1)..(761): unsure at all n locations
agtgtatgtatacatgttattcattcatcgtacaactccatccgctcgcatacgtatacgtaagtaatatttgtatataccaggactatccctgttcggggcttcacgggctcaacgccgcggcggggaagacagcgagggggatcctcacggtgtgcttcttgtcgcccctgaggaccacctcgccgaagctgaaggtgttccccggcgcggtggtgttgagcacgatcctcagcgtggccgtcgcgccgggggcgacggcgaacgtgtccggcgacacgcgcaccgccacgccgtcgggcgcctgcacgtgcgccatgtacgtctcgttctccgcgcccacgctcgtcacccgccggtccacccgccgcgaccccaccaggctcgccaccgtcacgctcggcgcgttcaggtccgagcaccaccgcgcccgcgacggcgggcagggcacgcccaccgcgcggacaccgcggcgtcgtccacgccaggcacggcgcacaggaactggaggtagtcccggtacccggcgtcgaacaccaggcccgggtcgacggcgcgcgccgcgttgatggccccggcgcccatntcgaacggcgtcgcgcgctccaggacgcccccgtcacnccgcgccatcaggggcctcccggagcggtcggtgagtcggcggtggtcatgatcgccgacatgaccatggcggggctccacttggggtgcctctgcctgatagggcaacacaccggcgangtgcggggtggccattc

SEQ ID NO: 394406 - DNA, 266 bp, Oryza sativa
tgttgagctcggaacccggggatctcgctgagaatcccgctacccctgctactcgcaacatcactgttgatccggttgcaccagcggttaatgagcttgacatcactgacaactccgataccggcgcagatgacttgattactagcaatggcaatcctgtcctcaccttcacgggtgaacctggactcaccatcacccttaccggtccggatggtagcactggctccatctgctgcctacaccgtcgcagagacacccagtgcgaa

SEQ ID NO: 394407 - DNA, 873 bp, Oryza sativa
ccggggatcaaccgcaaaaagaataatgtgagcgaattagaacaaagaattcgtgttctcaaacaagaaatatcagatcttgaggatagtgctcgagtagcattacagactttagaagagcccatcaaggatttaattccggttcaaaggcaaggtattaacgaagatgatttccttaaccagtttagtaattccctaaaagtaaagggcttagactttcatgaacgtatcgttaaagcctttcatacttctctaaaagtacaagatatttcggcattagtaattttagccggaattagcggtacaggaaaaagtgaattaccccaaaagtatgcggatttcattggtgctccactcgtcatgttgccggtacaaccccgttgggattctccccaagatttacagggtttttataattatattgaaaaaaagtataagccaactcaattaatgcattatctctatcaatatcagcaggatagaaaaatgcatggcagaatcatcatggtgctacttgatgagatgaatctagctcgggttgagtattattttagtgatttcctttctaaactcgaaacacgacgtagtaagccaacctatttatcattggacgtaggtagtttaaaacttcctgagaagcaacgagatattctgattcccgaagaattcctgtttattggcaccatgaatgaagatgaaaccactcaatccttatccgataaagtgttagaccgagccaatgtcttaacttttggtcgtccaaatgaattgaaattacggggaagaaaaatcaagtatgaaaaaacagaaaattatttaccttggaatgaatttgtaaagtggactaaagaacctgatcctctagagtcgacc

SEQ ID NO: 394408 - DNA, 247 bp, Oryza sativa
cgagctcggtacccggggatccttaatggataagtaacctcccggctctacttaaagtcaatgctggttcatataggcattggacgggggggcaaaacccaaatccaggaatgtttgctttaaaggtgtatggcaatggcgacatttcataaactcagacctaaaaaggtggaatctagtaaggggtgattttggtctacgctgggataattcggtaattgcttggggccactcaatccctaggcga

SEQ ID NO: 394409 - DNA, 590 bp, Oryza sativa
cccggggatccggaggttgccccgatcgccacccagcaaatggccgagttgattggttcgattttttcctttggatacttgtcggcgattcaagtttttgcccttagcccagcaggaaggcgacccccccagtgtgctagtggccatggtggaccccgataacttggctgcccaggacgagctaaaccgaattttgcgggttaaaggttttgaattgcgccgcttggtggccacccaagatgattttaaccaactgttggaacagtactatgccatccgggaagagtgggaggcggcccaggaaaaaagggaccaggaaagggcccttgataaacttaatgatttgacggatattgtcggctccatcgacatgaatctgggggaggacaaagaagatgtccatagtgctctagactccaacgatgctaaccaagcaccggtgattaacctggtcaacaaaattttggctaaggctctccaggaaggaacttccgacattcacgtggagccgcagaaaaaaaccctgagaattcgtttccgcaaggatggggttttaaatcaggctttcgatcctctagagtcgacctgca

SEQ ID NO: 394410 - DNA, 245 bp, Oryza sativa
cgagctcggtacccggggatcagctcaggggtcagcagaattcctccaaaaacagaggttgccgccatgagatttgccttaactcgattatcttcaatctgttccaatgcagtcgccacttccctcaattttaatgtagggtcagaggtctgcgtcaataccgctaggggcaatagccctgggctttggaggaatatctccgaggggtgctcccagagccggatcctcagagtgaccgcaggcat

SEQ ID NO: 394411 - DNA, 947 bp, Oryza sativa
cccggggatcaagcccaaaaggtctatcaccaatacgaacacaagttgcagattttagcctatcaagttaacccccaagaccccaaccgagccaccgttactgcccgggtagaagaaattagccagccctttaccctaggtaatcaacagcagaagggctccgccaccaaagatgacttgactgtgcgctatcagctagtacgacaccaaggggtttggaaaattgaccaaatacaagtggtaaatggcccccgttagtgcgtggcgttaactccccttttgaccaatggcatacggctagatgcccccataggtacggaaacctgcacttccgagaactaagcccctaccgtcactataagagtgtgaacgtgtcggccccaggcaatggattggaaccatggcttttcggcccatcgttgtgtcttatattcttacttgttaacgggagttaattaaaattatgggaaaagttgttgggattgacctcggtactaccaattcctgtgtggctgtaatggaagggggtaaacccactgttatcgccaatgcagaaggttttcgcacgaccccatcggtggttggttatgccaaaaatggcgatcgcctagtggggcaaattgccaagcgtcaagcggtgatgaacccgggcaatactttttattctgtcaaacgattcattggtcgtaaatttgatgaaattaccaatgaagccaccgaagttgcctacagcgtagttaaagacggcaacggcaatgtgaaactagattgcccagcccaaggaaaacagtttgccccggaagaaatttctgcccaagtgctgcggaaattggtggacgatgccagcaagtacctaggggagaccgttacccaagccgtcatcaccgttcctgcctacattaacgactcccaacggcaagccaccaaagatgcgggtaaaatcgccg

SEQ ID NO: 394412 - DNA, 629 bp, Oryza sativa
ccggggatcactgagggatttggtcacaccggacaaataggtgtggtccccaaccatgatttcttttttaactgtgtagtccaactgcacggtgccgcagtcctggcagtataaaacccgcaggggataatagggttcctggcccacttccgccggggtgagaaaatggttacaccagggttgttcccccaaatcgatcgccaaatctagacgggtagaatcacaaacacggcactgcataggaactaaccaaaaaactaagaaccaggacgacgggcaagggctatcttcccacgtttgttgtttcggctcaagctggggctaggccgttgggggtgtttagggctggcagtgaatttgctgtaaatcggcgatggtggcgtcggtccccactaggtttccctgggcataaccaggccagtgaatggcgatcgccccttgggcatgggcccctttggccatggtgatatccccctgggcatccccaatcatcaaggtgtgctccggtttcacgcccaactcccggcaggttaaaaggtataaagctggatcaggtttaatgagtccttggtccgaccccttagccacatccactaggctttgcaattggtgatcctctagagtcgacc

SEQ ID NO: 394413 - DNA, 272 bp, Oryza sativa
cgagctcggtacccggggatcgcaatggtgctcaaactgcggaagaaggaattgtccaagtcttgcactaacagtttcattaatagtccaaagaaaacaatgggaatggtgcccaaaccaatacccagacctaatttaaattcgagggaatcgtattggcgagtttgcacagctttgataatgcccttagcaatgccggttaaatcttcccagaagtaccaaaatacggctccaatgctacccaattgaataacggcggtgaacgccacccc

SEQ ID NO: 394414 - DNA, 314 bp, Oryza sativa
cgagcgtcggtacccggggatcattagggtgtagtctcggttttcgatgacagcttcagcgctcattatcctcgtggggcaattttgcaagcaatgcgcggttttttctcttttagcctattacaactttttggcaatgttcttaagattgcatatttccttacaattcatcagaaatttgttcgaggggtaatgctgtgccgtctgtccactgctccaactgcgattgtcaagcccccaatgacctaggcgatcgcctgtgcaagaccggccggactcctctgctgaaaaggtatctgtggtcggtgggggac

SEQ ID NO: 394415 - DNA, 648 bp, Oryza sativa
acccgggatccacaattgctgaaattccctaaggcgatcgggtaaatcgagtgtttgcgtagacgacattgctccgatgaatttgacgggggttgggcgaatcaaggttaaaataatgttaaggcttgctgattattaactcaaacttgtcgaccctgtgtggtccaactccctgggaaatctcctggggagagtatcgcttttacctgtccctagtaaaaggagcaaaaatcattaataaccattaacattaattaacattaatcccaaaaacctgcaccgatacagaaatgtctgctacaagataaatacgggattttgacaagctaatagctgatactatttttcccccgttaattggcaattatcggcttttttggtcgttttttctgttttataactaggtagtgcaaactaccctaacaccctccccaaaactatgaatgccgtcgccgctctgcccacccccaccattcacaccacctgtgcccaagacattcacgatattgaattgccccagtggttagaggattgtttacagcagcggcagagggagatagaacagggccaggacgaaacaacggcgccccattgtctaatttgtcgagcgttctgtttcgcctacgatcctctagagtcgacctgcag

SEQ ID NO: 394416 - DNA, 328 bp, Oryza sativa
cgagctcggtacccggggatctagcggttaacctccccaacttacggtcccagattcaactttattgctatgcctgccccagggtcggcgatgtgacctttgcccaactccattcccgccaagtgcccaacagttaccgtattgttaacctcgcagacgtgattcccctcctgccccccactacggggttaggcacctatgtccatgtcgggcaaagttggagtttcctcagccaaggaggggacatcttacccaaccatgtggtggatacctaccagggagcagtggatagggaagtggaaacggatcctcagagtaacctgcaggc

SEQ ID NO: 394417 - DNA, 863 bp, Oryza sativa
gctcccacccggggatcgagtgtaaaagactcaactcaacgcagacctgcaataggggggattccggcaagattttcagtcttggctcaacctttgttccgtcgtagttggggattgtccttacctttgcctggggctaaaacgatcatttccatggcacgacaagctcgctatcaaaaccttttagggctcaatccgagaactgaatcccgcagtctaatttggtgtcgtcgtttctccgttcgtcctaattgccttgggcttttgtatagaaaaaattgctttgaaaaaactttagaaccgggtatttactccttttgggattttcgctcagaattggaacttttcctgattccccgttctgaccagttctttattgttacaaatcaagaagtattaaccaaagataatattcctctacgtttttcttacattgtcaattatagaattacagacggtcagaaattgttgacctatattgatcctgcccaaatgggatacatcgaagggctagcaagtatgattcaaactctgattcatcctctaacccaaatttattggcgtagggctattagtgtaattaacagccttgagcttaatgagcaatgggaagctttcatccccaatattccggatgaattgcaagaatcagcccaaaaatttggggttatgattgaagcaatgaaattaagggatattacttttcccaaaaatatccaaactctttttgctcttcagttagaagccaaaattagaggtcaaacggatttggaaaatgcccgcacagaagttgccaccgctagggcgttaaaaaatgcttcccaattaataggagatgatcctctagagtagacctgaggcat

SEQ ID NO: 394418 - DNA, 578 bp, Oryza sativa
  unsure (1)..(578): unsure at all n locations
gaaaaccaaaccaaaccaaacacgacaaccttgcttacagactcgatatatacagatagataatccaagccacgcattgagttaaagatcttctgttatttttgcttaaagacactagaacaggatgtgcatcaatagatgcccattccaggatggaacaacaacagaggcacgggaggaagaaagcactgggtatatatcctaaggtgaaaagcagcacaggagaagagagtacacacatggttcttcattcatgagatggatccaatagatgcagatgcagcgtcagaaatgcagtgatgtgtgctagtgagttgaactggtggtaccatggccgctgctgattgaaccccagttagcttcggttcccatttgcacagcgatgctgtccatcgactctgaggttcngcttctgtgaccccaacttgatcgtctngaatgcataccagccctaccttccacaagctcacccggangagaaagatctgnggatgcatgggctattctaccctctttctcatccaaaagaccccanaggccaacttccaaatctctgatatctgctngacncacgtccg

SEQ ID NO: 394419 - DNA, 387 bp, Oryza sativa
ggggaaagcgagatgttttcttccccaattttcatgacaaagttttacaagaaaattcagaggctgtgcttatgtggacaggcccaccggacaccaaatttacaactttgatcttataggctatatatcacactggcacccttaattataccctactaatccacttattggtctggagacatggtttaaattaccaaggggaaaaaaaaagaaaatttaaccagccaaaaaaaaaaaaggcccagaggaagctaagcttgcccccccaagctcctcccatggcgccccacccgtttggacttttaacacccttacctgcgaaccattcttgccctaccccgtcgaggtcgccggccggcgtcagtacaaggggcaggtgagcccggg

SEQ ID NO: 394420 - DNA, 735 bp, Oryza sativa
  unsure (1)..(735): unsure at all n locations
nnnnnnnnnnnnnnnnnnnnnnnnnnnnnnnnnnnnnnnnnnnnnnnnnnnnnngggaatggcacaacacgctagtcagttataagaagaaaacgcagaagagatgtccaaatgggataagattgttcaatccaacaagttctctctaacatcagcagctctcttgctcaacaaaagcagggtgtctcggggaggcagggaaatcaaaagcaaaccggaaacgcttcagctatacactgaacatggcagaggaaagggacgcaaaaaccctatagaaataagtcaaatcgcaccagatacaaaccacaacaaagcagctggttcactgtcacggatggggagaacatcttttttacatcggaagcaaaacaattggatcaaactgcagacgccatcatcgtcgtcatccacccgaatgttgcgcaacccaacaggaggttttggtgctcgatcgatggaactcttcagcgtttccattcagctttggcaggtctttcacttgcgtctcttgatgatagcatagacttgtcagccttcactccctctttgccaccagcatgggttggcctttgtgtacgcggcgagtgcgagttcaacttaccattagaggatgggagggaatggcgcctggtgaagccatttttctccgcagagtcagaactaagtctgggtgaatctgtccccgcagtttcgccttcgcanattgtgttgcagccatgttagnctggggaacag

SEQ ID NO: 394421 - DNA, 523 bp, Oryza sativa
  unsure (1)..(523): unsure at all n locations
ctgcactacattaccattttcttcgcgttctctctcgctgcaatggaggcgtactgttgggaggagggagggagagagcgagggagagagggagctagggtttctgggccgccgctgcctccttgagttcgtcgtccctccggctcccaacccttgggcgtgcggcagtgtaggctccaatggggaagtctccggcgaagtggatcaaatccgcgctcttccggaagaagtcatcgcggtccggctctaccaaggcgaaagatttatcgaagggctccaacaacacagggtatgctgctgctgggaaggatgctgggtttgagagctccccggtgatatcggagccggtgctcgttacaactcataacaattaaggctttccaagaggtttnggaggggtnaagattccancttacaaagtgaagttgttggtncgcatttaagtaagacctggagaagagatactttcgtttcnatgngtccacgaccccagagtttanaaagacaagggcctaaggacaag

SEQ ID NO: 394422 - DNA, 439 bp, Oryza sativa
gacaaggccggcggggggtacgcgagcctgatcggcgggtccaacctgacggacgtggtgatcaccggcgcgaacgggacgatcgacgggcagggggcgatgtggtggtccaagttccattcgaacaagctcaagtacacgcgtgggtacctgatcgaggtgatgcactcggacacggtggtgatatcgaacgtgacgctggtgaactcgccggcgtggaacatccacccggtgtacagcagcaacatcgtggtgcagggggtgacgatcctggcaccgacgcactcgcccaacaccgacggcatcaacccggactcgtgctcccacgtccgcatcgaggactgctacatcgtgtccggcgacgactgcgtggcgatcaagtccgggtgggacgagtaccggatcgcgtacgggatgcccagccagcacattgtggtgc

SEQ ID NO: 394423 - DNA, 469 bp, Oryza sativa
ccttttttttttttttttttgcgaaatcactgacatttgccaatataattgtttcaacatttacatcgcctgggcattgtgattggttcgttttgtcgttcagcatgtaaacaataactataacaatacatctgacattgacatgcgcttattggtcacgagtcacaacacatctgattagagaccggaggagcgcctattggaccatgtgttgagcagcgcatggtgggtttgcaggacatattacgagacaacgaggtgctatctcaccaatccccaacattatttatggatacggatcacatgcggacaggttgatcctgccagtccctctccgactcacagcttcgatagtgaaatgtccatcgcctcaatgaagaaatcggagtcctctttggtgaagcatagtggaggtgttactctgaacacgttcccgtagaaaccacctttcccaaccagcacacccatg

SEQ ID NO: 394424 - DNA, 483 bp, Oryza sativa
atcgccagcgagagcttgctttgatttgatccgcgcgcggagaagacgaagcgagagagagagggagaggtggaggaggctagctagggttgcgagcgatctgcagcgtgggagatggggaaggggttcatgtcgtacctggcgatgaagacggacgcggcgggaggggaggcggcgcaggcggcgctgatcgacgccgacctgcaggagctgggcgtggcggcgcggaagctcgccaaccacgcgctcgtcctcggcggcggcctcgggttcggcaccaccttcctcaagtggctcgccttcttcgccgccgtgtacctcctgatattggataggacaaactggaagaccaacatgctgaccgctctcttggtcccttacattttctttacactgcctggtgggctgttctctctgttgaggggagaaattggaaaatggattgcgatcattgcttgtcatccttcgtctcttctttcctcg

SEQ ID NO: 394425 - DNA, 415 bp, Oryza sativa
gaagaataacatgttggttgcattgccatcgactatgtcatcctgttctgttccttttggtatctgtctgatcacaacaaatcatatacaattgccaagctagaacttcaccaatcgtgattaattacttactacaatcctgaatctacatgatttataaacgttgcctgcactgcaaaatgctatcctgccttcctcctctatcaacgtgacgttgcccatgcagtacgactcgccgaaggagctggacgacacggccaggctggagatcctgacgttgaagtacgccggctgcctcggctccggcaacgtcagcccctcgctgccgagcatggcgatcacgtcggacatgttcggccggtcgtcggcgctgtcctggacgcacagcagctccacctgcacgcactttatcacc

SEQ ID NO: 394426 - DNA, 569 bp, Oryza sativa
gtaatttctactagcatgagtggagagctgaagagagactacgagattggcgaggagatcgggcgcggccgcttcggcgtggtccaccgctgcacgtcgcgcgccaccggcgaggccttcgccgtcaagtccgtcgaccgctcgcagctggccgacgacctcgaccgggagctcgcggagctcgagcccaagctggcccagctggccgccgcgggcaacccgggcgtcgtccaggtgcacgccgtgtacgaggacgacgcgtggacgcacatggtcatggacctctgctccggccccgacctgctcgactggatccgcctccgccgcggcgcgcccgtcccggagcccgtcgccgccgccgtcgtcgcgcagctcgcggaggcgctcgcgcactgccaccgccgcggggtcgcccaccgcgacgtcaagcccgacaacatccccctcgacgtcgtcgacgacgggatcgacggcggcggcacgccgcgcgcgcggctcgcggacttcgggtcggccgcgtgggccggggagagcggcggcagcgcccagggccctctggggacgcccca

SEQ ID NO: 394427 - DNA, 787 bp, Oryza sativa
  unsure (1)..(787): unsure at all n locations
caagcaaaaagcatttttagttctaattttttgagcagtcaataaaacaattcgacccaccgcctgaggttcaaattagccaccttagtttaaacgaagaaccgacgagacataaaagtcacaatcaccgaaccgactttgtatcagtacaacgtcagaatccacaacgttggaataaagagtgaccaacataaaagataagacaactaaaattcttttcacgcgccaaaaaccaattcaactagtgccgctggagtttaatcaacgttgccaccttcaagggctttctggccatcttgccgcttcttggcattaggttcagaagagctacggggatcatgatggtgatggtggtggcggtggtggtgacgatggtgtccggtcttgtgaggccttttaccatttctcaccttttcatattcaccggcagctgcatcatcggatgactcctccagggagcgactcctacggtgcttatggttgttggaatctgatgttgcatcctcatcgcttgatctatgatgtttcttatgtcttgacctgcccctctcctcagactcagaccctgagtcatcaccagatgatcggtggtggtggtgcctgtgactcctggaactggaatggtccttcttggaaagatctcctctcttcatcatcgctgctaaaagtctgaagcatcagaatcaganccttgatggaatgtcggcgatgctttctcctgtgtgaacgcttcttccttcgatttccttcttcanaaccaataatcatatccatcactaatcagtat

SEQ ID NO: 394428 - DNA, 776 bp, Oryza sativa
  unsure (1)..(776): unsure at all n locations
nnnnnnnnnnnnnnnnnnnnnnnnnnnnnnnnnnnnnnnnnnnnnnnnnnnnnnngaaggtttgcacaccattttgtattcttaccgcgttttcgttcatttcaagttttcaaccgataccgttctaaagattacatcagaaatgttggtacatatcaaccgatcagggaatacgcaatttttccctgtttattggactcgaactccgacggctaatcatagcaagagcagtacatgcattaatattggactcatctcttattatatgcacacatagcaatgctgctgcgttgaagtttcggttttcagttgacgccagtagaaattcctgaagtctgtcgatgaagcttaacatgttcatcagccgatcttgaccaccgaactagccaaaatttattccttgtgctagaggcagctcgcttccatagttgatcgtacaagtggccctcctcatgtactgcttccacgaatcactccctgcttctcgtccaccaccagtagctttttctccaccaaaagctccaccaatttcagcaccatttgtgggaatatttacattaacaatgccacagtcactaccatgaggcccaatccacttgaaaataatatctggtctctttgtaaatatagaactgctcaatccttgaggaacagaattgttgatttcaactgcttccttcagattctgaactttcatcacataaagaacaggaccaaagagtcttctctcacaaccggtgcagaaggtgaaatttcccaattgttggctgaacaaa

SEQ ID NO: 394429 - DNA, 474 bp, Oryza sativa
  unsure (1)..(474): unsure at all n locations
nnnnnnnnnnnnnnnnnnnnnnnnnnnnnnnngaaaaaacagaacacggaatttatatgtatcccgtgtctcagtatttcagccagataggcagatacatcttaaagacttggtacagtaccagaaaatgtaaggtcagccagacacatcgagacttcataaagcaccacaaaatataagggatatggaatgatgataagttaagcttacagatccatccacaaatagataaacaacaagcataatcacaggatctaaacaggtacactccttaagatgccccttggaagtagacgttgcattaagacaactcagacatcaagtcctctcatcaagaagttgatattctcaacagaataccctccagataacatttggaatgcatggagaaacttctgaacaaaacatgcagatctaatacctcaacgacctctttcaaagttgaggcgggacctcccagatcctccaccctcg

SEQ ID NO: 394430 - DNA, 497 bp, Oryza sativa
  unsure (1)..(497): unsure at all n locations
ggcaagaaacaggagatcgatttggagtgaacccattacatggattacatggtacagctccatatcatcatcatcatcatcatgtttatgtacacaaacatcttctttacaagtacagccatggatttttctttttacatggcagtagtagagtagcactagtagtatggtgatggctcaagcaagccctttatctctctcaccatggacaagaacaacatatatctacaaaacacctcacctgacctgactcttccatctcaacgaacacaagacttgagatccagaaaccaattcagtaaaaaaaaaagaagaacaataattgattaaaaatcctctcctcctccgtggttggtttgatcatcctcctgtgcatcgggcgatcgtttctaaactcctttttttccttaattaacctccctactatctgctgttaataaaccgtactaaaaattactttatatacttcaccatggggactncggacgggcccggng

SEQ ID NO: 394431 - DNA, 572 bp, Oryza sativa
ggcaaaaattgcaacatcaccatgcaaataacagaacgatgtcataacataagcaatttccaacttacaaaagcttgggttgggttctttctcagtaggaaaacatatgtccaagcatgggaacttagttccaagatatatatacttggctctacaactaaagaggcaatcttctacacaaaagaagcctacaattgcggctgggcctcttcctgttattgggtattatgtacattgactgaaaccaaaactgcaaattcacctaccaaaaggggctacttttctttcctgtaagttaaaaggattaacctagtttacttacattccattaacaatcaaaatctgcaagaaccagaagcatttacactgatttttcagatgattcctccatgtttgttgaattgagtgagaagtcatcgaggaaattgctgcccgagtcaacctgaaattctttgaacattgtcatgacctggatcatggtaggcctgcggttaggctggtcatccaagcagcggcaagcaatcttcagatactgatagagctccaattcactagatgtcgtggccatcaat

SEQ ID NO: 394432 - DNA, 710 bp, Oryza sativa
  unsure (1)..(710): unsure at all n locations
nnnnnnnnnnnnnnnnnnnnnnnnnnnnggaataaaatcaaatgcatttccaccatatgtttgcactttgcactcgacttttgtcttgtcaaatctataacattaaggtgatcatgaacattcattgcaccatactgataaaacgagattgggtatctgacaactaataatctaaacaaagtttgtgcagtaccatgcaatggttgctctgcaactcagtacataaaaaaaacaaaaacaaaaaaatggcaaacaaaattcctccattaaatattaggttcatatggttccaaagtagccatagaaaatatccaggtagatcaataggacaaagatgcttgaactagtttcctccttagttggttactctgtacttcttaacagtgttaagcagaatctttgcttcactgttgttattgaagtggtcacgaataggctgcaatatttggtttattgcttttgctagagctggcttaacatcagcaggatgcaaagcaccagtcttataatcatcgatgagttcatccatgtttgtaaatgtctgttaccgccatttgcttccttccgaacccacctcaaacatttcaaaaccaagggaaaacaatatacttgatgtactcccaagcatggggttcccatcaacccacgttggggagggcaaaatgctttgttttaaccttccaaatttacctggagccctcggtcatctt

SEQ ID NO: 394433 - DNA, 559 bp, Oryza sativa
cccacgcgtccgcccacgcgtccgcccacgcgtccgccctcgcctcagagaggaggcgtgttggttagctcattggcagcagcacacacaaaccacatctcctatatatagctcatttttagcttttggaatttgagagaggttttgagagaaatggctagccaaggtgtagcctccatgttcgctctcgcattgctcctcggtgcctttgcctccattcctcaaaaggcggaggcgatcggggtgtgctacggcatgagcgcgaacaacctgccgccggcgagctcggtggtggggatgtaccgctccaacggcatcacgtcgatgcggctgtacgcgccggaccaggcggcgctgcagtcggtgggcggcacggggatcagcgtcgtcgtcggcgcgcccaacgacgtgctctccaaccttgccgccagccccgccgcggaggcgtcgtgggtgcggaacaacattcaggcctacccgtcggtgtcgttcccgtacgtcgccgtcgggaacgaggtcgccggcagcgccacgtccagtctggtccccgccatggaga

SEQ ID NO: 394434 - DNA, 667 bp, Oryza sativa
  unsure (1)..(667): unsure at all n locations
tttttttttttttttttttaagtccccttcattctagggaaatcaaatttaatttctggtccaggttgagatagttgagctgaattatgtacagaaataaagcggtgctacatcatcggtggggaacaagaagaacgagtttaaacatatatatgatacagaatagataagataaaaatgaaaacacttctcccttggatcatagagcctccaggtttgcaagttttagcttcttttcaacagccaagtgatcttccactgcaatgcaagtacagcgcagaatattggcaagaaaaatagccatttcagcttcacttccatgaatatggtcatggcgtgcgaggccgacactatgagtcagctgttctgcccaagtgtagatgcggagcggtcaacaaccataacttatcagcaacagagttccggaggtccatcccaaatgctgctagagagaaacgaaggaagggtgacaggcaagtcactccagtaccatttgttggggtaacaatgnagaagtggcatatagatgccagcagctaccacatagcaggccnaacggaaatggagtancgtgggagggantgggctgtaacacagccaaatatctaatggcatcccaggaagccaatggctttttccanacgactatcnagcaataaatataggg

SEQ ID NO: 394435 - DNA, 471 bp, Oryza sativa
gcgtagccgaaatagtctactattccattatattctagccggcaccagttgcaaatctgcattttacagtgaattgaacaatgaaagtatagctgtcgaatcctctcaagctttctaaagtatttccaaaacagaaagaaaaaggcaccagtgatacacctcactaatgcaaccgttcttcataaacaattcctaaaaggttcatccgtgttgacgtctaaagaatagcagcctaacttgttctcctcgaggaacagccaatccagggctcaatggcaaaaggttgcagccatcacttgggcaagttaatgaagcccgtatatttgctcactgaacagatgaataactacaaataccaacttagtaccggtacttgatatcatctgcaagggctttggccagcagtataatctcatgaggagaatatttgcaacttgcagctgaataaacaccacaagttgcaatatttag

SEQ ID NO: 394436 - DNA, 840 bp, Oryza sativa
ctcgattattgcctctctgctctgagtgtgactgtcaatctgtgagcttagctagtgactggccattgcacgagaaaagaacaggttgatcgatcattagtaggtgaagtgttcttgccctgttcttttcttggtttcttgggtaaaccaactggttgggttcggtgagtttgagaacttcagaaactgtaacaacaatgggaggcaccatggattacctgtctgatcttctcggcggcggcgggagcagcagccgtcggaggtacaagaagaggaagcagttccagacggtggagctcaaggtgaggatggactgcgacggctgcgagctcaaagtcaggaacgccctctccagcatgaaaggggtgcagtcggtggagataaacaggaagcagtacaaggtgacggtgcaggggttcgtggagccgcacaaggtggtgaagcgggtgcaggcgacggggaagaaggcggagatcttggccctacgtgccctacaccctcgtcgcccacccctacgccgccccggcctacgacaagagggctccccccggccacgtccgccgcgtcgacgccgtcatgcccgtcgccagcttagctccgccgccgctgccgccgcgccggaggagcgcctcaccaccatgttcagcgacgagaaccccaacgcctgctccatcatgtgaattactgtaactgaatattagtgtaatctcttcagagttcagatgaatgtacgaaatgtatgtgcagatatgagagattgtactccctccatcccaaaatataaaagaatctagaatctggatagttgtctagattcatagtaaaaaaaaaaaaaaaaaa

SEQ ID NO: 394437 - DNA, 622 bp, Oryza sativa
gttacctcttcagttctcaaaaaaaaaaaaaaaatcctcttccacttctgacttctcgccaagggaggttgcttcgctttgcttgctcgcgtcggaaacgcatcgtctcctctccgccgccgcagcggaagcggaagcgcgcgcgagagagagatggcgtccagcgccgtcggcccgcagtcgccgccgtggcggtgctcctgctgctggctcccggggcggagcgatcgggctgtggctgccgcctcccaccggtggcggggggcgcctcggcggcgcgccgagccaggcaggtacctgacgcaggaggagcggtggatggaccagaccctcgaccacttcaaccccaccgaccatcggcaattcaagcagcgttactatgaattccttgattactaccgagctccaaaagggccaattttcttatatatctgtgggagaatcttcgtgcaacgggattcctaacagctacttagctgtgatggcaaagaagtttggtgcggcagtggtctcccctgagcatcggtactacggaaagagttccccttttgagagtttgacaacggaaaatctaaggttcttgtcatacaaacaggccttggttgatctgggctgtttccgc

SEQ ID NO: 394438 - DNA, 538 bp, Oryza sativa
  unsure (1)..(538): unsure at all n locations
atttcggagggggatgtgtagcggcggcggcggctagggtggtggtttgctgttcttcgagctagcatctgtagtaattctcgcaagttatttgaaggacaaatatggctactattcaagatataggtgtctctgcagctatcaacatactgagtgccatcactttcctgctagcgtttgctttcctgcgactacagcccatcaacgatagggtttacttcccaaagtggtatctcaaaggtgcaagagagagtccaagtcatgggggtgcatttgtgcggaagtttgtcaatttggacatgcgatcatacttgaaggtcttaagttggatgcctgctgctctcaaaatgccagaggatgagttaattagccatgcaggccttgattcagctgtctatctgcggatcctacttaatagggcttaaaatatttgctccaatcacagttctagcatttattattctntgtgcctgtaattggaccaatattacccttcaaagctcgaaggtgcagcacagtgatattgacaaacttcata

SEQ ID NO: 394439 - DNA, 573 bp, Oryza sativa
ctcctcacatcgccagctcgtccgcttgccccgcaccgcaaccgcggcgcggaggaggagagctctcgcgccgcgcgtgcgcgcgcgcgtgcgggcgtgcgcgggcgatcgaatccgatcgccatgaccggcgccgacgagccgtccatcacccgctggaccttcgaggacttcgaggtctactacgaggtgcgcctcggcatccgccgcgagcccgggggagatgaagacggcgacggcgacggcggcggaggtcgcggctacgcgccgcttggatccggctccgcgggcagcacccgcccttcccgcggcgcacgccaacggcggcgccgacctggccgtcttcgagcagttcgagcggctggagaggaaggtggagctgcggaatggagcaattgaagctgggcctccgcagaaatccctacttccttcttttgaatctgcagaaatgcgcaatttagctgagacattgttgagggatatcattcgtgggagtccagatgtcaaatgggaaagcattaaggtttgagaatgcaagcgtcttctgaagagcagtgtgatgctataaatacc

SEQ ID NO: 394440 - DNA, 841 bp, Oryza sativa
aaaccttcaaatgaacaggggaaacaattccacaagcgtttattacaattttcggtttttccacgatacattgcttgattgaaagtaaaataccatcaaataggctgtaatatgtaatatccaaggagccatgcttcagaaatgcagattaacaagattatgtatcacttcactggttcaatctttcttttggagcctgagtgtgaaagcctgaagggataagagaacttgcttgatccgttctctgatttgcgcatcaatcaaattaccatcactgtcaaactttggaggctgctcaaatgcttttacggctagttctggcttgttgatgaagtgaagatctaaaaataccccgacctgacgaagatggtactgtgatctaccccctccagagccacctcctgcactgacaattgcagcaggtttgtctgcccagcaattttgccctctagaagcccaatcaagtgcattcttcagtggggttgcgatggagtagttgtactcgggggatccgaagaggaagcagtcggcctggcggaccttgtcgcggaaggcctcgacggcgggagggaatccgccatcggcggtctcgaggtcggtgttgagcagcggcaggccggagatgtcgacgtggtcgacgcgcaggcccgggatggactcctcgcacacccccgcggcggcgcggaggaggccgccgttgtaggaggccttgcggagggagccgcagatggcggcgacgcggatgacgggcctcgccgccgcggcctccatggtggtggtggtggtcgtcgtcgtcgtcttctccctcggcggctcaggctgctgagttggtgacgcgcgc

SEQ ID NO: 394441 - DNA, 524 bp, Oryza sativa
  unsure (1)..(524): unsure at all n locations
nnnnnnnnnnnnnnnnnnnnngttactgaacgtctcaacgaattgaattcaattttatttcttgacaaatgtaacaagcaaatccatatttacaatttgtaggctactaggcacacacctaccaaaagaatcgccgccgtcgttgtcacgattccgccgccgtcgccgccgccgcatccaccgcgttctggtcaatgaagttgaccagcgcgaggccggcggcccagacgtcgtcgtccatcacggactcctccggcgagtggctcacgccgccgcggtaaccgcacgaacagcatccccaccttcgtcagcctcgccatcgccatcgagtcgtgccccgctccgctcatcagcaccggcgttttgccgccggtccggcgcacgcccgccgccattgacgagatcgtcgaccgcgtagcgcgctccagccgcgacgtcagctccgtgtcgcacggagttgccgcccccgcgtgcttctgctcgacggcgcagtcgaccaatctgtcgtcgcatctgtgaagaac

SEQ ID NO: 394442 - DNA, 893 bp, Oryza sativa
  unsure (1)..(893): unsure at all n locations
agcccatacagatgaagtctggtgggtggttggnccatccatgttcctcttcttcctcctccgactccgacccgcagccgcaggaacccaagaggagatcggaagaaagagagagagattgaggaggaggaggaggaggagccatggctgcggtggtgcgtggcgtgttgaacggcatccgggagaagggcctctccaacttcctccgccatgcccgcgacgaaggctacttcaaatgccttctggatggaaacctcttgcaaactaaaatccacaatatcggcgccacacttgtaggagtagacaagttcggcaacaaatattatgaaaaactacatgacactcagtatggaaggcacaggtgggtagaatatgcagagaaagggcgctacaatgcatcccaagtgccccctgaatggcatggatggctgcaccacatcaccgacagcactggggacgagctactggagcagaatgctaaagcgtacatcgtggatcacaaggagaacttctccggcgagggtgaggaactgatctaccactccaaggggcatgctctaaacccaggacaaagggactggacgaggtaccagccgtgggaaccaaagaaagaagaggcaacctaattaaggcactgatccagtgtgtcatttgatttggtgtctaaaacaacagtcagccggctcggtgggctgaatctgaataatgttgtcttgaggattgtttacttgagaatggaagaacatgatggagttttaattcccatatgatatgtttgtttatttttgatggagcggagcgtcgtccccattgaatggacgagggttgaatgctggtttgctgaaatgaaatattgtcgattgtctggattnnnnnnnnnnnnnnnnnnnnnn

SEQ ID NO: 394443 - DNA, 530 bp, Oryza sativa
ttttttttttttttttaatctgaacagatgactagcgcttgcgattctcattgccaacttattttctagtgtttcaatcttccataacagtatactttacacgagcaacagagatagcctacccaatatataccatcattattggttcctacaagaatcacagtggtaattgtactacatctttaatctcctttttttggagagcctacagtcgatcagagtctcacagataacttgatatctcctaacaggggcgcttggcaactctgtccatcgctttatggaaacaattgtggtataagtagggaactaactcttgtacaacctagatcatcttaatggcttcgatggtaacttcttaacaaggctggtgttgccggttaccaataatcgagcgcccttcaccagttcctccttaatcataaaaaggagagcagaagcaaaaacactttgtacgatttttggtgctcattgctttattaaagacctggacaaaaccttcataacgtatcatctttgtggatcgcatc

SEQ ID NO: 394444 - DNA, 491 bp, Oryza sativa
aaataaagggaccccgtgtatagcactataatcagccctctcattgggctataattaatataggagtacattactatatagcggctaataagcatttggaggatcagttttgacggtcactcttggggacggtggccgggccggcgaagaagcggttgatcgccgggaagacctcggggcgctgcgtgccgaggaatcggcggaaggcgtggtggtgatacttctccccctcgtcggcgttctccagcacggcgctctggcgggggctcttgttcaccctcacgtccgggttcatgaacaccgttcctcgtcagctggaaacacccacatccctcccaccagagacatcgccacgatcagcgggtatacatctggcttcacccaacggcccatgtcgatcgatggatgatcctcgtctgcctgacgctgctgctgtttttgtttcttgctaggactgcaacgaatgatccgatagatcgaagccttgaaac

SEQ ID NO: 394445 - DNA, 503 bp, Oryza sativa
cataaaacaaattaacattcaaaacacaatttccccccaatatgctaaaattgaattgcttcccattccatgcgaggccttagaaaatctctcagatggctcaaatggcgaggcatgtaagccgcgtagccggatgtgtgatactctcattcaggacttacaaaatcgcaaggaaaatataaaatgataaacatcatacatatccatttccctgtcttcaaatcctggcaatccacaaagaacaccgtgaagcacggtaggactatgattctatagttgccagatttgtttcgttagaagtggcatcaggagtaccaccggacgggctttgtttcctttctgcctgtaatgatcgacatagagattccagcttctctttttgattcttgaacttatcaacttgcttcttcattaactcacgctcctcaatcaacttcactagagcaacatctgaattctcacatttactcttcatgaattcattatccttctttagatccttt

SEQ ID NO: 394446 - DNA, 466 bp, Oryza sativa
tttttgtttttttttggcatgaatgtaaattgccatgtattttaatcatgtgattcatgaatattggaattggctgttcttgcaagcttacaatggagtacatctctgcatgaaacaacaaacaaatatcccccttcctcgccaaaatcaccatgaacgttttcctaccagtaatctttacacgagcagaggccatccctgaaatgatgaaacctcgtggcgtcccgcacgatgatctccctgtccgtgaccttggagatggccttgatcgcggcgtggcagtcgttgcacacccgcaggttcttcatgacccgcagcgtcgtcttctccggcgtgctgatgaggccgaacgcgatggcgagcttctcgctgtggcggctcagcagctcctccttgagctcgtcgtcgacgtcgtgcaggacggactgcaggtcgggcacgaacccggcccccttgatctccttcc

SEQ ID NO: 394447 - DNA, 485 bp, Oryza sativa
  unsure (1)..(485): unsure at all n locations
gtgtcgccgaagaacctcttcatcggctcgtactcggcgtcggtggcatggagcagccgtggtaaatcgcaggtcaggtgagagatgacgtgcagcccggcccccacggtgatccccactggcgttcacccttgtggaagttgcgggtggcgtccaacggctccacgcgggcgaccccggcgcggttgcggatccaggtgacggtgttccggcacaccgggaggaggatgagcgccatgttgaacttgagcgtctcggcgccgcccttggcgacgcagacgcagtagcccatgacgtggaacacggcgcggtgccggtactggatgaacttgtaggtgaagaggcccgcgcagatggcgagccacaggaggagcacccagacgcggcgccagttgtcctcgaggaagtaggaggcgcgccgncaccaccgtcggagcgggttgggctccgccgtcggccggaggttctggctcagcatctggctc

SEQ ID NO: 394448 - DNA, 543 bp, Oryza sativa
gccccgccttcccgtccgtcgccgcggcgtccacatcgatggcgtcctcggagagcgaggagaggaaggagaccaagctgtggggcgggcgattcgaggagggcgtcaccgacgccgtggaagggttcaccgagtccatctcctacgactggcagctctacaagtacgacatcatgggcagcaaggcccacgcatccatgctcgccgcgcagggtttgataacggctggcgataaggacatcatcttagaggggcttgatcaaatagagaagctgattcaggatggaaaatttgagtggcggacagaccgggaggatgtccatatgaatattgaggcagctctgatcgaaaaggttggtgaaccagccaagaaactgcatactgctaggagccgcaatgaccaaatcgtgacggatctccgcctgtggtgccgtgatgctattgacaagattttgttccgcatcaaacagtttcaggtgtctcttgttctggtagcttcaaaatatgttgacttaatagttcctggttacactcacctgcaaa

SEQ ID NO: 394449 - DNA, 505 bp, Oryza sativa
accattcaagaaatctccatgacagggacggatgcattatatatcttgtttttgggcataaattatttatcaactggccagcatgcctttcagaagcaccaaccaaatcaatctggcatggcgagagaaatcttcacagataatctgaccacaaatcagagctcaagacaagcaaagtaatgttcgcagatagactactcccaacagtttaatattcctgtgtcagaaatctcagaattatgtcttgtatggcgaggatgcgcccccaccaacgctaccgcccaccttcatcaggctgccatcagcatttttctcaaacagatcatcgaagtatttgttagaagaaacataagatggcctgcgagctcctgcagacatcggttgcttagggctcccgtttatcggcgattgtggcccggcacttcgaagcggaaccccgaaagaatttgattgctgtagaggcctcaaattcagtggtacattaaccggcgaggcggaattaggt

SEQ ID NO: 394450 - DNA, 583 bp, Oryza sativa
  unsure (1)..(583): unsure at all n locations
gcatcaagagaaagttcattcccgccgagcaatgctgctcgagtacagctttcagtacccgaaaacaattggtgaattcctcgcaagagttaccagaaaaaaaaatggggaaaaaacctcttgcaatcctacccacaactgtctggttcataggatctgcagggagctaagcaggagaaaactagaactctcaactcaatttacaaacattttctttttttacggggttcattctacgggttccaaaattattcactgctgaatcaaattcagtagctgcagggagaagatcataggtttgggagatttgctaggacttaaagaggaggagacagcgcgaatcgcacgctcttggttaacaatgtgaagctgtcaggtgcttcaagcttgagatgtcgaacagctccatgaatctctgatcggtgctcctcgccttcgcagcggcgaagcgctggtactcgtcgaacactgaagacaagcaccatttctgaagcttcctcaagcaccccacgacgcagccggtgcggtgcttncctctcttgcagtgaataagcagaggttggttttttacgtctgtatctag

SEQ ID NO: 394451 - DNA, 365 bp, Oryza sativa
  unsure (1)..(365): unsure at all n locations
nnnnnnnnnnnnnnnnnnnnnactcatagaacagctcaaattgccaatcaacttggaagaacaataccgcttctagctaagctttgttttcttggagtttgctacacagcactacagctacacagaattcagagagcaattggaagggagaatcacagaatgaactgatttccgtacgctcggggaacggacaatcaaacgaatgcagcctacgagcgttgccaggtacaatcctctacaacttgtaataaatagatgccaatgttagattctactgcatcctgaatggctagtaacaagtgtaacaaacaccatttaaactggacctggcagccgggggcacaaccgaatttaatgaattgctc

SEQ ID NO: 394452 - DNA, 467 bp, Oryza sativa
  unsure (1)..(467): unsure at all n locations
nnnnnnnnnnnnnnnnnnnnnnnnnnnnnnnnnnnnggacagtgaaaacgaagcatttttatttttatttttctcacagggccttcaaccaatgtacactggtcaagttaaaggactgatctgatcagtctgctagttcaaggtgggtcctattcctccccaacaagcgggggttacattctgattctggggggggttttgccacccatcccagactgttcatcttcactgtaaaatggccaaatacaatgaccagctgtgatagcatacacatggccaacgcgcgaatctaagtcacaaatccttgtttccgtttgataaatggngaaccatatatccccanatccctgcctggcagtgctcagaaagttaacatctctcctaagttctccgcttcagttcagaggatagtgtgacaagcttggatggatagtcatgtgctacaagctcacttcctttggcaggct

SEQ ID NO: 394453 - DNA, 539 bp, Oryza sativa
tttaatttctagctaacccctcctcctccaggtcccttctcctcgccgcccctctctcccgcggcgccaccccactgcccctcctgcggcgcgatgtctccgcggcctacggcgacgacgacatggacgacgacttcggggacttcgacctcgacgacggggacggcgtgggggacgacgaagacctcgacaacgagcaggactacgacgtcgactacgaccgcctgctcgcccccgtcaaggcgccgccgcgcccgctgtccggggagggcgacgaggaggaggagggggacatcgccatggtcgccgcccagagcttcgtctccacgcaggactccgcctccgacaccgtggtcgactactccgtcaacgaggacgaattccacaagattcgcctactgcactgcgacttttttatccgcaaggtgcctgaccccgacgacgacgtcttcgacttccgggagatgtatgtcacgccgcctgacactgacatctactccatcccaagggttcttgctccgatgccgcaaaagtatgtt

SEQ ID NO: 394454 - DNA, 481 bp, Oryza sativa
gctccaaactggtgcgcacctacacccgcgcacacaacacagacacggacgtacactttgcacctctctcaccgcacgtagtcgccatggtcgctgtcaccgtgatgaggaagtcccggaacttcgtcgggccggctcctccgacgccgccggccgagatcacgacgacgctcgagctgtcgtccatcgaccgcgtgcccgggctgcgccacaacgcgcggtccctgcacgtgttccgccgccacaagaacagcgggcccgtcgtcgacggtgatagcaggaggccggccgccgtgatccgcgcggcgctcgcccgggcgctggcggactaccccggcgttcgccggccgattcgtcggctccctgctggccggcgacgcctgcgtcgcgtgcacccgcgagggcgcgtggttcgtggaggcatccccggactgcagcctttactacgtgaacggcctttagtacccgcttctgatcttcg

SEQ ID NO: 394455 - DNA, 481 bp, Oryza sativa
aaagttcttgaatcatagtcttataagagattctagcattgtcaagtcagaaagcatcatattatcttgagagaagaccaaaagattgattgatatctcggtgctactactatatgtacaatcgaatccacagctagccattctacgctacttgttcttcgtcgacgggtgatttgatctcttgctcttgcacatgcatctggagatcgtgatcgactcctcttgcttcgatgcacaatgtaattctctgccccttgcttagtagtagagcagatgggcgtagggagacaggcagtgctggtcctgccacgggctgcgcagctgcgtcaggaacgggtcctgcagccagtccatcgccggaagctgcaggctcggcagctggctcaccgccgggagctgtaggctcgtcgccgacgcccaccgtgaccgtgacgtctgcttcttccttcttggcttcccttggtgcgcccccacgcgtcca

SEQ ID NO: 394456 - DNA, 505 bp, Oryza sativa
ggtttttcaaatatgaatcttattgcctgctgaaagccgaggcttcttagaagcagaatagcacagcaacaacatggaactgattgggcgctgatgcagaattactacattttgttcatcaacaggaatggcaccactgatgctgacctgaaaaattgccacttacacattcagctctaaaccgcacaagcgaaaatcagatttacaataagccccttgcttgaactttacagtgatatcacttcacacacacaaacgggaactaatcatcgaactgaggcctttctcgtctttgctgacttgtgcttgataaagagggtagctagcatgcttttagtgctaactggaaccttttggatttcacgccctctaggtttgtccaatgcattaaatgtcgacatatgcatgaaaccaggctggtcctttgaaccaacatttttcttagcatcaaaactggtgtccccattcaggtgcagaggcttgtgcttgggagaagcaggtatgc

SEQ ID NO: 394457 - DNA, 592 bp, Oryza sativa
  unsure (1)..(592): unsure at all n locations
ttttttttttttttttatgaaaataagctgaaatttctcaagcttgctgaggtataaaattgaagcagaataccccaatccatacgaaatgttacgcctaaaccagaccaaacgcaacagataacttcgcaccaatcaccaaagctactgttttctccattggattcagagaagagaatcctcgtcagcgttaggaccaccaccaccatcgccatccatggcgactaggacgaggccgaggaggacgtacagggggaggcgtcgccgccccctgccgccgctggccgccgccttggtgtactcctccatgtcccgtcttgtacgccgccatggactccgcggccttgccgttccacgcctgcttctccgcctccccgaggtccttccacttcaccgacacgagcgcggtcagcgtgganctcgccacgncggggcgctcctncgncagctgncgnctcgantncttgctgaacagcaggaacgacgaagccggcttcttgggncggttnnggtcggcggtaaggnggngngncaanttttnggacgcgtgggtcgaantcgagggggggnccggtaacaattngnctatagt

SEQ ID NO: 394458 - DNA, 534 bp, Oryza sativa
tttgggtgttttaaacttggggggttatacaagttacctatcaaaatacctgttgacaaaataattgcgttcttgcgaaatttactctcctacaattgaaactgaaatagttgagactatgttcatagccatactcctattgacaatcaagtgtgtcactcttacgcatattaatcatggtattttgcacaaatatatacactgtgcaattggtcaatgcagagagtggcttctaatcttctaaaccaaacttggcaatggattgcaaaaaaggacgttggacgagcatatgcatagatgcataatcctcaggcataaaacaatcaatctgtcaccgaagtaacacgagatcaaagaaccttgaagcataatcctcaggcgtcaacaatcagtccgccagcgcctacaaaggcgcgaacgccgccttggagatgacatgcgtcttcttgccgagcccgaacccgatgatgtggttgatgtacacgtcgccatccttcaccgtcgccgacgagccgatccgtgagccggtccgac

SEQ ID NO: 394459 - DNA, 524 bp, Oryza sativa
tttttgttactttatcaaagatataaggacctatgtattccacatattactttagcacgtaatatcaaataattaatggtgcacttcacaagctaaacttcttataacttaattaacacacgtatatataattggccaggtcatatatcacgtatttaacacaatacaacaagcatggtattgattggaccctgcaaatactactcataaatagcaaatttattccaacctactacacatataatatatattatatgaaggccttcatctcatcttggaactccttgatacacttgttctccacacactgtgtcataatccgggtccctttctttggcattggtggagcaccaagcactgcgactgccatgtagtctgcataagtgaatggtatgatgtgattaggtgtaccccacccatagtctacctcgaagaattctaacctcgttcaatccgtcacaacaagcacattgtgttcaaatgtcaatgcgtagggatcaacttttacatccccctgagcccac

SEQ ID NO: 394460 - DNA, 519 bp, Oryza sativa
tgtttggttttttgcttccttgaaatccattcatggtgctgctttgttagatatctcagctttattgtttacatgatatgtaaccggaagaacaaaacaaactgagaaagaacggtcctttctatcagaatataaataaatagagctacagttttaggccatcctagaaaatgctaagggtagttggacatgatgatcaaacatacatctcctctgcctctccaaaatgtcgacatagcaactcatatacacagttgctattcaggcgcctgaatcaggccaaaagcattgcatggcatctctgacgtagcacgcaccacaacaggaccacacactcaaaagggtttcaaaggctgggtcagtaactatttggccacatttggttagcctgagcggcagcggcagcagagcttaagttgccgtcactagggttccggtgctcatggcccaggccgggctgtgtcggtgcaagtggagcaccaaactgtgaaggcagctgcccctgccgaaggccgcctg

SEQ ID NO: 394461 - DNA, 390 bp, Oryza sativa
gtccttgatgccgacgaggtcgatgtagtagaacgacggcgtcgcgccgtcggccagcgccgtgaactgcgcgttcgccggcggggcgccgccgagggacaggtagcccctgccgctcgacgacgacggtaggcagtaggtgaatccggggccgtagctcggcgcgccctgcgacggcagcgacaccttctccctgccgaggccgaacagcccgtcgacctggccgaacagcccggcgttctggttcgccgcacccgaagacgaagcccgggagcgtgtccgacgccgagagcgtcagctgtgtcgcgcacgaggttgccgtcggtctgcgactggtcgccgtactggaccttgttccggcacctgctgttcgacgagcagtccgacgcg

SEQ ID NO: 394462 - DNA, 530 bp, Oryza sativa
  unsure (1)..(530): unsure at all n locations
gcgtacaaaaactcagtgcatttaacttttgaactcatcactattacaagaggaaatgaaaatcaaagaacaccagaacgtttaaacaatattcacttcactcacacaaactgaattaaatgagctaattaaaccacaatgaagaactctcatccacaggagaaggtaattaattaacatacttaagcactattaattcattcggaactcatttaatttaggccatctcgcgttcttgctagtagtagttcaccttcctgcagttgacgcggacctcgccttggctcccgacgagcgggctcaggctggccatcctcaccatggactcggcgaagtctcgccggaacgcgtccgggttggcggcgtagaacctgacgagcccgtcggtggcgccgaggccgccgccggcgaacagctgctggtccgagtgcaggagccccctggcgcgcagcagcgaagcgtaatacgcggccggacccntgggtcgacctccaagggggggccggtaccaattcgccctatantgattc

SEQ ID NO: 394463 - DNA, 603 bp, Oryza sativa
atactgcgtacgggccgccctttttttttttttgtggaatataagagtacaacatagaatagttgtcccctttagtcaagtcttacactatacgatgaatacatgttttatgcaaagcaacgggggtaacaaactaaataacagaaggactcactccacaaatattaatgcggaaattgtcatcaacacaattcaggcatacaggtcctgtttatgaaaagaaaatgtgtaaccttgcttgtctcatcatgttacatacactcaaggctaaaatgcaaattgatctggacaagtagtcacaatggcatggtgccgatcagctgatgaactttgtggccaaagaggcagatgaatccatcgaacagcaggcagaggcacagataacttgagaagttcagagtaaaccccgtcttcttttgtagtcactgacggtcagagttagagcatgcctccttccatcattgccagggaccttgtaacccatggttgcttcaatcttctgcttcctcgccatgtaaccatcgaagagacccttgggaccgccgaattcttccaggccggccaatgatataccgagctcaaaattatgcagcaaattcgatt

SEQ ID NO: 394464 - DNA, 552 bp, Oryza sativa
  unsure (1)..(552): unsure at all n locations
ctgctgaccaagctctttttttctcctcctcctccttttcgtcctgacatcctcatcacccccctttgcaatttgcatcatcatcctcacctcctctttggtttaaataccctgtcttagcagcagccacagcacagcttccttcctgcactctctgctctccttggagcttttctttctcaagagacaagaaagatttcagaatctttggatggggatctgtgcatcttcagagcagctggagcatgttcatgagacagatgagagcattgggtatgtgaaggatgagcaaggaagggggggtaggggggtggagagtgggggggctaggaaggtggcctccctcttctcccagaggggcaagaaaggccccaaccaggactctgtcatcctctgccagggattcggcatggaggacgncgtgttctgcggcgtgttcgacggccatggccggtgcgggcaattcatcagcaagctggtgcgggactacctcccgtcatgatcctgagcaccgaacgcgctgtcctggccgacgtgccgtcgtccgcgaca

SEQ ID NO: 394465 - DNA, 392 bp, Oryza sativa
  unsure (1)..(392): unsure at all n locations
tgcactctctgctctccttggagcttttctttctcaagagacaagaaagatttcagaatctttggatggggatctgtgcatcttcagagcagctggagcatgttcatgagacagatgagagcattgtgtatgtnaaggatgagcaaggaagggggggtaggggggtggagagtgggggggctaggaaggtggcctccctcttctcccagaggggcaagaaaggccccaaccaggactctgtcatcctctgccaggtatcatcttcagttctttactctctgtccctgaatctttgctttctgttttgatgtgctcagctcagatcaatctgctcaatttctcctcttgatgaggctgctcaggccaattgtttgggtttgtgctcaaaaggg

SEQ ID NO: 394466 - DNA, 259 bp, Oryza sativa
ctttctcaagagacaagaaagatttcagaaatctttggatggggatctgtgcatcttcagagcagctggagcatgttcatgagacagatgagagcattgtgtatgtgaaggatgagcaaggaagggggggtagggggaggtggcgagtactaccacaaccacctcgaataaggccaaggccaccttacactcgtgcctgagccggtggtagagaaacttgaaccccacctccgcgccggtcacgtgcaaccggtcgtcc

SEQ ID NO: 394467 - DNA, 465 bp, Oryza sativa
gggctagcaacaaacaaatattaattccgcaccaaatactgtcccaaacaaatgagtagtccctttccctcttaacatgtagtattacttcactcaaataagaaacttatatgaattatgcatcaagcactgttccctgctgttttttagacaacggattaagaaaccggcctctacatccaactgttccctgctgttgatcggtgaagtttcatttcctcgtcagatggaagggctcgtgaaatactgctgtcattgtttgcttggccagtaaatagaaggcgcttatttcatcctgttgaatatacaattggcgaactaaatctcctgtgttggttgaacctttattctgtttgttactcgggtaattacaacttggactttgttgattctgcttcacgcagatgtgcgtacatatctgcgatttcttttgcaaagtatgccttagcttgcggtcttttgatc

SEQ ID NO: 394468 - DNA, 488 bp, Oryza sativa
caacgaaacagagtcaatcatcgtatacgaaacattaggaacaatcaccaaatttgttacactactcaatatgttttgcatccaaaatggttaagcatcgatcatcacactcgagaagaaagtggaaaagaatgggaaggagacctatgcaaggcgttactatgccgcctgtagctcaatattttctggaccgtgtactctctcctgacaaaaatgaattgagactacctacaagcaaactaaactactactagtacgtttcattccagcctgctattttccagcttattcagcaaccagtggaaagcggctcaagttggatggcaattttcatgtccaattcacatctattgtcttgtcttctatgggtttaacggctcatcttccccagtcatctctacagcttttgttgatctgtggagaacagagacacccattagccgcctttggaagattgctgccatgaaaaggaaaatagcacacatgcc

SEQ ID NO: 394469 - DNA, 665 bp, Oryza sativa
  unsure (1)..(665): unsure at all n locations
nnnnnnnnnnnnntttttttttttagtttcaactaaacacttataaatatccctttatttgcttgctccgtcattcaatccatcaaaacaagatagaaggaaattaaattaagctaaaactccagtcctaatgtatatactttatcctagttagcaacaaaaaacaaacaaaagaatacgacaatttcgtacttacaaacatgtacagttttatgaacccctttaaataacacgaggttaaagattgcttccccgagttagaatttgatttatattaactccgatcaagtgaagccaaatatcaacgattagggtgtcacttgacccggcgctgcatgcaaagcttccactacaggagttgcctgcaaaaacaatatcttgtccttttctttgacccttggatatttacactgaatatttgccggtcttagctctgtccactctcctcttcatctcggccgtgaagctcttctccaacaagtaggcttgaaataatcctggagaggtcttacaggcacaggaatgaatttccccagatatgccagaggccaacttataagccaataggcaactgagaccaaccatnaatctccaattaagtctcaaaggttttgaagaactttcccaggaactcaataattnagtaatctggaaatacagtagtt

SEQ ID NO: 394470 - DNA, 508 bp, Oryza sativa
gcggctcggagcgcggcgggaaatggcgaggctgatcggcgatgcggataaggggaggaggtggacgggtgttcttgcggaggttgcgtctccctctccccggcgggagctcgccgcggcggcaaggacgacggcgcgcgacgtgttcgcgccggtgactaacccgacgacgacgccggcgacgaacccggtgacggtgcccgcgacgaacccggcgatgaacccggtgacgccgggcatcgtcaccgtgccgtcgaccaacccggccacgggatactccaacaaccccaacctcccgccgctgtacccggagccgacgccggtgacgatgcccgacccgacgacgacgacgacgccgacgccattcatgaacccggtcaccgcgccgaccatgccatccccggtgaccaaccccgccacgacgccggccgtcacaaacccaacgacgatgccttacccgtacccgccgcagcaaggcggcgtcatgccgacgactccgacttaccag

SEQ ID NO: 394471 - DNA, 514 bp, Oryza sativa
gctccagcggcttcctggccgtgatcacctccagcagcagcacgccgaagctgtacacgtcgctccggtccgtcagctgctgcgtcatgtagtactccgggtccaggtaccccattgtgcccttgacttgggtggtgatctggccacgaccgtcttcgccgagaagcttggacaggccgaagtcggagaccttggcgttgagccgctcatcgaggagaacattgctcgacttgatgtcacggtggatgatcggagggtcagcgagctcatgcaggtaggcgatacccttcgccgcaccgaggacaacccggagccgccgcttccagtccagcctcacaccagatttccctgtgaggctctccttgagggtgccattggggacatactcgtagacaagcatctgctcgccctggtcgaagcagaatccgactaggctgacgacattcttgtgatgaaccctggacaggagctcgatctcagtcctgaactcgaggttgccctgcagggagccttg

SEQ ID NO: 394472 - DNA, 496 bp, Oryza sativa
gagtaacgatcgaatctatttctcttctttagcaaccaatgaactgaatggagcaatcgctttgtacatctcaaaagttactgtaaggtgtaagccaagccatctccacatttacaaattgtttgtcactacgctgttaactagcagtagcacaactaggattcaaccacgctaattaacaaaggaaaaattactgaaacaacgaagatatattacatttacattgtctaagctacaccctcaaactttgcctttgtatatcatcaccatttctgaaaaaagttcagaactggatcagcttatatcagctatatatagctctagctctagctctagctaagctagaacgggttccacgcctgcgacgccatggcgctctgctgcacgtagccggaggactcctcctccctccagccaagatggaacccctccgtcttggcggaggcagcgccgccgccgccgccttgtgccatgttgctcagcaggtccctgaagt

SEQ ID NO: 394473 - DNA, 482 bp, Oryza sativa
aaaagaaaaaaaaagtctcaaccgagctcaattctgcagctcatctttcatcattttccacaaattgagaggttctccacaaaaaaaaggcactacaccaattctgtcaggggtcatgcaaaggcccgctaagatttattactcaacagcgttctcacaattgagcattcaagtttcttccttgttccccaattctcagggaggatgttaaccgttgcttcttgtgtaagagaagattaagaaaaaaaaaatgtacgcatcctctttttccacgatggcaaaaaccatgtgttataatcttcaactaccaggtttcctcacaaacagcttctggacctgctccagtgtcaagaacattatcacattccatgatcccagtctagcaaagtttgggaggaagcctttgtaaaatgccagaggtccatcattcttcagcgttttcacgaaacaatcaatagtacttgtgtaggccgagtcaccca

SEQ ID NO: 394474 - DNA, 656 bp, Oryza sativa
ccttcaaaacatattgatcatcccatttaaagagagcaaagcaggcttttcgattgggcagtttacatatgtttggttaaaacaatgtaatgacatttaaaatttgaaatccaccatctttcatttctattctatatataggacctttaaacgaactgaaagaaaaaaaaatttgaagggcctttaggagctcaatcctgtaattttgtatagctaaagaaactagcccttgcaacactgtcagattctgctcgcaacttagctcttacgccgcgatggggtcactcaatttccggccgcttgtttccaggggaaagtatgagactgcaccacctgagacgagcatcaccgggatgaatatcaggatggctgcagtctgatggcacgcgtgcaccaaaccaacggccacaagagggcacaagatcccaccgaaacgagcgattgagctcgcaaacccgactccggtagccctgactgcggttgggtatatctcaggagcatagatgtgcaagacaatgaagcttgcggagatgcaaatgcgtgcaccgaacaggaagatagttgtcagggactctgtttgagggaccataaggggagctatgcacaggcaactgatataaagcatagaggacattgagagtttgcgcccaatcttg

SEQ ID NO: 394475 - DNA, 810 bp, Oryza sativa
  unsure (1)..(810): unsure at all n locations
gggaaacaactagaatgtgacagaatttcatttcaggcaaataaccaacaattgcttgcactgaaaaacacataacctgcaattcactgaaaaacagacagaactgccgcttggtagttccctgttttgaaaaacacaatctgcagtaacgctgctaattttccaaataataggtacaggtggagatactccctccgtcccaaaaacacatacatcaacctggagatcaacctaggagagatcacatcccctcttaattcttatcccctcttaattctttttgggacggagggagtactgttgaagaagtccgatgacattttttctctactgatcagtatgtacaagcattcacagacgtcctcctcccatatttacaaattgcaaatttgcaacaaatgctccctatacattcgtgtcttctaactagcagagcttccaaacgaacatattcttgggtctaaaatttcgccatctcactccaatatggagagtatacctggagatttcatctatgaatcatcacatacaggcgcacagcaaaatacatgcctagctagctaagctagtctcagttgaaaactatgggccacttcagaacttggccagaagccacccaaatgtccagccaagaagcagccctgcacctgcaagacctaaaccaacggcaaataagagcgcgtcacagaaactccctgcatttttatgccttctgcctttcntccttgtccaatctnctttctcatgatctggtgtgtccttttctttagtgtaatccatgggatatcagggatcatgggtgctatctga

SEQ ID NO: 394476 - DNA, 476 bp, Oryza sativa
  unsure (1)..(476): unsure at all n locations
gggaatgtcacctatttgaccacttaaaactgagattcagatatacagattaggggctacccatgagcacagtcgcagatctctgtttcacatttgctaaacttccaaagttaaaagttgaaactaaaggaattctcaaatcgttgtgtggacctcttgttatgtagtgtacctaagatctacctatacggtcttcctcgttagggccagaagtaccactgctacattgttgatcttgtcttcctggaaacactggaaacaggtttactggcaaagtggccgttggtgttgggtaccttgcctggggccgtgttacatggtcagaaatcccgtgttcttgtgacggttcgctgtcttcgctgctcgcagactcagggaagagctgaagttctcttggcgtggcggcatagtgctgctcgatgataaccggtagctgctgaggaaatgctgccntnntggtgantggtaaaantggc

SEQ ID NO: 394477 - DNA, 984 bp, Oryza sativa
ttttttttttttttttttctgaaagcatgtatattggatggacgctatagacaacattggtcgtcaaaaagtaaaacctcattgtaatttgtacgcttgatcaagtagaaagaaagggggtaattacaaccagatggagatacacactgacagcttaagcaaatgactatcttttcttatcttatccatcaaactttcacccaaagtgcttgccaacatactaatcacaattcacagccactgaagtagatatgcaacgggcaccatctgcttttttctccaaccatatcttgcaaacctgatgcgctccaactccggcacaccacctttattttacctttttgaaaaactatgttatgcacttcctgtgctgctctgctctataaatcacacctgcctacatggagcttgcaaaagaatgacaataacttctctgtactatgcctgtttcttcagacattctccactgccttaggagcaaatttcttcactgcgtccccgacagtcaggaatatcttgtcttcaccgatgagatccgtgaatttcgctgatcggagcttcaggatcacagctggccccggattggctagaatcagctgaggaatgccaggaaggatgctccgatcaatatcgtctgccagttccactgcagcagcaaccaagctagcatcagttgtacccaatactggtttccatcaaagaatgatgaagaagcaataagttcttaaaggaatgatattattttgtcctaccccatggtgaacatttccccagactgatttcatgaccgagatgatgtcagtcttcttggtgaaggttgcaattccaaggaagcctttaagctgctgaagggcaatggtgatggccgctcccgccatgaatccaacgatggcagcatgggacaagaactctatgataaaccctagcctgcagcagaggacaatctcactctatggtagccactcacctgaggaatccgagcgc

SEQ ID NO: 394478 - DNA, 502 bp, Oryza sativa
ttttttttttttttttttgaatggaacgaacatttctgctatgatcaacaatgaaacaatcaattacagtagggaagaagaaaaagaatcagctcgccattctttctttttaatcaagaggggaaagaaaaataacaacattgccaagccatttgtccagatcatgcattgggcaccaaccactaatccactatacgatcgcttcccagtccaccccgaaaaatggtacccctgatgccagtatgctgcctgtgaagtcaatgacatgcaggaaattcacgcttcgatctgtcagctgaaagaatttcaatccacaaggtagcagcagcgcttcgacagctgccacccttcatggacttctctttgcactaaaagggtcacaagacaaaagaaagcccttaatcctcggtgtcacgtgaaccagatggctcagggaagatctccttcgattgcctcctgcgggaggaagaatggtcaccattgctccctccggatgatttga

SEQ ID NO: 394479 - DNA, 619 bp, Oryza sativa
  unsure (1)..(619): unsure at all n locations
nnnnnnnnnnnnnnnnnnnnnnnnnnnnnnnnnnnnnaaacgggctgtttattaacagcattacttcactatattccacagtaatttcggaagggataaataaaaaacatacggttacattttacatacaaatgacaaacataatccgttcgtcactttcaggcaacagaacagcaaatgcaccactacacccaaacagcagattacacataactagagtacttaccgaatgatcgatcgatcaatcgaagcagcacgggaaacacacacgtggaagcatctacgtcgtgcgttggtttattacacacgaaaccgacggcccagatctctccctccctccctcaccatcagtctcagtccacctgggtgaagcggaggtagcacttgttggagggcagctgggcggtctcgaacccggccgggaacctcgccttggcctcctcgtcggagacgccgggggggatgacgacgcgctcgccgggcttccagttcaccggcgtcgccacccggtgcctcgccgccgtcagcagcgcgtccgtcgcgcgcagcacctccgccatgttccgccccgtgcacgccgggaacaggaagctcagcttcaccttcttgtccggcccga

SEQ ID NO: 394480 - DNA, 439 bp, Oryza sativa
  unsure (1)..(439): unsure at all n locations
agaacatcacagatttatttatgcactcaagtgagcagatttatctgaatggtttcaccacaaacaatagttcagacagaaaggtaactgactgtaattaaaggtagtaaaacagattaacgacccacttagccatcagctttggcttcagaatttcagatcctctcatgacatcgacttgcgccatttcggcgtcggcgtccccgcggcggcgccggcggcgccgcccctgcccttcttcccgctcgccggcgtccgccgctcgatgccgctctcggagtcctccacccgcgcgacgtcggcgctcatgccgccgaaccagaacgtgctccacttgaagaacccgccgccgccaccgctgccgccttcggcgggccgncttcttttcgtgctcagcctgtccacctgagcctgcagcgcgctgcactggacctggagg

SEQ ID NO: 394481 - DNA, 480 bp, Oryza sativa
aaacagaaccgtgccgattgaacttatttttaagggaagataatgagctcgagtatgcatacatacttcgagcgacaactttcgataacatctcttcggatgttcaacaaacggagcaaacagtgtaacaaagaacaagacacgtggtcacaaatcaaaataataaaggcataagcggtaaaagttttgcattttgttgataaccaacagcttacgagttggatgtatcaacagatgattaagaagctagctggttgtgactccatagtgagaacatccccttgtactttgcagccacaaactggcgtgacagaaagctcaaaggctgctccttgcagcagctggagctgcgttttgatcggctccaatgtcttcagcacaggaacggtccctgcaagtgatgcacctctcagatgtcaccagcggagatagcttgctacaatgaggaacggtaggggcagttctgctgtcgctagtgct

SEQ ID NO: 394482 - DNA, 672 bp, Oryza sativa
  unsure (1)..(672): unsure at all n locations
nnnnnnnnnnnnnnnnnnnnnnnnnnnnnnnnnnggctgcatctatatgcaaatatttttttctccaagcaaaaacaccaatccacaaaagacactttttgaaacaaattatacatacatgaagaaaaagaaactactacctatgtcaaagacagtatataatcttcccctgttataacaacatgtactggtggcattgcaatctgccgcgggccttcttttcttctctttcccctgtgaacttgttcagtatagttacaagaccaaaccaaatacaccaagcccatatgatgtagtcctaggagttacagccaagaacatggcaagaaactatggagatgatgaagatgatttgcttcaactcgacggagacgtaggtggcggagtactccggcatccggggcaggctccggagcacgctctcggcgacctgcttcgtcgcggcgtcacccttgtggaacgcgctcaccagcgcgctcggcagcgcgcggtccgccgtcacgtcgcgcacgcaccgctcgccgccgtgcgccaggaacctctccacggcccagaagcagcgccgcgacaccgcgccgccggtgtccccgccgccaccgccgacggcggagacgtcgcggtgctgccgtagcgcgcgcaggacgtggcgcgccgcgtcgtgctcgcgagcgc

SEQ ID NO: 394483 - DNA, 669 bp, Oryza sativa
  unsure (1)..(669): unsure at all n locations
nnnnnnnnnnntttttttttttttttttttgggtaaaattctcagggcgaaaactgtagctctgcccgaatcctttaaccggcaaaactcgccgcaaaactgtagctagtatcatctctttcgatatacatgacaacaaccaactcaccatcagtttcatctcaagcactcaaggctcgatctcactgtatacaaacacctacactagtctctcctctcaaactcctccctgaagatctggtattatttttcatcgccgcgccgcaattaacctaacccaccaaagctgtgatgaaaatttctgatgcaacatcatcttggatcatttccagccatagctctcagacctgccatcctcctcctcgcagctgaccgtcgccgccgatgagccgccaccggccatgcctgagcctgagaaatggagaggaccctcaggggatccagactgggagctgctttgctcttgaggaatgtaacagagcccttgcatgagcacaatcggttggttcacaattgttgagcttggcactctcggccggttgtgcaggcggtacttctgaagatggcttttgacctcgtcatttgtcagtccacccacctttcatcagctccctgatttgctttggagtggcaaacttgaggggcancgagtttgctggcaaggcggtt

SEQ ID NO: 394484 - DNA, 392 bp, Oryza sativa
  unsure (1)..(392): unsure at all n locations
tttntttttttttttttttaatgaaatatttcgtggatggctcaattaaccaatgagtttgttcccgctcacaatttatcagcgattctccgcccaaaaaagctacaggtatagcaaccctcttagaaacctaagaaaccaggggtgggtaagatgtcaacttcctattacatgaacaaaaaaaggtagaaactagatgtagatcaaatctacatcttagcttccttagcagcatcctggtattcagcctcaggagtctggtcaccaccactgctgctgctgctgccgccgccantgccgccaccgccaccttgttgncatgtgctctccaatctttgaaactgcctgtttgcagcctcaagcttctgcttgnatcttctccaaatcatcct

SEQ ID NO: 394485 - DNA, 417 bp, Oryza sativa
  unsure (1)..(417): unsure at all n locations
acaactgaaagatcgatgaagatttgcacattgatacagttaattcacgggggttctattacaggtagttaccaacaattgattacaacaacctacatgcacaagtatttgtacatttggagaggtggacaactactacactaacgaggcactgcttactagacatcggagacgccggacacaaaaacgacgccggcgagcagcctccggaacctaaaaaaccaacacaaaaagaaaagggtctacacaagaacgaacatataatccatcgcctcgccgccgcgcagaatgcctaaaacctcatctgcgcccgccggcaatggcgggctatggaggagaagagctagttattgntgttgagcagcgagtcccagtcgatctcgtacgacgggtacttggtgagcgcgaaccccttcg

SEQ ID NO: 394486 - DNA, 421 bp, Oryza sativa
cggaatgaatagcaaatcttaggaataacatgtcaagtttatcagaactgtctttattagaaatctggagtcatgagcgcacaccatgatgaccaattcacttcctactttgatgtattggatctgacgcaacatggttcactgaaatcactagcagaagcaaatagatcattttcaaaaaggaacaggaaaattgtgttgttgctaatgccttacaccagcaaagtgaaacctggcatgcatgaagctttagggggtcgaagtacatctgctacaaaacaggggtgttcacgtcgaatctcaacatgctagcggctgatgggggtgtgcatacgctcaacaattctatttgatagcattccgcgtcattacaagagtgtcatgtttgaaggatgctgtatacatttaggccaatggatgg

SEQ ID NO: 394487 - DNA, 702 bp, Oryza sativa
  unsure (1)..(702): unsure at all n locations
nnnnnnnnnnnnnnnnnnnnnnnnnnnnnatatgatattagcaatatttttctgcatctcagtcttgagcatgtgcgaattgtttaattttgtctgccattgttaacaaccctcttcctccaaactaattgttctcaagaacaatagaattcaatacaaactcagagaatagaagagaaattgagtgagaagaagtagaggaagcttctagaaatggcagtgaagaggaacacgagagagtaagaaagagatagagatcgacgaggttcaaccgaaccaagccgccgccgtggccgaagccgctgatgcctgatctgttcgttgcttgaagttctcctgctgctgccttttgtatccctctcctttgtttgtttggcccttggcatggattagcaattgagtcagcccatgtgcagcccaatgggttcctgacaatctcctctccttgaaactgacttgtccataagttgatgacaagtaaacttcagaaatggcaaacctccactttgatttctctagtattcttgcatcgttccaaaagcttcattaatgtccaatttgttttcagcgtgccaacagaaaacttgcatctcaaaagaacagctcaagcaaatcctggcacttcgcatgtgaaagagagaactgncttgcaatgagaattgactgcctgaaatgtgatttgtccaagagaagagnatattt

SEQ ID NO: 394488 - DNA, 674 bp, Oryza sativa
gattgtgttgaataattcattgctgactaatgaggaacaaaacaatatttagatgggcaccctgtacacactctgctaatgttattcttgctgtacatacagggtgaaattaattgattaatctttccgtgtgataatggtaacaagggacgctctttgacagtgaaaggtacagcaattaagatcaatttggccaaacaagaaacacacgtacattaagattgaagactgactaggcaaaacaaaacaaactaataaaaggcatctactgtacacggggatgaacacaagaagaagaatatagggcgtgacggagacatggacgacgatattcgtgagcggattatggttggagcttattgttggagacgtggttggcgccgacgtggacgtcgtggtctccgatgaatcggcgccagaaccagtgggacttccagacgagcaccatctcctcgatggggacgttcttggtctcggggaggaagagggcgatgaagacggtcatgatgacgacccatccggcgaagaagtagaagaggccgaacttcatgtggcagagcatggtgaggaaggcctgcgcgatgacgaagtgaagagcatgttcaccgacacgttgatgctctgccccgccggccggatctaccagcgggaagatctcgctggggacgaagcca

SEQ ID NO: 394489 - DNA, 820 bp, Oryza sativa
tttttttttttttttaatttcaaacatgtcagtcacatagatttattagaacatgactatcacaggacaaattttggaggtgacagcagaccttcagtacaagacctgaaattcagcatctaatgtgtaaccttcccccttttatttatctcacacaggtgattattacattttacaaagcacaaacgattaataatatatcacaagttcacaacactgctaaacaaatcaggacacaacagttcacacaatcacaccatagttttcacacccgaaggattaagaagagaaggcacttgtcagatggttcgaagcatatgcttactgaaatggagagagcagaaggcggttcaaggctctacagccagctgccccgcaccgcagagttaccggtcaccatgccattggtggatttcgagttgcgaggtgcagaggtgctagcctctgcttggttggcgggatgcttccccaaactcatgccatttgcaaacattgacaggatgttgccaccatgcacccgaccctcgtcagctggagctgccacacgacgaggagcctccataggatgcgagaaaatgctgcacctgcttgtttcagtgtttgaaggtcgatctccctgagaaagtgcatcgctgacaacgctgaaacccccatggacacgattttcatccacctgcggattgtgataaacacacaggccattcttgcctcttgcaaggcgctcacaaggagtgtcaccagctccatggtcagatccttcgtgaccccacaagcaacgcttgccgcctccatgtgccttgcaaaagttagtgcttccctg

SEQ ID NO: 394490 - DNA, 490 bp, Oryza sativa
gaacgaacgaacttgactcagctttctggtgtgaaggcagaatgcttagtcattttatctcatcatcagtagtctatcaatgtcacaacaattgtttcacttcattctcgtttgttattattgaactcatcctaagaaccccttcaaaaaaaacaaacaaaattactctgccaccatgctggcgtgacaattctatgtgggtaaaaaactcaaagcaccctaggaattccaaaattgttggaaataaacctaccactgatgttactttctatgacttctgctttgatttctgcttcttcaactccaaggaagtccctaatcctactggggtggaaccaccggactttttagacgatggcccgttggtattccctgcagtgccgttttgtgggggtccattcgattgctgaccttcagatgcattttgagtgctggcagtagcggaagtagcagcggcagtggctggagtgctaccagaagcagtaggcgc

SEQ ID NO: 394491 - DNA, 510 bp, Oryza sativa
tctttacagatttcttggcgatttgtctggttctgcctgctcttgctggtttcagatccgggaggggactgagcctccgaagttatcaggagagtgaaagacataatggggatcagcagcgaatcgccgaatgggagccagcagattgtacaaaaggaaacacgagatgagacaacaccacttctgccggtcaaggtggaggaggaggggtttcatgagttcaatggagcttcattttccggggcggttttcaatttatcgaccactattgttggggctggaattatggccttgccagccagtatcaagatgttgggcatcatcccagggattctgatgatcatcgttgtggcgttgctcacagaggcatcaattgacatgcttgtcaggtgcagccaccagggcaagattacatccttatggttggctaatgggtgaggcttacggacagtggggaagaatggcactgcacgcctgtgtcgtcaaaacaacattggggtgacgataggc

SEQ ID NO: 394492 - DNA, 468 bp, Oryza sativa
gccgacttgagcgcggcgatgttgctgagcgacgcgaacatccggtccttcctgcccgccatcaccctgttggagtccaggaatgtggcgctgagcttgccatgcatgtcgcccctccacttgtgcagcgacgacaaggggtcggccgccgccgcgagctcgccggcgccatgaccgtgatcggcggccttccgtgctgccgcgagctggccgtcgagctccttggcgcgcccgcgcgcctcggcctcgctggccttgaggctctcgttctcctgacgtagtgcctccatggcgctctccttctccgcgacggcgtcctgcagcttggagttctcgccggtggcgagctcgagcgactcgttcgccgcgttgacctcctcgacggcgcgctccagagcgcgacgcaggctgccgttctcgtcgtcgaccacccggtgcagctcggcgagctcgacgttctcttgcccg

SEQ ID NO: 394493 - DNA, 451 bp, Oryza sativa
  unsure (1)..(451): unsure at all n locations
nnnnnnnnnnnnnnnnnnnnnnnnnnnnnnnnnnnnnnnnnnnntttttgggaacacaaaccctccctcctcttgttaaaagcttttctacccccatgaaaataaaaccataggggagaatgcagaaacacaatacacgatttacaagggctactctgcagacgactgactgactatacaggggattggggagacttgggaggtacaaagaattagttggcttaaccagccatcattataataagatcctacaacaacccctactaatttacacaatctacgcgaacccgccgcttgccatagacgggagcagcgctctagcacttttgcaacaagactacccttccaaatactgacgatgttgagggcatccatcctcatcttcggcgatgttgggccatctttgcctgagcctgctttatcctatccgcatacatcggggggcgcggga

SEQ ID NO: 394494 - DNA, 456 bp, Oryza sativa
caccgtactgccggtttgctagccgcctcgctgctccggctccgcctctccacccatcccgccgccaccgccgccgccgccgcctcatcctcctctctacccgcgccgccgcgcctagctatctctaggaagggaggagaaggggccgggtgcgcgcgcgctcgctcgctcgctcgtctcgccggatctacagccgccgccgccgcctccgggtgttctctgcttgggatctatctcgtgagccaaagccatggcccgccgtcgcgccgcctcaggtcccggtcgtcgcgcccgcgcccgctgctgctgctgctcctcctgccccggctcctggccgacgccgccaccgctgcccccgtcccggatcaaaccacgggatctgctgcagaaggtgtctttggattcgcagcccagggcggtggatgcggccaccgagcccgcggcgctaagaggggc

SEQ ID NO: 394495 - DNA, 517 bp, Oryza sativa
  unsure (1)..(517): unsure at all n locations
tgtttttgcaaaaaactacttcccgaaacctttattagggccaacagctcgaaactgagcaaccgaaatgcaacgtccacttcctacaatctgtaacctatcaccggcacttaagatggctactgttttgcctttacacatggatatccacattgcacattgggaggtgacaattctacgcaacgggaaaaggcgctacattaaatcaatgatggatctatcagttaataatggaacacatctctacaaggtaaggggaggagggggctgtacaaatggggaaggtgagagagactgttgttaccctgccatctaaaagctaaatccccatgattaggtaggaaaggtgtgagtaggaagaaaaaagaatggtgtctgactaaaatctccaaaggaaaaaaccaataccctctgcctacaattccttggctagcctaggaagacgttggatcttgtcttgagccaatgcancatctccttgtcaaggggggaattattcaatacggcatccatcatt

SEQ ID NO: 394496 - DNA, 662 bp, Oryza sativa
  unsure (1)..(662): unsure at all n locations
tttttttttttttttttttggagcagcaactcttttttttttattacatgggtaatataatgcacatatgaatatcccactgtgtgactgtctcctaccccaccacagctctgtacatctacaatatggaggttactactactgctactatatttttacacggttgcaaaacttagttgccgttaccgagtcgtaagcacccagcagtgcttggacttgactgggtactaactaggagtaactgaactgtaactaaaaaccgaagctgaaaagtaacaaacaagctataatatgtatgtgacgtggcttactgctcttgcccttctccggcattacgccggccggcctccgggaagggaagcgccgggctcgccgccattccggggcacacggttattgtgtttggctatgtcatgtgtacagtacactatgttgatcaggccggacgcgtcgagactccctagaactcgacgatgaggctgccgaagggggaccggtgcgggacgcccttgcggcgcttgttgccggtgcggtagctggcggnggtcggcggcggggtcaacggcgtgaagctctgcacgacgctgctcttgtcgctgtgccgccgctggtgctcgtgcacgagtcctcggactcgtaccgcgcgtccttgagcgccgccc

SEQ ID NO: 394497 - DNA, 448 bp, Oryza sativa
tcgtgatgtacgccatgcacctcgtggagctctcggagcggtcgtcggcgatcaccctggtgcagcgcgcccgccgcaacggcatgccgttcttcaactccggcgacaaggccgagcagatggtggtggcgttcgaggcgttccagcagctgagctcggtgcgggtgcgccccatgacggccatctccgacctggacaccatccaccgcgacgtcatcgacagcgccaccgccaagcgcgccgccatcgtcgtcatgccgtaccacaagatgctccagcacgacggcacgttccagtccctcggctccgcgtaccacgccatcaacaagcgcgtcctccgcgaggcgccctgctccgtcgccgtcctcgtcgaccgcggcctcggcggccacgcccaggtgtccgccaagaacgtggccttctccgtggcggcgctcttcttcggcgg

SEQ ID NO: 394498 - DNA, 533 bp, Oryza sativa
tttttgggtttactgaaataatttggtactatattttattctaatcgaagaacatgtctatatctcacatcaaaggtcttatttagatgcaacatactaattccacaacaccttatcgaagcctaccatactgcatcacatatatcagcaaccataccgtatatacacatcataaccttaccaaatcaggtcacatgcagagtcatcttcacatcataagttcaatactaaccaaaattacacaataccaagtttccaatgatgctatgcataacaataaagctgctaacgatagtaattacggataattggaccctcaggccccgccaacttcttccacacaggcggacacagcatggaaggcacggacacgggttccacagcccgatcgcttcttacgcttgcctgaaatcatcgtccacattggctccggagcaagcacctggacctcacagctactggcctcctccttgacccgaccgccacagctctcaccttcctccttcacccgtggaagaagggtcggcttagct

SEQ ID NO: 394499 - DNA, 472 bp, Oryza sativa
  unsure (1)..(472): unsure at all n locations
ttttnnntttttttttttgcagccttgaagcctgctcctttcaggttctcaattatgttcataccactgcagtgcacatacatccgctcatacatatatagagcaacatagatagccagccatggctagctccaaatccgtagatgtaccgatacattctttcactatgaacaatccatatcagtagatcgatacaccgaagcatcgaccatgcacgcacacatgtcggtgatccgctgtcgtctcaagaggtcgtggcagcggcggcacacaccggcaggtcgttctcctgggtcggacgctgccctaggatggggttgctctcaaagaagttcactggcttaaggtcgaagctggacgacaccgtgggcatgatggggaagtcctcctggcacgggacatggtgaaaccccagcgttgtaccacagcaccaggtccttgttctcttatcngacggtccctttcggaccaa

SEQ ID NO: 394500 - DNA, 538 bp, Oryza sativa
  unsure (1)..(538): unsure at all n locations
gtattttgcaagagcagagtgagagtaggagagcttgagttgaggccttgtgggtttgcacacagaacagcttgagaaaatgtcacagtgcccaactcatgtcgctctccggttgcttgctctgctcttcctgcttccagctgcgtggtccgcgacgttcacgatgaccaacaattgcggctacacggtgtggcctgggctgctgtcgggtgccggcacgcgccgctggtcgacgacagggttcgcgctggcgcacggcgcgtcggcgacggtggacgcgccggcgagctggtcggggcgcatgtgggcgcgcacgctctgcgccgaggacgcgacaggcaagttcacctgcgccacgggggactgtggctcgggtggcatccagtgcaacggacggtgggcgcggcgccgncacgccaacgcttcatgtgagttcacgctcgacgggctccggcggcatgggacttcttcgacgtgagcctcgtcgacgggtataacctgccccatgatnattcgcggcntacagctacgggtaacg

SEQ ID NO: 394501 - DNA, 419 bp, Oryza sativa
gaaaatccctttatattatgggacggagggagtatgttacaagctaattaagagccctgggaaggcagaacaaaagaggggtgaatttaattgcaatacacatgcccgtcagaaatggtagcaagtatacactagctgtaacctgagacccatcatcaccgaagctgtaacccaaacacacggcgaaccaaacaaacatcgccgcgtacagcaaacaccactctttggacagaggagggatttttgtatgaagaatttgagaagagaaagcatcggttagaatttacaaagcttggacgggaaacaagatcaaaaggaaccaatttttttcttgttttaattatctgtgttttacttttgaaaacctccttatcctatttatgtcgaggttggtattgttctggtggaatggtggagtg

SEQ ID NO: 394502 - DNA, 620 bp, Oryza sativa
  unsure (1)..(620): unsure at all n locations
nnnnnnnnnnnnnntttttgggccagcacttttgagtgttggattagaaactgatgaaaggtaaggtacagttactacattagttgcaaatcacctaccaaatcacaatcttttttttttctactgctgccatagcagagcagaactaacattaggaaagcctaagacctaatcagattacccgtttcagccaacaatcatgggaatagttttgacaagagcactgagttttagaggccctaagttcacaggacaatgtatatcaatgtcacaacttcactgtatcatctttagctactttctggcagagagtgctgctcttcaggggcctcttcctggttgctcttgaggctgctgccacacatacgtcaccgggtgaccttgctgtccaccgtacatcattcctggatccaggcccctgctgcgctggcacgtagtaatatggatatggggctgctgcgccccccacattaaggcgggaggccaaccctcggaagcccaagnccttcttctttcatttcatncctgggaactatgtccaccaagaagncatagatatcagtcctggtgatggcagctgcaatggcattcttctgcaagggccggcgctttgtgtctnc

SEQ ID NO: 394503 - DNA, 527 bp, Oryza sativa
gagctccaccgcggtggcggccgcccgcccgccgtcgctacctcctcctcgagccagcggccggcaccaccaccttcccacggagccagcgaccggcgctatgttctcacggagccgggcgcggtgccatcttctcgcggagtcactggcccgcaccgccgctaccttcttctcctcatagagccagggatgtcgacaccatcgccgtctgtgtccgcttcttcgcacagctacgccagcttgcggccactactacaccaggatttgggtgtgggtggagcaagtgtgccagccactgcaccgccgtccactcccatgagaaagtcagctccatcaagatgaacgaacatccagccacttgcgcgctcctccatttgctgccgtatgaggatgaggcaggcagctccagttaggtcactactctgctcgaaaaaagaaaaactggagtcctgaagaaatgcacagactgttttacaaggcaaacatattgaagggttgttctatctcgaccaaagtttctcagatta

SEQ ID NO: 394504 - DNA, 711 bp, Oryza sativa
  unsure (1)..(711): unsure at all n locations
tttttttttttttttttttgacaaaaacttgctactagctagctggtttatattattacagtggtagtactaatttactactacagctagttgcagttggaaaccaacaaagaaatcataatattggcaatccaatcatcagtctgtgggtgttgaacaatccctccatatacctctcgtgctgtaaagtgtacagcaaagctatctgccaacatccccgtaggagtaggtatgtatcaatctatctgtacagactataaagaattcaacaagctagtagtcaccctgatattcccgtagctctatcgttcgtgtacagtttcaggaagagagagcgtgtcggagccttcgtacttgctctgggcgggagtgttccggcgagattgacgcttggtcggcacgatcacctcctccatcccgacatcctcggatattgacatattgtcctcctcctccctgcctttgaacaccgggtgcaggtacgcattggccaggtacgctttcagatcgaaggttggctcccttgcccgttccagggtgtctttcctcatcgnttcctgtaantgggttcctcacaaatgcagctcaaaccggttcttgcagtacttgtaaaaccaaaaacgtcaacacaggaagaacaacaagaactgggtgtcgtctcctcgaaacctttttggtactcaacagtccaataaagaagtagctgtggat

SEQ ID NO: 394505 - DNA, 472 bp, Oryza sativa
gtgcaccaactattatcagtactttgcttttatggcaaatccttttgtcatttacatgatagctacatatataaagtacatagatatatactagctccttatcattaaagaaaaggactagatacgtacttgatcacttgatccctacccaaatactactactcttgcatccttgcagagtcaaactcagaactactaccttttgacttgacctaatcagggatcattactaagtaatcacctaatcccctttgattaattaatttatacatcacacacactctccttaattaggtggggactcatatacatccacccttactaatatttttccatccaaggaaaaaccataaaaaagaggttaagactaggttaaatgattaataatccacctaattatactaagacgtgtggttcgaacccacatgtcagtgacgcatattgacctcgtgaacacccttctcctgctgct

SEQ ID NO: 394506 - DNA, 625 bp, Oryza sativa
gaaacaagaacctgaaatgtgcactgcgatatatataggattatgagtataaagtgggtttacaacatttgctatatatgaactgaattggaaatattgtcttgcatcttattctataacagtactataactgcctattattaattatctagagtcattcatctgcaacagccaccaacaacttgcccacattcctcccagaaaacatgccaatgagagcctccgatgccttctcgatgcccttgacaacatcctgcaggacggtcaccttaccttcctttaggtacctagccatctcatcctcaaacctcgggtataagccgaagtggttgaatacggcaaatccctccacccggatggtcttggataggatctgtatcacgttgtgcatcccttcgggctcctgcaggttgtactgtgagatcatcccacacaccaccactcgaccaccacgccgcatgttgaccagcgccgcatccagcgtcgcaccgccgacattgtcaaagtagatgtcgattccatctgggaagcaccgccggagagcaccagtaaggtcgttgccctctttcttgtagttgaatgcatcgtgaaagccaaacttggtcttgagaagggtaaccttctc

SEQ ID NO: 394507 - DNA, 520 bp, Oryza sativa
  unsure (1)..(520): unsure at all n locations
aaagggaacaaaaggggagccccaccgggggtggnggccgcccctnttnttttngtttnttttttcaactgnacttagccatgccaaaatgcacgagtattttgtttgcaacatcgttccttcagcttgctttacaacaaaatttgagcctatgaattgaacgaatgacgacgaatcctttacaacagcggactcaactctcaaattcgagctccctctacatacatacaagaaacaacaaacaccatggaatccaattacaaactgccagcagcaacaatctacttgaagaatatgcccttccttcttcctttactcttctcaactgccttcattctgaacagcctcaagattagaacaatggtatctcgtgatggcgcattctctgcaggcttgagattgtattcagcaccatcagcagccaatatagaaaattcagtaggacgcccatatgggatattgatagcagtggcttgctggaatttttctgtaataacaacaccacgctggccattacact

SEQ ID NO: 394508 - DNA, 758 bp, Oryza sativa
gttacaaacgaccactttacaagacaagtgttaaatggttaacatagttaactcagtctaggcattaatccaggaatgaacaaagggggaaagggaggattatgtcatacaagaattacttctgtttactggtacaaagaacggctagctaccctattcaatgattcatatgcattacattgtacattagctatctttacaatgctgagctgcagttggtatatggtttaataggggcccccgagtttcttctcctcacatgaaatccatggagtcgtttagggactgaccactcagcgactggccgccatttgatgagctctgctgatggcttggatggcgttgctgagcatggtggccgcctaaataaggcatctgttgctgctgctgctgctgttgcgtgtaatagggcggaatctgctgttggagtccaccattgaagggattcccgttcatgtttggagcttgccctgctgctatcttaagtcgctgaacttcttctcgcagagcttcattcagagcatcacgtagtttagcttgctcttccatggactgcaaccgtagcttgagctctctattctcggcagttaaaccagatgtatccctctggagaagcgtgagctgtgcagacagcgtggtggcctcggtctgcagtgtctgcaccttcctctccagctcgctagtgtacttgatcttcctttcccttggaccttgcagccgactgcctgttcgccactcgtgccgaattcggtgcagcc

SEQ ID NO: 394509 - DNA, 525 bp, Oryza sativa
tttttttttttttttttttaattacgcttacagttctcaatcactatatgtcgactgtcaaacaacattaggcatagtgttcgactgggcatagtgttcgacggagattaaattgggaaattgaaatgtatgccttttgcatgcaatatataccctacgatgccgaagcagccctatatgaattcccaacaaactgacaatcacacaacattaccatacagttttattatatatacatgaatcttgaatgcttcggctatcaaattgcgagaataccatcaagctatcaaattctcacatgtaattgcgagaataccatcgatcttcaggagaccatttgtcttcataccttccgagcgagtaccccacagcaggcatatcagcaagcatgcagaggatctggttctatgccatagtctgtcagtggtcggtgctcaagatcttatcatgatcaatcacgaaatctggaatttcaacttccccctttctgatgtccccccaaagatactccagccgactaacata

SEQ ID NO: 394510 - DNA, 502 bp, Oryza sativa
ggatggccggcgcggggatcgaccgcgtgacggcgtgaggtgcggcggcggcggcggccatggcgctcgcgcagggcaccggcgacttctccgtggtggtgctgggctccgacttcgcggtcgacgccggcgccgtgctcctcaacccggccgaccgggaggagtggcacgactgcctccccgacctctccgcgcccgccgacgggagggacttctccgacctcgaagagctccaggtcgtccgcgtccagggcaccgacagggccgggaggcgcatcgtccgcgtcgtcggcaggttcttccctgctcctgtcataggtggtgatcgtctgaagaagtatgttcttcacaagctgcgcaccgaattgccagaggggccattctgccttttgtacatgcacagcactgtgcagtcagatgatgacaaccctgctatggcatccttgaagggggcctatgaagatcttgcacctgaatacaacgatagactgcagatcgtata

SEQ ID NO: 394511 - DNA, 1231 bp, Oryza sativa
tctcttggctgccgtgcagcgactcctgcgggcgttcgcctccggtggcgcggcggctgctgcggcggctgcgaggaggcgcatgtccacggcggtggcgccggagcagacgcctgcggccgtggtgttcccgttcgcggcggctgcggatgagggcgaggcagcgggtggcggatgagaggaacgtgcagtgggtgttcctcgggtgccccggcgtgggcaaggggacttatgccagccgcctctcccgcctcctcggcgtgccccacatcgccaccggggatctcgtccgcgacgagctcgcttcctccggccccctatctgtgctgcttgctgaaattgttaatcaggggaaattagtttctgatgaaattatcatcaatctgttatctaaacgtcttaagaaaggagaagagcagggggaatcgggatttattctggatggttttccacgtactgtaaaacaagcggaaattcttgatggagttactgacattgatatggtggtcaatctaaagttgagagaggatgtcctagttgagaagtgccttggcagacgtatttgtggccaatgtggaaagaacttcaatttggcctgcattgatgtgaagggtgaaaatgggctgccaccaatctacatggcaccactattgcccccaaataactgtatgtcaaagcttatcaccagagctgatgataccgaagaggtcgtgagaaatcgtcttcagatatataatgacatgagccaacctgttgagggtttctaccggcaacaggggaagcttttagaatttgatttgcctggaggaatccctgagtcttggccaaagctgctccatgttctaaatctcgaggaccaagaagagatgaagctggccactgcgtaaggccatggggctggctttacattgggccaatgaatttacacaccgcaattttgaataatggaaaaaagagcaaaaacttattccataatgtgtgcgtttgtagaattaaagtttgaccaaaagtgattcattttcgccggtgttttgatgagccggtacactgtaactgtcatgttgagatgttaatcttaatttcttgttttgatttagcctgctgagaacaggacttcatcaggatatgatgcgagagctatattcatgatagatacattggtcaattatgactatatagtagtaatgcattttcactgtactgttgtcttttactaaaaaaaaaaaaaaaa

SEQ ID NO: 394512 - DNA, 464 bp, Oryza sativa
  unsure (1)..(464): unsure at all n locations
nnnnnnnnnnnnnnnnnnnnnnnnnnnnnnnnnataaaggagcaccatcctttatttatcagctaataataatacataaaccatagcattacatcatattattgcattttacaagccataacatgacaaaagcatactataattttcttctttcattttagatgtagcaaagcatactccctctaccgcgttgcaagtcgtaagagggcacatcacaatctctccatcggtccgtccatctctgctgcaaaccatcaatggcaatgatccaacggctgggaatgtctcagccacgaacaccagagggcaaagatcgcaccgccacgtggcagcagcagcatcctagacgtgaatctccaggttccacctgtacatctcctgctccggcaccggcagtccgacggcgangagccccgtgtcgccgtcgtaggtgaacccacgtcggngccgtcgagggggacctn

SEQ ID NO: 394513 - DNA, 404 bp, Oryza sativa
  unsure (1)..(404): unsure at all n locations
gagaagaaagcataaaggggatcattacagcaaccaatattgttacttcatcagtcctagtatgaaacagtcgtgtaattcccctgtacacgttctacgctaacacaacaccctcaagcatctcacaaaatcacactacagatcccgcaaaaaagctcgagattttcagcaaagcgggcagcgcacgagcccattctcgttgcagtcggggcagcgccggaaggtgtccagctcctcgaggaacaccttgcagctgccggagcactcctcgcacggcacgaaccggacgccgccgcagccggagcacgcgtccagcgcaatgcccttgcccgcggnggccggcggcgccatctcgcagtcgcccagcgccttggacagctccccggantcgtgcatgcggcgga

SEQ ID NO: 394514 - DNA, 384 bp, Oryza sativa
  unsure (1)..(384): unsure at all n locations
nnnnnnnnnnnnnnnnnnnnnnnnnnnnnnnnnnnnngatcactacaataaaatcctttattcgtgatggatgataacctacataatgtatgcctcgtcgggggtcactagtaataagaaaaatatcaactgttacaagtgcggacctgtcagagatgactatctctcaaaacagtccaaaagttgtgatccgttgatgatgactataacccaacatttcctcacatctcggatcgatctgcgtttacgaatattcgagcaagaacgaatttgtcgttcattcgtttcttaccgaacacacacacggtatacccatgtgtataaggtcaagcaattcacgaatttttgctacacatcatcacatcagagttctcccaacctctt

SEQ ID NO: 394515 - DNA, 713 bp, Oryza sativa
  unsure (1)..(713): unsure at all n locations
nnnnnnnnnnnnnnnntttttgttaacaaaaacaatggtgccccagcgttgatgatatattcaaagctataaataatcctgaaactttggttggagtggcacaaactttacacatgctaatttcacgacgaacttactacacacacacattcctgcaagaaccaacaaacgtccgaaatcatgagcggcatcaggtgtcccagatcatgacgacggcgatgacggcgacgcnaagggacgacggcgagcagcctncccgccggcgtgtcggcggcgacggggnctcancgggggtgtaacccttgganaagaagtgggttgatgganacgtnnattaanatgcccgtngcgaaggccatgganacggngaaantccantcggcanccggcctgcgtggntggcgtctnttaanatccgntccgaacccgaaaggggttgtaaacggcnaaggtaagnttaccnacaagnatanngaatgncggtccgganaatncgnaaaggnntttcccngggatggcncnaatttttnaagtttttnnnggntnaagganttttttggattctnggtnctnaaagnngannacggttaaaanttgtcanntttgtttnaaantnncacntgttttttngccgcnanatgtnngnnatagngtnnngttgtttttagnntnnntnangtnangntngnggngntttntttccnnnanatnan

SEQ ID NO: 394516 - DNA, 434 bp, Oryza sativa
  unsure (1)..(434): unsure at all n locations
nnnnnnnnnnnnnnnnnnnnnnnnatgagcaacatcgcttttccagcattatttccantcttcatggctancnngggagaatcacacaacctccttatacacagaactacattgccatccacgactttaaagaggtacaacaggtaatggtaatatagtcaacaacagttgcggtcaactagtacaatctgaataaatcaggttccgaaagagaaaagaaaggtaaaataaaaaggaaacaggctcctagtttatggaaaattgaagccaacctgcctgtcaaattcaaatgacaccgctagccgggagaacattttcagcagattggcgctcagcagaacttccagtggttgtttgcagttcacgcatgtcacaaaatgtgtcattggcttatcaacacttccagtctgcagctggtagtaagtcgtctttcg

SEQ ID NO: 394517 - DNA, 242 bp, Oryza sativa
ggacaagctgacaacactgaaacaaataaccagcgcgtccatgtttcgctaacagtagcaagaaaattacaaatatgtacagctctgagcaagctcgcatgagaaacgcaagtttccatcactcctacaatcctacacgatcctgtgcactaaaattctctcaagtctacgaaaaactgtacagatgcatcattcgcagattcagcacaattcaagcctttaaggaccaccaaatcaccacc

SEQ ID NO: 394518 - DNA, 851 bp, Oryza sativa
tttttaaaaaaaattagtcaggaaaaggaaaagatttctgatttttttagcaagtccaaacattacttgggaacatgatgaatcaggcaatccaatgctacactgctaactggtacagactagagacacaagaaaacacagaaatgaacaagaaaaaaaaatacagcaaaggcctacacaacctcaattaccgagcatgtttttattactaagcaatttaggtcctccagtttaagtgatgatgaacgtggtctagttatgaccaaaggaggacctattttctccagcgatgtatttacaccaaaatgaaagttacaatcatgcgcttgcaagaaaaccaaggaatccctcgtaagttcaattgtccacaattcttggaccccatataagttgacccgacaagatgaaaattgtctggtggttcacactcctccagccatgcgtatccatcgtctccaggaaggggctttgaatctccagcagaaggtgcagaggaagagacgttgtagtgctggcagtgcctcccactgccatcgtcatatggtgggccaaggacatcaagaacagcacaagcagtatgtgcggtgaagcagtgcaggttgccaccatcttccggatatagtaccgatgttgacaaggtgcattcaaggtgccatcaaccttcacctttgctaagcgggctccttgcaactgagcatcagttgaatcttgtgaggcatcagcccaatcataggacttcacacgcagctcaccaaaaagaagcttactgaacacagtcatgttggggtgattatggagaggaatgacaccccttggaggcaaacaaaagatgccgatcgagaaagcctcac

SEQ ID NO: 394519 - DNA, 451 bp, Oryza sativa
  unsure (1)..(451): unsure at all n locations
nnnnnnnnnnnnnnnnnnnnnnnnnnnnnnnnggttatacaggttcgggccggtgcgaagcgtaataccctactcctgggtttttggggatttgggtatgaatgagctacaaagtgggagccaacttctcccccgttctaagctctaaatctggaaaagaatcaaaaaaaacccccttctctatgggcaagggcctccttttatacttcaaggggataccacatgcacccacccctttccaaactggacttttcttttttttatggacggagattggtatggttgctgtccgaatgacactccgatgggacagcccacacctaccttcacttccgggggagacaggcgcaacgtgggatactggctgcccgttgctgacgcgaccagtgccagaccggtcattcttgtccaccacgcgtcagtttaacaacatgcatgtttgcccttcctt

SEQ ID NO: 394520 - DNA, 277 bp, Oryza sativa
ttttggggctttgaaaaattgcgggaatttctagtagatcagattgcatcaaagatgacagtgatgatgtacaatgggctagtatgctagtatcagaaggccgcattttactagagaatcctaccattctattcatcgatctcctttacagcatcctttgcaagtcgtgttacatatgtagcagcaatggctgtaaataatagcccgatgcccagtgtcagtagctggctgtttcctcccaaaccgatctctgactcatcttcaattatagctcgtc

SEQ ID NO: 394521 - DNA, 366 bp, Oryza sativa
  unsure (1)..(366): unsure at all n locations
gctagagagagaaacaaattaaccaagaaatcctcttaagaaggatactgacagtgcacgccagctagctaatcactccaccagtttcggggaaaaaatatcaaggatttcgagatcctagctcgctagcaggtgatcgatcgatcgatcaatggccctggtgcagtcggcgcggcgtgccgcggggccggcggcgacgccggcctcttctccgacggcgtcggtggcggcggccgggcgctcccccgtggctggcctgccgaaggcgctgccgcggccggccatatcgtcgctgtggatggtcggcgccgcctccgccccgccgctttgncggcacggngcggttgggcggtgttcgacgtgacc

SEQ ID NO: 394522 - DNA, 366 bp, Oryza sativa
ttttggggttttacgaaattttgggacaactcaagatttgaaactctaggcacaagccaagcatgaacataacaattcagtcagctaattattacagttacaggcagagcaaatatgcttctacagagcaacctgttaaaaaaaacaaaagaaaaggagaatgtagggatacagatacaacacaacagcatctacaaatcagggaacatgtctagaaaaaaaacattggttttctaatgactacaagttaatagggcataaatagcaaacaacaggatagagcccccagctaaatttggagggggcccatttgttacaataatcgataaccatgctttcgcaccgatgatttcattccgcaggcca

SEQ ID NO: 394523 - DNA, 339 bp, Oryza sativa
ggagggtaacctaaggatgacaattatcaaaactagggtagcacaccagcgttgttgagttatgacaacagccaaacatgttgtgaaatataatcctattcccaacaaaaataagaaataaatagaacagctgattgactgactactccagttactaacacaatcagactcaataaggaacaatagattatcttaaattttctctcaagctttttttgcggatagtgctaaaactagaaaagacaatctccaaccccttctcctaacttggcatcaggcttcttttccattagatgatgcccctcgtcttcatgagattttatcacctcttcggaactg

SEQ ID NO: 394524 - DNA, 501 bp, Oryza sativa
tgaactagaacggggaaaatcatacaaaatattttattgaaatggatttattgcgtccatcaaatacattcatggagcaagtcatctcaatgtgtaacacaagtatacagaagtccaacaccacactctcagatcattccatatcgtgtttcagttccctagaccaggagcaacttccaccgaataaacgaaagactatggacactaaaatgtaggaagagaaagtgcatctccatcatataggaagagaaatggaacgcacaagcatcagtggaagtgcatctgtcatctaatttttacaatctagcaatctttgagcgcaatcagctggtcaacgacgccaggatcagcaagggtgcttgtgtcaccaagttcatccagctgttttgaggcaattttgcgcagaatcctgcgcattatcttaccgcttctcgttttaggaagtcctggtgcccagtggatcttgtcaggagctgcaaatgccccaatctggttgcggac

SEQ ID NO: 394525 - DNA, 595 bp, Oryza sativa
aagcggcttcgtctcctctcctcctccggcgacgcgatcgagaagcggcgccggattttgccgccggcgacgcgcggctgagggggcggcgggaagggggtgggggtggggaggagggattccgcaaccccgcgcccatggcaggaagtaatccaccacccaaaccatgggaacgtgctggaacttcatctggtccagcgcctttcaagcccccatccgggggtagcactagtgatatcgtcgaagcttctggcacagcaaaacctggggaagttgtttctgccgcagagagcaatgttgcttccaatgtgaacagcaccatctctaggcctgtgcccccacggccttggcagcagcaaggatacggaaattcttatggaggttatggctccagtatgtatagttcgcttggtgggtttgtggaccttatagtagcggcggactttacggaaataacatgtattcaaagttatggaggaggttatgggggtatgtatgggaagttctggaatgtacggtgggtccatgtataatagcgggatgggaggcccctatggcggctatggtatgggcaatggtgcttacaacccagggc

SEQ ID NO: 394526 - DNA, 463 bp, Oryza sativa
tttcctccttctcccttcttcctcctcatcctgtcgccgccgtcccctggagggcggcaaaccctagatctcgccgtggcgaggcgacatggaagcgccgtcggcaaaacctagatctcgccgtgccacgcatggatatatggtcctggaccgcatagtccgttgctggagcggagttggaggggacgacgaccccacggcgtcggagatcgcctacacctgcagcggccaccccatccgcgtctccctccgcgtcgccgacccccccgccgtctcccgcctctacgttcaccgccccggctggccgcgcgtctacgacctgggcgacgccgaggtcatcgccgcccaccgcggctccatcctcctctcggcgcgcgttcctttcgccgacctcgacaccatcgcgccgggccaatttcccctggactacttcgtctacacggccaggcccggcgaggggttg

SEQ ID NO: 394527 - DNA, 604 bp, Oryza sativa
  unsure (1)..(604): unsure at all n locations
gcaagaggggcaagnccgacggtgcgaacggcgccggcgggaagcgcgcgcgagaatcggagtcatttcaaaccggtgtaggaagcaaatcgaagccatgcaccaaatttttcagtacctctggttgcccctttggtgagggttgccacttcctccaccacttccctggtggctaccaagctgttgcaaagatgaccaatcttggtggtccagctattgcgccgcctccaaggaagaatgccaatgggaaatgctgttcctgaatgggccaccaaacaaccccactgttaaagactcgccctgttgcaaacaagttttaacactgcagagggatgcaaatggggggataagtgccactttgcgcacggtgagagggagctcggcaagcctatgttgatggatagctcaatgcctcccccaatgggaccaaggnccactgggtcacttttgcacctccanccaatgcctagccctgccatgtccactccagccaagcttttgcgctttcggccanagccaagatcagtgttgatgcatctcttgcaggtggcataatcgggaggggtggggtaacacaaagcagatatccagagtcacagggggc

SEQ ID NO: 394528 - DNA, 581 bp, Oryza sativa
  unsure (1)..(581): unsure at all n locations
ccaacaatcaacgagactgctcactttgccagagaaacagtcacagtagcattaattttatgaaaagcatagtaatcatcaaccacagtaggctttaacatcgcaggagaaaagggataacataatcacataacctggcgttcgtgttttagctcaaaaataaaatgcaataaagaatccagaggtaaaacaagacagcacataagcctaaacggtcagaaaattcagcatcagccctcaaagtttcgagttacaatgactaatcgctacaaaccacaatggatctcaagcagcagctgatttccgaagctcattttcaccatgggcaaaatggcacctgtcgccaaaagtgcacgaccctttggtgaagttctcgcacagcttggtcttgaagttgcttccggggcctcccccgcggtgggatcctcccacaggtttcttgccttgtggaggggcaccgccacccgatgctgacattcagctccctcaccatttgcactagcgttcttgatcttgatcaaaatgtgcccttcaagctcaatggtttttcaagttgggtgtctgattcatggatcacgana

SEQ ID NO: 394529 - DNA, 448 bp, Oryza sativa
tctttaagcttgggcatttggtgaggcactgattgaagctcagcactaggcgaagtgcagggcatggtgcttcccaaaccagaaatgccgttctttgtcctgctcctcttcctcggcctcggctgcctccgcccggcggcggcgaccgacgagcggttcgtcttcaacgggttcaccggcgccaacctcagcttcgacggcatggcaacggtgacctcgaacgggctgctcatgctgaccaacggcacgaaccagctcaagggccacgccttcttcccgtcgccgctccagttccagagggggcccaacagcacggcgatgcagtccttctccacgggccttcgtcatcggcatcatcggcgcgttcgaggacctgagcagccacggcatggcgttcatcatcgccaagagcaagaacctcacctcggcgctgccggggcagttcatg

SEQ ID NO: 394530 - DNA, 592 bp, Oryza sativa
  unsure (1)..(592): unsure at all n locations
tttttttttttttttttttaccatgacaactcttgacgatcttttattattaactaatctgaatacacggctcaagcttttgcacaaggacgagagcgaggaagaaaaggaagcttgagaaaatgggatgatctctgaatcaagcaagaagggtaaagggtaactaaaaacaagggcagggctgggcaggacggggaagggttttctgatgtgtttttttggtcaggcgtgcattcgtcgccgtcttcttgaagtcgatctttgtcgaccttgacctcgccgtcgatcagctcgtacaccgtagacgaccacgcggaggccgtcgatgtccatgagcacgaagctcgggttcacgtcgtaggtgatgcngctgtaggcgcccgtggcggagcgggggttgatgaccacgcccccctcgtgcttgtacgccttnaacnggtgggtgtgcccngtgangaggatgtncangtccanctgccgttggancatcgccagggagnccaaaatcgccccatggaacaaccngatgacccanggnacagccctnacttgaaagggaccaataataantgtcttnagtctctggggnant

SEQ ID NO: 394531 - DNA, 890 bp, Oryza sativa
  unsure (1)..(890): unsure at all n locations
cgtgttccatgaagctccagtacctccgcctcggcgccgtgcccgccgtcgtggcggcgctcgcggggcccggggcctcccccgccgcgctcgtgcaggccgccgccgccgttgggagcttcgcgtgcggcgtcgacgacggcgtgcgggccgtgctcgccgccggggccgtggcccacctgacgcggctcctcgcccaccccgacgagaaggctgttgatgctagtgcacgtgctctgagaatgatttatcaatcgaaactagctccaaagtttgatgtcaacaataatgagaaaaacatggaatttcttcttacccttttgaacagcgagaatgaaaatgtcacagagcttgctgccaatattatatctcactcttgtgatagcactacagaacaattagcactatgtgctgctggagttccgcagagacttgttaaccattttggaggctccatgaatctacgggatgcttgcttagattctttgactgcaatcataagaaataactgggaagttgcttcaagatttgcactgctggaccatggaaaagctttgcgctcaatagttgcattaatacatgatcggagcccacgcacaagactacttgcttgtttgtgcttgattgcgcttagccatgcttctccctgtcactttcaagacagacaaattaaaaccaagttgatcctggtcttacttgagctcatcgaggaacctggtcatgtaggagatgatgctccattggcattgacaaccttgatcaaagacagtgtggaactgcagaaacaagcactctcaacaaacgcagttcagaagttaagcaaccatcttatagcaaattcgttggagtcaaggcgtgcagtgaccatatngcttgtttagctgaacttg

SEQ ID NO: 394532 - DNA, 708 bp, Oryza sativa
  unsure (1)..(708): unsure at all n locations
tttttttttttttttttcaagctataatacagaaagacattagaaaggttctcaacatggaaaggtttaagaggcacagtggaaatgatggataattaaatccatcgatttagattacgaaatgatacaagtaccacaactaaaacttgactctatagtccctaatcagcagagcgaactgcagcataatacatcatactaacctaaacagaacgttgtactacataggattgaaaggggtccgacaattagctacttgtctgaacggcagattgaactgcagctagccagctacataaatacagctaaagtacaacttaagatcgatctcttgatagcgagatcagagggcattccctcttcttcttggtcttggcttgcttcgccaatagaactgcagagcccagtcaatgcgcaatttcttcctcttccctgagaccctcttgcgaacagccgtctcttctctggacaaaantntanccctgttcagaatctgaccaagggaaacgttcggcatancgctcgnttngtcgtcccagatggttttgtcatgcccttcaggccccatcaagcttcatgcntagtactgcccaattgacaacgtttgcttgnagganttagttgaagcanngagaatgatatccatgctgtgangaatctntacgaagtngagctgcattctnaaactttggagagccancgatgntt

SEQ ID NO: 394533 - DNA, 697 bp, Oryza sativa
gatgaaactacacgggttggtaactagtatataacatgacaaatgctgtctctctaagtaccagtactctttcatctgcaaaggagtaccagtacatacaccagtactcttaataatttgctctcgattgaatgcgtactgatatagtacctagatatccagatgtatactagaaaatgtacatcaagtcactcgaaatctgctgccaaaggatagtgccatatgctcaacctggaaagaactgctagcacaccctactcactctagttcctgatagcaatctcttcaaagttccagtccctgacaagatcccttgaaacagcacggcttcgttgaagtcgaggagcgccttcagtgccttggccagcagccattagaggaaaaggtgtcaccttcgacgtccctacagtgttagcggttccagcaggcattactcgccgtgttaggcaggcaacaacagctccacacctgttctcctcctccgaacttgagaccgaatagctcctaaacgagtgcgaggggctgctcatgccatggcatactagacaagctagactcatggttatgatgcagctgaaattgctgtcgttgctttctcttcgtgaatttgatctcgcgcccgggatagcaaatcccgcagttcgcttaagccccgggctgaagctgacgcctggactatgaagatggagagagagag

SEQ ID NO: 394534 - DNA, 571 bp, Oryza sativa
  unsure (1)..(571): unsure at all n locations
nnnnnnnnnnnnnnnnnnnnnnnnnnnnnnnnngcaagaaaaggaatggcatttctttgcagttaagtttcagagttcgtggtggtcgctgtcttcatcatgaaacaaaatttcacagcatgttaatacttcctggtttgctactatggacaaaacacctctacacacaccacgcaaaaataaaaataaagcggagatcatcggatttacagtcccataagattatctctctctcatgagtaggaatagcccatttgggattctgcaagtctccaagtagaatgcatcttgcagtgttcactacaaacttaaatgagtgaatatggccggcaccaggtcgaccactgaccatgcaaggctggcgtactgaacgaaccttatgccggtgtccacatcgcacgccttgtgtggaaagagggcgaacaccttctggagataaccgccctgcttctcgtgggacttgaccttgcacttttcggaagcctatcccgctggaacatagcaggtcgatacaataggaatgcccagggcgttgcacatcaccgcgtgaagccatttcgagagagcttta

SEQ ID NO: 394535 - DNA, 582 bp, Oryza sativa
  unsure (1)..(582): unsure at all n locations
nnnnnnnnnnnnnnnnnnnnnnnnnnnnnnnnnnnnnnngcagggttaaaacttttttccttgttatacacacaaaacctgaattaatgggttattatgcatttatgctttacaatttcctgtgaatcaaagaaagaaacaactcgttccaaaaaacgaaaaaagaaaagaaattaatgatcaaaccacattactggggcagctgacgcttggtttccactgcacctgcctcgtctccatccaagccaagaacttgtacaccttaccaaaaatgcacaggaacaccaggccggccacgagagcgtacgccgcgacgctcgccgcggcgccctccgcgaacgcccacccggcgaggtacacggcgtcgccggcgacgaacacccagctcgnggcctccagcgccgaccgcgtccacgcgctgacccgntcctcgccgtagatccggcacaccatccgggagcagacgcgaagatgatggcgagagcgtcttggacaggccccggtagagcaccgtccggccgccgacgacgagcgggtccatccggcagaggcatgtngcgcactcgccggagaaccgcganc

SEQ ID NO: 394536 - DNA, 558 bp, Oryza sativa
  unsure (1)..(558): unsure at all n locations
tttttttttttacatggaacaaaaaacaaccngtgatcacttattcattctcagtctggatctagcaaagcacaagggaagcctggagattccacaaattcagacaaaaaaaaaaattgctagtttgctatcacagagaaattacagaaggttttgtttcctgttgtagtattacatttcaacaagaccattgaggattacatcggaatcatgtcttcacttggtagttcttttaacaaccatatgataatacacagtgctaaactagttctgggagttcatgccccacttgtcccagatcaccccaaaagaatgaacaaaactttaccgagagcagaagaatttacgaaaatcaaacggccatagttccctaatccgcctttgtcaagtgcaaaatagaaaggcggcaggaactggtctgcaggatcatagagtaaaggagtagaatcgcttgcgacctttaggcttaaattcctcagcaggggcataaatcttgacactgaatagtcctgtgccatcctgtgctatatcaaaggtaaaatcctaaaatatccttgc

SEQ ID NO: 394537 - DNA, 791 bp, Oryza sativa
tttttgtgaattgaaaatttgccaaattttggttggctccgaatggaattctgaatttctctgcttgtcacgaaaaaaaattatgtgttaactaagggtgagatttacatggccgaatctcttgtgacccgtgaggttgcaaattaattacatcgctctcaactccggcgaactcgccgccggcgccgccgcctacaagagggacaacggcgtgggttgggggaagaggtcggcgaatcgctggagggcctcgcgcatccaccagtgcgggcaccggtccatggcctgctgcggggagacccagctgcggcgcctggccgccatctccggccaccggtcgagctcgtcggtgacccggagcgggaagacgaagccctcgtaggtggcgtcgtagcggcggctccggtagcaccaccgccccagcgaggcgccgatctcgccgagcacaccggcctcctccagggcctcccgccgcgccgcctcgtccacggactcgtccagctcccacccgcccttggggaacatcaccacgtcgccggcggcggcgcccttcttctgcgagctgatcacgagcacctccaccccgccgccgtcgcccctcaccctgtacgggatgcaccccaccaccatcctcccccccgtgttgtcgctgtacctctgcagctccctcccctgcctcgccaccatcaccgccgccatcgctggaatcgaatcgaatgcgaccttctttgctttgcctttggagtttggattggatcagttggatcgatggatgaatctttgcttgagaa

SEQ ID NO: 394538 - DNA, 702 bp, Oryza sativa
ggaaacaaccggcggtttcgttaagtgttcaactgttcatacaccaaggcaaggaaccagctacagttgaatagtgccctcaaggacaagctttctagaaattttgccagacatgatccagaccacgagttaccagatgcaatcccaggtctgaattgaaaggtactaaataaaagccaacacaataatacaaaggtgtcccatgggctttgtctgagcccttaagacagaatgtacgaatcaaaagttccatatccagcatgtgtaggggaaactgagttactgttccaatgtaccctcgactccatacaattaacatttcaacatttcatgttcatatgagaacgcaggagatgccaccatccacatcaggattaaagagcgtgacaagatcatggcatggcatgttcccaaaattaattctcttctacaggaccatttccttcagtgcaatcactcttgggcgggcaaagatcatgattcttcgtcactttcattgccaaaaaccgatgacatttttgtagcaaccttaggtttcttgcttacattgccaactggagccttggaaggagccattttggagaagccaaacttcaaggttttacgctgatcctgatttgaagggttaggcaagttcttcattgtaattctctctgatgagctctctgatggttcttgcttctgctgctgctgctttaaata

SEQ ID NO: 394539 - DNA, 643 bp, Oryza sativa
gggggtgccgtcgtgcgcgtcgaagctggtcccctgcggcggctacctcaacgccaccgcggcgccgccgccggcgtcgtgctgcggcccgctcagggaggccgccgccaacgagacggcgtgcttgtgcgccatcctcaccaacaaggccgcgctccaggcgttcggcgtcgcgccagagcagggcctcctcctcgccaagcgctgcggcgtcaccaccgacgcctccgcctgcgccaagtccgcctcctcctccgccaccgccgccgccgccgccgacgccgccggtgccggcactgcaggtagcactgctgcttcttcagcttccactggaaacgctgcatctacagcggccaagccaacggcgagcggaggcgcaacgcatcgcctgagcttgatcagtgcatcgtccttggtaggcttcagcttcatctggtggacgatcatggcgcagtagtaattcagatccagaagagcagtttcaagtttgctagttggtcactactatatgatgaggaagtacataggattgtattggcaaaattctttcttctgtagattgctgttcttcgccggtcgatcagttcctcggttgaatcagagttgtttaattctgtactgtccaaataaaacatgcttaatc

SEQ ID NO: 394540 - DNA, 410 bp, Oryza sativa
agaatacaggataattcacaggctgcctggggacaattttcagctagagcgactgtctcgatagccacttgctgaccaaacagactcataatcaatctagtaagacacaatcatagttgcctccctggtgtacaccacggagggccttgtttaagcaacatacgagctgggagggccagaaggagtgtcaccacccagaggggcttgagggggagaggctaaagaagaaaggtcctctgtagaaaccttggcaagagcttcagcctccacgatctgctgagaagtggcagaatcgtcagcagccttcttcgcttctgcagcagcggcttcttcagcggccttgcgagcagcctcctctgcagccgccttggcggcttctgcagcggcctcgcaaacaacgtcctggtcag

SEQ ID NO: 394541 - DNA, 546 bp, Oryza sativa
cctgctctctctctctctcccacgtgagcgcgaggcggttgttgcggcggcgcgaggtgagcggggcaccagcggcggcggaggagatggggaaggcctcgaaggggtcgcggagagggaagaaggcgtggcgcgccaacatcagcaccgacgacatcgaggacttcttcgagaagcagacgcgcgacgcgcacgccggggccgccgccatcccgtccctgccctccgactccctcttcttcgtcgacaagccggcctccgccgcgtccacctcctccgccgccgacgccgccgcggcggatgtcgcccccaaagatattcctgtccaaaggaagattgagaagaagagagagaaggttctatatcatgagagtgtattgaagcggaatccatatgtacaaccagtcccgtcttctttaacgacaaagaaaggatatgaagaagttcaaagaagaagggaatcgaaagagacacagggaagcgaaaattgttcccatggaagatgattcaagtgataagatccttgacatctggggtcaagatgtt

SEQ ID NO: 394542 - DNA, 552 bp, Oryza sativa
  unsure (1)..(552): unsure at all n locations
ccccccccttttttttttttttttttttttttttttttgcatcccnttataagacgntgantttcttgtaatctatgtcctgaaggcatcaaatattcccagggagatttaaggtatcacctatttgcaactcataatgcacaacacatctaaactgaaccatgggttaaattacataaagtacaagcagctcctcgctagcgtgaagttcgaactaacatgacaaaactgttttccccaatgtaacaacatttgcaattttggagtcacggtacagctcaagcgagctaacctagatgagcttcttcttctggaagtacccttgaaggtgccacaattgcaaaattgaaaccacaatgcagacgcttagtgacaaaatactgaaccaggctaccctagcgtttgttttctcgctcactgttcgcatctctgcttcccttgctttgagatatatcatgttctgatggatggattgtactgccacttcaagttttctaagctctagttctacaccctcaattttttccttcttagcgataacatcccaatcct

SEQ ID NO: 394543 - DNA, 794 bp, Oryza sativa
  unsure (1)..(794): unsure at all n locations
tctagcncgttcggaacgagtggagtcgtnccaggttgaaattaatggaaaagttttccaaatcaaaagtgtgcggaatctcaatggacacagcattggaccataccaaatccacgctggaaaatcagttccaattgtgaaaggtggagagcaaacaaaaatggaagagggggaattttatgccattgaaacttttggatctacaggaaagggatttgtaagggaggatttagaatgcagtcattacatgaagaactttgatgttggacatgtacctctgagcgtggcaaaggctttgcaactacttggaacgattaacaacaatttcggaacgcttgctttttgtcgccggtacttggaccgccttggtgagaccaagtatctcatggcactgaaaaatctatgcgacgttggtattgttcagccgtatcctccattgtgcgacgtgaggggaagctatgtgtcacaatttgagcacaccatcttactccggccaacctgcaaggaagtcatatccagaggcgacgactactgattgcggctgtagcttgtcatgtaccggttgtttgtgagatcattgtgcaccattctgggcaacctgtgtactatcatgctatgtatgggatcatatggcggaatcatcagataaataatcgagagacgttttcagttttttgttttgttgtttacacgagataccaactatctgttgtctttcttgaaactttgaaatatgtaaaaaaaaaaaaagatgatcttcattgtgatggatgatcactaaaaaaaanaaaaaa

SEQ ID NO: 394544 - DNA, 338 bp, Oryza sativa
ctcgatgtattgcgcgttctccgatcgctcatccgcgttggattgacgctgtcagtgcctgttcgtagagggagggagaccgataagcttgtgttgcaatgcatggcaagcaaagccttttccccagggaggagccttgctcatctagtcatcttatcgtcggcatttgcctgtgcttgcattttcttccttttcaacccaccccggcgttgtctgattgtctcccgttttgtaaagcagtagcaagttaattagacggtgataatttctgttaactctactgtaaacaacgttgctatagattccagactccagtgagacgaaaaaaaaaaaaaaaa

SEQ ID NO: 394545 - DNA, 795 bp, Oryza sativa
  unsure (1)..(795): unsure at all n locations
ttttttttttttttttagttcaaaaccaatgcgtaattccattgaatttttgccgtttgacaaattaaagcatagagacaaaagaagaacaaaaactctgatgataggaacaagtagaggcttcaaaaatgttgttgttcagcaagcgaggcctagctcagtttgcaaccctgcagtttgtgcggatctggccgtcgctgccggtgagcacctggatggcgcccatcttgaccatggcctggccgaacttggtggcgaagaggtacatgttgtaggcgttctgcgccacgagcgcggcggtggcgttgtcggcggtgagcgtctggtcggaggcgaggacgccgcggccggcgaggaggttctggtagtagctggtgtcgaacgtgttctcgctgccgtcgtccatggccaccgtgttggcgctcccctgcgggcaactccgcgacaccgcgacgccatcgccgcgttcaggccgggtcctgccccgtgctggagttgtacccgtacagcctcgagctgaacgagctgcaatgcgccaaccctatcgtgtgcgcccctgaaaggatgaccatgtcgtcctggggaaagcccatgagttggcgaaactttgtgtganttggggcaaatctgaagtgggaaggggcaggttgggccatcgcgtcgggacgccaaggaagtgttgccgtcccttcctcccgggccggaangcggtaggggtnccgccgggccaacaaganggttgtttttgggcggcgaaagcgaagtattgtccgcgcaaggagaaccaaccccttt

SEQ ID NO: 394546 - DNA, 480 bp, Oryza sativa
gccaaatcttccaatccctcttgcttcctcttcttctcatgatgttttttggagcgatcagctcctgaatcgtgatgcgcactcttatccttcttcttttctttttccttttctttttctttttctttttctttatctttactccgatctttatggcgatgtttgtgcttcttctgatccttgtacttgtccttgtctttctccttgtgccttttatgcttctttactttgtctttggacttgatctttgatttacccgatatagttggcgtacctttttcagcagaaggcaaatctattggcgctgtttctcgcagctgaaatgcttgtccaagtgtttccatgtcaaagggttgaatgtaagaggtcttctcccttaggtatgcatcctgaaagagttgatcaagctccattccttcccctttacgtatttctgtgtctaccacaacattgtgaagataatctgtctcggaaatttgc

SEQ ID NO: 394547 - DNA, 455 bp, Oryza sativa
gtgaaaacatcacttgtaaatatgcagtgcgatatatgtacagcagcagaatttatacattgcagccaaattttagaacagattagtcacagaaagtagaaacattgatggtacatacaatggtcatgcagacaatgctgcacagtttcaacggtagtcaggagccaaagttatgtaagacccacatgactctaggaaaaacaataaacacataaaacttcagaaagagcaatactgattgcttgcaagttgcaacccatatattacgatggtttttgagcaggtcttatccttgggcaaaaccgcaaaacatgacaattgccaagtagcataggccatagaatttcgaaagttagtagcaggattctgaataaacaacagatcaggcatacatgtacacagaaaatggatagcagcatatatcaggatatattataattaagaccagatttcag

SEQ ID NO: 394548 - DNA, 471 bp, Oryza sativa
aacaacaatccttgaactcgttttaaacacgacttgcacccaaccccccttccttgttaactccggttccggaacgcccggttaaggacgtagcgctcctcgtaggaagaagggggaaacttgtcgagccactcctgcgcgatgtggacctcgcactcggcgaagcagccgtcgatctcctcgaggcggtgggactccggctcgatgaggcccgcgttggcgagcgcgcggaggacggtctggccggacaggccgaccacctcgcggcgcgcgccgtccgggtcgatggcgaggaggcgcacgatgcggtcggcgaccttggcggaggcagcggccggggcgggggcggccggcgagagcgcgcagaaggcccgcgagagggagggggcgaggtggagggggatgcgcgcagggcgcgcgccgcgatcgccatggctagggttcgaggtgggagatctgaggaggcgtcaa

SEQ ID NO: 394549 - DNA, 762 bp, Oryza sativa
ggctccaacaccattcattaattgaactgaaccgaggcaatttcaagggattccacattacatcatccacatgttaccacattcaaagtaaacaaaagtttaaacatcagcactaaagttttgcccatcaaatcattattctttcatcgaatccataacataaaaaaagcgttggcgcggcacgaacgcacccgccgagggagacggtgggggaaaggaagtctcacatcaccatcgcagcggcggttcgcaattacgggatgtcccatggcttgggctccggaacggcgacgaccatcccctggagctccggtgtgagcacgacctggcacccgagccgcgcgtgcttgttgagctcccggttccgggacgcgcgggtgaggacctaacgctcctcttagaaagaaggggaaaactttttcaaaaccaactcttcccaattttgacccttcgaactcgcggaacaagcgtcgatctcctcgagcgttggaactccggctcgatgagcccgcgtttgcgaacgcgcgcaggacggtctgccggacaggccgaccacctcgcggcgcgcgccgtccgggtcgatggcgaggaggcgcacgatgcggtcggcgaccttggcggaggcagcggccggggcgggggcggccggcgagagcgcgcagaaggcccgcgagagggagggggcgaggtggagggggatgcgccgcagggcgcgcgccgcgatcgccatggctagggttcgaggtgggagatctgaggagg

SEQ ID NO: 394550 - DNA, 636 bp, Oryza sativa
  unsure (1)..(636): unsure at all n locations
taaacgcattnccaccattattatncccccatacccaacttactttctcgcccntttttnatttacgatacatnaccagacactttcatattncaacccnattaccnactaaggaacaaactgaactccacccgtttcgccacgcccctccaacgccccccgtcgcctcccggctcgaattgaagtgctaacagcaagcagtttggtttgaaagcaaatttgggggattattatttttttggtgggaaatttgagtagggatctgtaatagcggaaaaaggaggagcttcggtggtgaattgagggggtttctccatggtggggaaggaattggtggtgagaaagaacggccccgtggacatccgcgagattgccgccaaggcgacgctgagggaggtccggcagaatgggcacacctacgttgagctccgccgtgtcggcaagcgcgtcatcttcttctgcaccatctgcctcaccgagtgcttcagcgacaccgtgctgtttgatcacctgaaggggaacctgcactccccggcgccgcggaggctaaggtcacgctgttcgggcccatgccatggccgttcaacgacggcgtgctcttcttcaacaactcgcgcgagnanacgngcccgtccg

SEQ ID NO: 394551 - DNA, 448 bp, Oryza sativa
gttagaaatataatgtgttagttagagataagagtcaaatacaaatatagagataagatatatcctagagattgactcctagagataagatagagtcctaaagatagaatcctagagataaatctactcttacttgtattatactccaagtctctatcccctatgtactcctatatataccccatgagagggtcgatataatagatcagaaaacatcacaataaaacaaattagaattttccacagtcagccaaaacactcccaagaacgcaaacgcaaaggaaacctgggtacactacagccgagaacaacggcggatcctgtcgctctcggtgacgacgtggccgcgcgtgatcctccttcaccgacgctgccaggccggctggagccccatgggtgaatctccagctcgtctctcagccattccgcagcgcgttcctcacgccgg

SEQ ID NO: 394552 - DNA, 565 bp, Oryza sativa
  unsure (1)..(565): unsure at all n locations
gggagagactgatctttatatgaatatatgagagccaattttgataactctcttaaagatgctctaagcacttaaaaaaaagggaggcttaaatagagtaaggttgaaggacacattttcattgttcttttggcggctatacctatatttgagttttggatccacgagaacgtgaccaccctgttgctggtgcccccctcccccctggcgacacacgcaattattggggatccttcatatcccgttctctgccctgggctctctacccctgcccaacatttatgtgttgggagaccgcactgttacctgggggagatcaaccggtgggggaggaggaccatcggcatatctcccggtcgagcctgccggtgacgccggtgggtgaccaccgtcggatttaccgaacggtctgcttcatcagtgatcagttccatgtgggaagttactattggagcagtgcagaaactagaaaaactagaaaggcgatgtctggaatcaagatggcagactcagagcctggagacgcccatgaacgcagnacttccatggttccattcagtgctta

SEQ ID NO: 394553 - DNA, 831 bp, Oryza sativa
  unsure (1)..(831): unsure at all n locations
nnnnnnnnnttttgttttttaaaccaaacgatgtttttcattaagagtactgatatattaaaacagagcagctagtttgctcgtcttgcgagatctgatgacaagcctagaacaagaacagcagcagcaggagcaggaggaggagaacgtgttattcctctgaactagtagtaagtttcagctgagatccgacggctgcaaatgccccatctctttgcttcagaagaaagcacggcttccgtagaatactttgggagatttctccggcccaccggccatcggcttcttcgccgccgccgcggccgccgcgcccgagtcggcgccgctggagtccgcgtcggaagcggcggcgccggcgccggagacggccgcgctcttgtcgctgccgttgtccaggtccagcgggagcttcatcttggcgagggactccgtgaactgctgcatgctcttcatgtacatgtccatgatctccttctggtcgaccttgacctcctgctcgaggttgacgcggatgaccggcggcttatccaccgcgctctcggacatggcgccgggggagttcgccgccgggctggcgctgctctgcacggtgcgggaggactccacctccgcgtcggcggcgtcggaggcggccttctccttctgctccgccgacgagacggcattgccggaggagttggactgcggggtggccgggaccgcggcggcggcgggggactccgtggtggacacgctgctgaccggggtgttgtttcggaaggtgccggccgagtcggcggtgctgttgtccgtcgagaagctctgcacgacgcgcacgccggcgacgtgggt

SEQ ID NO: 394554 - DNA, 538 bp, Oryza sativa
  unsure (1)..(538): unsure at all n locations
caaaagcctcattttggatggatttgtttccccccacggggtgcatatacaattgagtgatctcacgcttgtgcatgcttatatatagctggactctatgtacatcaatttgccaattaggagactaatacgtacgtatagcagaacaaatcaagcaattattaccatctaattgattatctaaacaaaatttagatcaattttatgaacttgcttcacttgttcggcgccgccgcgccgccgccgcgccccatgtaggacgtgatcgccgccgccaaaaccgactggaagctcgggtccgacgtgatcgccttcgcgatcgtgtccgtcacggccgccggcgcgacgcccccgccgtcgatggctctctgcaggtacggcgacgtcgtctggccgccgaacagctgttccggcgccggcctcggccgccggcgtcgccatgcccatgatgccgaaatgatggccgaacggcaacggngcaacgcccttggcgtagtatggctgngccgtcgccgngccgccgtacgccaggtacccg

SEQ ID NO: 394555 - DNA, 368 bp, Oryza sativa
agatagatagataatagatagattccagttgtgaagacaagaaattttgatcttgcccaagttgtcattacattccagttctgttttgtactatccgaattcagaaacagagcaccatccataataccatactgcttatttaaaacctgctagctgcatgccattcactcgttcagatttcagagtgatggttgtcacgccgtcgggtaggaggccatcatggcgaggccacagacgccctccttgtcggcgacgcccctctccatcctgacgtagccgtcctccccccacgacgtgccccacgagttcttcatcagccagtacttggtcccgtccccggccacgccgtaccccaccgccgtgatcgc

SEQ ID NO: 394556 - DNA, 621 bp, Oryza sativa
  unsure (1)..(621): unsure at all n locations
attaataggggcgatcctaatgcagcttcccttcactgtctaccaataatacaaaatggaagtacataaggagaaaaaaatccagtgcatgtaacttttaacgtcttgtataaaggttgagaagcagcaacaaaatctccaaacaaaagaattgagagacatacagccgggctcgtggaacccgtatctaaggacagaagatctacagaccccgacaccgcggaggagaggagcatcaacacaggtgagttaaaattgtcaaccacccacaaattacaaaaagtagtcgggagtcttgcgtgttgtgtctggttcaatttgccgaggagctggatcaaattggaggaagttctgatccatgttttcgccaatctcaagaattgcagccatgttaccacagcgataacagtagtttggtgcactgaagaccgtcacaacattcttgtcctgacaccaattaaatccttccattacaagttgatgtgcccttgagatgagagatggaccatttgtatggttaaactgttgagcgatctcttgcccaaatgtattacctgctcctctcggtgaaattccccacccgcatctgtcatctgggtcagaccacnananacccgtccg

SEQ ID NO: 394557 - DNA, 404 bp, Oryza sativa
ttttttttttttttttttcggggataccatatccaaggttattattattaacttatcagtgtcagtgctacatcttccactacagtctacaggtcctcctgcaaagttaaacgaagcacttccagcttctggtacaaaaggaaagattagattatgcatggtccatccctaacaaaactggagatcactccatggcaaaaacttaaatcttcaaagagagcatcaggccatactgggctgatccatgaaaggcttgtcgactgttgagcactttgatcttctaagttacacctagccctgtcccaccaaagttcctagtaactgaccagcacaaacttgggagaccaggctacgccgtgttcttacaaaattgcaggcatctttctaccttttggacaaatctt

SEQ ID NO: 394558 - DNA, 467 bp, Oryza sativa
  unsure (1)..(467): unsure at all n locations
nnnnnnttttttttttttttatactaatcattaacccaaattagattgatcaagtaacaaaacttttgtatttacacatctctcgatttggcctgtacataaccgcgagcaaagaagctaaagctaatacatcctacagatttcacgtcgcgctgaacggacggctctgatcacgccggcgagcactcgacggtggcggcggcaacgtcgggcgccgccggccggtcgccctgccacgcccagacaatgtcggcgagccccggccgcacgtcgacggcgcagaacttgttgaactcgagctcgtcgccggcgtcgtgcgcgaactcgaccaccgcgacgtcggcggccacctcgagcgcctcgacggtgaccgcgagccgcccgtttgctccgtccgccgtcgcctccaacctcagcttccaccctttccctcttcgtggcgctgtaacccagcgatcgccccacgg

SEQ ID NO: 394559 - DNA, 389 bp, Oryza sativa
gctggtgctcccgctcacgctcgcctaccccaacgccacccgcctccccgcctcctcggccaggcgcggcctcggcgatggacacaaccccaacgcccgcatgcgcctccacgatgatctcctcaccaacgggttattacaacgacgaggctgtacatcgggacgccttcgcaggagttcgcgctgatcgtggactccgggagcaccgtcacctacgttccctgcgccacctgcgagcagtgcggcaaccaccaggatccacgattccaacctgatctctccagtacatattcaccagtaaaatgcaatgttgattgtactcgtgataatgagaggagtcaatgcacttatgagaggcagtatgctgaaatgagctccagcagtggtgt

SEQ ID NO: 394560 - DNA, 445 bp, Oryza sativa
tgtgtttcaagagaaaaacactgacatatgatcaaagaatagcacatcagttttagctacaacaaacatatatccgaaatcgtaattctgaattctcatcttcactttcacctatagtagtagtagtatgacttattctactagacatataccaaacgacgaaggatggatcgaactatgcaactctgaatttcttcttcatcatcttcctcagtgtccaaggccggcagctctaccgcagagtatggcgttggtcgggatactgtactcattggagaagctctgctgcggcgtccacactctcatgtacagctgctggccgaggtattgccggtcccagttcgccgacctcaggttccacatcccctggttgtccaatgacaccaagattgccgaccatccattcgggtaaacctgaactgtatgcctcgcttgcgcatcaacc

SEQ ID NO: 394561 - DNA, 469 bp, Oryza sativa
atcctctctcgccatctctcctgtctcctcgaatcctaagccccggcggctgctgctccctccctagcggcggctgctgctcttcctccccggcgtggtggcggttgctcccctccccgtcctggtggcatctgctacgcccccctccccggctgccccctcccctccccgacgtggagccgaaggcggctcctgctgcctctccccggtgtgggagcgtggcggcagcggcggcggttgcttccctcccggcgtggtggcagcagctgccccccctccccgacattgtgttgacggtggctcctactctcccttcccggcatggtgacggcggctgtggcggctgcttccctcccccgcgtggtggtagcagctgcccgctgcctcctccttcccggctgcccctcatctccccgatgtggagcccgaaggcggctccttgctgtctcttcccccgcgttggcgccct

SEQ ID NO: 394562 - DNA, 339 bp, Oryza sativa
ttttttttttttttttaatcggggcaacttttaactcacaaaaggaagacatgtgattttcttttacataaaattcagacaatattattatgccaaaactcgaactctatctaccactgcatacaactccagggcgcgcgtgcaaacaacacatgctactagcattcattcgtactattcactataaacaggacctcccatctgaaccacccccaaccttggtttccgcattcgataccgatttacacgttgctgcaggacgcttccatcataccattcccgatttgctcgctgatatccctgacatggcctgggccatgaggtatgaacaccgtggtg

SEQ ID NO: 394563 - DNA, 544 bp, Oryza sativa
tgtgttttttttagctagggttgtagtttatgatattgaattgaatttatattacataacagtagctaattgccacggaatcaagtagcctacgttcttacaccagcttccatatcattctcctctcgtaaagggtgccaccatcgcatacccccaattctagattggcgcaatgacagtaagaagacaacagtgatctcctcgaagcttagatatttgaggggcatgagaaactcaatgcctagagggacctcttccatgctgcttaggtttattagtcttaatctttcaaggctcaccatggcaccttgctgaatatccatcctctttagattaggcaagtctcttaaacgtagaaccttcagcttgggaaaccatctagtaaggaagaccagcttctctccgttgtaggctctggtgaaatgtagctctgttagatttaacaaccgagaaagggatggcaagggatcctcttttagttgggaccaaaataggcgcaacgagtacagatttcgtcccccggcataatcaaggaatagaggag

SEQ ID NO: 394564 - DNA, 449 bp, Oryza sativa
tgtgttttttttaggtaaacaacaataacattgatgatcaaaatacagagcaataatatgttgccggatcgatcccatcttgatgagaaacaaaatgaacaaaaaaaaaagaggaacaatagtgatgataataatggaggtgctagctgaaccatcggctggctataccatccgacgaaaacgagcttaaattcttcagacttaattaacagcaataacaataataatcatcatgacgacgttctggaatcgcagaaactggcgcagaatccggccaaaccaccaccttcttgttcttcatcttcatcatcgccgttgttgtgatcagatcatcagatcatgctctatgcatgcttcatctctccacaagatctcaagtaaaaatacacacttgacacacacactatgtacaaaacaagatttaaccacatatcttgatccatttctga

SEQ ID NO: 394565 - DNA, 474 bp, Oryza sativa
  unsure (1)..(474): unsure at all n locations
nnnnnnnnnnnnnnnnnntgtgtaattgcaagggagagttaacaccaagaatcatctgaaaaatgtataagctgtagcacttatggtaccagctcatgtacatggattcacaagagacatccaactacagaaaagaaatatatgtatgctctgcatctgccacttctgttatgagggggttatttacatgtacatatcccctcctgcgactttaacctatagaagctaaattatctatatgatgagaaataagaatccatgtatgtagtgaaacaagtctggatgtaaatttagtagacttcaccggtgaaatctcccaagcgctcactctggtgtaggtccacagaagaactcactggatcattattattcgctatcgtcttctaacagttattattcggtccgcggtttcttcaaaacgtatgcaatctgtggcataccttgtcaattctgttcctatgatcaaatgaagct

SEQ ID NO: 394566 - DNA, 478 bp, Oryza sativa
tttgtgttttacatcaaaaagctttgactgtttgagtatgagtatgattaccatcacaaaaaccacagggagcaaaccaccaacaagcgccgatccacagaagtaaagcaaacccgtatatatctggagtactagcgtatagggcccccccaatcccaaggccaccgaggtgaccgcgcgcgccacgacacacgtacacccctcactgtactccactaagcccacgaggccacgacccacactgtgcgcgcgcgcggccaaacgacacgtaccatcaatttgtacagttgtactacaaccgcgaccttattgtccgtggcattcttcacaccccggccggcgacgcgtcgacggggacggtgtgcctgggctgtccgccattcgccgacgacctcccgccctggcgcacgctgttctccgcgaaccgcacgctggccgcgttgaaacccttctagcgctcgtgatccgaccactcccg

SEQ ID NO: 394567 - DNA, 490 bp, Oryza sativa
tcgttgacgcggcggcggcgccaccggcgacggcctctccttcgtctcgttctccgctctgcttgacgggaggcggctcctccgcgcgtccccctctccgccgcggtgaccggccgaggggtgctccgccctccgcttctcccaaccccggacggggcgccgccgagccagtgctccccgacggcggcggcggcggcgaggaacccgtccccgacagccgaaactcgggtcccaactaggaggagctgcagaaagccggcgtctcctacctccaacggcttcgacttgactgcaaaatatggatctttctcctttcaagttggatattgatgagctactagcgggattataccgaggcaaattgcactcgcattcgctgatttcaagagattgtggattggcaaagaaatttccttatatctatgaaggaagacctaagacaaactctggcgctttatgcagtcgctcttttgcattgattggtcatatg

SEQ ID NO: 394568 - DNA, 468 bp, Oryza sativa
ggccgttgctgcggcgaggcacccgcacgacgtgcagtccgtgccggactcgccgatgattgacaagaactcctcgttcggatcaacgtcctctgcgccatcgctgtcgaatctaccgccgatacgggtgcggcccgaggatcgcccgccggatagccgactcgccccgcaggttcccgttgaggatcacttcgcccagatggggatctccgatcagccggtgcagcctgtaattgggggatacatgcagccgccgccacaggtgccgatccccaacatggctgtccccagcatctccccctcggatgcgtccagccggagtgttctccgacgatgacaagtccgatcacggcggcggcggaggtcggaagccgcagccacccaagccggaggttccacctgtcgctgaccccaccaacagagccatgtactacaacgatagatcgcctcctgctgaattgagcgtga

SEQ ID NO: 394569 - DNA, 592 bp, Oryza sativa
  unsure (1)..(592): unsure at all n locations
ttttttttttttttttttaaaactgtaaatttaaattaagcatcaccgacaacataatacagggagagcacaggtgtccttttaacaagagcactaacaatgtaagaggctttcaagcaacaaaggtgaaagcaactacttaccatagaacgcacctatgcttgctgatttttacatcaagcaaagttcatcagctttaactttgcttcggtgctgctttctactcagtatttaacaagctagaaattcaagatagcctaccacatgtgactcttccaagaagactcaagactacattatatgcaacaactatcattcctttttccttgctactgtgaagagattagccctacagcctttttctcataagttaatcccgtttgatgggataccaagcctagaataaacacctttcaagcattttctgtttgtttccccgcgcccaactaccaagggntttnaaccactcaaatcccttaagaaaaaacccccnttnaaactgntttggttggttgaaaagtgttgtgaaaccaacnccaaaccccccggggttananttccatcccaaaattgtttattttgatccccattg

SEQ ID NO: 394570 - DNA, 603 bp, Oryza sativa
  unsure (1)..(603): unsure at all n locations
nnnnnnnnnnnnnnnnnnnnnnngtgaatcgtgcagagcttatctttgaggctttgaacatcttcatttcgagatatttacacccagatcgagaagcaatacgctgcctatcttaaacatctcctcgtcacaaaaatcaaacaaacacgaaactctctccaaaaagagaaaaaaaaattgaacgtaatcctatcccctttcggagcaataatatacaaacacaaaaaaaacactagtcctgtctccacatttccagttcttcttcttgttttttttttttcagatagacgtctgcgtcggcgtctctgacgatgagaaaggctccgtttcatcagtggtgctgaacgatctcatgttggatgaccgtgttgtctcgttctccttctgctggctgctgctgaccttgaggtcggcgaagtcggtgatcatggccggcctggtgatccggtgcaccgagaagtgcttctccccggtgagcatcctgacgacggtgctcatgttggggcggcgcgccattgcgtcctgtgtgcatagcaggccaatcttcaggaaccggcatgcctcgtcgacgtccaggtcattcccaggtcagcatcgatgatc

SEQ ID NO: 394571 - DNA, 487 bp, Oryza sativa
gtcgcttcctgtctctcctccctttgcttgcatctgtagctagcagcagcttgatctggaatactccagccagctagctagctcggatcgatcgatcgggatgctgcctgggcgtgaagagatcgaggtgatgatcaggtgatccatcgatctatatgctgctgactagctgctgcatgcatgcctgccatcccgtctcttgaatcagcagataccgcatgcagagattgcaggaacagcttagatctgatccgaatatatatctggttcagtatcaagaaatcgagctacatatgaaaacttcatttctaagctccagcagctagcgtgatatgatagtgtgattgatatttgatacttccttgagagagacgcatacgatcgaatcggatgcactgcacctgagctaagctagctcaagctcgctcgatcagctcatgtacttgttgagcccaagaaatggcgactaggaggacgaacaggagga

SEQ ID NO: 394572 - DNA, 534 bp, Oryza sativa
  unsure (1)..(534): unsure at all n locations
agcgagcgagttgattgggcctttcgagacggagacgccgcctgcctaatctcctcgactcgatctttccttcccaggaggcggaggagggaggaggaagaggagctatcgcctctctcgctgacgcccgcacctcgacacggcgatagagacagaggtgggagatcggagatgaggaagctggtcccctcgccgtccctgccgacggcgacggcgctcgcgggtacgccggagatggcatgccgtggcgctggcgctggccctgcggggttgctgggaggaggtgaacgggtcgccggcgtggcaggacggcgccttcttctccctctccgccgcctacgcgctcgtctccgccgtcgcgctggttcaattgatcagaattcagttgcgagtgacctgaatttggttngacnacccagaaaggttttccatctgnatgaactttgttgtaaacggagttcgtgnctgtcgtgtttggaatttcatnctcaagtgttcctttttcaaacaaaaangtgtatacttttggtgtta

SEQ ID NO: 394573 - DNA, 629 bp, Oryza sativa
  unsure (1)..(629): unsure at all n locations
nnnnnnnnnnnnnnnnnnnnnnnnnnnnnntttttgggggttaaactggaaatttcatatttacattagagaaaaacttggattcagcaaaagcttcactgagactggcgccgaccatgcacagttacaacttcaacaatggattaatttcaacaaaaataacgcatagagtacggtaaaaaaagacactggttacttactacgggtagggaaaaattttttcacatacatgtcatttttattgtgacatttttactagagcgctagcgacggcagctcgtagtcttcgaaggtccagagcccggcgggcgccgcggcttcctcggcgccggcggcggaggcggcgccgccctccatgtaggggatgccgaggaagctcatgtagttctcgtacgcgagcagctcctcggacagctccttgacctcgtcggaggagcaggcgccggcgccctcggacaccgcctccatcttgggcggcgggagcacggccggcgtgggccgacgcgagggacggcctttcgccccgccgcggccggcgcgggggcggcgccgaagtcgttggggaatttaacttcccttggcccctnatccgncncgggcgtctnggcccccggggctcgngtcgttta

SEQ ID NO: 394574 - DNA, 458 bp, Oryza sativa
tcgttgctctgcacctggtacatcatgctcgtggatgccgccctcgccggcgttgcagaagacgtacttgccgcggacgtccttgcggctgaggctgccggactcgcaccgctccttggtccggttgccgtggccgtagtagagcgcggcggcgccggccggcacgcgccccgggtacaccgacctgccgacgatgctcctcgcgccgccggcgccggcgccgagcgtcacggtggcggtgaacgccctgtcgatggtcgacgcgccgacggtggtgatccacggcgcgccgatgaggacggagtagctgtcggagccgtcgttgccggcggagcacgtgacgaggatgcccctccgcacggcggcgaaggcgccgatggggacgacgatggtgccgtagggggactccggtaagaccagcgagagcgacatgactttgacgccgtctgcgatggcct

SEQ ID NO: 394575 - DNA, 645 bp, Oryza sativa
  unsure (1)..(645): unsure at all n locations
ttttttttttttttttttggacagaatttgtagttttatgttacagaacaatgctacaagtcacagctcaacaaacaaacaaatgtagcttgttatcaacaactaataacatgtatagnaaatcacatctttaaaaggaacagctgatgcngcgacggtaagtaaatctggaaggccatatacttcaactcaaatacccgcgggatcatttcctattctatttccttatctcaaatggggcattgcaacccacgacaagcatggggtgaaagcattccagcaaaatgcaagcacgctgttacttgcattcactgcacaaagcatgcccgaatgctgtgagaaatctactatagctcatccttgacaatgtcaccagcggctactggttcgacatccgcaatttgcagcttctccttgacgaattttgccatggccttcagatatgatttctttgaaagatttatcgggttgcttttgtcttgcgcaggatatagcaacagtgtaggggacatgtttatctgcactttgggatgttcattcacagaagcatctatgcctgcaaatttaacattagtgtggcccaaatcattgaaatgtttggccaacttctccacgttcttacttatggcctgacagtaaacacaa

SEQ ID NO: 394576 - DNA, 656 bp, Oryza sativa
  unsure (1)..(656): unsure at all n locations
nnnnnnnnnnnnnnnnnnnnnnnnnnnnnnnnnnnnnngaatgggaatgtgttgactttattcatgttgcaggatctgaccaaggtcttcagcatttcccactcaagaagacctcgagtgcaaaaggtacatggaaatatgaattttcccagcagaagctgggatatactctagtgaatttacacatattacagaccttatcttcattatatatctatttaatattcacattcattcaactaggtgcttatacgaaatatgaccttacactataatttatacaatttaaaaatcaatatatgaattgaattcttcaaacccatatgcctggcatgcaatacagaacgcagcagcaggagtccctttcagccaggtttgttcaaagtgtggtaaaattgattttggagcatttcatcactcaaggctttggtactctgctccttacctaggccacaaatcctgatgaagatgatgaaccggatatctcttccgctttgcgccaccggaacatacaccangtcggtcaatgagctgtgggtccggncatagaaaatggacacgaatactcccattacccagncataacccaacttnttcaatccatggccctccancccaaggttactaaacaagtaatgtggttcangagggatgca

SEQ ID NO: 394577 - DNA, 436 bp, Oryza sativa
tttttggtttgttttttgaacgaagtaacacatgcattctccttgattgacaagttccacataacgaaagcacgtaaaacaacagaacgaataacttacagctatcatgcattcccccaaaaagagagtgaaacatcggacatgtaaaaacgcaaaactaagaaataacagggcgatctcgtgctgcatcccagctaccactccagcgacgacctacatatatcttgtatcatgcttgcttaattccgcagcatatataaaatattcaactcctacaaacatgagcttgcgtattggttcgattctgacccgatcccatccccattcttgcaatgcagccattcatggatctatgagtcaccactcaccagtactgctagctgctgctactgcttattctatgctggtaggactgggtatatcttgatcaactttt

SEQ ID NO: 394578 - DNA, 488 bp, Oryza sativa
tttttattttcaaacgtttttttatgcttacagatgatcattgactgactggcagctatcaaaagatgtttacagcaacattattaattccacaaataataaaaatattaaccagatcacaaaaatcaaatccaaaggagccagaaacccacatcttgactgttcactacacttgtagttcttggacacgttcgtcatcaggttgactttagttgaccttcctacagttcagacggacctcggtcggcgtcccggccgccggcaggagggcgcccatcctcaccatcgccttggcgaagtcggcggcgaacatgccggcgttgccggcgtacttcctcaccagcgcgtcctgcgacccgccgttgaacagctcctggtcggagtggaacagcccctgcttctttaccaggttcgcgtagtaggcgttgtcgaacgcgtcgggcgtctgcacgttgatgggcgccagcgtcgtgtcgccgccggactgc

SEQ ID NO: 394579 - DNA, 461 bp, Oryza sativa
acattacccacccacatcttttattgaaaacatggataggtactacaccaacaaatagttctatttctccaaaaaaaaaacaaagatctaagtatctccatttggagaagtaataacacttctaggtaatggcacaaacccccgaatcaatcttaaggggaaaattcacaacaacatgcaccatttacgcataccctctttcaaatgcatcaatcccaaccgttgattggttttccgaagagcaaaggcctccacttgggatcaccctccgatcttggccggccatgcctaggtgctttcacaatcttgatgctttgattaattatacacttcacttgattatctacactgattgcaacacaattaagtaagctgctgacatcttttagctagaaggtggacccatttgagctggtgaccatggaggcattgaccaccaagctcgagttttccatcccaaa

SEQ ID NO: 394580 - DNA, 699 bp, Oryza sativa
  unsure (1)..(699): unsure at all n locations
ttctttccgaaaaaaatcttntacatttgaagatgatagttactcgaaagattttatatgatacttcctcgtttttttaatatatgaagccgttgaatttctcagaaacgtaagagaacaaacattcaaacaacccataaagacgagtaaccagcacctaactgaagatgataggtactaccactcatacttccaatccaaggatcatcttcagtggatcattgtgcagctagcgtacgtctactccgcagaacgccttgagcggttcgctgaatctgccgccctcctccgagtggcggaactggacgtactcgtcctcttgcacggcctgtacgccagcgggtggtcgccgtcgacgagctcgtccatggcgctcaccacggtgccgcccttgcaccgcgtggtgaacagcgccacgagccgctcgcggtggctcggcgtcctcacgcggtgnacgcaagcgggcacccgcccgttcgtcaccaccgtgaacagctcaccggccatgaaggcgaccgtgtccggctcaggggggatcgtgtgccagctgccgttgctggcctgcacctcgaggccctccacctcgtgctgcacgatgatggtgatnacggtgtcgtcccggtgctnccccatggacatnnggntcncggcgtccggcggcgggnngtnncgggncaaagggacggcgtanagnccgtc

SEQ ID NO: 394581 - DNA, 506 bp, Oryza sativa
gcgcgtgtcatagccggctggccgtccgcggccgtgccggtccttttcaagccactggccgcgtgcctcgcgtcgcctgacccgcgggcgtcggctgctgccgcagctgcattctgtgagctgtcggcgccgccagccgatgctgctcctttcctgccgctggcgcccgacctctacaatctgctcaccacgtcccgctccaactgggcgctcatcaaggtgctcaaggtgtttgcacggctggctcctctggaatcacgcctcgccgcacggattgtcgacccggtgtgccagcttctcgcgcgttctgctgctatgtccctgacgtttgagtgcatccggactgttctaactgccctgccggcacatgatgctgccgtgcgccttgccattgggaaggccaaggagttccttgctgctgaggatgatcccaacctgcggtaccttggcctccttgcgcttggtatgcttggaccgggcatatgcatcgccgttgcatgaatgcc

SEQ ID NO: 394582 - DNA, 518 bp, Oryza sativa
gttggaggctagaagattcaatcctggataaaagaaacaatgcatattatgagatttaaactgaaaggcgaagttataaagtagcgtaaaataattaaatggaacatttgagatgtaaacagaaatctcaaattattgtccttttatctcaacataaccactttacagatacccaagctgtaatctttgttatactcatgaaactttgagtacttcaggcaatcagtaatttcatccacaaatgggcaccaccagaaacttggcaagtccatgggcgatggctgcgaaacaatgggcggcgggttacatcttcaaatttcgtcaaggaacctgtgttctaattccattactaatttcattcccttcactgaccaaaacttatagtcaaccttgggcaggatgagctgctacagacccatggaatatgtgctccaatatgaaggaccatcctaagcaaggtacagctatttgcttttccttcaataagtgagtcctacttttaaggtttaggatactgc

SEQ ID NO: 394583 - DNA, 470 bp, Oryza sativa
tttttacatcaaaatgacttataatatgaaacaaatggagtagctgacaatggaactagttaaaaaaatgagcttgaactagaaacgctggtgatacatgagtttctctgctacagggctatgtctagggaagcaaaagaacaatctgaaggatgcgttgcattgcattcctgcatgcatcagcagccaaaacttttgatcagttccatgtcagtcctaggcctaccactcgtttcagctaatgaagctaatagagccagtaagtccacctactccattccaaacaaattgttgtagaagtggggagccgtgctcgtgttactcgccacccatgtcccgttgctaccggtggagcccccgtagagtgctgatccagaagccatagctgctgcagcagaataagaaatgttgttaccggagtagctgttgctctgcctgttgctgctgccgccgatttttgctgcctcccc

SEQ ID NO: 394584 - DNA, 320 bp, Oryza sativa
gtgtactctggcaatatgctatctccattttctgtagaacgataggagtccatttacatatgacatctttacatcccgggaagatgaaggggaacaaaaaatgagggggtaactttgaatttggctatatcataacattgtcaacaaatgaaacgaatagcttacatcatgatgcacgctttgaagaaaaaggcatctgatactgtacagttgatcacaatcatctttggggtggtcttgagaatggagtctgtgtggaggtatatgttgaggatgtgagtggaaccgttgcaaattcggtgtcttgacgaccgaacatg

SEQ ID NO: 394585 - DNA, 629 bp, Oryza sativa
tctcacgcttccgcggacgcgtccgcccacgcgtccggagaaattctcccgtcgtctccttccttgcgccaagaaagacgagccgcggctcaacagcggagtggaggggcgccgatctccatcgccgaggagagcagagcaggggaggggaggggatcctggttagcgcttttggcgtgtgattgatttctaaacgaattttgggccgtgaagggaagttcaatcatggcagggtctcttgccgcctcagcattcttcccaggtccaggctcatctcctgcagcatcagctagaagctccaagaatgctgctgttaccggcgaattgccggagaatttgagtgtccgtggcattgtcgcaaagcctaacccacctcctgcagccatgcaagtaaaggcacaggctcaaacccttcccaaggttaatggtacgaaggttaacctcaagacggtgaagcctgacatggaggaaacggtgccttacagtgctccaaagacgttctataaccaactgccggattggagcatgctttcttgcgggtattacaaccatcttccttgccgcaggagaagcagttggcactgcttgattggaaggcaaaggaacctgacatgcttgttgacacattt

SEQ ID NO: 394586 - DNA, 475 bp, Oryza sativa
  unsure (1)..(475): unsure at all n locations
tctttttncttcntttttcttttttttttttttgacaacgaagcacatcttttattcagatcaatacttcagcagaacaatggttcccaatacaagtgcatcgatcgttctgaaattaaagcaacagcgaactgtcgtccataaaagaagttcacgacactccgacccactttcaaaaactggaaccacaataatcggattttcgaggtcttctcgaccatttatgaactaatgccaagctgagtgcgccaatcctcgagctgtttttttacttgctccgagcctgtagagccgtaagatatgaacttgtttacggcggttctccactcccagatactcgtacacatcggccctcaaaaacgggggtgaacaagatttcagggcgtctaggcccaagttcgggcgagctgacagttcttcgagacgcatagagcttacaagaccttccaaactatctcgtgcggaggttctgaaa

SEQ ID NO: 394587 - DNA, 481 bp, Oryza sativa
  unsure (1)..(481): unsure at all n locations
nnnnnnnnnnnnnnnnnnnnnnnnnnnnnnnatgcatcagcatcagcatatactcctctcagatagctaagaatctacctttattcccatactaacattcaatggcacaaaatgggaatgagatcccatgaacacatgaaaagcagtagcagcagcatcgcgaaatagttactggtaccgatacaacagatggatcgaaaatctcttacgcgcaaagcagctcttgcaaggagcctaattatgctatgatgaagaacagagaccattcctactgaagacagcatcaaaataccataaccaccatgagtcaaattaagggttcctggcttggaaatccttcatgaacgcgacgagcttctccacaccggcgagcggcatggcgttgtagatggaggcgcgcacgccgccgaccgacctgtgccccttgagctgcaccattccctccttggccgccttggcaatgaactgcttttaaaaatcc

SEQ ID NO: 394588 - DNA, 560 bp, Oryza sativa
ttttggttttttttttgaataatgaaccagattagtacattgtgatcctgacagggcaacctgtcttggccacaactagcaatttgttgttacaagaggtcaaccagagattgacctcgttctcacactgacaagcacatccatttttacaacttattgcaaacaggtcaacaagacgttgacctcacccacgcattcggaagctaaaaaaactttttacaagcagcaagcaggtcaacaaaaagttgagctgcacatgctgaagaaatgaagatttctgaactttgttctgaaaaaagggaaaaaactttgaacatttcagaattcaaactgacggattggcgttcgtcagttggtgccggaagggaagacccacaccggcggcggccacttccagagcaggtcgcgcacggggccccgtggcaccttgtagctcccgtcggggaggtcgagcacgccgacgttgggaaccaccttggggcaccttttgtgcgaccatggcccgtcgtcggtgaagtagacccaattgccctttaccttcgggcagcaatcccccggga

SEQ ID NO: 394589 - DNA, 510 bp, Oryza sativa
taccgtctcatcttcttcttcctcctcctctgatcttctcctccttgtcatgcgatcgagctttgctctgctctggcaatggcgatgaacaagctagtcggcgccgcggtgaggcggcctgggtgggccgacctcccgcgggacctcctcgagtccgtgctcggccgcctccccgtgccggaccgcctccgcttccccggcgtgtgcacggcgtggcagtcggctgatgcggcctccgccaccgcacggtttcgcgccgcgcagccgccgtggctcatgctcccgttcaacccgaccgcgcgcaggcagagcccgagcggcggcggcggtggggatggtaggttcttggaggcgagagttcttgagcctctccgatggcagggcgtacgccattccgcagccggcgccggcggtgtctgagcggctatgtgttggctccggccaccggtggctcgtcaccgccgacgccggcttcgagctccacctgctgaacccgctcaccggtgcgca

SEQ ID NO: 394590 - DNA, 410 bp, Oryza sativa
  unsure (1)..(410): unsure at all n locations
nnnnnnnnnnnnnnnnnntacacaaaaccaaatccagcatatcagtgattctgggataaatttattgtattcaacaaatgcgacggatgtagtacacattgcctttacccgtatttgtagaaacatttcacaccaacatctgttgttacagttccaaattcagacctaacattgctgtattcatctcggggcatttgacgaagtggagtaatgcatgtaagcagtaatgcacaagcacaacaacatgaggcaaaatagagttgtactagcaacatctaatttactgaagctcattcggcaggacccaggctctcaggcacgtcacattcatcaagcagagctaggatgttattctcaggggcacttacagagggtaatatggcgcgcttcggtactgcggatcgcgacct

SEQ ID NO: 394591 - DNA, 771 bp, Oryza sativa
aaaagaaaggcagagttttgccaataaactggaagcaccgatgaacaggtgaatctggtggacgcacgagtgaaacaggattgaacagagaaagaaagaaagaaaaaaaaagaaagccatcaaagtgttcactagtagtagagagatatttgccgggacgcagacatgtggaaatggagcaacagcagcagggcccggacatgacagtgcaggaaacacaggtgagaccaaaagtttttcccaaatgtttctcggaattgcctctgcctgcctagcaagacaaacagcttgaaacaaaggcagtgcattctccacacgcatccccaactctccaagtgtatctccatttccacaccaacttgcgcccaggcagcccggcccccggccgagctggcgcccattttcggcatgtgcgcctacccagcacgcagaatggtgaacactggcagccgccatgtcaccgtcgacgacgacgacaatggtgccattgtcgtctacaccctctctctcttcatctgatgacagcattgttgggtaatcctactccaggtcctcatgagtcatcgctgacgtcatcgtcggcttacatgcaggtcagcagacactgatgttttcagaccattctggttgagcaagaagtgagcttgacatcggcgaaatcatggctggttctttgtaaatgttgtcgacgactgacgccgctggggatattggtattcacagttctatgctagaagattgggatttatgtacctgcccgggcggccgctc

SEQ ID NO: 394592 - DNA, 444 bp, Oryza sativa
tttgtttttgaactatccaacaggaggagaccattttattgtgtaaatttggcgcctgcaagacaagtgacaatttaaactgtatgctatggcgtcagaagaaagaatcgggcaaaatcatacaactcccaccactccaaacaaaatgtgtttggcattggcatgtgtcccgcaatgcacaatgttacttcacaaaactttcagctatcgtttcgcaactctatcagaaaccaagccttgggttcttcagctatccacctttagggatccgatttgttggtattagcttggttcaggtgggacccattttgagggctgcgcatccactcgcaggaaactatgggtcatcaaagtgggatgaagctgctcttcaacctagacctttgttcaggagtaaggtttccctaacttaggggaatctttgactcctgctcatagtagggg

SEQ ID NO: 394593 - DNA, 546 bp, Oryza sativa
gctggcgagcaaggcgaaggtgctggggcggctagtgcccgggtgccggaagctggcgttcccggcgctcctggcggaggcgtcggactacattgctgcgctggagatgcaggtgcgcgccatggcggcgctcgcgcaggcactccagtccgtggcacccgcgccgccgccgccgccgtcgtcgtcgtgatctcacctcctcatcgtcatccagttcggatttggcctgtgtgtctgtacatgattttttttttttttggggttcgggctagcttggccattgttagtgaattgatgatgaaaatcgaaatgagtttttgggtttagtttggtcaggattatcattaatttttgtttataggtctggtgttatctcgactctgcagtgaaagcaagcaggagatttgagatttttcatacgcttttttgagtatggatgttggcgatcgatcgatggatcgaatggaatcgcttctgcagtcaagtcatggtcagactgattgagaaatgcttttgcttcttctgacaataaaatgttctattcgc

SEQ ID NO: 394594 - DNA, 528 bp, Oryza sativa
  unsure (1)..(528): unsure at all n locations
nnnnnnnnnnnnnnnnnnnnnnnaanagaaacngacaaggttagataatggtaaaaggtcactagttacaaactacacagcaaaattcgcgatgagaaacgcgtacacaagcgctgacaaaatgaatacaatggcatggtaacgaccaagccaaactaaaccctatctcgctaatccaatcaattaatcagcatacattgttatgttacatagaaaaccctcatttgtggggtttacacactcaaatttccagcgagcgatgcagcacaccgccattcatcccaaggcaggtatgctgcatgctgctctccccccaaaaccggcaaactctattgcccattgcaccactcgcagatcaatctatcccaagacaaccggaaacggaggattgaattgatttcttttgcctccactccactccacaggttccacggccgtgcatgtgtggtacaaacacttttcgtacatgcgaaaaaacactttacaatgtggagctgtttagcgtaagccatacttaaaaagtagtaa

SEQ ID NO: 394595 - DNA, 654 bp, Oryza sativa
  unsure (1)..(654): unsure at all n locations
nnnannnnngnaattgtaatacgactcactatagggcgaattgggtaccgggccccccctcgagttttttttttttttttttttgtgaaatggcacataaactcactctgatagcataaaagtacactgaatctttgccaagagagggttattaacagttcgcattcagcatgtcatttgaactgaatggatcaagtaacacagttcctggcacagaatatgaaagtgggaagcaatttcattcagaaaagaagatctagtctaacaatctattcaatgctgaaccatttacaacaaacatacaatgtgacaaggggcattacataggggcgaccacgtagtcttctagtctaccgaaagaacgatatatcctaagttctggtgcaaaaatttccaccgtggaaagctatagtgtggtcaggcgggtgcgctaagtattttggatcatgagaatgctctacccagaagcatgccaccacagcatttactccaaatgctggattctgaactccggtaatgaacaaaatgcccacccttttatgattatgctaacaggttccccaccattcccntncttgccctggaganatccaacnnttcaaggntcntgaanccctcaatccgccccgggnnctntccaaaggcccccgggac

SEQ ID NO: 394596 - DNA, 381 bp, Oryza sativa
  unsure (1)..(381): unsure at all n locations
tttttttttttttttttttattatagaatnctagaaatgaattgcattataagcccttattatacattagctacaaaattaatcaaagacttaagattaacgatgcagtagtaataattttaaaccaaggtgatattacagtaggtacgtacaagtagtcgtattaatgtacgtacactacgcgtatactagtataataccgtcgtatttttttccgctgactcgatcgttgactagttactactactactagtagtagttctggttggtgcatctgcaagtcttcctgatctcgaagtgggtgccctcggcggggagcttgctgagcttggccatggcggcggcgaagtccacgtcccacttggtggcgttgtccctgta

SEQ ID NO: 394597 - DNA, 384 bp, Oryza sativa
  unsure (1)..(384): unsure at all n locations
cagctaaggatttggaggatctggagatggtgatggtgaagcttaacgnggcggtggccgcgcgccgttgtgctgtctctgttggtggtggtcgccgtgcatccggcggcggccgacgccggcggcgattggtacggcaagaagagcatcgaggagacggtgaggaaggaggtggagaaggccatcaagcacaatcccggcgtgggtgccgcccttgtccgtttggtgttccatgactgctgggtcaacggttgtgatggatcggtgctcttggacaagacgccgtacagcagcagcacggagaaggcggcggcgaacaacatcggcctggacggcttcgacgtcatcgacgccctcaaatccaagctgggcgccgacgtcttc

SEQ ID NO: 394598 - DNA, 481 bp, Oryza sativa
gagaagtgaagaggacgaaacggcggtgggctctcgaaacttccgggctccggcgactccgccgccccgcgatctcctcctcctcctcctctccggctcttcccggagacgaccaactccctccttcctgttcatttggtattctggtgcagtttgcagtggtttctggccttcttgacaaaatggtgaagctgacaatggtagcacgtgtcactgatggccttccactggcagaagggttggatgatggacgggatcagaaggacgctgacttttacaagcagcaagctaaacttcttttcaaaaacttatcaaaggggcaacatgaagcctcgcggatgtcaattgagactgggccatacttttttcattacatcattgaggggcgagtatgttatccgacaatgtgtgaccgttcttatccaaagaaacttgcattccagtacctagaagatctgaaaaacgaatttgaaagagtcaa

SEQ ID NO: 394599 - DNA, 408 bp, Oryza sativa
gatcccaaaatgattttacacatacagatcgcaaacatgctaaatcgtcctcagtttcttacaaaatggtgggagtttagtaaaccaactgtaacatttggtatggtacaaaccaagaaacaaatggcaaacagcagatgatcagcagccgttccagagatatgataactatgaacaaaaacaaactcggtgtactttacaaaatacaaaggatataccaaaacctgtcccctttgtaccgtataatggacaggaaaaacgcacaaggtgaatgaccaacctcccactcaaaaaggttccactgcatcaacgcgttggagtttcctcaaaagaattcagccttgtatcgacaaatgaattcactaaaaatagtaccctggtgtatcagaatttggggggagacctgct

SEQ ID NO: 394600 - DNA, 567 bp, Oryza sativa
  unsure (1)..(567): unsure at all n locations
nnnnnnnnnnnnnnnnnnnnnnnnnnnnnnnnnnnnnnnnnnnnnnnnnnnnnnnnnnnnnnnnnnnnnnnnnnnnnnnnnnnnngagnncnnaaaaaaatnacnacnanagnggagttgnacgcccanaagccanaaacaagcaaatttaagaacaaaacagggncagccacgaacgngcacacgaacttgtacattgaatccagttcgattcaagtgctgcaatctttttgcagccaaagacaaagttgcaggttcaatcagggaatcaaactggaacacatacacaaatagcacatctgacatctcctgtggatgaccggaattgagaacttcactagctacagaggcccctaggttatgctacagttggcattacattagagtgcacctttctctgggtggaatatattaacaggattgctaccgtaaaaatctggagaagactttgtcatcttactgatcagacaatggttgattacttgattgtgcaagtatcacaaacaagccaatacaatacatcgtgtattcacggggcagttctgaacaaaaatggggatttggggg

SEQ ID NO: 394601 - DNA, 606 bp, Oryza sativa
ttttttttttgaactataaagtcgcatgtacagatttaatttgcatgtacaaatgagcacactttgatgaactataaagtcgcttgcaccttatatatatctccctagtacacctaatttacacttgcacaccgtatacacttggaggccgggagcagctactacacatatactactgcacatataacgttcagacttcagagtttcagacaacaggtacgtacctgtctgttgttcagtaatcacacggaatcaaatcggcctcatcatcacacagaaaattcaaggtatatctacgtactttgggccagttatcgattgggacaatcagctactagattcggtcgcaatatgtcctccgatcatccgatcatcgtgacgatcgagacgacgacggccggcatgctcgcgcgcgagcagaagcagcatcgatcgtacactagctggtgcagctacatgatggcgcagctgtccgggtcgttgttggcgtactggtggtgcacgacggtgtgcgtgttcgtcgtcgccgccgccgccggcgggtagtacgacgacgactgcccgtactgcgggtacgacgaggactgcccgtaatgcgggtacccg

SEQ ID NO: 394602 - DNA, 478 bp, Oryza sativa
atggcgccgttctggcgctgggcggacctgccgccggacctgctgtgccgcgtcggcgacaggctggacctcaagtgctacgccagcgcgcgcggggcgtgcacggcgtggcggtcggcgctgtcgccggcgtcgccggcgctcctcgtgctgtccgacgccaggatgtgcccctcggcggcgtccctcccgacgcggcggtgcttcgacctcgcggcgatactgacggggggcagatgcgcacgggtccagcaacgggtggctcgtcctgtccatcgcgctctacggcgggcagagcgcgttcgtgctcttcaaccccatcaccaccacggagatcgtcctcccgcccctgatctacgagagcagggtgggcctcccaggtcgtgtccgcgcccagcccccccaaggacgactaccccgccgtcggcatctgcgacatcgacaggatcccctacttaccccgggcgccaggaggggg

SEQ ID NO: 394603 - DNA, 538 bp, Oryza sativa
gcattacacattcatgaccattattttcgtgaacaagcaaggtgacatgcatgcattcaccaagataaaagacttaaattacaagggtgttactgatgtttgatgatcaacaccaagctatagcaagcataggtgcgctctggcagctgtctacaacttaacccttcttcattcttccagtgcataataatccattaatccacccaaagagatcaatctctagctagacaagagccacacacacacacacacacactaccagttatatactctgttgttgcacccatcaaaccatgagcatacacgtgcatagcatcaagaggaaccagccttttcagcaggatggctgctcctgatgttatgcagctaattaacccaaatgcaagcatgcatgcatgtgatgtaatatgtaagatatgatctctatatttccattgattcttcagctagcttaattagccagccgagccagccatttcattggccatggcgcccacagagatcaccggaccatgcatcgatctagcggccgaaccct

SEQ ID NO: 394604 - DNA, 307 bp, Oryza sativa
atcgcctcctcccgccgcctagcccgcgcagagcgcgcgcctgctcaccagccagaggcggtgcgcatggccgacgcccgcttgtcgccgccgcccgctcgctgccgccgccaccattgcctggctgggttgcccccgtcgcctcctgcgaccagccgccgtagccatcgcctcctcccgccgcctagcccgcgcagagtgcacgcctgctcgccggcaggaggagctgcgcctggccgccgcccgcacgtcgtcgcctggccgctgcccgcacgccgcccaatttgtcgtcgcctgtgctgcccag

SEQ ID NO: 394605 - DNA, 711 bp, Oryza sativa
  unsure (1)..(711): unsure at all n locations
gagggtgttcgtggtgtccgacctgcacacggactaccgggagaacatggactgggtgctgcggctccccgtcggcggcgggggaggcgggggcgacggggtggggatcgacgcgctcgtcgtggcgggcgacgtggcggagacgcgggacaacttcgcgcgcaccatggccgcgctcagggagcggttcggggccgtcttctacgtccccgggaaccacgacctctggctccgccgcgagaacggccgctacatggattcgctggagaaactgactgcattgcttgatgcgtgtagtgagctgggtgtggatacaggcccaagaataataggtgacttggggatcataccattgttctcatggtatcacaagagctttgacaaggaaaaggatgttaacagtgttcgcgtcccttccttagagatggcttgtaaagatttccatgcttgtcaatggcctccagacctggcaaatgaagatgaagctcttgctctctactttgacaaattgaatgacagaaatcaagatgcaattgaagaagtaaaaaaagagcagcaaaccagatactaacatttttcacactttgtaccaaganaggaactatgtccangngaaagcggatgctttattatccaaacctcccaaaagtcatcggatcagattttttggaagaggaggcttgagaactatacatgncaacactaaaccat

SEQ ID NO: 394606 - DNA, 710 bp, Oryza sativa
gcaacaacattgagccatatgtattatgtttagggttacacaccaaagctaggagtcactcaaactctttacaatcgtctactagcaagacaaaagaaaacccggtggacagaaatcctggtcgtgatacaattgtttgaaacaccttcctgtgtgctactatgttcgccgaacgacgaacccatcttgcattacattatgtgattccgcaaagcaggaacagtagttttttttttagagcacactggttgtccaaaatgcaggaaagtgaaaaacgtagaaattaaatgcagcacattttaaattcccacatcctacacctataagatatgcagattatacagatgcgagctgtgggatggaaatcctgccgattattggtcgagatccgtcggcgtaccatcgttgagtcgttgacggatgagcacacgcatcaaaaacttgatgagtgggggagacaaacatcacacagcagggctggtggatctccaatctgtgtgcttcatggagtgactgaagctgaaaggcaggaatctccgaccggagctgcgcatggacgagatgtggcggtcgccgtcgccgtcggcgagcttcgcgggagaggggagccgtcgtcccgtcccggtcgagcgaactgagtcgccgccggcgaggagctagcgtcgtcctgagccgcggttgggctgggcacggcgtacgggagaacatag

SEQ ID NO: 394607 - DNA, 743 bp, Oryza sativa
  unsure (1)..(743): unsure at all n locations
aacagagttttgaagctttaaccccagggcagttgccgtcgtgatagatcccatccaaagtgtcaaggggaaagttgtcattgatgcatttcgccttattaaccctcagaccatgatgcttggtcaggagccacgacagacaacatcaaatgttgggcacctaaataagccatctattcaggctcttattcatgggctgaacaggcactactattcaattgcaatcaattaccggaaaaatgagcttgaggaaaagatgttactgaacttgcacaaaaagaaatggaccgatggattgattctgaagaggtttgacactcattcaaagaccaatgagcagactgttcaggaaatgctgaaccttgctatcaagtacaacaaggcggtgcaagaggaggatgagctgccgcctgagaaattagcgatagcaaatgtgggacggcaagatgctaagaagcacttggaagagcatgtctccaatttgatgtcatcaaacatagttcagacgctaggaaccatgctcgatacagttgtattttagatcactactgctgttatcccaacactgtacccagagctcgtttattttttatttttttatgtttatcgaagcctaccataattcagtgaacttaacgccagttacatttgggttatgaaagcttaccacttgacaacttcataaaaaaaaaaaaaaaaannnnnnnnnnnnnnnnnnnnnnnnnnnnnnnnnnnnnnnnnnn

SEQ ID NO: 394608 - DNA, 367 bp, Oryza sativa
  unsure (1)..(367): unsure at all n locations
tctgcttgcttctcttgctggttcgtcggtcggtggagtttgagcctgcgccatggctgtcggcgggagagggagacggccgctgctcctgctcctgctcctcctcgccgtggcgctggcgctggcggcgcgcgcgcgggcgcagctgtcgccggggttctactcggcgagctgccccaccgtgcacggcgtcgtgcggcaggtcatgtcgcaggccgtcatgaacgacacgcgcgccggcgacgccgtcctccgcctcttctaccacgactgcttcgtcggcggctgcgacgcgtcggtgctcctcgacgacacccccgcggcgcccggcgagaaggngcgtcggccccaaacgccgtcggctcga

SEQ ID NO: 394609 - DNA, 625 bp, Oryza sativa
tttttttttttttttgagaataatatgaaatggatttggaggcgcaaagaatggcagcatatacaaccgactcaaatcaacaagaccaggagatgatgaccacaagtaggtcgacgcttcagacaaagaacacacaacagctgctgatcaaccagcaaatacagctgctattatttcacaagatagctcatttcggagaattacataacacggctctttgctaagatatacaatcatacaaggtaccatccatatttgataaagtagaaatcagcaattttaaaccttgaaggccagggatgagacttccatatcggcacgcaaacgcgaccggatatcatggtgtcctctctcttttcttttttcttttctgtactctatcctggcattagtttcagtctgtggtcattggccccgcaatacaacagcggaaaacgtgccctgcggacatttctcataacctctatctcggcattctcaagcatgacaacgatctcggcaaatgatggcgaacttcagggtttgcgtcccaacagcaagtcatgatcttgctcagagaatccacacaatcctgcgggattgcaggacgagagcccctgtttacgacagcaaatgcagcctgaac

SEQ ID NO: 394610 - DNA, 651 bp, Oryza sativa
  unsure (1)..(651): unsure at all n locations
agatcgttgtgcggtgcctcgacgagacgacgatatttccccttcccctcgtcgtcgcctccgactccgactccgactcctcgtgagctcgccccgccgcctgcgccgccgatcccgcgaggcgcgccgccgccgttcgtcctgctgcttccgccgcatcccgataccgtgggagcactgaagaaaactgagaaatggatgtttttcagcgattctactgtttcgtaaagcaaccctactgttagtgttggttgtttgaagatgattgaggggtcaaggtttcagaatatgttgggcggtgctggaattggaggtggtataggttgcagaggaaggcaagaaaacgagatgaatggcttccacaatatgccctactaccacaaggtcggggagagctcccacatgtccgtggataacgccgacaacctgaacatgatgaactttgttggtggttcggttgccatggcggtggataacatgcagcgtgggatcaaacgagtcccgcacggtcatgctcaaacaccctggcctccgtgatatgccggcgncgagttattcggttcacaatagcgtcatccatcccgaaccgggctatggcgcctactctgaatgangatgcattggctccgggtattgatngatccaagccat

SEQ ID NO: 394611 - DNA, 287 bp, Oryza sativa
ctccgatcgtcggagctgctcccggtcatcgtgcacctgaggcaatcgccggatccagccatctctgagtatgcttctgccatcgcgaccaaggcttgccagccttgagcccttgacatccctggttcctcccggccgtggcgggggcatgatcatgccgccgcaatgcgaatctgaaatctttgtaatgtcctggaattgtaatgtagtacagtatatcacggatcaactatttgtatatatatgacttgatccatatatttacccgacatatgaaatttgcagct

SEQ ID NO: 394612 - DNA, 653 bp, Oryza sativa
ggcaatattcatctcacagaataaatcaaaaatctagaaaaaggacatatcacataatcaacaaattcatgcatcacacaatcaaatattcatcaacaagtttacatcactgaatcaaacatcaaacatcattaaatcatcgaatcaaacatcaacaatggcacagccggcaagcgaaggagacggttgggggtgctcactggtggcaggagagacaagggagcccaccactgtcgcccgtggggagcccaccgccgtcgttgccgctacctactcctcgccggatttggcagaggggagggctccgccgccgccattaccttcccctcccgccagatctggcagaggggaggtcgtcgccgccaccgcccgtgagccacgccacttgctgctgccacccctcctgtcgtcgttgactcccctcccggccggatctggtggagcgggggcaccactgcctcccctccggccggatctggtggaggggagggtgtcgccgccgcctcccgtccggccgccgggcagctgcagccacgggctcccctctagctccctgccgccgcctccgccggccaaccgtcggtagtgcgcgggagagaagggagggagagagagaagagagcacagacgagagagaagagagtgagacgaga

SEQ ID NO: 394613 - DNA, 367 bp, Oryza sativa
  unsure (1)..(367): unsure at all n locations
aggggatttctngccgccaacgcccatnagccacgccacttgctgntgccacccctcctgtcgtcgttaactcccctcccggccggatctgttggagcggaggcaccactgcctcccctccggccggatctggtggaggggagggtgtcgccgccgcctcccgtccggccgccgggcagctgcagccacgggctcccctctagctccctgccgccgcctcccctcccaccggatggcccggatctggcggaggggagggcgcggtcaccactgccgcctccgccggccaaccgtcggtagtgcgcgggagagaagggagggagagagagaagagagcgagacgagagagaagagagtgagacgagag

SEQ ID NO: 394614 - DNA, 854 bp, Oryza sativa
  unsure (1)..(854): unsure at all n locations
tttttttttttttttttaaaggaaattcagaaggcgaatttaaaaatcaggcacaacgaatctcaggccacaagaaaatatatttgagccgtttacagtttaaattaacttgtatatagctaggatacaacaatactctctctgcccccaatcgccggcgcaaagttagtagggtcctagttcgccgtggccgctgccggcctgctgcttccgcagcctttccgattgcacgccgtgggaaagggtagttcaggttgttgcactccgggcaggtccagctcccttccggagcgtccttgtctttgcgacatggggtagcattagatccagggcttggccttggagctccacatttcttcatattgcaactgtttctgaaggaaaagttgacattctcacactttgggcagatccagtcattctcagccattccatctgggcctccacgacgcttgcgtgaagcagagctgtcattattttccactaatgctccaccagaccatgggctagaaaccggcattggagatcctctaaaaccataaccatatcggcctagctcaggtccagggccatagcccatgcctcccatcggactgcccattggtccaggttgaccataagaagaaaaaaggccatatgaagcaggaggtcctactggtggaccatatccataccgcaagccaagatgtggatagggggcaccatagctaccagatccaagaggaataggaagttgggtgccagcactaccataaaacagatgtggncgatcatatccnagatgtggccgatcatatccagcagcaggaagaagtggcatcttgggcttaaacccgtgatggacggggtgcacc

SEQ ID NO: 394615 - DNA, 515 bp, Oryza sativa
ctcagaagtcagaactactcagaatacaggtttaagaattggggaactatttattactcatcacttaggtacttcctccattttatattataagactttctagcattggctacattcatatgtatattaatgaatctagacatatatgtatgcgtagattcattaacatatatatatatgctagaaagtcttataacctgaaacggatggagtaattacctcaggttggtacacatatgtacatgcacgaatttcgatgcacaaacacaagcagagctgggtggttgaccgttgacacagccgaagctaactctctacgtgttacaccatttctctcttcttgaacagggtgatcgatctcacttgccggcggccatggcgtcgtagaagcggctcctcctgacctcctcgggcgggatgaaggcgtcggggccgagcccgggcacgttgaacgccacgtcgtcgatggtccacgactcctccatcgcgttacgacgcgggcggcgcgaacgccg

SEQ ID NO: 394616 - DNA, 704 bp, Oryza sativa
  unsure (1)..(704): unsure at all n locations
gggctacaataatcttaccaggctactgctataatttagcaagatgaaacaaaggaatgtcagttaaggtagataatatattagactcaattaaacaggggctatttacaaggaggtggcagcttagtgctgagagagaggaagtgcagggtgggagggctgagcttacttttctacgcataccaacatttatatggtaggactggcggctgacaacttacctcaccaaaatagaaaaccaaaactgcagcaaataagagtgcaacttgaccaccaaggacaagcaccatctacaaatagggtactttgagcttatccaatacatcaaagggggaaaaaaagcattaactccactacgaaatgcattttcttataacgatgcatcgcgttcttgtctcccatgttacttcaaaagacgttaccagatgggaaagcattagcagttctcagaattaagagacgaggttgacaagcagcctcgcatttctctgccgactgagcccctttccattgaattagcatgactatcttctgatcttgagttcagggttcccggattcatccgctgaacctctnctcttgtgtagatgaagatcttgtgaaccatgtcgcagaattcaatccagggatcatccccaactagcatcatgtcaccttcgttggtcagtgtagacaaccatccactccttcttaggacccttcag

SEQ ID NO: 394617 - DNA, 484 bp, Oryza sativa
ggggcaaactggagatacactgccagctcattctccttatttttactagtaacagcttaggattaagaacaaactgaagaaacactgcagtattgtcagaaaacgtagcagaaacaaaggattgcgacaacacaaggtcattgactgagcccaaagccctcgactaagaagaaatacagggattcatccatcagttggggtggggtttgaagggctaggcatagcgagtagctatgaacagtgcaggatttacaggagtacagactatttggttgttctagactttgccctcccagaggcactcaagggagggaccattgctattgggattgcctgcatgagtattgttcagtaagagatccctgagatgaggtggtgggtgaagacccatggcagaagcacgttcccaacgctgaagacgagtaacgccaatgcaagggccaaacttcatgtccatatcaaacagtcgcaactgctcctcttg

SEQ ID NO: 394618 - DNA, 470 bp, Oryza sativa
cgtggtcgcggccgaggtcttttttttgttttttgatgcccaaagatatatatgaatatatatcgagtaaaataaaaactcttgttggaattcttgtatacaactattttataaaacccaaagagaggggcaaaaattaatagagtaaatatcagctgttcttcatcaatctagagctccctttgggtatacatgcttctttgttgatgaacaatattatttgcgaacagcttaaatatgtactaaaaaaccatctcatttgaatcaaattaagcaaacgaaggggaaaaattaattgaaagaaagaacttctttttttttggttagctaggttgctatgagcctctgatgatcatgccaccatctgctcctgctccggccactgcgcgaatatgtcgccggcggcgtggcccgtccttgacaagagagttcacccatggacacgtccggctccgccgccgcggcgtgcg

SEQ ID NO: 394619 - DNA, 737 bp, Oryza sativa
  unsure (1)..(737): unsure at all n locations
gcgagaggaaacgacgatatataattaagttgatggaatcaatcaaaattaaaggatgcgggtagtagtgaccagtgacagttagcagcggcgaactggcgatccgtttaataagctgtctagttgggattaggaagtcaaaggaacatgtgactgacatatagatcccatcgttcacgggtccacatatcagtaaccgcgtcaggagaaagtttacgttggaggatccgcttccgtctagctagttgtagttgttgctggccgccggcgccggtgaggtgaggtagacggcggcgcgacagacggggcagcgggaggcggtctggacccatggcacggcgcagccccagtggaagcggtgcgtgcaggggaggtgcgccaccgcctccccggnacgcagctcctctananacaccgngnacncctcctcctcctccggcgtcggnctccgccccaaccncctgaancanatccgccgccgcccttctttcctcgtgtacancttcccantgtggcgccgccgnantngccgttgantgcncgccgncgtaaacngactcgttcctgananctgcgatttnttanncctctttgangangacganggnggattncctctggctccgcaaattcttgtcnaaactnttncttnnncatnccggaatgnttgangtnnaagtncaaacaancggggntgatgctnatacgtaatgnggtcctctgattaaaaggggttt

SEQ ID NO: 394620 - DNA, 486 bp, Oryza sativa
aaccatggggaatggagaattttacttgtaaatttatttaattttacacatcccttcttaaaaattccaaatttttcagcgaatttgtattttaattaattacatatttttctgatctgtaaacttcccggggcaacgcacgggcacttttgctaaaccaaacaacacttttggtcaatatacacactctgtaatcacccggtgcaacgcacgggcacttttgctaggatatatatatatgtaaccagtattcaacacgttggacacagggtttcttgataatttattaagcaagtagcttagtaggagtcgacagcatcaacgaccatagagattgcagcggttttcttgatggggtacatgccgtacagggcgatgccacatagcccagacttcgctgcaatgtcacgcttcatccggatgtaacccattttaccccaccctgttccccacgagttcttaacgatccagtacttggtgttgtcc

SEQ ID NO: 394621 - DNA, 427 bp, Oryza sativa
  unsure (1)..(427): unsure at all n locations
nnnnnnnnnnnnnnnnnnnnnnnnnttttttttgatcattctctaacacaaacacatgcagtattcatacataggagtacagtatacagtagcatatatgtatagtactagtagaaaggcagaaaaagcgcgagggacgacgccatcacgcacactctgctagctacacacgccaccatacaaacacacacaaggagcccgaactaacctcgggcgcggccccgccatctcatctctcaacctttgggggtcaaaaagccatcgacgcatgcagcaccaggccaccagcactgcactttgcatggacttcattcattcattcctccttccttcctttgctttggatcacaccacaatgggaggggagaaaaaagatctttatagcttagccctcccctggttttacttattgcgccatcaacggcca

SEQ ID NO: 394622 - DNA, 681 bp, Oryza sativa
gacccaaattaactgctcttcattgtaatgcaaagagaggtactgtatatggtcgatcctaaaacaatgctcgacccaaattcttattgggcttgaaaaacagacaatgagatcaaaagacatgtgtcaaatgttgttccaggtcaaaacacgtaacaaaaaaaccaagcttttcccaagcgggagcttgacaaaacattcagtgagcaacagccttctgagccttgtttgggaggatgttgtccgggaggatgagctccggcgggatctcacggaccacgccgagcatcgaatcatactcctcgtctttgtgggcatactttttcctcagcatcttctcgagctcgatctcgtcgaaggtcttggaattctcggcagcatggacttgggccagattgatgtagttcgttgctgactgagcaatgaacgctatctcctcttcagtaagctttcttaggaacttggcaggattaccgacccagacctctccagaaggaatccttgtgttctgcttaacaagcgatcctgcaccaaccatgctgtgcttttcaacgaccactccatcaagcagagtggcacccataccaacaaaagcttcatcctcgacggtgcatgcgtgcagaacagcactatgacctattgtaacattgtttccaattatggtaggatgaaccttcccgc

SEQ ID NO: 394623 - DNA, 490 bp, Oryza sativa
  unsure (1)..(490): unsure at all n locations
tcgtactctccccccccccccccctccaaacgcttgttaaaatccctcattcccatcacctcagcacgtacgaacgagagtgatcgatcgctagctcgccgagatcaccagcctcctcgtcttcttcttcttcttcctctcgatctcgaggagggtgccatgggtaccatggttggccatgtcgcgccgggcgccggcttcatcctcatcggcatgtggcagctgttcaaccacatccggctgttcgcgctgcggccgagctcgtacgcggcgccggtgtggttcccggtgcgcggggtgcgccacctggagctcatactggtgatcgtcggcgcggctatctccatcctgatggagctcgtgatcgggccggcgaggaccagccgtttcgacgacgacgggaccatcccctccaaccaacttcacaaatttcaagcaacgggtccatcttggttggggttgntggtctaaggccgcggtgactattcca

SEQ ID NO: 394624 - DNA, 671 bp, Oryza sativa
  unsure (1)..(671): unsure at all n locations
aagaattgtgaagtagcagaggcagtcaatgaaaatgtcgatccagccacccaagttactggctcatctaccccagaacagggcacggatgtcatagtagatgctgaacaagaaaacccagccacaacagaggcaactaacttcaatggcgtcccctngtctgcaaaggtgacaggcgattctgatttctccccttttatggaccaattcgtgaatttaagtataaattcaaacgaaacagagccaacttttgctctgttggctgcccatgtccttttatggacccttttatgaaccatagaaccacccatatatactgccataggacctttagtgcacggctttgtatagtctagggtgaagatttctggttttgtatttaagggacctaaaaaaatctcgctgtatatactgccataggacctttagtgtatggttttgtatagtttaggggtgaagatttctggttttgtgtttaaggacctaaaaaaaattaagttgaggtacctccggtgaacttattcttttatatatcaacatgccctcgaagtctcgaactggaaacctgaaaggcgaaaagaagctagtccaaattaagcggcggcgtggcccaaccggtccacaacgacccagacactctcgccgttgccgactcctcgccttcgcttact

SEQ ID NO: 394625 - DNA, 509 bp, Oryza sativa
  unsure (1)..(509): unsure at all n locations
cggtgtccgcttcctcgccttccgcaacgagcagtccgcgggctacgccgccgccgcctacggcttcctcaccggctcccccggcctgctcctcaccgtctccggccccggctgcgtccacggcctcgcgggcctctcccacgccaccgccaacgcctggccgctcctcatggtctccggctcctgctcccagccagacgccggcaggggcgacttccaggagctcgaccagatcgccgccaccaagcctttcatcaagatcgccgtcaaggcaaccaccatcgccgacatccctcgcctcgtcttccaggccctcgccgccaccgtctccggccgccccggcggctgctacctcgacatcccatccgacgtcctccaccaaaccctcacggaatcggaggccgccgccctcatcgacgctgccgccgccgattccgccaaatccgattcttctccacccaagcacaagtccctggacgagggaatcgagaaggcggnggagtgctccg

SEQ ID NO: 394626 - DNA, 925 bp, Oryza sativa
ttcatttcttggtcttcgtctccgtctccgtccttgggttgatatccagaatcagtcggtttggtttgtcagcaatggcgaggctagccggcgttgctgctctctcgttggtgctcgtcttgctcggcgccggcgtgccccggccggcggccgccgccgcggcgaagacgcaggtgttcctctccaagctgcccaaagcgctcgtcgtcggcgtctcgcccaagcacggtgaagtcgtgcacgccggcgagaacacggtgacggtgacgtggtcgctgaacacgtcggagccggcgggcgccgacgcggcgttcaagagcgtgaaggtgaagctgtgctacgcgccggcgagccggacggaccgcgggtggcgcaaggcctccgacgacctgcacaaggacaaggcgtgccagttcaaggtcaccgtgcagccgtacgccgccggcgccggcaggttcgactacgtggtggcgcgcgacatcccgacggcgtcctacttcgtgcgcgcctacgcggtggacgcgtccggcacggaggtggcctacgggcagagctcgccggacgccgccttcgacgtcgccgggatcaccggcatccacgcctccctcaaggtcgccgccggcgtcttctccaccttctccatcgccgcgctcgccttcttcttcgtcgtcgagaagcgcaagaaggacaagtagatcgtcttgctgcaaacgcaagttcgcagcttcagtggactgaattccgttatcggaaaaaaaaaaggaaatgcgtactttagcttgctgttataaatgtatacagtgatgttctcctcggatataattttgtgtttgtttttaccttttttataaaaattatatgtaccttttgtttcttatttttgtttggtcacgtgcaacgaatatgaaaataaattggttgctgt

SEQ ID NO: 394627 - DNA, 426 bp, Oryza sativa
  unsure (1)..(426): unsure at all n locations
cacactcgctgtcgccctcgccccgactcgactccgccgctcgcgcggcnccggagccctaaaccctaggtctcccacgcggcggcggcggcgggcgggggtttctcgccatgtcgcacttcgggaggtcggggccgccggacatccgcgacaccttctcgctcctcgtcctcaacatcagcttccgtaccacagccgacgacctcttcccgctcttcgaccgctacggcaaggtcgtcgacgtcttcatcccgagggatcggaggactggggactcgaggggattcgcgttcgtgcgctacaagtacgctgaagaggcgcagaaggctatagatcggcttgatgggcgtaatgtggatgggaggaacatcatggtgcagcctgccaaggttgggcccaatgcggagccattacgaaatggaagga

SEQ ID NO: 394628 - DNA, 321 bp, Oryza sativa
gtggcgggcgttggcagcaggcgacggcgccctcccggcaggaggggagggggcgaacaagggcggtgcccttccctccgccggatccagcgggaggggaggcggcggcagcccgtcggcgtcccagcggcggtggcgccctcccctccgttggatccagcgggaggggagccggcggcggcccggcgtacctgcgacggcggcaccctccccttcgatctagctgtatgggaatttttggataaaatttgggtgtatatgcttcagtttttcttggctctgattctatttgtctgatttccagggggatttagggagggg

SEQ ID NO: 394629 - DNA, 403 bp, Oryza sativa
  unsure (1)..(403): unsure at all n locations
nnnnnnnnnnnngagcgcactctccggtcatatttggccccacattattattcgacaaaggaatataatactgtaacaagggaagctttgaaaaggacgtccggaagttaaaacgggcaaaataaaccccaaagcctgctttgggggatgcaagcctagcacgaggggatggctcgactcaccaggaacacaaaacgattttcccagatgagatggtaagcatggaacgcttatagtatgtacccggggcacaaacaccacacaggggagcgctttcaggactgctgatccaggtaggcatctttctccggcttggtctcgccactgaggcaccccacaaggcttccggaaacggcggagacccaggagacgctgcgtgccaaccaggccgaaggagtggccg

SEQ ID NO: 394630 - DNA, 620 bp, Oryza sativa
gggaagcaacaggctaaggtcattgccagatagcatctcaaagtgcaggtcattaattgagcttgatgcgagctacaacgggctcgcttatctgccaaccaacattgggtatgagctggtaaatctgcggaaactctgggtccatatgaacaagttgcggtcacttccatcatctatctgcgagatgagatcattgtacctcctggatgcacatttcaatgaactatgtggtctgccatctgccatagggaaactttcaagtcttgaaattctgaacctgagcagcaactttagtgacctgaaggatctccctgcttctttcggtgacctgctgaatctgcgcgagctttgacctcagcaacaaccagatccatgctcttccccgacaattttgggtcggctggataagctagagaagctcaacctggggcaaaatcccctttctatgccgccaatggagatcgtgaacaaaggcgtggacgcggtgaaagaatacatgttgcagaggtggcttgacatcttgctcgaggaagaacggatgagcatcgcagcagcggagagccctcaagcaccgaccactccttcggcctggctggcacgcagcgtctcctgggtctccg

SEQ ID NO: 394631 - DNA, 1128 bp, Oryza sativa
catccattatgtttccttgggaggctgaaatggtaaataaacggaagttggagtagccaaagaggtgaagccccccgctccactcctcccaactccgccgcctcacgccgccgccgccggtgcccgatcccgcacacgcgtatccctccagctcgccgcccgccagcccggcatggagcgcgtcgccggcggcggcggaggaggagccggcgaggcgcggggtgcagacgcgccgccgccgccgccggtggcggcagggggcgggggcggggcggtgaaggggaagtcctgcaagggctacctcttctactcgtcgtcgctcaggtcgcgagaccgcggtcccgtctgcgccggcatcacccgcgccatcccccaagtccctgatcacatggttggagaaattgagatggaagctatccaggaaggtcgcagcctttccgacttcagatatggatgtatcggctattccatgtatctggatgacaagaagagttctgaagggaaaggtgacaagcacccgcaactgcctatttgtgttggaatcgagctattggctgatagaaaaacttcgactaatcaggcttcatctcaccataaaaaggaagctccccaaccacggcgatataagcctgcacagagaggagatgatttcttaaccaaatttcagaggaatgctggacttgtggctaatggtgtagcaaggaacttaaataaagttggggcctacattaaagacaccatggatgatatcatgtatccttaccgcaaacgtccaaagtaaaacctagatctggttcttttttaatcctgaagaagagtagacaaacgggggagtgtctaatccactacttcctgaaacacctggctagcacatagataggctctgtaggcagttatatggaggccaagttgcactctattccgctagctgtttggtgccttcacttcatatcatgtttcccccctagccttctcccgctattgcaatgagttcattttactgggttccatccagcaatgtataggaggtatgatgtaacacacaatatcacctgcttgaggtcatacttgcgacttctgagaataatatcatgtcaccattgcgagccaaaaaaaaaaaaaaaaaaa

SEQ ID NO: 394632 - DNA, 530 bp, Oryza sativa
tcggtttgagccgcctcgcctcgcctcgctcccgctgccctcaaatccccgatctccccgacccgcatccacagttccacacccacctcgtgctcgtcgcaccgccaccctctcgagcctcgccgccgcgtgattcgccggccgcgacggccaccaagatctccgccgaccgccgccgtcacccgacaaggaacttgaacagcccaggtcatattccagatggggaaagataaacaatgcgaaactgtggacgcggtcgggatggtgccaatggaggaagagaagaagtccaaggaggagatacatctcaagattaagagcaaggacaagtctttcaggtgatgagggatgagaaggaaggaggattgagataggaggtcaaagccaagattgtgggacaaggaagaggtgaagctttgattcagatgatggcgcaaagtccgcggtaaaaagtaagggctccaagaaaggcaatgggaaataaaaaatcagacaggacggacgatgaacatgacgatgaggatgaagag

SEQ ID NO: 394633 - DNA, 481 bp, Oryza sativa
aaaaatataaaaacgacctgaatccgcaccgtcccctttcctctcgccgccgacctcgtcggccgtctccaccgccggccggactacgcttccccatcggtgcggccaccccctcgaggccttcacatcagcgccgccaccaaccggttgcagtatcgctgatctcctcctcttaccaggaggcaagatgtcgtcgctcgccgcggcaagggcggataacttctactacccgccggaatggagcccaaagaagggtgggctcaacaagttccatggacaacatgctctcagggaacgggcgaggaagctggaccagggcatcctgattataagattcgagatgccattcaatatttggtgtggtgggtgcaactccatgatagcaaaagggagtgagggtttaacgctgagaagaaacaagtttgggaattattactctaccaagatatggagcttcaccattgaaatcaccatgctgcaa

SEQ ID NO: 394634 - DNA, 557 bp, Oryza sativa
gtccgtacacactcctatctatccaacaagctaattaagcgaggagcttggtagacggcggcaatggcgggcgcggcggcggcggccttcgcggcgcaggtgctgcgggggcggtggttcatggcgtacggctccttcctcatcatgtcggcggcgggggcgacgtacatcttcgccatctactccaaggacatcaagtccaccctcggctacacccaggagcagctcaacaccgtcggcttcttcaaggacgtcggcgccaacatcggcatccacgccggcctcatcgccgaggtcacgccgccatggttcgtcctcgccatcggcgccgccatgaatctcgggggttacctcatgctctacctctccgtcaccggccgcgtcggcgccaggaccccgctctggctcggctgcctctacatcgccgtcggcgccaactcgcaggccttcgccaacaccggcgcgctcgtcacctgcgtcaagaacttccccgagagccgcggcgtcatgctcggcttgctcaagggttcgtcggccttagcggcgccatctttacg

SEQ ID NO: 394635 - DNA, 644 bp, Oryza sativa
tcgctttgtgtctccgccgtgggacgcgccggccaagtccggcagcgtgaagcgtgtctcccggtgaataagcggaaaccactccgcagcaagcacctccggccgaagaatcgcccccaatcggccaatcctccccaccccgacttgtataaagtagcccgctgccggagccccgacgtgccacgtgctgacgtcatctggccgtggttggacacgtgtcatgacatccaaggcttcaaagctggcggagcagcagagggaaccatttcttggagtcgccggccgccctgctggtggtgaccgcgcggttgcgccggccgacggcgaacatgacggcggtttctcctggctgacggccctcggttttgtctttctaactttcaattcaggtatggcgatctaccgctcggacggcgacctcgccgccgtgtccttcgtgtccttctcctacatcgacctcgtgctgctcttcgtctgcttgcgcatgttcgagaaggcggagcccaactcgcgggagagggggaacctcaaggcggccgtgtggatcctgacgacgctgctcaccgttgttttttcctataaggtcgcggcgatcatgcccgtgcccgtgcaaatactggtttgggcgatggccggcgcgactg

SEQ ID NO: 394636 - DNA, 518 bp, Oryza sativa
tcggtcgaaaccatcggttcccctcctctctcgctctcgccggagttagatgcgcgtgagctcgtgtaggagagcgggagcgagcactaccgggtgagactccggcggcggcggcggccgcgatggcgtccatctccggcgcggcggcgcctccgtcctcgtcggcggcgtgcaggctgcggctgcggcggcagctcctcctccgcccctcccacctccgcctccgcgccccccactccatcgcggacctctcccgctcctcctcgtcctcgtcggagcagcagccctcctctaccccggcggcgccgctcgcctccaggccggggcagaacggcagcacccgcggcgcggtggagaaggacccgatcaagctgtgggagaggtacgtggagtggctgtaccagcacaaggagctcggcctgttcgtggacgtgagccggatggggttcacggaggagttcctccgccggatggagccgcggatgcagcgcgccttcgcggcgatgcgggagctcgag

SEQ ID NO: 394637 - DNA, 703 bp, Oryza sativa
  unsure (1)..(703): unsure at all n locations
aacccctcgtctcgtctcgtcgcctcgcctcgcgagttcgcccgccgcctgcgccgagcagccgccgatctccgccacgcgagcagcggcgccggcgtcctgctacttccgccgcgtcctcgccggtgagcaaccaaaggaaggatgagtaggcgctggagcaggacaatttatgtcgggaacctcccgggcgacatcagggagagggaggtagaggatctgttctacaagtatggacgcattgttgatattgacttgaagatccccccaaggccgcctggttttgcttttgttgagttcgaagatccccgtgatgctgaagatgcaatccgtggacgggatggctataattttgatgggaaccgtttgagggtggaacttgcacatggtgggagaggtaactcttcctcctttaacaattctggtggagggggacgccgtgggggtcgtatctaggcatacagagtatcgcgttctggttactggactaccttcttcagcatcatggcaagacctaaaggaccatatgcgaaatgctggtgatgtttgttaactctgaagtgtanccgtgagggtggtggtactataagggattgtaggctnccacaaactatgatggcatgaaggatgntatcagggaactttatgattctgatttaaggattccttttcaaaggccttttaaagggtaaggggntttttg

SEQ ID NO: 394638 - DNA, 529 bp, Oryza sativa
cttcctttccctctccttccttccagatctctccacgcgccgccccgatctcttccccccacccccacctcgtcaccggcggggaggagggcccggccgccggcagccatgatctcctccagtaagctcaagtccgtcgacttctacaggaaaattcctagggatttgaccgaggcatcactatctggggctggattgtccattgtagcagcactagctatggtgtttttgtttggaatggaactgagtaattacttagcagtcaatactagcacatctgtgattgttgataggagttcagatggggagttcttacggatagattttaacttaagctttcctgcactttcatgcgaatttgcatcagttgatgtcagtgatgttctgggaacaaacagattgaacataacgaaaactgttcgcaaatattcaattgatcggaatttagtgcctactggatccgagttccacccaggacctattcctacggtcagcaaacatggagatgatgttgaagaaaccatgatga

SEQ ID NO: 394639 - DNA, 270 bp, Oryza sativa
ttcgacgctctcaaggtgtacagtccgttcagcggatgattggaacgtgaggggcacgtgtgctcgttaaattatttcttactatctctgtaccaaaatatagcaaactagtataaataggacgaaattcgggtagttctcaggtacgaattcatcgtactaggaaatatctcacattgtattaagttgctatattttgggtcagcattagtacaatattacacaaagaggaaaaaaaaaggaagaaatgtaacatgtggcgtttttcat

SEQ ID NO: 394640 - DNA, 513 bp, Oryza sativa
gatcaaactatcagagcacatatggcactcactcacctcctctgctccctcctccttgccaccgcattgctgctgctctccatctcccgtacagaggctggcgaggtgggcgtgtgctacgggagggacgcggacgatttgatggatccaccggccgtggtgaatcttctgaaggagaacggcatcacgaaggtgaggatctacgacgccgacccgacggtgctgagatcgctgtccaacacaggcatcaaggtgatggtggcactacccaacaaggaccttgcttctgcaggccacgatcagggaagtgcgctagactgggtgaaaacaaacattgttccgtactataaccagggcacacaaaataatggtgtggctgtggggaatgaggtgttcaggcaagcacccaacttgacccctcagctgttacccgcgatgaaaaatgtgcagaccgcgctagcgagactgggccttgccgacataataagggattaacacccattaatttgatgc

SEQ ID NO: 394641 - DNA, 512 bp, Oryza sativa
tttcgtttctccttctccctcccctgttcttggagttcctcgccggagaacttctgcggtggtctctgagttcgcactccaggttagaattctggtgcggcggctcgagctcgggttcgaattcggatttcctgggttggctgatcttgatcgcactcgcgggaagaagaagaattaggaagcagagtgatctctgatggtcacgggccgagaagggaagagataggagttgctgtcatggagcccgcgacggagaccacggcgacttcgccggctgcggctgccgctgcgcagccggaggcggaggcggaggcggaggcggagtcggcggcgacgccggtggcagtggcggcggcggcggcggcaacctatcagccgccagcgccggtggttccagtcgccgtggcaggtgcggcggcggtgagagggaacgggaagaggaagagggggaggccgaggtagtacggtccggacggtagcctgctcctgccgctgtaggcgaccccgatctc

SEQ ID NO: 394642 - DNA, 432 bp, Oryza sativa
tcgttcacaccaaaaacgaatcagctcgtctcctgcctccgcctccgcctccgcgagctcccattccattcccggattgcgccgccgccggtgttgcagcagccatggggatggggccactagagaacgccgtggtggacgcggcggcggaggccgtggcggcgaaggccgcggtcggcggcgtgggcgtggggggttcgtacgcggtgctgcagtgcggggaggactcggagtacgtgaggaaggcgtacgggggctacttcgaggtgttcagggcgctgctggcggaggacggcgagcggtggcgggtgtaccgcgccgtgcgcggggagctccccggggaggaggaggccgcggggatcgacgggttcgtcatctccgggagctgcagcgacgcccacgccgacgacccgtggatcgtcgccctcgtcg

SEQ ID NO: 394643 - DNA, 555 bp, Oryza sativa
  unsure (1)..(555): unsure at all n locations
gtttttgaaaaggaagatatggttcaacaccaagcctcattctaacctttgcggtgtgattgagtgccgattttgtggtgacactgttcaagctggtggagaaccacttgatgctcgggatcggcttcgcaacatgtgtgagcacgagagtatctcgtggatccaggactgcaccatgtgattcttgtggacggtcagtcatgctgaaggacatggacattcatgtgattgctgtgcatcagaagagctaactattgtaaagcattggctctgagaaagatggcctgtcctttatcctgctgggctttaaccaccaaggccatgaagtttcagcactgctggaccaaatggtatttccttttgtgttacatatatcttgtgtcattggttaaattgtaacactgcgtatgggagcatggaacactggggcggtgtatgggagtatggaacacagtggcggtgtctccttatgtatacacaaaccatctattatatttgatttgagctttctcatattcaggagctttattacnaactttcaaaaaaaaaaaaaaa

SEQ ID NO: 394644 - DNA, 497 bp, Oryza sativa
  unsure (1)..(497): unsure at all n locations
caaatttttttctgagttccaattcgatttgttcgttcggttactgcaaaagaaagtcagcaacaaaatggccaacgcgaggaacgcggctgccgcgtcgccgccgccgccgtcgtcgtcttcttcgtattcctcgtcggcgtccgacggggagatcctccgatcgctgcaccgcctggcgagggatctggctgcggcggaggcgccggcgccgttcttggagacggtgttcgcggcggtgtccaggcgcgcgaagcttctcgccgcggtgttcgacgacctgctccggtgcgggaggctgccgcggtcggcgtcgctgtgcctgcgcgaggtgctgctcgtgctgcagcggttcatggcggtggtggccgactgctcggcgcgcagccggatgcggctgctactgcaggccgacgaggtggcggcgcggctgcgtgagctgcagcatgacctggccacgctgctggatcttctncccgttcccgagctcgggctcg

SEQ ID NO: 394645 - DNA, 465 bp, Oryza sativa
  unsure (1)..(465): unsure at all n locations
ctcgtctcgatccaagaagcagagaggagagggattcttgttttcttgatcatccatggcgcggctgcggcgtggtctcgaacacctggagcggcggtacgcgttctacgcggcgtaccactccaacccggcgaacgtgctcgtccacgccgtgtgcgtgtggcccatcctcctcaccgtgatgctcccgctccggtacgcgccgccgctgccgctgctccgattctactgcccgctctgccgccagtacctccccgtgcagctcggcttccccgtcgccgtcgcgctgggcgcgtactacgcgctcaatggaccgccgcggggcgccgncgccggggtcttgcttagccgggtgggccgccgggacgctcctcgccgacgncgcggggctctggacgttccgcaacgntggaagccgcttgtnaacgggaagccgttntctggtcgccaatttttttcaaggtt

SEQ ID NO: 394646 - DNA, 777 bp, Oryza sativa
  unsure (1)..(777): unsure at all n locations
ttttttttttttcagttttttcccccacccacaccacaagcagacgaagaagaagaacaaggttcgtccgtcgagatgttggaggagctgctcatcttcacgcgcggcggcctcatcctctggtcgtcatgccgggcgctcggcggcgccgccctcaagggctcgcccatcgacgccctcatccgctcctgcctcctcgaggagcgctctgccgacgccagcttctcccaggacacctatgcgcttaagtggacctttaacaatgacctcggcctcgtgttcgtcgccgtttaccagcgcatgcttccacctcctttacgtcgacgacctcctcgccgccgtccgtaaggagttctcacagatttatgatcccaagcgcacctcctaatgatgacgccttcaatgagggttttcgccagctccacctcgaggctgaggctcgcagtgaggagatgaagaagaataaacaggtcactggttcccggcccaccaaggttaccactaagaccaatcgtggcgacactcagggctctggtggtggtaggaagaaaggtgactcggggaaggacgactctgatggtgactccgggaaggggcacactttgccaaatggtaattccaagatgcaagagaatagcctcaaggacaattcttcatgcccccagtgttgttgttaaaggaaaggagaacggggaccccaacgttggggcctttgatgtaaataagttacagaagatgagaaacaagggtaacaagaagantnaggttgctagtaat

SEQ ID NO: 394647 - DNA, 421 bp, Oryza sativa
tttttccacccccaaatcgcctcgactagcggctgcggcgtcgagggcaggagaggggcggccgcggcggcggcggcgggggcgagatgagcgactcgttctgcccggactgcaagaagcacacggaggtggcgttcgaccactcggcgggggacacagtgtgcacggagtgcgccctcgtcctggaggcgcactccgtcgacgagacctccgagtggcggacgttcgccaacgagtccagcgacaacgaccccgtccgtgtcggcggcccgaccaacccgctcctcaccgacggcggcctctccaccgtcatcgccaagcccaacggggcccagggggaaggtcctctcctcctccctcggcaggtggcaaaaccgcgggttcaaccccgaccggttccttatactttgctttccgacca

SEQ ID NO: 394648 - DNA, 494 bp, Oryza sativa
cgttgtgacgtctacctcggctacggctacgccatgggcggtcagacgatgccgttcatgcacggcatggggtacgtcgtgtcgtgggacgtcgcgacgtgggtgtccacggcggaggagatcctcgcgcgcaacgacacggaggggcccgaggacctcatggtcgggaagtggctcaacctcgccggacgcggccggaatcgctacgacctcaagccgcggatgtacgacctcagctgggacatggacaacttccggccggacaccgtcgccgtgcacatgctcaaggacaaccgccggtgggcggcggcgttcagctacttcaacgtcaccgccgggatcaacctgcaccacctctcaccatgatcgatcgatcgatcgatcacctcttcgatgatccataattggtggttgttaatttcttccccgtttgattaattctaattaactaatcggtcgacccattttttaacggggttaattcgattcgtgca

SEQ ID NO: 394649 - DNA, 528 bp, Oryza sativa
ataagttggttgagaaggcagttggcatatcatctgttgctgaaatctttcagctccatagtgaagcattcttcagagataatgaggagttacatgaagaaagggtcaacaatctggttagatgttccattggatgcacttgcagggcgaattgctgcagtaggaactgcttctcggcccctcttgcatcaagaatctggtgatccttatgcaaaggcttatgcaaaactgactgcactttttgaacaaagaatggactcatatgctaatgctgatgccagggtttcactcgaacatattgcagtgaaacaaggacatagtaatgtgacgacacttacaccaagtgccattgctattgaggcattgctaaagatggagagctttcttactgagaaggcaatgatcagaaactaaccacttttgggtgggtaaaagcacatcaacaaacaaaaactcttgtttgttctggtggatttatcgcatatacctaaggcgggtttcttagtatagcatgaacttgttagtcac

SEQ ID NO: 394650 - DNA, 492 bp, Oryza sativa
tttttatcctctctctctgtctccgtccccaagggagcgtttgacgatcccctcccctgcacggttcaaaacggggatcggtagtgttctgcatcagtgatgggctggagatttgcgttgttactgttacatgttcttctgtgccttgtcaatggcgtctcctgtggccgcacgagctcttacgtgcgtacggagtacccatcgactgatatacctctagaaagcgaatggtttgcggttccaaacggctacaatgcgccacagcaggttcatatcactcaaggtgactataatggaaaagctgttatagtatcatgggttactgtagcagaacctgggacaagtgaggtgctctatggtaaaaatgagcaccagtatgatcagagagtggaagggaccagtaacaaattataccttttacggctataaatctggatatattcaccatttgccttgttgatggccttgagtataacaccaattttatataag

SEQ ID NO: 394651 - DNA, 499 bp, Oryza sativa
tttgatctagctggtgaatcaagggttgtgggagctgttaacaatgcagtgggatctgaccttagcaaaggatcaagctcagcttatctatctgctgcatctaatgctgcacaagcggcggcagctgctgctagcgaaagttcaaacctaccacctgagctggatgaattcggcagagatatcaatatgcagaagcgaatggatcttaagcgtagggaagaagacaggaggcgaagaaaaattcgatcagaatctaaaaggttgtcatctgaagggaggagtgcaaataatgaacatatcgaaggggaactaagcactgatgagagtgatagtgagagcagtgcctatctgtccagccgtgatgagttgctcaagactgctgatcttgtattcagtgatgctgccgaggaatactcaagccttagaattgttaaggacaagtttgaaggacggacaactcagtatcctctggcttaccgagatgctcatgtagctctga

SEQ ID NO: 394652 - DNA, 451 bp, Oryza sativa
  unsure (1)..(451): unsure at all n locations
tttggtgcaatacgtcaccggctacctgtgccgctccttggctctcctcttgctcactctcgtcctccacagggtggcgaggaaggcgaccggtaatggcgccggcaagccgaggcttccgccggggccgtggcggctgccggtcatcggcaacctccaccaggtcgcgatgggcggcccgctcgtccaccgcaccatggccgacctggcgcgccggcacgacgcgccgctcatgtcgctcaggctcggcgagcttcgcgtcgtcgtcgcctcgtccgccgacgctgccagggagatcaccaagacgcacgacgtcgcgttcgcgacgcggccgtggagctccaccatccgcgtcatgatgagcgacggcgtcgggctggtgttcgcgccctacggcgcgctgtggcggcagctccgcaagatcgccgtggtggagctcctcagncgcgcg

SEQ ID NO: 394653 - DNA, 468 bp, Oryza sativa
  unsure (1)..(468): unsure at all n locations
ggacggcggngnacggttgggtacacgattgcgcatggagctggacaagaaatttaaggtgctttgcctgcacggcttccggacaagtgggagttttctgaagaagcaaatcagcaaatggaatccttccatcttccaacaatttgacatggtcttccctgatggcatattcccagctggagggaaatcagagatagaaggcatatttcccccaccctactttgagtggtttcagttcaacaaggacttcactgaatacacaaatctggatgagtgcatttcatacctgtgtgattacatggtgaaaaatggaccttttgatggcctgcttggattctcccagggtgcaactctttctgctcttttgataggttaccaagcacagggcaaagtactgaatgatcatccaccaatcaagttcatgggctcaatagctgggagcaagttcagggacccagcatatgcaat

SEQ ID NO: 394654 - DNA, 498 bp, Oryza sativa
tcggtatcagcttgcctaggaagcaaggaatgtagccatggcttctgtttcgccgctactgcttctcctcttgtgcagctaccactctgtagttgctcatgcaggagatggacagagttacaaggttcttgagctgaattctgaggccgtctgctccgagcgaaatgcgatttcgtcgtcgttgagtggaaccacggtggcgttgaaccaccggcacgggccatgctcgccggtgccgtcgtccaagaagaggccgaccgaagaggagctgctcaaacgcgaccagctccgagccgagcacatccagcggaagttcgccatgaacgccgccgtcgatggcgccggcgatctccagcagtcgaaggtgtcgtcgtccgtgccgaccaagctgggctcctccctgggacacgctggagtacgtcaatctcccgtgggctcggcacgccggccgtgacgcagacggtgaccatcgacaccggcagcgacgtgtcgtgggtg

SEQ ID NO: 394655 - DNA, 668 bp, Oryza sativa
ttcgtccgttcaagtactcccaggtcaacaaggccaaaagggccagtgagtggctagcttaattagctaagctcatagtcatagcaatggctggagccgtgctggtgaggagaatggtggtggtggttgccattgccgccttggtggcgcccggcgaggtggcggcgcagctgacgccgacgtactacgacggcagctgcccgagcctgcagtccatcgtgaggtcggccatggcggccgccgtgcagcaagagccccgcatgggcgcctccatcctccgcctcttcttccacgactgcttcgtcaatgggtgcgacgcgtcggtgctgctggacgactcgtcgacgatcaccggcgagaagaacgccgggccgaacgccaactcgctgcgcggattcgaggtcatcgactccatcaagtcgcaggtcgaggccgcctgccccggcaccgtctcctgcgccgacatcctcgccgtcgccgcccgcgacggcgtcaacctgttgggtgggccgacgtgggcggtgcagctggggcggcgcgacacgcggacggcgagccagtcggcggcgaacagcaacctgcccgcgccgtcgtccagcgcggcggcgctggtgtcggcggtcgggtccaaagggctcgactcccgcgacatgattggcgctgtcggg

SEQ ID NO: 394656 - DNA, 686 bp, Oryza sativa
gtttgttgccgcccttttttttttttttttgaaacaagctaaggtgtgacataacatcttattcgttgtaattgtcagcaaggtagccataggaagtgcattatgactcttactcctaatataccatcaatagctggtgagtttgccatatttaatgataatttatgttatagtcaataggaaatctttggtgcaataaaagctgtgcaagctgaagcaatgttgtcggctcatggtgtgctgatctccaaggtgtaagattcaccatgtaggtgcctttgacttctccacaagaatgatcctaccgttccactcagtctcatcacaagcacgaatcgctgcatcagcatcctcatccttctccaaagataagaaaccaaagcctcgagaatccccagatcttttatcccgaacaacacgtgcacttgtcacacgcccatacttagagaatttcttttccaaatctcgctcagtggtggcataactaaaacctgcaacaaacagattccgtccaggcttacccaatccagtcttcctgttggcaggtggtgaccacggccttctaggtgaatgatgacgatgactggaaggagatgatctgcgccgtggtgaatgccttcttggagatcgcctatggtgactccttgagtgaggagaccttgaccgagatctaccatgttcccttc

SEQ ID NO: 394657 - DNA, 592 bp, Oryza sativa
gccacgccgccaccaactcctccccccaaatccgccatggaagacggccacgctcccgccggagccgagctcgcggtggccctcgacgaggaggaggaggaggccgccccgctggtatccggcagacgcggcgccgcggcggcggcgagggcggcgacgtcccagacccgcgacctgcacctgctgagctcggccttcctcttcgtcttcctcgcctaccacgccgcccagaacctgcagagcaccgtcaacacggacgagaacctggggtcggtgtcgctggggctcctgtacacgtcgttcacggcgttctcggtggtgggctcgccggtggtgcggcggatggggtccaggcgcgcgctcgtgctcggcacctccggctacctcctcttcatcgccgccaacctcgtcccctcctggtacacaatggtgccagcctccctgtatctgggttttactgcatcgatcatctgggttgggcagggtacatatctcacgtctgctgccctcagtcatgcaagagacaataatttgcctgaaggccaaactttggggaacttcaatggagagttctggggaatgtttgctagca

SEQ ID NO: 394658 - DNA, 461 bp, Oryza sativa
caaagaacagagcagagcagagcagcagcagcaagaaacagagagagaagcagagcaatttcgatcgagaagaaccaaagctactcctaagccaaagatggtgcacgcaccggcgaaagtggcagctgcggcggcgatcccgctgctgacgccgtacaagatggggcagctggagctctcccaccgtgtggtgctcgcgccgctcacgcggtgccgctcctacggcaacgtgccgcagccgcacgcggcggtgtactactcgcagcgggcgaccaggggcggcctcctcatcgcggaggccaccgacatctcccccaccgcgcagggctacccggagacccccggcatctacacgcagcagcagatcgaggcgttgaagccatcgtcgacgccgtccaccgcaaggcgccctcttcttccttcagatattgcacgtcggcaaggttttcaccacagatttt

SEQ ID NO: 394659 - DNA, 392 bp, Oryza sativa
ttttttttttttttttaaaccagagacttcactggattttattccctctcgcgccaaagttacgacataacgtctcgttaagacacgaataaacgtcacgaattccaacgttgatcgaattttacatgcacaaaccagcagcagcagggttgggaacttgggacccaaatgatatgagatgagatccttacacacatcgtcatggcaatatggcacgtatatctaggcgaacttggcgagctcgtcggcgaaggcggcggcgtgcggtctcctcgacgcagcggagcatgaggcggatgccgcgcttgggcgccggcggccggaggtagatcaccgacgcgacgatgttgacgtcgtcgttgagcgtgaacacctacccgggcttgccgaac

SEQ ID NO: 394660 - DNA, 811 bp, Oryza sativa
gtgttgacttcgacacaatctatcgatgtcgatgccgatgccaatactcctcctcctcctgctcctcccccagggccagggccacggcggcgccggcgacatctgcatcgtgggcagcggcatctccggatcatccaccgccttcttcttcaccaactacaccaccgccctctccggtgcccagctccgcgtcttcgagcgccgcgctaaggtcggcggccgcctcgccaccgtcaccgtctccggcgatcacttcgaggctggcggctccatcatccacccacgaaatctccatgtgcgccgcttcgccgacctgcttggcctcgaagccaagaccgatggcgacgaggactggctcgggatttgggacggccaccgcttcgtcttccagacgctccgcccgctaccgcccgggacgtcctggctccgccgcaagctgcacacccttgttaactcgctgcgcctctttaagcgctatggtctctcgctgctcaagatggacagatttgtccaggaaatgttgcaaagatttatgctctactacaatggctttgaatcccgacctgtttttgacacggttgaggagatgctcaaatggtcgggcctctatggcctcactcgcaggacactagaggcagagctgcttgatgctggcctcaattctcaaactatttcagagcttgtcactgtgataacaagaatcaactatgggcaaagtgtgagtataagtggccttgctggtgcggtttctttagctggttctgaatcaggactgtgggctgtcaaagggggcaacctgcagctagctgct

SEQ ID NO: 394661 - DNA, 655 bp, Oryza sativa
  unsure (1)..(655): unsure at all n locations
tgccactcccccccaccttactcccccccgcttccactcccccggaccttccagaaccttctcccgcgtcccccgccgagatggatgactcggagaacaacgcgccgtcgacgccggggtcgccggggttcagcacagacaggctgccgccgaacaccaccaccagccgcggcgccaccgacccgtcctcctactcggacgacgaccaccaccacctggttggcgcggaggaggcggaggtcgaccccaacgtgctccccgaggacgacggcgtcgtcgccgccgaggaggaggaggacggggaggacctcttcaacgacaactacctcgatgattaccggaggatggatgagcaggaccagtatgaatcggttgggttagatgactcgatagaggatgaaaggaacctggatgagatcatggcagatagaanggctgctgaagcagaacttgatgcaagggatgttaggactggtgcagcacctgatangaaattgccacggatgctacatgatcaagacacagatgaggatatgagcttcaggcgtcctaaaaggcacagagctaattttagaccaccaagggaaccaagaacaccaagaagtgatgatgacggtgatgggtgccacgcctagtttcacctgggaagatttca

SEQ ID NO: 394662 - DNA, 504 bp, Oryza sativa
  unsure (1)..(504): unsure at all n locations
cgaaaccccaatccccattatcgacgcttcctccgccccggcgttcgccggcacccgtatccccccgcgaccgcctccgattgattcgatccggtgatcttgtgttgttgccacatgattgttgcctctaaatgattctatgggggcccccaatgaagtgacatcgtactcttccctctccaaaatcgatagcaacaaccagggaggtcatctatctagtctagttccagcaaacatttacccagcgcaggattatctctatgaaccgtccctggagccagatttcccatcggagtacgattctagagaagatccatttgttccaacacgagctagttcaaatatcaatttgaagactgtcctaactngggctggctgctattgtttcgggcacaaataaggaaccagggtaatacactgcaagcagaaagtttcagcacggatgtctcaattctagggatttgacaaggatggggatgttaatgtacatccatctgtatgcgt

SEQ ID NO: 394663 - DNA, 530 bp, Oryza sativa
cacactgaagtgtgtaaccaagtttgagacagaggcgaggtcgggtcagcaaggaagacggcgatgacggcgcgaagcatgttgcggaaccacccggaggcgtcggtgctcgacaccatccggcagcacctgctggaggagccgcgcggcggcggcggtggcgaggcggcggaggcgagcttcgggagcctggtggccgacatgtggagcgactcgctgccgttccgcgacgacgacgccgacgacatggtggtgttcggcgcgatgcgggacgcgttctcgtgcgggtggctgcccgacggcgtgttcgcggaggtgaagccggagcccctgctctcgccggactcgtcgtcgtacgacgggtcctcttgctgcttcggcttcgcggacgtgtcggagccggtgacgccgagcgacgccgcgtcgggggcggcagaagcggccgccgcggcggccgcggcgacggccgagcacgggaaggaggaggaggccctggctgccgtggccaaggggaagcactacaggggggt

SEQ ID NO: 394664 - DNA, 621 bp, Oryza sativa
ctagtttccaaggagagcaatcatcgcctacatgttacactcggctcgtcatgtgcggatttaagccttagaacaaaaacttgtatatgttaggtgctagctggtgatcgcagctggttggtacctctgggctaagcttctctcaggagtccttgcgtgatgtcgtcgacggcgtacacgcggccgtccaagccaccagggccggccggagagcggaggcctccgcggctagccaaggagcttggcaggatcgagcccaagaagctcgggattgggctggtcgccggctgctgcctcgctctcctcacctacatctcctttgcccgccttttcgccatctactcgccggtcttcgagagcacgtccttggtgatgaagaacgcaccacctgcgtcgactcagcagaaccctgtgctggctcaacaacagagcaaagaagaggacgagaaagatgttggtgaagatgagacggaccggaaagtgccaagcttttcggagacgacagaaaagaatgaaggaggaggaaacagtaacggaaaccattcggggacgaagctgaggccacaatcttctgcgttgagaacggcgttgatgaggggtttccatattcgcgggcaccgt

SEQ ID NO: 394665 - DNA, 497 bp, Oryza sativa
ggaggggagagaggcaagcaacactagcatcctctgacctgccaaactgtcccccgcggctcacatttcttggccatttcttaccttccaagcaccaccaatcttgtccgaggcgagcaagcttagccggtgcttctcagagctaagccaaatcgcgtgccaaatccaagaaaggcacgggaggaagaggaagaagaaggaggggaagaagagcagtcagggcagggggatcagtggcaggctgacacgccaatgggggcagcttcttgttcttcttcttcggcgaagatctgttcctgctctgcctcctcctcggcttctgcttcgcgttcgcggcgagccagcaggagcagcagcagtcggactcgtgcagtagcgccggcgtcgcggtcgctcatctcgtcctcttcaactcctccgccttccgctgcctgaccgtctggaagcaagaagacttcgtcctgcggtacaagaacaccggagagagccaatggagc

SEQ ID NO: 394666 - DNA, 437 bp, Oryza sativa
  unsure (1)..(437): unsure at all n locations
ccattttagattgattccgtgtagatcgatgggggttggggcggctggtagttccgggccgggagactaattctgatgcgattcgacagcggacggatatttggagagtctgtctctttttgccgccgcctatgattcggagcagcaagcgccgccgcctgacgcccatccccagcgacgccggcaagatgtcgccggattgggcttcgcttgaccaggatctggtggggctgatcggggggcgggtgcttgccggcgacgacatgcgggactacgtccggttccgcgccgtctgctctcactggagcgcaagccccgtccgcccactcggccgcggcgtcaccgaccggcgttttcacccgcggcggtggatgatgctaaccggagggccaaggctctaccccggcaatccgacctncgcggctacgtcctttctt

SEQ ID NO: 394667 - DNA, 527 bp, Oryza sativa
  unsure (1)..(527): unsure at all n locations
ttaggaaatgtgataaaatgcagatagtggcgctgaaggggagggaggcggcgtcggagctgataaacctgaacaaggagacggaggcgtcgtgcagcaaccgcagcgagaatagctccgagatcaacctcgacatctcgcgcacgccgccgcccgacgccgccgcgctcgacaccgccccgaccgcgcaccaccaccaccatggcggcggcggcggcggcggcggcggtggcggcatgatcccgttctacacctccatcgcccgccccgccagcggcggcggcgtcgacatcgaccagctcctccacagctcgtcgggcggcgccggcggacccaagatggagcaccacggcggcggcggcaatgtgcaggcggcgtccgtcgacacggccagcttcggcaacctgctctgcggcgtcgacgagccgccgccgttctggccatggcccgatcaccagcacttncactgatcgatcgatccatggatcccaaccaccaaccaaacaaccattgggcacaacaaacta

SEQ ID NO: 394668 - DNA, 563 bp, Oryza sativa
  unsure (1)..(563): unsure at all n locations
tatgactgaggttatttcaaaggatcaattggaagcgcttgttgagaaaataaataagttaacatcatctgctgagtcacatttgcagagagaattggctatgtcctctagtcctattgaaaagctcttcagtctcattgatgaagtttatgcacttcggcacgaagtagcataccttgagatatgaaaatgaagatttacatttaaatcttgaatcccatactcgtgaaatggagcagctaaaggaggcatccagaaatagtgactcaaaccgcagggagctggaatcaaagagtagtgaactacttgagataccagttagtatggaccgaatgattcagcgattaggatatcttggaggaaaagaagcactagaagataccaagcctacaagcacacaagcactcttatccaagctgggaaaactaataattgcctccaatgtggaatctgggaatgccaagtctgtaatacaggaactgggagcaaagctgcaggtcagggaaaaggcaattgatgagtcgtcaacanaagttaagatgtttgatgacttgcatcatgct

SEQ ID NO: 394669 - DNA, 628 bp, Oryza sativa
  unsure (1)..(628): unsure at all n locations
tnttgatcaggagccttcaaattgggaactgcttggtccaaaaaagaaatcgcctcagaaacatcaagacaaatcaggaaatggagtgctagttgcaagtcatgaaccagaccaactgaagatcttaatcagtcgggtacaacatctctttttagtgctaaagatgaatccagtcttttggaagactgcctcttggcatcagttaaggttcttatgaacttagcaaatgacaacccatctggttgtgaattgattgcgtcatgtggtggacttaacaccatggcctccttgatcatgaagcatttcccctcattttgttttgtcgtgggacaacaactataacacgagagatggagatgtcaatcttgatcatgagttatcatcttctcaaaacagcaaggcacaccaggtcaaaattaagcaattgcgagatcatgaacttgattttctggttgccatattgggcttgcttgttaaccttgtagagaaggatagccttaatagggtacggctttcatctgcccgtgttcctgttgatctatctcagaatccacagagtgaagagacacagagagatgtcatagcactcctctgttctgtattcttagcaagtcaaggtgctagtgaa

SEQ ID NO: 394670 - DNA, 599 bp, Oryza sativa
cccccccccaaccacgaccgcggccggccggcgaatcgcctcgattccggcgtgcgaattcctccacctcgccgccgccgctgctcgcgaccgatcttcaccttccgcttccccccccctgcagccgattggactcgatcctatcctatcctatcctatccccgaacgggcgatctggtaggcgagagagaccagccatgtcgggggtgttcggcaaggtgttcgggaagtccaaggcgcagagccaggccaccgcgctggcctccatcgacaagctcagcgagactcttgaaatgctggaaaagaaagaaaatttgctagtgaagaaagcgaatcttgaggttgagaaggccaagaccttcactaaagcgaagaataaaagagctgcaatacaatgcttaaagaggaagagattatatgagcaacagattgagcagcttggtaatttccaattaaggatacatgatcagatgataatgctggaaggtgcaaaggctacaacagagactgttgatgcattgagaactggagcatcggcgatgaaagcaatgcacatagcgaccaatattgacgacgttgacaagaccatggatgaaatt

SEQ ID NO: 394671 - DNA, 526 bp, Oryza sativa
tagatcgcgagcggccttcttttttttttttttttgccataaagtacttaattcttaaagcaagcttgatacattatatgattatacaaataaaagaatatactgtaggtaaagatgtaatcccacggtttataacaacacatcggcaaattattcccccaaaggcacaagtatagtaaatcaattcaaaataactcacagttctcgtgtcaaggtggattacagtggttgtacacaatgcactagcaaaacacctctagtcagccatcttgttcaggcgatggatcatactcctcgcaagcctattccctgggtcaattttcagaaccaaacggaggtcctctgcaccaagcctgtatttctcagagctctcatatagaagggcacgttggacaagcaccgaaacattatccttatctttctctagtaccttcgaacagtcggcaattgccttcttgtactccccaacctcctttgtagatgaagcccttgatgacagcacctctacaatgtcagcatactttcc

SEQ ID NO: 394672 - DNA, 767 bp, Oryza sativa
catgcagctcggctgcaccaagagcgccgaggggaagacggatcactgcatcgcccacggcgcgggccgccggtgcgggcaccagggctgcccgaaggccgcgcgggggaagtccgggcggtgcatcaagcatggcggagggaagaggtgttcggtcgagggctgcatccggagcgcggaggggagggtcgggctctgcatctcccacggcggcgggcggcggtgccagtacccggactgccgaaagggcgcgcaggggagcacgctgtactgcaaggcgcacggcggcggcaagcggtgcgtgttcgacgggtgcctcaagggcgcggaggggagcacgccgctgtgcaaggcgcacggcggcgggaagcggtgcatgttcgagggcggcgggctctgccccaagagcgtccacggcggcaccagcttctgcgtggcgcacggcggcgggaagcggtgcacggtgcccgggtgcggcaagagcgcccgcggccgcacggactgctgcgtcaagcacggcggcggcaagcggtgcagggtcgacggctgcgccaagagcgcgcaggggagcacggagttctgcaaggcccacggcggcggcaagcgctgcacctgggccaccggctgcgagaagttcgcccgcgggcggagcggcctctgcgccgcgcacggcacgctcatggcctcacagcagcgtcgcgccggcggcggcgggagcatgatcggtccagggctcttccacggcctcgtcggcgccatgaacaacg

SEQ ID NO: 394673 - DNA, 495 bp, Oryza sativa
cgaaatgaaaattctgtccacccaggacactgtcttctctctctctctctctctctctctctgcttcgagttcgtcgattcggttcaaatcactcgtctcgtagtcatagatagatggctcgtctcctcaatccaatcttgccgctctccgggctcacagtttcttgatttccccattcttttttcgtttccaaagtttttttcttcttttttgttgttctttgtgttgatttcttcctctgcgagtccactcccagtccagggtcagaagcttgctgttgaattccacactgttgaagcacaactcgagtttttctcatcaaatttcatcttttcttctgttcttttccctctctctctttttgttttggcttaaatcttactagagttcatcacagcttcccacactcgttttcccgtctcgatttcatcagctgaggtcggcacttgctcatctttgccgatttgtttcttctcgagagcctacaaaaattc

SEQ ID NO: 394674 - DNA, 398 bp, Oryza sativa
catcaacttcgacgagaagatgaagctcgggcagggcggctacggcgtggtctaccgcgccaccgtcgttggggagaacggccagaacatggaggtcgccgtgaagcagttctccggtgccaacaccaaggggcaggaggatttcctcgccgagctcagcatcatcaaccgcctccggcaccgtaatctcgtcaagctcgtcggttggtgccaccaaaatggcgtcttgttgctggtgtacgactacatgccgaacggtagcctggacacgcacctcttcggcgggccggagtcggaggtgctgaactggcagcagcgctacaacgtcgtcaccggcgttgcgtcggcgctgaactaccttcaccacgagtacgaccagatggtgatccaccgcgaca

SEQ ID NO: 394675 - DNA, 737 bp, Oryza sativa
ttcttgctcgagctggttcagagcagcttcaggctcgggcatggcgtcggtgggcttcactggagtggtggcgatgctgctcatggccacagcgttcttgggggtcactgccgacactagctcagacgacgtgactgccctaaacacgttctacacaagtctgaactcgccctcgcagctgacaaactgggtggcgcagaacggcgacccttgtggccagtcttggcttgggatcacttgctctggatcaagggtgataacaataaaattacccggtatggggctcaaggggaccttggggtacaacatgaacgtcatgactgcactggttgagcttgatgctagcaataacaatcttggaggaggtgatatcccttataatctccctccaaatcttgagaggctaaatcttgagaacaatagcttcactgggactttgccttactccatttcccaaatggcctcactgaagtatctaaatcttggacataatcagctttcaagcatcaatgttatgttcaaccaactcaccaacttggctacattggacctctctgacaacaccttctctggcactctgccagacagcttcagcaacttgacaagtctgaccatgcttcatttgcaggataatcggtttaccggtaccatagatgtcctatctggatctccctctaactgacctcaacgttcaaaacaatcaattaagtggagcaattcctggataagctaaaagg

SEQ ID NO: 394676 - DNA, 618 bp, Oryza sativa
  unsure (1)..(618): unsure at all n locations
tgttctgcaatgctcaagagtcgttttgctggtacaattgtcaaggcgcagcagaaagcacttctggatcatgggaagaaaatagaccctgcgaaattgcagttagaaaaggagaggctggaaaaaaggcagcaagaagagaaagcaagaattgaggcccaggtgaaggcggctgaagctgctgcacaattaaagctagacgaagaaatgaggatgaagagggagcaggtaagacgagcagcacgcctggcactacacatgatgaagaagactgttgatattgacaacagtgacttccttaaggacctggaaaacttaagcaaaaagtgggagctgaatccccctggcaaacttattgttgattttgtcgacgggatcgatctaccacctggcttaaggagtccgctagagaggcttggccttttcatgaagaaggatcttgaggaagaggtccaacatgaaatggaggacagtgtatcaccatctacggagatcgacgtggaggaaggagagatcagcttctgtcaatagcacggctctaaaatatccattgtttcttcctttttttctttccccccatcagactctgaagcaacatgctcgcatngcttataaaat

SEQ ID NO: 394677 - DNA, 470 bp, Oryza sativa
gaagaaatcaagaaaccaaccaccaactagctactgtagttgactgacagtgatagtggcagtcatgcaggtcgtgggaaccgtgcgtgtcagtggctgcggcgcggtggtggcgccctcgcgccggcagtgccgcgtgtccgcggcggtgctgacggccgcggagacggcgacggcgacgcggcgccgcgtgacgcactcgatgccgccggagaaggcggaggtgttccggtcgctggaagggtgggcgaggtcgtcgctgctgccgctgctcaagcccgtggaggagtgctggcagccgacggacttcctgccggactcgtcgtcggagatgttcgagcaccaggtccacgagctccgcgcgcgcgccgcggggctccccgacgagtacttcgtcgttgctggtccggggacatgattaccgaggaggcgctgccgccgtaccagaccattatcaacacgttcaacgc

SEQ ID NO: 394678 - DNA, 558 bp, Oryza sativa
acaactaagttcgattttattcttttagaaataaactccaggtgggggaggtggggtaacaggtccaaaaaatacgagaggttgcaatataagaggacagcaagcctagcgctgtctacacaccctctcaaccgatatgcaccagaagcaccagcccaggtaccttgaccatctacgatattaccagcaccaccaaaacagtacaaagtagaactagcttcagtatagaaaggagtaagagaaccagcatagtcaatgtaatgatcagtatgagtttggtgaataccgaaggtagcattaccagtgaaggtaggagtagttccaacattaaaagttatttcggcaacactaatagaaccaatgactgtattaatggtctcagaaacattaccagcagcagcgatctcagtatcaatatcctctgatggagccttcatgtgacagacatagacattgctgttatacacacatagaccagtgtactgtaatgtaaaaccaaactgcagactaaaagccaaggacaaaagagcccacaatacaagtaaagatttccgcaaa

SEQ ID NO: 394679 - DNA, 503 bp, Oryza sativa
ccactttcgttgcttcgcttcgcttcttcccccacctgctctcgtctccatcaccatcccttctctctcctctctctctctccagtctccacctcctaggagaggccactggcggtcgccgacgcgagggccccgcccaaatcggaccccggcgccacgccgatcggttcgatctccccttgctccgccgcccccgccgccggggaggacgaggtggaggtcgaggtggaggtggaggagcagctcgccggactcgccatcgccgatcagggggaggagctgctgctttcccaagcccaccggctgggaggatggccctgtttgtttgtttgctggagatgaggacttcaggggcgagaagatgccgggtgtggtggccgcagcagtgggtgtggagggtgctgatgaggattcgaggccgcggtttcctaggcgaccacgggagccggactgcacctactacgtcaagttcgagagctgccgctttgggatgaagtgcaagt

SEQ ID NO: 394680 - DNA, 515 bp, Oryza sativa
caaaaacccacaggatccgagctaaagctaagcttagctaccacacagtggtggccgcgcactcctcctcctcctcgcgctgcacacgccaacgggttacaagaacgagttggcacgcgagagccctgcagggaggaggaaggatgcacctgcacgcgaagacggactcggaggtgacgtcgagcatggcggcgtcgtcgccgccgcgggcggcctactacgtgcagtcgccgagccacgacgacggggagaacaagacggcggcgtcgtacttccactcctcccccgcggcgtcgccgccgcgctccctcggcaaccactcccgcgagtcctcctcctcccgcttctccgccgccaagtccggctcctcccgccgcaccgtcgtcgtcgggggagacggcggcaaaggcggtgtcgcggctggccgctgcggctgatgtggtggtggtggtgggcggcgtatcccgtggatgaaggaggcggtcatcgaggaggaaggcctgctgatggaggac

SEQ ID NO: 394681 - DNA, 528 bp, Oryza sativa
  unsure (1)..(528): unsure at all n locations
ttcncttcatccagctcactgcataatcacacactaattaacaagctaattagctgctgtaattagctgcattgaattcatggagaggggtcagaagaagaagctggcgacgttggtcgggtgcaactacgccggcacgcccaacgagctgcagggctgcatcaacgacgtcgccgcgatgcgcgacgccctcgtcgcccgcttcggcttcgcgccggccgacgtcaccgtgctcaccgacgaccgcggctcgccggtgctccccaccggcgccaacatcaagcgcgcgctggccgacatggtcgcccgcgcggcgcccggcgacgttctcttcttccactacagcggccacggcacgctcgtcccgccggtgaaggggcgccgccacggccacggcgagtgcgacgaggccatcgtgccctgcgacttcaacctcatcaccgacgtcgacttccgccggctcgtggaccgcgtgccgcgcggcgcgagcttcaccatggtgtccgactcgtgccacagcggcgggct

SEQ ID NO: 394682 - DNA, 499 bp, Oryza sativa
  unsure (1)..(499): unsure at all n locations
tttaatgtttcgccggcgaagtgaaccagagagagtcatccatggaggtggaggaggcggcgtacaggacggtgtggtcggagccgccgaagaggccggcgggaaggaccaagttcagggagacgaggcacccggtgtaccgcggcgtgcggcggcgcggggggcggccgggcgcggcggggaggtgggtgtgcgaggtgcgggtgcccggggcgcgcggctccaggctgtggctcggcacgttcgccaccgccgaggcggcggcgcgcgcgcacgacgccgccgcgcttggcgctccgcggcaagggccgcttgcctcaacttcgccgacttcgcgtggcggattgccgcccgttcccgcgtccgccgggttcgccggcgcgaggggggtcaaggacgccgttgcgttgcgtcgagggttcaacgcaatnggccggcttgttttcggcgaaactttgcaacattgcacgagagagaaaaagacgttttccttnggcgc

SEQ ID NO: 394683 - DNA, 714 bp, Oryza sativa
ttccaggaggaaggcatacaggcatggcgctctcctgcatgaggtgctccccggccgccggcgccgtacgacgaggattggcatcggcggctccgccggcggcgctctcctttgccagatgcggcctccgtagagcggccgcgctcgggtggcgcgtcgccgccgtcgccactacgggagtgcaaggtgccaaggatgctggtctggagaaagctgccagaagtgcttcccaatcaaaggtggaaaatggctcaccttcagaaatcattttagatgattttgaagacttgagccctctatcagaaaatgatgactccactgttagtatcactgtagtcggagcatctggtgaccttgccaagaagaagatatttcctgcactttttgctctatactatgaagattgtcttccaaagcatttcactatcttcggatatgcacgcagcaagatgacagatgctgaattgagaaacatggtcagcaaaacactgacatgcagaatagataaaagggaaaactgtaatgagaagatggaagagtttttaaagagatgcttctatcattcaggccaatatgattcagaggagcatttcatggaccttgacaagaagctgaaacaacatgagggttccagagtttctaaccgtcttttctacttgtcaataccaccaaatatattccttggatgttgtaaatgtgcaagcaaatcagcat

SEQ ID NO: 394684 - DNA, 793 bp, Oryza sativa
tttctgatgaaatgttcgtggaagacaccaaactatggcagaagagggtcgggctctacaagtccgtgataagtcaatttggacagaaaggacggtaccgcaacttgcttgatatgaatgcgcgctttggcggcttcgctgcggcattggtggatgaccctgtgtgggtcatgaatatggtcccaactgttggcaattcaacaactcttggggttatatacgagcgtgggctcatcggaagctaccaagactggtgtgagggcatgtccacgtaccctcggacctacgacctcattcatgccgattcagtgttcacgctatacaaggacagatgccagatggacaacattctgctggaaatggacagaatactgaggcctgagggtacagtgattataagagatgatgttgatatgttggtgaaaataaagagcattaccgacggtatgagatggaacagccaaatcgttgatcacgaagatggcccgctcgtccgggagaagctcctccttgttgtaaagacatactggacactcggggaagaaaaggaatagcaataacgtgaaataaagtgttagaaaaaattgacatattgggcaaatatcgtaatcggcttaccatttgccttgtggatttgaagtttctttttccatttcattctttgggtggaatagttcacatatggagttcagccctcgatgtttaggtgtaaaaaaggtgctgagaaggaaaccctgcaaagttttttacattaaaggacaaccaaagtattccaggtgggtaaatagaagct

SEQ ID NO: 394685 - DNA, 524 bp, Oryza sativa
tgttaattcttgcggtttctcgccgtccgagcggccgagcggtgagcgcctcgatccgcccgccgccgcgcatgaggatcctcgcgctcgtcgtggcggccgcggccctcctcgccgccgccgccaccgcgcacgagcaccacggcgaggcgcccacctgcgccggcggcggcagcgggcgcgtgctcgcggagttccgtccaggggaggtgaccctggacgggcacccggcagactgggacggcgtggaggcgtcggagttcgcgctgcttccggctcttgaccccgacgaggaccaggcctacgccggcggcaaggtctttcgtcaaggctgtgcatgatggcgtcaacattttcttcatgctgaaaggtgatggggattacacctacactaaaggcgaaaataaggaagtgccctttctgctggtctgatggttcaaatatggagaggaaagcaccgaactattatatgggagggtggaaagatatgcctggttcatgcacaagcacaagttgcagaggtc

SEQ ID NO: 394686 - DNA, 945 bp, Oryza sativa
  unsure (1)..(945): unsure at all n locations
ctcgccgccggcgcctccttgagaccgtcgagatcgagatagagagagagtgatggggtgggcgacgcggttcctggcggcggtctgcttcttcgcggcgggcgtcgtcttcgccccctacgtcctcctcggcgcccgctccggctccggctccggcggcggcgccgccgcggccgccaaggtggcccacctcctctgcttcgccacctcatggggcgccgccctctgggccaccttcatcggcggcatcatcatgttcaagaatctgccgaggcaccagttcgggaacctgcaggggaagttgttcccggcctacttcatgctcatctccgcctgcgccgccgtctccgtcgccgccttcgcctacctccacccgtggaagacggcgtccaccgtcgagcgctaccagctcggcttcctcctcgccgcccttggcttcgacctctccaacctgctcgtgttcacccccatgaccatcgagatgatgaagaagaggcacacgattgagtaggggacctggagcattggtgaggaggttgggtggtcgaagaatgttcaggtggcaaaaaaacaaccctacccttgccgcaatcaacaagaagtttgggatgatccacgggctctcgtctttggccaacatcatgtcattcggcagcctagccatgcattcctggtaccttgctagcaagcttgagatgtgaagtgaacaaacacccttgaccaacattcagttgaatcagatctgattgcatcacaatattaatgtggcaaagcctcatttggagagcttgcaaatatatttacgtgtacaatgattcgactcgagattagttgtacttaaaataatgtacagaatccacgcatttctcgccagtgtattataagttcatgaaccaaaactattcaaacccacgcgtccgcccacgcgtcncngnccaccgtccg

SEQ ID NO: 394687 - DNA, 668 bp, Oryza sativa
  unsure (1)..(668): unsure at all n locations
ctgaactgagcgagctagctgcttctacaactgtgcaggtagctaattaatctagcaatcctcccgtagattggaataatggcagatcagaaggtgattctcgccgagccgctgcttccggggaaggaagctgacttcgccgacgacgacgacgtggaggcgcactcacttcgtaccacaccggcgcctccttctccaggacgtgcctcaacctcaccaatgccgtctccggcatcggggtgctgtccatgccgtacgcggtgtcgcagggcgggtggctcagcctgctgctcttcgtcctcgtcggcgccgtgtgctactacaccggcacgctcatcgagcgctgcatgcgcgccgacggctccatcgccagctacccggacatcgggccagtacgccttcggggccaccggcaggagagccgtcgcattcttcatgtacgtcgagctctacctcgtcgccataagcttcctcgtcctcgagggcgacaatctcgacaagctcttccccggcgcaaccatggagattcttggctaccagctccacggcaagcagctattcattgtactcgccgccgccgtcatactgcccactacctggctcaagaatcttggcatgctcgcttaacgtgtnagcgggccggggctcatcngccttcggtggccttg

SEQ ID NO: 394688 - DNA, 516 bp, Oryza sativa
gttgcttttagcagcttggagttgaggcaaaaatccaattctgctcaattggactcatggggagggctccatgctgcgacaggaacaacgtcaagaagggaccttggtcgcctgaggaggatgccaagctcaaggagttcatagagaagcatggcaccggcggcaattggattgctctccctcagaaagcacgattgaggagatgtggcaaaagttgtaggcttagatggctaaattacctgaggcccaatattaagcatggagagttcacagagcatgaagacaggatcatctgcaacatgtttgccagtattgggagcaggtggtctataatcgcgtcgcagctccccggcagaacggacaacgacatcaaaaactactggaacaccaagctcaagaagaagctcctcggctcgagcgccgacgccgcctgcgcgcctgcacggatacagcgtcatcagcagagccaccaccggtcgtctctgctcctgccgaactcgccgtcgctcaatcccg

SEQ ID NO: 394689 - DNA, 519 bp, Oryza sativa
attcacactatatatatatatatattttgcggcttaatttcccttgtttctttatgcttcttgttcatccaagctaagctgagctgagctgagatgggcgagagatgtagaagtagatagaattaagctagctagagaggtagatatatagctgtggtgaggaagtttccagaaggttctagaagatcgccatgggcaacacgtgctgcgtcgctccggctaccaccgatgaggtgggcgcgccgccgcgagatcatcatcacgcggccaagaagtcgccggcgccgtcggcgacgacgacgacggcgacgacggcagaggcatggccaagaacccaagcccaagcccaagcccagggcgagggcgaagcccaaccccgtacgactggggcgccgccgcgggtgctgccggcgaggggccggcgccgccgcgtccccggttgcgcgtgctgtgagggcgtggtggccgaccacccgcggctgcgcgtcacggacaagtaccaatttggccggagttttg

SEQ ID NO: 394690 - DNA, 683 bp, Oryza sativa
  unsure (1)..(683): unsure at all n locations
cgggacggagacgngaaggcagttgctcgtttttgtgtgtgagagaggggagaggccggcggcgatggggaggacgctggacgtgttgctggggcggacgacgaagcagacggcgaggctcaagtcgatgctggggctggcggtgacgcggctcggcgtgctgcgcgggcacaggcaggtgcggtgcgcgcaggcgcgcggcgacgtggagcagctgctccgcctcggccaccccgaccgcgccctgctccgcgccgagcaggtcatccgcgagcagaacacgctcgacgccttcctcatgctcgagtcctactgcaatctcatcaccgagcgcgccgccctcgtggactcgcacagggagtgtcccgaggagctgcgtgaggcggcagcgggtttgatctacgcggcggcgaggtgcggtgacgtgccggagctgcaggaggtgaagcgcctcatggggccaagttcggcagggagttcgtctcctccgcggccgagctccgcagcggctgcgggatcaatgccaagatcgtgcagaagctgtcgaccaagcagccgagcctggagagcaggcagatggtgctccaggagatcgcggcggagaaagggatcgccggcgtcgtggtgcacgtcgtccacgagccttcttcccacgacgaggactcgggcctnagcacaggagg

SEQ ID NO: 394691 - DNA, 555 bp, Oryza sativa
gctctcgcttcgacaaacaaaaccccccaaaaccctagcctccgccgcccgccgccgccgccgccgcgcaacccccgagctcgagcggcgcgatgaacatcaagggcggaggccgggtcccggtgcccccggccggcgcgggcacgctcgtcaagctggtggtgctcggcggcacggccgtgtacgccgccgtcaacagcctctacaacgtcgagggtggccaccgcgccatcgtcttcaaccgcatccagggaatcaaggacaaggtataccctgaggggactcactttatgattccatggtttgagaggccaatcatttatgatgtccgtgctcgtcccaatcttgtggagagtacttctggaagcagggatctccagatggtgaaaattggtctccgtgtccttacaaggcccatgccagagaagctaccaactatctacaggactctgggggagaacttcaatgagagagttttgccttcaattatccatgaaacacttaaagctgttgtcgcacaatacaatgcgagtcagctaatcacacagagagaga

SEQ ID NO: 394692 - DNA, 487 bp, Oryza sativa
gacagatatgacggccgccctgcaagcgctgctcgacccgacggcgctggccttgggcctgcccacgccggcgatcaacaaggaggagtacctcgccatctgcctcgccgcgctcgcctgcacgcgggcggggaaggccctggtgggagtgggaggccagcagcaggtgcaggcctgcaataagtggctgtgcccagcgcccgcggcgcctgaggagctccgcttccggtgcaccgtctgcgggaaggccttcgcctcgtaccaggcgctcggcggacacaagtccagccaccggaagccgccttccccgggagaccactacggcgccgccgccgcggcgcagcagctggcatccgctggtgactcgaaggaggactcggcgtcgtcagcggccgggagcactggcccgcaccggggcaccatctgcaggaggagctctcgcgacggggcaggcgctcggcggccacaagcgctgccactactggga

SEQ ID NO: 394693 - DNA, 576 bp, Oryza sativa
taaaaaataaaaaatctccggcgcaaatcctcctctccgccgccgccgcctccacctccaccgctcgccccctcgccgcgcctccactcctcacaccacgctcctcctgacctcctccctcgcgcttctccggcggcgcctcgctcctctgcgcggaccgttgcccctggccgagcgcggcgcggcgcggcgccgcccgcggggggatcgggctcgggtagaggcgggcgacctggcgggggaagtaaggggtcgcgcgtggcggggagatgatcttacacggcgatagacacgttcttacctgacggacgagcagctgcgggacttcgccgtcgaggaaggatgggatcgacgaggccaccgagaccgccctccgcgtctacggctgcgacctcatccaggagagcggcatcctcctcaagctaccacaagcggtgttgcccgcagcacaagtattgtttcatcgtttttactgcaagaaatcatttgttcgggttagcgttaagagagttgctgcaagctgtgtttgggctggcaggaaagtggggagagtccaggagatcaagcatataatca

SEQ ID NO: 394694 - DNA, 370 bp, Oryza sativa
  unsure (1)..(370): unsure at all n locations
cagtttctcacgcacacctgacggcgcctgagtcccgacggccaccatatcctcgtacgtcctcctcgagagatatatagcagcgatcgatcgatcttctcttctcgtcttgatcatcaagtagagtgcatggatcgtcggcggcgggggcagccggagcgcaaggcggcggcggcgacgacgaagaagcgcgggagggacgaggaggtggcggcgtgctggcgccgccgccgtcgtggggcgcggtggatttcccgttcgaggagggggacgaggaggcggcggcggctgacggcggcggggatcaggcaccgggggtgttccggttcccgtggcagancttgccgcgcgggctcggggtggtcgccgg

SEQ ID NO: 394695 - DNA, 464 bp, Oryza sativa
  unsure (1)..(464): unsure at all n locations
tgtagatgtgtgaaagttaataccagccgggtcacttcgcttcctgtggcagcacagctagcgcgtggccatggacgaccaccagagcaaggtgcagcggctgtacgacgcgtgcgacgccgtcttctcgtcggggagtaaagcagggttgccgacgctcaagcagatcaggtggctgcaagacctgctcgatggcatggaggcggcggacgtcgggatcgaaggcggcggcagcggcggcgagaggtccgtcgtcctcggaggacgacgacgagaggagcccgccggggcggcggtttctctcggcgcgggcgttcacccggatcacctacgtgcacatccacgagtgcgacgatttctcgatcggcgtgttctgcttcccggccggcgcgacgctgccgctgcacgaaccacccgaaatgggtggtgctgagcaagcttctctacngctcgatgcgggtcaa

SEQ ID NO: 394696 - DNA, 468 bp, Oryza sativa
catctaatgtcttctccttgacccttcttcttcttcttcttcctcctcctgatgatcaaccagcataaaggagaggcttctggttgggaggttttgcagttctcttaccctcttctgttcatgaatcatgtgcaatgggtgttggagctgtagaagcatggtgatgattttgggtgtgattatgtatatatatatatctctgggtgattggtggtgagtagtatgttcttgctgctgtggtttcttgatactttgcttcagggacaggccatggacagaaggaaccaagctcctccggttgatagctcagcatgcttgtgcagagtggagaggatcggtcgccggcgccgccgcggcgaggctgatgccgagggcgaaagcgtgcgcgcagccgagcctcagggcgtccatccacccgctcaagcccaagagatcgccggggcgcgaccaccgcggcggcggcggcgc

SEQ ID NO: 394697 - DNA, 671 bp, Oryza sativa
gcattctgcaggacctcatcctgtggcagaacgagctggagggcgagataccggcgtccctgtcgcgcattcagggcctcgagcatctcatcctcgactacaacgggctcacgggtagcatcccgccggagctagccaagtgcaccaagctgaactggatttctttggcgagcaaccggctgtccgggccaatcccttcatggcttgggaagctcagctgcttggctatcttgaagctcagcaacaattccttctcggggcctataccgccagagctcggtgactgccagagcttggtgtggctggacctgaatagcaatcagctgaatggatcaatacccaaagagctggccaaacagtctgggaagatgaatgttggcctcatagttggacggccttacgtttatcttcgcaacgacgagctgagcagcgagtgccgtggcaaggggagcttgctggagtttaccagcatccgacctgatgacctcagtcggatgccgagcaagaagctgtgcaacttcacaagaatgtatgtggggagcacggagtacaccttcaacaagaatggttcgatgatatttctcgatttgtcatataatcagctggactcggcgattcctggcgagctgggggacatgttctacctcatgatcatgaatcttgggcacaac

SEQ ID NO: 394698 - DNA, 619 bp, Oryza sativa
  unsure (1)..(619): unsure at all n locations
gagagactagactagtagtaccaattaatggcggcgctctcctcctgcttactcgccgccgtccgacctcatcctccacctgcacctcgaccgctctccccttccttcatcccctctgccctccgccaccgccaccgcctgagccaagcgccgcccctcgccacctctctcccacgaccacgtcccccggggcgccgcttctccgcctcctcgccgccaccgccacccgacgaccctgacgactacgagctgttggacacgacaggaaattgtgatcctttatgctccgttgatgaagttagctcacagtattttgaagctaactacaagccaaaaaatgatcttcttaaagctttaactataatagcaacagctttggctggggcagctgcaataaaccattcctgggttnctgaacatcaggacattgcaatggtgctagtgtttgctctcggttatgcaggtatcatatttgaggaatcactagcgtttaacaaaagtggagttggatttctcatggccgnttgcctatggggttatcaagaagtatcggggctccatctacttgatgtagaagttcaaagagttnagtcatacaaccgccgaagttagtgaaata

SEQ ID NO: 394699 - DNA, 538 bp, Oryza sativa
  unsure (1)..(538): unsure at all n locations
gcttcacttacgcctgcactagctgctgaagccaacatgttaagggagagatttgctcatcggtatcacagtggctccctttttggcatgaactccaggggcaggagaggtgagtcctctcgacgtggtgacataattggttcaggtcttgatagaaatgctggtgattcttctcgacaaccaactagcaagccaattgaaacggaaggatctcctcttgttgacaaggatgctcttaaagctcttattaggctactccgggttggtcagcctctatacaaaggtcaattgcagaggcttctcttgaacctttgtgctcatagggaaagcagaaagtccttggctcacattctagtggacatgcttatgctttgatctgcagggctcttctaagaaatcaattgatgcaactgagccaccatttaggctatatgggtgccatgcaaatattacgtactcacgcnctcaatcgacagatggcgtgcctgcattaggtttctcgtcgtgttcttgaactttgacatacttggcaagaaat

SEQ ID NO: 394700 - DNA, 525 bp, Oryza sativa
gtcgcgtaagatcacgttcgaaatctttattcattttctctccaccggttgccctctcgccgcacccaaccatcgcgccacgccgcgccgcgctgccggagccgcgctttccgctatgctataagagctgacgcgcagggcacagcggatgtacgtacacacagtcactagctaagctgctagccttgctaccacgtgttggagatggaggctaagccggtggcgatggaggtggagggggtcgaggcggcggggggcaagccgcggttcaggatgccggtggactccgacctcaaggcgacggagttctggctcttctccttcgcgaggccacacatggcctcctttccacatggcgtggttctccttcttctgctgcttcgtgtccacgttcgccgcgccgccgctgctgccgctcatccgcgacaccctcgggctcacggccacggacatcggcaacgccgggatcgcgtccgtgtcgggcgccgtgttcgcgcgtctggccatgggcacggcgtgcgacct

SEQ ID NO: 394701 - DNA, 752 bp, Oryza sativa
  unsure (1)..(752): unsure at all n locations
cactcacacacactccagtacccccacgctttcggcacattctcctcgcgcgagaggggggaggagaggggaggggggaggagcgagagcggagcgttgggctcgccggggcatggggatgcggcggagagggacatcgacgatctcccacggaacgacgccaactacacggcgctgacgccgctcctggttcctggagcgcgccgccgtggtccacccggacagggccgccgtcgtgcacggcccggtgaggtacacctgggcggagacctaccgccgctgccgccgcctcgcctccgccctcgcgcagcgatccgtcggccccggctgcacggtcgctgtgattgctccaaatgtcccggcactgtatgaagctcatttcggcgtccccatgtctggagcggtggtgaactgcgtaaacatcaggttaaacgccgagacaattgccttcctccttgaccactcagtggcagaggtcgtcatggtggaccaggaatttttcaccctagctgaagagtccctgaagatactggccgagaagangaaatggtcgttnaggcccccnatcctgatcgtaatcggcgacccgacctgcgaatccgaagcctctgcagtacgctctggggagagggagcgatcnantacgaggagttcctgaagacccggtgacccgaagttcgcctggaagccgccaaggatgattggnagagcatcgttttgggttaacctccgggactattcgagcccaaggg

SEQ ID NO: 394702 - DNA, 465 bp, Oryza sativa
ctctactctaccctccctccctctctccttcgcgctctcctctcgccggacctcctcggcggccggcctgccggcgagaacccccgcaacgcgcggcgtggggaagcctcccccctctccctgacccggtcctgatcctaccccgccgcgcggcctcttcctcctcctcctcgccggcgaggagagagtgggtgtttcttgaagcggctttgacctccttccaactggctcccgtctcgggtggggggatcgagttgaaggcgtccgccctcccttgcctcggctgctgcaagcgcgagctcgcttgacccacccccagcgggcggctgggcttcctcccccgcggcggcgcgcgcgcgatgagctgcggcagcgatggcgggtgtagggatggtggtggcagcgaggagttcaagcggccgcggccgagcaaggtcgcggcgggggacttggtggagccggcgc

SEQ ID NO: 394703 - DNA, 753 bp, Oryza sativa
  unsure (1)..(753): unsure at all n locations
ggcacatgggagtatatatcacggtatgnaggtgctttggtggcaaaatgttacttcgcaaaacataagcctgtntgggaagttctggaaggtggtttgaagagtaagatagaaattcagtggtnggatattactgcattgtaggcatcttgccctgaaaatggacagggaaccttggatgtggtgttggcccgacctnctctcttcttcaaagagacggatcctcaaccaaggaaacacacactgtggcaagctacatctgatttcacaggtggccaagcaagtatgaacaggaggcattttcttcagtgcccttcaagcttgttgagcaaaaactttgaaaagcttctccagtgtggtcagcggctaaaccaattgggtcagcaaccagacatcatattggactctcccgtttttgaacccagatgctctatatttgaggacccagttgaatcgaagtgccaaggttttactaatttgaaggacgaacatgaattatctgggttttcaggttctctgtcaccctgtgctggttcatccatgtctgctaagattgaagtcaatgattccattgcaacgcaagcaggatttcttgctcagccaggaaacccaggacctagtgcagtgaacgttcagggagtcagcagaaacgtaaatggtgcttcagagttaaatatccccagctggtggagtcaactgaaagtgcctgggcttagaccgtctatgtcagtggatgttttggtaaccacttgg

SEQ ID NO: 394704 - DNA, 562 bp, Oryza sativa
  unsure (1)..(562): unsure at all n locations
gcatcccgcacggccgcacggcnantnggccgncaccctcggccacctccagccacgccctcctctccacagcctcctcccgtcctctgcgctttcctccctctccacacctcccctttcctcccctccccacccaccacgatgcccaccagcggctgggcagaggggtggcgcaggcagcggggcgacgcaagcgaccaggcgagcggtcgggaggaggatgtgcaggcgacgcaagggacaagcgcaggtggccgacggcggaagcggcgcgggcgcaggtggccgatgccgggagcggcacgggctcagttggccgacggtggtcggacagtgaaggtagccaccggaaaacaagaaaggcacagcagattcaagcatgaaacttttgaagataatggattacccggccaggcagtcaagcgaagaaagaaaaagttgctcagtgcttcgatgctgccagcctgccactggccaccgctatgcccggcggccggcgtcggaggaagtgcctcacgcagtcacgcggcaaggccgcaacagttctggctcgaggttggcg

SEQ ID NO: 394705 - DNA, 721 bp, Oryza sativa
tggaggatgtttgcccaatctgtcttgaagaatatgatgcagaaaatcctcgctctttaactaaatgtgagcatcatttccatctttgttgcatacttgaatggatggagcgaagtgatacctgcccagtttgtgaccagattactttgatagatgatatgtatgaatagcattggagcatgggactattatgtttggtttgatgctagtttgttttaatgaggaagtacagtcagcaaagctcctgatctatcaacctggtcagacgggggtgctattggaatgaattttgagaaaactaagggaaaataattgaagacgggaatggcttgaaatttgttaaatatcatctcagctttttacattttgtttgaagcattaactgttcatgacaacaggaggatttgttagtatccatatctactgctggttcgattgcttcacagttgatgaaacccccagatgagctttctgtttctttggagttttgaactggggatgtcttccatttcatttctggttgcggttagcgtctgtataaatcatgacacgttagataggtgacagggaaaaaaaactttattctaatttatgttcaacgatcaaagctgtacaagcttcatgtatatccttcgccttttgattagtcagggactattaagtcccctgttgtgaaccaagttggctgatttatgtaccatggtatacatttgcctgcttt

SEQ ID NO: 394706 - DNA, 571 bp, Oryza sativa
cccacgtacatgatccgcgccgtgccgtccaacgcctccgacaacgtctactgctcgctgctcgcccacagcgccatccatggcgccatggccgggtacaccggcttcaccgtcgcacccgtcaatggccgccacgcctacatccccttctacaggatcacggagaagcagaacaaggtggtcatcacggacaggatgtgggcgagggtgctctgctcgacgaaccagccgtgcttcctcagcacggaggacgtcgagaaggcagggcaggacgacgaggagccgatcgtgccgctcgtcgagggcgagaactcgctcgtcaaggcgccgccgctgctggccaacgccgggcgatggcgccgccctctgcaacggcgccgcctgagcttgaagaagtagctacacgaagaagacgatcacacggccatgtttggtagtgcgaaattcacagaaatggttatgtaattggaggatattttttttctttagattctttttgctcattcatttttcggcttgccggtacagaggaagtattgacaaactgagaataattgaaagtttatgtgac

SEQ ID NO: 394707 - DNA, 694 bp, Oryza sativa
tgtcgtttgccccgacggcaccttcaccgacgtctgcatcgggtggccggggtccatgagcgacgagcaggtgctccgcaagtcggcgctgcaccagcgggcgtcggcggcggctgggtcgatgtcgtgggtggtgggcggcgcgagctacccgctgacggagtggatgctggtcccctacgcgcagcgcaacctgacgtggacgcagcacgccttcaacgagaaggtgggcgaggtccggcgcgtgcccacggaggcgttcgtccgcctcaaggggcggtgggcgtgcctgcagaagcgcacggaggtgaagctgcaggacctccccgcggtgctcgccgcctgctgcgtcctccacaacatctgcgagaccaggggggaggacatggaccccgacctccgctgcgacctcccccccgacgaggaggaggacgaccccgtgcttgtgcagtcggagtccgccaacaaggtgagggacgacatggggcacaacctcctccaccggggattggccggcaccgccttcttctgatcatttcgatttccgtcccaatctgcactacaaacactgtattgaggtttccctcctcccctcctgtttgttcttgttattgctatagattagtttaggtgctccactcaacaacaacaataacacaagattgaaatgtgatgctttgccctccccgttaat

SEQ ID NO: 394708 - DNA, 457 bp, Oryza sativa
caacattcgcagcatcagtgtgcgtgacaaattttcaggagctaggtgacatgggcgacttgggcggcggcggcgagacgaaggacgtcatcgacgtggaggcggtggtcgtgggcgccgggatcgccgggctcgccacggcgctggcgctgcggcgggcgggctttgcggcgcgggacggcggcggtggcggtggcgtcgtggtgctggagcggcacgccgagctgcgcgccacgggcgccgcgctcaccgtcttccccaacggctggttcgcgctccgcgcgctacggcatcgcgcacaagctcacccctcgctaaccaaccctacgaaacatccgtggtgaccaacctcgagtccggagcgacgcaggttgtttcggtttggtgggcacaagagcaggagcggcgaggtgaagggtgaggccggtgcaccggaaggagctgctggaggcgatgg

SEQ ID NO: 394709 - DNA, 516 bp, Oryza sativa
ctttttgatgctatcgagattttaacacaatctctttcgagaaattgttctgggtttactctgcttgttttcatccttcatgtgatggctctgcagagactaaatgaccttaacaggcagattaatgcttttgattttttgcttgaagatgatacagatcaatttgacaaggagaatagtgaaggcactgagttattaaagaagtctagctgtctcgaggccacacaactcaccagttttatgatgagctatgtgagactattatcatcaggagaaaccggctctttttggtgttatgagattagttcttcctgggattcaagtctatgctctttagatgaattttcatttcctatagcaacttggcaactgctgtgtgaaaacattgatatttggagcccccatgcatctaaaaaggatttgaagaacttcttttctaatctgataaagtttgcttttgttgaaaagaggtcatgccaagatgtggagaatagtggcagccaatcttctcaccga

SEQ ID NO: 394710 - DNA, 1349 bp, Oryza sativa
tttgtcttcttaccggttagcccagaggtgatggagatagacattgatgatggggagataagctctgttaaggatactaccaaggagcccctcttggaaccaggacacgaagtgaaacacaatgcagtaggtttcttagaggcttggaagatacctggagttgcgccctttgctctgtgcctcttcttctccaaattggttgcttacaccttcttgtattggctaccgttctacatcagtcatacacctattggcggtgagtacctctcagatgctttggctggcagcctatcaacaatctttgatgttggaggcgtgttgggtggagtccttgctggtcacatctcggatcgcttaaatgcacgagcggttacagctgccagcttcatgtactgcgcgatacctgccctcttcctataccgcacatacggcagcatgtcgataatgtggaacatttgcctcatgttcatcaccgggatgttcgtcaatggtccttatgccctaatcacaactgcagtgtcagctgaccttggcactcacagctcattgaatggaaattcccgggcattggctactgtgacagccatcattgacgggaccgggtctgttggcgccgccattgggccattgctgacaggctacatctcgtcgagtagttggagcgctgtgttcacgatgcttatggcagcagctctccttgctgggctcctcttgacacaacttgtgtgcagtgaactaaaaggaaaggcgacctccaatgcgagcaaggatgtcgccgatgctcaaggtacctactcagatgaggtgtaagactgtaagtaagatctagtcgcaccccaagacacgatacatggattagattctccgtagctccaaagcactgcttggcaagaagttgcattttattgcttcctgcacatgtcttgatcacctctggtttgaggctgaaataaccaaagagatgtggttaccaagtggtttgcttaatgcaactccagaaagaggtgcatgaaatagatagattagtttagtttcaggttcagagaatacaggggtgaaaacgcctcaaccaaagtttctgagcccaaatataggctcaggccgccttgtacatatactgggcaataggttatcattgtgttgtgtgtagtaagtataaattcaagcttgtatcctattgttgtagtttagggcagacaaagggaacctctcttgttcaaaggttacccaaagtctgtgtttgctggccatcttggcctcgttttgtatatgtaaagttgagaagattgagaaaattttgaattgaggtttcaagaaagtgaattgttctcaaaaaaaaaaaaaaaaaa

SEQ ID NO: 394711 - DNA, 469 bp, Oryza sativa
ggaggaggaggaaagagagccgtcgttttcgttctcctctgcttcgcctcggccacgctgcggccacctcctttctgccacggcaaaagcctcctcgggatgctccactgatcgtcttctacttactcctctttcttccagcttggccggcgtgtggctgattattccagaatttccattagcttaatcaccggatcaagaagaatgagagaaaggggggagaggctcttttctgtgggatgacaagattccgttttgtaggagcagcgcaccatttcagatttcttcctcctcctcttcttctttccgttggtgcttgctgctttttctctacttaccttttccactgttgcgaagtcgggttggtgggtggttgattgattgttctttccttcctcgtgagggttcttgcttcttggcttcttggccgcttcttgagttggggctagctggttcttttgctgtctct

SEQ ID NO: 394712 - DNA, 452 bp, Oryza sativa
ttgtttccaaccctaacgcggcggcgcggcgagcgatggcgtcgatcccgccggatgacgacgcggcggcggcggcggcggcgggggcggccgagaacgggtacgggaacgggaaggggaacggcaacgggccggcgccgcgcccgccgccggcgaagcggcctgaggtcggtgatctcggcggcgcagatccgggcggagttcgagcaccacgaggccggggtggcgcgcgtcaacaacggcagcttcgggtgctgcccgtcctccctcctcgacgcgcaggcgcggtggcagcgcctcttcatcgcccagcccgacgacttctacttccacgccctccagccggggctccgccgctcgcgggctgccgtcgcgggccttgtcaacgccggggacgttgccgaggtctccctcgttgacaacgccaccaccgtcgccgtcattgtgctgca

SEQ ID NO: 394713 - DNA, 444 bp, Oryza sativa
  unsure (1)..(444): unsure at all n locations
tgtatataccacgagctgaaagcctcaaagtagtaatggtccagctgctccagcactcgcatctgcacactgtattcgccgccgcgaccaccaccatcggagtcggacagtttccccgccgccgtgccaaattccccacctcccttgttcttcttcctcgctgcacctcctcctcctcctcctcctcctcaggagctccaatggacgccaatcctcctaccaccgccatgtatcctctccaccgctgcaaaaccatctacctggtcaggcatgcccagggtgttcacaatgtggaaggcgagaaggatcacagcgcctacatgtcgccccaactctttgacggccacctttactccattggggctgggaaccaagttgacttgcctgcgtgagaacggtgaaaaaaagtgggatttgcacaaaagattnaggtgggttataatt

SEQ ID NO: 394714 - DNA, 475 bp, Oryza sativa
  unsure (1)..(475): unsure at all n locations
tggtcacatatccacacacctcgacacgacggcgacggcgacggcgacgatgactgcgggccagcctctccgggacgatccccagccacgccggcacagcccgccggcgctccacccggccgtcgtgccggcgtacccgcccccggagtcggacgccgacgagtcgtgggtctggtcccagatcaaggccgaggcgcgccgcgacgccgacgccgagccggcgctcgcgtcgttcctctacgccaccgtgctctcccacccctccctcgaccgctcgctcgccttccacctcgccaacaagctctgctccttccacgctgctctccacgctcctctacgacctcttcgtcgcctccctcgccgcgcaccccaccctccgcgccgccgtcgtcgccgacctcctcgccgcgcgctccagggaccccgcctgcgtcgggttctcccactgcntcctcaatacaaggggttcctcggn

SEQ ID NO: 394715 - DNA, 473 bp, Oryza sativa
tatatttgtcagctcggaatatcatgctcatggagctcatgatgcttattgaggcaaacccactgtttcgggacaagctgaatttcccaccatttaaagtttcaagactccgcacattaatcaatcaaagctcttaactggcaacatcagctatgcaagaatcccagaccaaaccctgacatcaagacactgtttaccgatcattcttgtgccgctcctaccaatggagcaagagctcctccccctgctaatgggcctcttgttggaccaatccctaagtcagctgcatttcctccaatgggtgctcatgcgccatttcaacctgtggtgtcaccatctccaaatgcaattgcgggttggatgacaaatgcgaacccctctttgccacatgctgcagtcgcacaaggaccacctggtcttgttcaacctccaaacacagcggcatttctaaaacatccaaggactccaacaag

SEQ ID NO: 394716 - DNA, 388 bp, Oryza sativa
gcgctctcatatcacatctctgatcaatccttctgcgtgttcgtgaattgggaaattaatttggttttgagacaaatggaggcgccgtcgtcgtcgtcgtcgttgttgaacgggctgaactccggcgtggtgctgagcctgatcgcggtgctgtggacggtggtgtggcagaatctccagcggctgcagctctagacgctggtggggcgcgacatgaaccggcacgcgcggcggctggcggcgctcgtcgaacccgacctgtcggtcaccatccacgagtacgagggccgaccgatgaaatgcagcgcggcgtacgaggaggtcaaggcctacctagcgcgtcgttactgcgcgacctgcgtcatctgcggaccgagggcgccaagga

SEQ ID NO: 394717 - DNA, 584 bp, Oryza sativa
  unsure (1)..(584): unsure at all n locations
cagcaactaacgcgctcgcttccttcccncctcgcctcaacgcaaagnagnatccccccctatacctattaatacctcatcttgtcgtctcgtatcatctcatctcatcacatcagcacacatcacacgcgccgattccgaagaaatcaatcaaccaactactaggcgaaagcaagagcggatcgggtgctgcatttcgcggtcgttttcttcctctgaattctggtgtttgcggttgcggcaatggcgttggtggcggcagcggcggcgaatccgaagcagaaacagaagcagcagaaggcgtcgatcgggaggcgggcgtggcggctgctgcgcctggcggtgctctgggcgaggaagggcagcgcggtgcacagcctccgcctgctcagcaacctgcggcgcgccggcgtgggcctcggcgtcgtcggccgaggcgaccgcctggggtacggcgagcgggagtactcgatcgaggagacgccggcgttccggttccgcacgccgtcggcgcgggtgctccgtctaatcccctgcatcgcccccgccgtcccggacacgcccgggctctacggcgacgagga

SEQ ID NO: 394718 - DNA, 598 bp, Oryza sativa
tttttcttccagaacttcgtgctcaagaacggcgaccagccggagtacatccacccgcactccgtccgctccgccgccgccgcgctcaccctgtgctacccggcgcggaaccactccccgtcgttcgtcatccagacgttcgtcgaggacctgaccgtctccgcggcgtccgacgccgcggcggccgcggcggggcagaggcaccgggtcgccgcgttcgacgacctctcagtcaccctcgacgtctcgccgtcgctcagggcgttcctcgtcaggggctgcccctttgtcaccgtcgccaccgccgacgccgcgggccccgtcgacatctccgtcgcggccgtccacgccttcatcgaggtggcctcctgcgacgacgcgctcaccaagtggcggctccggatgaacagcggccagaccttcctcctctacgcgttcgcgccgatccgcctcgcgcagtccagcgtcacgcagctgtcggccctcggcttctccggcgtcattcgggtcgtctacctgccggacccgtccatggaggctgttcttgatcaagacagccggtgctttccaaccgccgcgaggccctcgtgaaccgccc

SEQ ID NO: 394719 - DNA, 408 bp, Oryza sativa
cgttctccccaatccgatccagaattcctccgtcgcgaatcctcccttgtaccctgttcgatctcgtgcgcggcgcggagcggcggacgacgacgatgccaacggcggcggcgatggccggagggatggcgacggggccaggcagccgcgtgacgcggtacgccaagtcgacggcggcgtcggtgacgccggtccgccccggcaagacgcacgcgctgtcggcgctggacaacgccatggagcgccacgcggtgtacctggtgctctactaccgcgccgcgccggggctcgacagggagccgctcaaggagtcgctgtccgacgtgctgtcgcagtacccggccatgaccggccgcctcacgcgccccgtcgccgtcgtcgtcggtggaggtggagagggcgtgaggg

SEQ ID NO: 394720 - DNA, 803 bp, Oryza sativa
  unsure (1)..(803): unsure at all n locations
gcgctcacgcggctcccgttttcgcggctgcgttttctcgctttcgccgcagctcctcccttcgtcgtccgtacgacgccggccggccgatgcgccgccggtccaggggcgccgcggggtggtgctgttgtcggtagggagggagtgggggtgggtggggggatnatggcgtactcggagccggcggcnagggcggtggcggaggaggtggcgcggtggggagggatgaggcagacgggggtaacgctgcggtacatgatggagttcggggcgcgccccacggagaggaacctgctgcggtcggcgcagttcctgcgcagggagctccccatccgcatcgcccgccgcgcgctcgacctcgactccctccccttcggcctctccaccaaagcccgccatcctcaaggtgagagattggtatttggactcattccgcgacttacggtgcttcccggaggtgaggaaccgggatgatgagcttgcattcaccgagatgatcaagatgattcgagtgcggcacaacaatgtggtgcccaccatggcgttgggtgtgcggcagctgaagaaagacctgggtggcacaaaggcctttccccctggcattgatgagatccatcagttcctcgaccgcttctacatgtcaaggattgggatccgcatgctgatagggcagcatgttgctttgcatgagcctgatccagaacctgggtgtattggactcataagcaaaagattattccccatgctggtggctcaacatgctactgaagatgcacgtgctttttgcatgagggaatatggat

SEQ ID NO: 394721 - DNA, 411 bp, Oryza sativa
gatgattttgaggatttttttttcgaggtggttttgtttgcctctagtgtttatttctttcctctctctttcacttggcagatccaagaaacaccgaaattttgcttgattttgccgcggattttttacttttttaatctgatctgatccgagagaatccaaagaattttttgatccaagaaaaagagaagagaagggaatttcttgctgtgtgcgggcgccatggccatggggctgaaccgattcacccaatggctgtggccggcgagcacggcgcgcgcgggcggcggcggcggcgacgacgcacggagctccccaccaccggcgacggcctgacgagcgcctgcttcccggactttccttccgggttccgggagccggacaccgtcacgttcgcggcgaccacgcgcc

SEQ ID NO: 394722 - DNA, 544 bp, Oryza sativa
  unsure (1)..(544): unsure at all n locations
ttctttgtcaaatgatgggcaaatacatgatatttctttgggaattgtaacgaatttaccgagccaatctaaagactacaataacagtcggaagcaactgaaagtgcagtttgataatagtacaattcatcccacaaagatagaagcccctcggtgcctggaaaattctaagaagcctgatattctggaacatgacaggaaaaatgtcaagaataacactgcccaagaaattgtgccaccggtccagacttcaaaaccttgtgcctcgcataggccatcttcaaacacactggcgtcgtgtaataatactgccgcagaaactgtgaaaggaactggagaacatgagaatctttccctcgttaataaaaatggtaccccctcgaagacatggaagagaagcattacccatgtctacatgtgtcatctcatccaaatgcatttggacaaagagaaggcatcacataaccgggtaaaacctgaggaagtttgtcacagtcacattttaaggtcttcagacggttctaccatangtaagaatggtgca

SEQ ID NO: 394723 - DNA, 490 bp, Oryza sativa
ggtaaacaaggcacaaacacaacagccaccgttacaaagagctagctagcttggttagttaggcgagtagtggctgcagtgccctgcgcaggcatggcgttatctgtggagaagtgggtaggtttcgggtcagccatggctggcgtcggcttgctttggtcccgaatgccggagcacgtccatgaggaggctaggcacatcatcggtagcttggtccccatggtgatgtcctactttaacccctacgagcagatcaccgtgtccgagtacggcgaagagcggttccggcggaacaagatgttcgacgccgtctccacctacctgatcagcgcgtgcttggagagcgcatgcaagctcaaagccgagctggggggcaacaacagttgcgacgacccgcgtgtgattctagaagagaaccatgaagtcttcgactgcttcgagggtgcccgcatgtggtggaagctgtgccccaggtctctagaacaggggg

SEQ ID NO: 394724 - DNA, 500 bp, Oryza sativa
gtttattcaacctactaagctagctagctagtgacaattaagtgatcacaagtgttgttgcgatgggtagagtagtggtcgtcgtggcggcggcggcggtagccgtggccgtcgtcgtgctgctgggcgcggcggcgccggcggcgagcgcgatggagttcggcgacaaggacgtggcgtcggaggaggcgctgtgggagctgtacgagcggtggcgcgggcagcaccgggtggcgcgggacctcggcgagaaggcgcggcggttcaacgtgttcaaggacaacgtccgcctcatccacgagttcaaccgccgcgacgagccctacaagctccgcctcaaccgcttcggcgacatgaccgccgacgagttccgccgcgcctacgcctcctcccgcgtctcccaccaccgaatgttccgcggtcgcggcgagaggcgcagtggcttcatgtacgccggcgcccgcgacctgccggcggcggtggactggcgcgagaagggc

SEQ ID NO: 394725 - DNA, 385 bp, Oryza sativa
cttctttcctccacttactactctttgtgagagtgagcctctcgccattgttgcctcgataagaagcttaattagctcggaagccttttcacttttcagccatgaggctgtcgtccctgctgttcttggtgtgcttcttcactgtcgccatgtcgcaattgcgcggcggcggcgaaggcgaggcacttcaggtgggaggtgagcaacatgttctggtcgccggactgcgaggagaaggtggtgatcggcatcaatggccagttccccgggccgaccatccgcgccaaggccggcgacaccatcgtcgtccacctcaagaacggcctgcacaccgagggcgtcgtcatccactggcacggcatcaaacagatccggacaccatggg

SEQ ID NO: 394726 - DNA, 452 bp, Oryza sativa
tttgttgtagccgttggccatgaagcaatcacgaagggaggaagtggacgacgatgtgagcgttggtaagaaggaggaagaagcaggatactgcaggagcagcagcatctcacgcctcccagaggcatgcctggctcatgcaatctccttcaccactcccacggacgcctgccgctgctccgccgtctccgccgacttccaagcagcggcgagctccaacgctcgtgtgggagcgcttcctgccgccggactaccactccatcctcgctcgagccgacgatcctgtggatttcaccacttccaacaaggagctcttcctcagcctcgcccaggaccacgttcttctggaccaacgcagcatgagtttctggttggaaagaacaagcggagctttatgcctacttgctatcatccagatcattagagatagcatggggggatgatgcccggtt

SEQ ID NO: 394727 - DNA, 422 bp, Oryza sativa
attgtgcttcgttgcacacgcgcgcgctgtggttgctgcatcaaatgggtaacttgcttgatatgaaggtggtggcaatggtggcggcgctagtcgtcatgagcttggcaggggtgtccatggcggcacggagggtgcccgcgctgctgaagagccacgtcggcgacgggatctcctaccacggcggcgccgtgcgtcggcggcgacattcccgtcaccctcgtgtggtacgggaagttcaagccggcgcagaaggccatcgtcgtcgacttcctcctctccctcacggccacgccaccgaacgcgacgacgccctcggccgcgcagtggtggggcgccatcgccgccggctacctgtcgtccaacgcgacgaacgtgacgactgcggcgcgggtggttcttgcgaaccagaccttcgacga

SEQ ID NO: 394728 - DNA, 623 bp, Oryza sativa
  unsure (1)..(623): unsure at all n locations
ncnctntngggcgaattgggtnccgggccccccctcgaggtcgacccacgcgtccgaagagctagagatgttgttggaggcatacttcatgcaaattgatggcacattaaacaaattgacaacgctgagagagtacattgatgacacagaagattacattaatatccagcttgacaaccaccgtaatcagttaattcagctagagctattcttgagttctgggaccgtatgcctgtcgctttactcattggttgccggaatttttggtatgaacattccatacacctggaatgacaaccatggatacgtattcaaatgggtggttctcgtgtcaggacttttctgtgccttcatgttcgtctccattgttgcgtacgcacggcacaagggcctcgtcgggtcgtgaaccttgcccaaactgtaaatttgagctagagcaaccttgcgtatgattaatctcttgtaccaaaattcatcagtataaaattgggatgatgaaaaagaacaataaataggaaaaaaaaagagtaaattccaaagagataaaggataaaaataaaattataatgacctgaaagctaaaaaagaaacaaaaaaaaggagtaattgatgaagccaatttt

SEQ ID NO: 394729 - DNA, 439 bp, Oryza sativa
  unsure (1)..(439): unsure at all n locations
caaccgttaaataggggggaagagagatttccctcgcgcgcttgtcgttcgccttcttcccctttgcggatttgaatccgctcgggggcgctattacctattggcgccgcggcggcggcggcgggcgatttgagtcgggatcccgctcgatggcggagggcttcgggcggtgggaggcggatccgctcttccccgccgccgagtgcgtgcaggactccgccgacaggatggagggtgtgtaccgcttgctcttgcatgaaagacaacctgatccaagatgatacctcacatacaaaacgtcgtgtatcaattgcagtatgagagagatgtgttgcacttgctcttggaacaacaaagttggcagttggagcaattttgagcgagaagttgaatgcagcggcatttgtctaanaaagtcaaattcnaggggaaatggcca

SEQ ID NO: 394730 - DNA, 499 bp, Oryza sativa
gttccttccactcagctttgctcttcaccttcaacaacacctcatcaacatggcaatgctgctgaggaaggccgctgtggcccctgccaggaccagcgtgcgcagcaaggctgccatcgagtggtacggccccgaccgccccaagttcctgggcccattcagcgagggtgacacccccgcctacctgaccggcgagttccccggtgactacggctgggacactgctggcctgtccgccgacccccagaccttcgccaagtaccgggagatcgaggtgatccacgcccgctgggccatgctcggcgccctgggctgcgtcacccccgagctgctggccaagaacggcgtgcccttcggtgaggccgtgtggttcaaggccggtgcccagatcttcaggacggtggcctgaactacctgggtaacgagaacctggtacacgcccagtccatcctggcaaccctggccatccacgtgctgctgatgggtgctgctgagagct

SEQ ID NO: 394731 - DNA, 445 bp, Oryza sativa
gccggcgccggagaccaccaccaccacctcacctcacccacctctgcttcttcttcttcttcttccccgtggtgtggtgtggtggtgaattgttgttctgttcccttcatttttcgttgattcgtgagcgcggcgacgtacgtacggtggtaagcatcgtcgtggattcgtctccggcgacgggggggagtgggtagggtagggatgttcgtcaaggactgggactgaggtgatcggctaaatgtaccgccagaacgagtcggccctctcctgcttctacctcttcctcctctggttcttcttcttgaaatagacttcacgccgcgcccatttccagaccgagcgggagcccactttttcattcgcgctgaaaatgggttcgggttgctttaacttgtgaactcggggggatttttggtttttggttttgttttggggttggttg

SEQ ID NO: 394732 - DNA, 482 bp, Oryza sativa
tcgattggagtcgtttcgtctcgtctcgtctcctccgtgggagattccgagattctactagctataggacttttcagtctggtaaattttttccatcagacagaaattatctggctacaacctgctgcttcttgatgctcaactaccagagaattaacatcactatctcagatggtctagcccgtcagagttgaagtacagtctggatcaaaattttcctgaaatccagacagtaagttcatggacagggcggacacatcgggttttgtcagtggtggactcatcggattacttagcctagatgaataacggttttccggaaatcattcgccgcggaaacccgcatctgatggataattccgcagttgtgataatgggacactctgtggcaagctacaccatgggacagccatggacggagctcttcttgcctagaccacctgggttcatcaatggagaacagtagtatccatggcaagaga

SEQ ID NO: 394733 - DNA, 532 bp, Oryza sativa
  unsure (1)..(532): unsure at all n locations
ccgttttccatttccactcctccccccacccaactcaccatcgccattccttccctccttccaccgctccctctctcttccatggccgtgcaggcgcagtacctctcccacgcctccttcccccacgacctctatggcctcagggctctggagggtgcgacggcggcgggttctttgttcttggacgaccacggcgggtgcgcgccggcgactccggcggcgcccgcgcctggggatagggcacacggtgctgagcgaccttccccggagcgagcttacctgcaacgacaataacggcgcgggatacggattcgtgccgaggaagagggcgcgcctggatgcggatgagtcggccggggcgttgatggcggcggcggcggcgcagcagcagcgcatggttcttccgccccatggccttgtctttcccggggatgtgcagagcanggcggtgggttgcggcgccgcgtccaccatgcggagggctggcaatgccgccggcctctcgcaggggctcctgtctcagctctatcat

SEQ ID NO: 394734 - DNA, 926 bp, Oryza sativa
  unsure (1)..(926): unsure at all n locations
gtaaaattggatggtgtttggggtctgcttgggactgctgcctttgcattcttctgtttctatcccctcatagccagtgattgctggggaaatgatgctgggtttgaaattagttttcatcaccattcacccaatgaaatggggaggaactttgatgaactcgttcctgtttaatgttggactcatcctactttgctccatcagtgtgattcagttctgtgccacagcttttgcttattatgcgcaagcacctgcagctcaggagatctttggccacacactgcaatctctccgtggaattaagtatctctacaagtacaatgttttccagtatggctttgtggctcttgcgatactcacactcttttactatgcaatatttggatggcgaaagaggaaaccgacaggaagattccagctctcaaattgatttgtggtttgttctgtaaggaagcctgacgaattgaactacaaacatatttgttcacgagtgatagattggttagcaatgtatatgatctttgaaaccgctttctcaaagagctggagagtttatccatgtaaattagcaaccatgaagtataaggagaaaactgagatttcagtagggcacggacatggttgttaaaagcagaacccagctgcctttgtaatgtacacatttctcatcgcggctcttcttttccttgtgtattattattttacacttggctgatgttattcttgacaatactgggtccttcgaggcagagatgtttgatgtgatcgggtgccactttgggacccccttgttcttttgttgggtttgtatcgagttaggtcagttgatttctttcatatgtaccatactgtgattaccatacgaacttctagattgtattaaggatgtcttgatcatcnnnnnnnnnnnnnnnnnnnnnnnnnnn

SEQ ID NO: 394735 - DNA, 443 bp, Oryza sativa
cctccctccctcctcctcttcgatctcacaatctccttgttcgcggaaccgaaaatgcagtcgaggcacagggtgttcgcggaggacctgctcctgccgcgggaggcggaaggggaggaccacttcgaccgcgtcccggactcgctcgtgctcctcatcttcaaccgcctcgccgacgcgcgctcgctggggcggtgctcggccgtgtccaagcggttcaactcgctcgtgccgctcgtggacgacgcctgcctccgcatcgaccgcgtcatcaccgacgcggccgacgccgacgacgcgctcggcctcgccgggccgcgccccgtcggccgcggggtgctggcgcacctcctcaaggcgatgctgctcgccgggctcaagccggtcgggcactgcgacgccggggtcaggagcggctgcggtagagagcgctcggggaagca

SEQ ID NO: 394736 - DNA, 471 bp, Oryza sativa
ccgcgacacgcgcgctagttcaactgcctcgcttcctccctcctcccgagcgaccgcgccatggctgccgccgccgtcaccaagtcgccgccggcgctggtgcccccggcggggcccaccccgggcggctccctcccgctctcctccatcgacaagaccgccgccgtccgcgtctccgtcgacttcatccaggtcttcccctcctccgccgaagccgccaaggaccaggccgcatcggtcgccgccatgcgggagggtttcgccagggcgctcgtccactactaccccgtcgccggccgcatcgcggagccggtccccggggagcccgagatcgactgcaccggggaaggggttgtggttcatcgaggccgaggcgagctgctcgctcgaggaggcgcgcaacctcgagcgccccctgtgcatccccaaggaggagctgttccctcgcccgccgcccgaggtccgcgtcga

SEQ ID NO: 394737 - DNA, 504 bp, Oryza sativa
ctcatcgtagcccttatcttcctcacgggctcacgcgcggcggggagagagaggacgtcaccgatcggccatgtccgcagccaccgcgtgcgcctcgccggcggcggcgcgcccgcccctccacatccccctccgctcgcctccttccgccgcgcaccttccctccgccgccgcctcccgccgggcctcctccgccgcttgccgctgcaccgcctccgcctccgcctccgcctcgccctccacctgggattggacccgctggacccgccacttcgccgacgtcgaccaggccgagagctacgcctccctcctcaagttccagctcgaggaggccgtcgacaacgaggacttcgcggaagcctccaagctcaagaaggccatactcgaggccacgggcaacgacgccgtcgcccaagtcatgtctgaactcaagactgctatagaggaacagaggtatcaggacgcctcaaaggttgacaaagcttgccagaaccaacttggtag

SEQ ID NO: 394738 - DNA, 479 bp, Oryza sativa
ttttgattatttgctttctagagtagaaattgtgggaactaggtgtacaatttctagagagtagttgatctatttgctttctagagtggagaaattgtttgaactaggtgtacaacttttagagtgagtacttgatttatttgttttgatgttttctagagtagagaaattgtttgaactatgtagacatgtgaaacattgaaagcctatttggaagatctggcccaattttttgtttgtttggatggcataactgtgatttgttctgcaaccctgccatgcgtatgcgattttgggggaaagtacattgagaaatctctttctggatcactatgattttttgtctccaaaatgttttgatggagcttttgattgtctctaatgttctagtggtgacatcagaggtttgttctgttttgtttaaaaaaaatcggtaatgatgagttcagcttacccaccttgtacagagttagtagtct

SEQ ID NO: 394739 - DNA, 452 bp, Oryza sativa
ttccatcgtatcagtcttccaaaaaacaatcgaccacagccttacctggtgctggtgaggtgagcagagctatcccaattccaattccaattcacaattcccaaagtggaggagaagatggtggcgccgtcgcccgacgccgggaagccgctggtgatcctgccgcggccgctctacccggagttcgctgccgcgctggacggccgcttccgcttcgtgcttgccgccgacgcccacgagggcaacgcagcagaggccagggccctgctcgtgccggctctgacgcctgtgtccgctgatctcgtggcttggctccccaagctggagatccgtggtggccacgtccaccggcgttgaccacatcgacctcgacgcgtgccgccgccgcgggatcagcggcaccaacgccggcgaggtgtttgcccccgacgtggcggactacgcggtccggc

SEQ ID NO: 394740 - DNA, 541 bp, Oryza sativa
ttccgctttttttttttttttttacaagatcaaatatactgtaaccactttatttgtcacactggtgttcgtaaggttcgggtgaagtgaaaacaaaacagtgagcagaaccaaaatcgtcactgcttagctccgagctgaacgcggctgggctaacgaaggaactgacaagctgacgaagtgaacgccgatagcccgcgaggaccaaattctcatcggccccgatcatggctcgcacgagcatcccctgccggacgacgcggctcggaaactccgatcccactggtccacaggcgcagcttcagcgtgagggacatggcgcgggtgcttctccctcttatcaccctttatctgcttcagggcgtgtttcagtgctggaagaagcgcctccatgcactccgcaacggcgttcgggttcccgggcatgttgatgataagtgttgatcccctgatccccgcagtggctctagatagcattgcgaatggtgtcaccttcaaactttcctgaagcatgacatatgtgaggccaggtgcttctttc

SEQ ID NO: 394741 - DNA, 740 bp, Oryza sativa
ttaaaacttgttcccctctccaccgccggagatggcgacccaaccccgagccggcgacggcgcggcggcggcggcggcggcgaaggaggcccccgccgtgtcctacttgcaggcctgcgtcgagctcgacgactggtggctggagagggttgaaggcgaggaaggcaaggtccgcgtcgtcggctccaacaccacgacgagtcgagctggtagaagattcacttctgcttccattaaaacacggcatgctagtggtgaccttgagactgaagatggtatcatcataatgattgcacgtccaccgaacatttctaaaatgcatctgaatggatttcctgacgaggtgtccaaacacttctcacttggctttccggttcaatgggagaatattattaatgcaaacatggcagagatgaacaagcagccgcaatctccactaaaatctactgaatattatatagaaaagtttttgcggggaaacttaaaatattcaatgggacttttctcttgggatggtctcaacatatatcaggggtctagaagtgatgcagacagatttcctagcgagaggctttctaattcttctaatggaggacctactgttgaggatcctactgcaaatacagattgtaatgttaatttcatgggcacattggccacttctgaggagttttgcactggcagaatggacatgcctgaaaaactcctgcaaccctaatgaaacatgttgtaatgatcaa

SEQ ID NO: 394742 - DNA, 743 bp, Oryza sativa
tttcagtttcttcctcctaatcttgatactagttgatgggtggttgacgtttcatcgagctatcctagctcaaggcttctctatccctttctactctcccactcctctctaaccactgtactatatactagcactgaagctggacactgatacaaaattccgtactaatattgacaactgactacctatactggtgtggcaccattatatacctcttctcccgcctgccattactaaccaccagccggagctacattgcttcgagatgatgggaattcagagaatttgcatcgttcttgggatgctttttatacttgtgagagagggtggagctgtgacattcacgttcgtgaaccggtgcacggggacggtgtggccgggcatcctgtcgaacgccgggagcgcgaggatggacccgacggggttcgagctgccgcccggcgcggcgcgcgcggtgccggcgccgaccggctggtccggccgcctgtgggcgcgcacgggctgcacgcaggacggcaccgggaaggtcgtgtgcgcgacgggcgactgcggctcgggcacgctggagtgcgccggccgcggcgcggcgcccccggccacgctggcggagttcacgctcgacggcggcggccgcaacgacttctacgacgtcagccttgtggacgggtacaacctgccgttgctggtggagccctcgggcgccctcagcgcgacggggacaacttgcgcggtcgccgggtgcg

SEQ ID NO: 394743 - DNA, 698 bp, Oryza sativa
  unsure (1)..(698): unsure at all n locations
tcntntttnnttttcgnntncntccacccctnnnntnctcnancncnttnnnnttatctctnttnttntcncntntcccnncaccaccnnncgacgggcntggactnngcccnnngttcgaggctgcccactgncgtctgagacctaccttggcatttgacggcaccggacttcacttgctgctcactttatctctacgggactaggttcaattttcggaaatacatcaaaaggtcactggaggacgattttaagacagttgttggcattagtgcacccttatgggcttctgcgttggccattatgctcttcaatgttcatggatggcataacttgttctggttctctacaatcccccttgtagtaactttagcagttggaacaaagctgcaggctataattgcaatgatggctgttgaaattaaagagaggcatacagtaattcaaggaatgccggtggtgaaactcagtgatgaacatttttggttcgggaagccacgtctggttcttcatcttatccatttcgcgtcatttcagaatgcatttgaaattacatacttcttttggatttggtacaaattcgggttgagatcctgcttccatgacaactttgagcttatcatcgccagaatctgccttggggtttgcgttcaattcatgtgcagctatatcacaactgcactctatgctctcgtatc

SEQ ID NO: 394744 - DNA, 415 bp, Oryza sativa
gtcacacgctcacacatcgatcgtcattgtcttagctagctaatctttctttctcctcggttaattatcctttgcatgcccctctccaagctcggacgctgcaagctaagatgggtccgaggattcagcagctggccgctgtgttgctggcggctgtcgtcgtcgtcgcagccgccagggatgaacctgcaggaaaaaactaccaaactcaatgggatacagtgatgtcaatacttaactgcaagagtgattcgttgatccctagctacatctgcagcgtgatcagcaaaacttcgctggggttggagctcagatgaccccgacgactacacgccggcgggggatccgtcgccgacggcggcgaggccgttgaggagcacggcggacctagccaagtacgtggacccgctgccgc

SEQ ID NO: 394745 - DNA, 498 bp, Oryza sativa
cccactcgtgcgttcaactgatgccaggggagcactcaaattcaagcgccacaacttccaataccccaaccctttgttacaacagcatgatgcccagagctcagttgaccacatttctcatcgtcactagcttcctctctactggcccctatctcagggcaccggtgcatggtggcgtcctcactagctaccatgtttcttctttggatatcatgtccaaaatccacactgatcatgacgcgactaccaaggcatcatcggactttggccatattgtacatgctacaccaaacggggtatttcgtcctaccttccctgctgacatcgctgccctaatccgcttatcactctctcagccgacacccttcaccgtggcaccacgaggcaagggccactcctctcgaggacaggccttcgccccgggcggcattgttgttgacatgtcggctctcggtgatcacggtcaccataccagtcaccgtatcgacgtgtcggttg

SEQ ID NO: 394746 - DNA, 584 bp, Oryza sativa
  unsure (1)..(584): unsure at all n locations
tttgaaatcctctcctctcttctcctcctcctcctctcctcgctcgtggccgccaccatgtcaggcggcctctacaaccaccagggtttctccccggcaagaaccctctcgccccagattaggagcaaccccgaggccgatagttttgcagccagtacttgagcgagctgctcgcggagcatcacaagctggggcctttcatgcaggtgctgccgatatgcagccggctgctcaaccaagaaatcatgcgggtatcaagcatggtcaacgaccatggatttcaacgattttgacaggcgtcgttatagaagtcccagtcccatggcttccccaattatgagacccaacctacatggccatggatttgggccttggaatggcatacaccaagagagattaggctttcctcctcctcctcctcctnggacaagtatggactngcaaggcgcaccgcaaaggtcatggctcttatattgtcaagaagattgtacgcatggaggttccagttgatgcttaccctaatttcaatttcgtgggacgtattctaggaccagggtaattctctaaagcgggttaagcatcac

SEQ ID NO: 394747 - DNA, 521 bp, Oryza sativa
cacccaaatcggcgagccgtgcagccgccgccgtactcctcctcccgaggcgtcgcagccgccgccaccctgacacctctccccgccgtcgcgccgccggcgctcgcggcgcccatccaccgtccacctgttgccaccgccgcatgcgccagagggaggcctagcgcgctcgcggatccctcctcctcctcgcctcgcccgacgacgacgcggcttccagcgatgcatcgcgcgatgcggctgcgcggcctcctgcgcccgcagctcctgcgcacgcatgagaccggaggcgcgcttgtcgtggggctcggagagcctggcgggagcgcggtgccgcggaggccgcctcccctgcctttcggcgacgggcggcggcggccgtcgtcccggttctactgctccaagggcggcgtctgcagcgtggaggcggctgtggggagcggcggaggcggtagtagtagcagcagcagcgagcaggagcacgcgcggttcggggagagggaccaagaggaatggctgag

SEQ ID NO: 394748 - DNA, 426 bp, Oryza sativa
ccttctcgtccgctcctctcctagtctcctccctcccatgcacgccgcccatggtggaggtggaaggcaaccagtaaccatcttgccaatctcgagttctcagcttgtggtcacaggtggagattggccacttcttgcctacctggtacgtgctaatgaccagctagctagaatggtacgaggctgagcgagtgagtggaagcttggttggtaggtaggagaaggctctcatggcgctggaagctgtggtgttcccgcaggagcacctgtcgtgcgctgccgccatgtacgcggcgccgccgtcgtcgctgggatgcggcgttgacatggacgagttcgaggagaacggtggtgtggtgctgcaagaggaggcccgagtggcggtgcacggcggcggcggcggtggccctggtgggatgatgagcc

SEQ ID NO: 394749 - DNA, 630 bp, Oryza sativa
  unsure (1)..(630): unsure at all n locations
ggncacctagtagctggcaattttgacccctattcatacactgaagcaatccccctacccatctagcaaccaattttaaaaagaaagtactgtcttgcctgactcgatgtataattgtacccaaaccattgcataatcctacagnacattcatatccctcttgaattcaaccatcaagcacatcaggaaggatggtcggtggcttcgacaaactgaaagtggagttcatcgaccaagatgagagtgtgcaggtcgttgcagacaccatcagaagctccggtgagattcctgaaaggtatgccaggcctgagatggaggccgatcctgtcatcatcgacaccgatggttacaatctgccggtaatagatatgtcaaggttgatcaatcctgagttctccgaggaggagattgccaagctcggatcagcctgtgaggattggggattcttccagcttgtgaaccatggggtggatggggagttgctgcaacggatcaaggatgacatcacagagtttttcagactttctctgcaggagaagatgtccgtggcgatcccacccaaaggcttgcaggggttcggtcaccacttcgtcttcttcaaggagcataagctggactgggtcgatttgc

SEQ ID NO: 394750 - DNA, 539 bp, Oryza sativa
ggggaggggcgctgtattaattcgaacgtaaccaccctccccgtcatcggcggcgagaaacagaagtacagaacagagaagaagagcgagagaccgagggaggaggaggagagagaaggcgaggcgcaaagcgcaaatggagctctgcgtccgcgcctcctcgcttctgctcggcctcctgctccagctcctttcctcagtggacgtggtgtcggcggcgcagaaatttggtatcaactatggccagatcgccaacaacctgccggacccgacgcaggtggccggcctcctccagtcgctgaacgtgaacaaggtgaagctctacgacgcggaccccaaggtgctgatggcattcgccaacaccggcgtcgagttcatcatcgccatcgggaacgagaaccttgcagtccatggccggcaaccccggcgccgccaggcagtgggtgacgcagcacgtgcagccctttctaccggccacgcgaatcacctgcattaccgtcggcaacgaggtgttctccggcaacgacacccgcatgatg

SEQ ID NO: 394751 - DNA, 463 bp, Oryza sativa
gttattcatatacacaggatccagcgacgagtatgtctacatctatgacgtggtaactggggatatcgtcgagaagctttcgtggcatggatcgatcatcagggactgtacctggcatccttacaacctgacaatcgtcagctcttcctgggacggctacctggcaaggtgggaggcatcaggggacgaggacgacctttctgtgctcacggaaaacgaacagaggacgagtccttaccgtcagtcgtacacacggcaccttctgctgtagggaagagaagtcattttggtttcctgtaaggagttgtgatgttgctacatctgtaatcgcctgattgcaatgctcattgcaacagtgtataggactgggtgctgtcaaactgcatttattgctgtagagaggccattggtcgcctgcaaagagttatatttgtgctcttctgattgcaacagagtatatagg

SEQ ID NO: 394752 - DNA, 725 bp, Oryza sativa
ctttcctccaacctccttcccacttctcaacctcgcctcgccatctccgcgccgcggcccagatccctccggcgagcgccgccgccgccaccgcctccgccatggaccgcctccgcgcggggagccccgtctacgggcggcagcggagcggcagcagcacgggctcctcctccccgggcggcgtctccccgtcccaccaccgctcctcctccacctcctccgccgcctccgccgccgcggggctgggcggcggcgtctccaacgtgcgccgcacgcagaacgtcgcggcgcgggcggccgccgcgaggctggcccaggtcatggcgtcacagagcgccgcggccgccgcgggccgcgacgacgacgacgacgacgacgactacgccaatgaccacccgcccgcccctccccccgcgaggttcggctccgcgcgccccgccgtggcgcacggcagccacggcgtctcgttgctcggccgcaccgcgagatctccctcccctgcgttagggaggaacattgtagagccacctcctactgtccgctcaacatcagctgggaggcctgccgttgcttcacggccgaccaccacggtggttccaccgatcaaaaccagcacgacattgcggacaccatcgcctattccacctgtggctgtggagcctccagtggaccgcagtcggcagaaaaggtttgatacagggcatctcaactccagagaatcaaca

SEQ ID NO: 394753 - DNA, 431 bp, Oryza sativa
ctcattcatggcgtgcacggctccacgggaggaggacctcctcatggagggagacgagcaccggccgcctctcaaccgggccctgctccaccgcagcgccaccaacaacacctcccaggttgccatggtcggctccaacccctgccccatagagagcctcgattacgagataatagagaacgacctgttcgatcagaactggaggtcgagagggaaagccgaccaggtgcggtacgtggtgctcaagtggaccttctgcttcgccatcggcttcatcaccggcatcgccggcttcggtcatcaacctcgccgtcgagaatgtcgccggtcttaagcacaccgccgtgttcgtcctcatggagtccagcagatattggacagcgttctggctgtttgccggaaccaacctggccctgctggtgttcgcgtcg

SEQ ID NO: 394754 - DNA, 462 bp, Oryza sativa
ccaactcctcctcccccccaaatcccccagatcccgcacgccgccggtggccgcagcgccgccgccgcccaaaccctagccggcgggcgggcgcagtagcggagatctggtaccgtgccgcgatgggggacttcaacgtggcgctggtgatcgtggcggcggtggtgagcgtcctcgtcctgctcgtcagcgtctacctgctcatcaactaccagcaccccgacgacgccaaccaggcctacttccccaagctcgtcgtcgtcctcggcatcaccgtcgccctcctctccatcctcatgctccccgccgacgtcgccaaccgccaggcctgccgccgcgccatctacagcggcgcctgctccctcaccctccccatgaagaccctctggctcgccgtctacatcgccgacgccgtcctcgtctttctcgtcatccccttcgccatgttctactacgagggcg

SEQ ID NO: 394755 - DNA, 600 bp, Oryza sativa
ttgtattgcaagaaggatatcttgttggttctggtggacaaatcaaaactcctaaatctgaaagggaagcaatgcagattccaacatcctccattggttgcaagccataacttgccgtgctcgctagagtaagtggtgatgatctcgtggccggcttggatgaacagggcaacatctggagggcgcatatcacatccttccagacactatgacgatgtcagtaacaccaatgagtatggctataatatgaatttaattgagggggatatgatggtagcagagggtagctcaggagccccgttgcttaattgcagagccaattttgttggtctacttcaaggaggtggtaaggaatgtttttcatgctttggttcactttctgatatatgtaagaagctaactgagtggggaatttttcctcgagagaaggtgattcaacaaaagaaatcccagaagtgacaactgattcatcattgaagcccttggatagtagagcaaacgtccaattgaattttgtttcagatgtttttactcgttgacactgtagcacagattctgtttaaagttttgcatggtttggtgacccccccccatgttgtg

SEQ ID NO: 394756 - DNA, 324 bp, Oryza sativa
gagagagccctcctctcctctcctaccctcttcttcctcctcctcctcctcgcctcccaccaaaccctagcacgagcagcccaatccatctccagcctcacgagctccagttcggagcagcctcgcggtgggacgagtcgccagttggggagctcggaggaggtgaggccgtggttgggggttgggaaggggggaaggccaagaaatggcggagaaggaggagggcaaggttggcggcggagggtggggcggaggcggacggccgacgaaggaggttgaaggtcaagttccgcctcttcgacggctccgacatcgggcccctcc

SEQ ID NO: 394757 - DNA, 808 bp, Oryza sativa
atcatttcttgcttcctcagctgcttcttcctccttcctcttcacacgacgctcccatttttatttatatatatcagcatcgtttctcctggcgtcactgcacccataactgccaagaattggagctgtctcttctccctctctctctctctctctctctctctctctctctctctctctctctctttctctctgcatctgagagagagccggaagaattggagttggagcaggagaagcgtggagcttctgaggattgattttggaaatttggagcttgaggatcggattgagtagtttctgaggattgggaacaggagagatcgaagcaggagctaggagaagcgtctggaactgaaggggaaagcgagaaaccaaaaaaaacaaaagatagacatcgagcttgatcggttagcacctgccggatacaccttttgctgcatgcgagtgatgttctgtggccttgtcggctcatggcaatctcagacgccagagtggttcgccatgtgaggtgtcccaaatgcttcagtgttcttcaggagcccaccggcgcgccggtgtaccaatgcggtggatgcggcactaccctccgagcgaaaaaccgcaccggcaactcacaggacgtgatcagcgctccctcctcttcggggagtggcctgcctcctcacagcaagcacctgggctccagtgatgttgcaagcaccagtggatccactcctgaagctcaaatcagcagtgggcagcaaggagctgacatgacaagccgacgcgagactgatgatctcgtgtcggcgaggaacaatgcttc

SEQ ID NO: 394758 - DNA, 385 bp, Oryza sativa
tctgattggggggggtggccctcatttccaggtcttttttcatgaggccaccaatctccaaacaagctgtccttaccgatcgttctatgcaaccatctcggggcaaaatggaaacttggccaatacaaaaatgcaatacaatttgacaaagtttgagttgaaaccctctcacgatctacccataaatataacgtgtgaactcaaccagagactcacaaacgagccttgcgggctgcgatcccagctgccttcattgcgtcaggattgcccaaggaattacgccagtgctcggaatttacaatcaaccacttactgtatctttggcagaacaatatcacgcatcaagctatctggagcttgcatgcctgttaaatgctcaaattga

SEQ ID NO: 394759 - DNA, 1032 bp, Oryza sativa
  unsure (1)..(1032): unsure at all n locations
agggaagatacaagtgtcatcccgcatccaacaaccatggactccttgtatgatatctcctgctttgctgctggtcttgcaggcaacatctttgcgcttgctctcttcctgtcgccagtgacgacgtttaagaggatcctgaaggccaaatcgaccgagcgattcgacgggctcccttacctgttctcgctgctgaattgcctcatctgcctgtggtatggacttccctgggtcgccgatggcaggctgctcgtcgctaccgtcaacggcattggagcggtgttccagctcgcctacatttgcctcttcatcttctacgcggacagcaggaagacgaggatgaagatcatagggctcttggtgctggtagtttgcgggtttgcgctagtttcacatgcgagcgtctttttctttgatcaaccgctttcgcagcagtttgtgggagctgtgagcatgnttcgctgatctccatgttcgcttctccgttagctgtcatgggagttgtgattcggtcagagtctgtggagttcatnccgttctatctgtcactctctacgcttactacagcagaaaatggagaggccaggattcatctgcaccgttgctgctcgcatgatcaaaaccggagtgaatgattgatcgatcagctggttttgccatggtttggattcttgaaagagtgggtttatggtgaattgtacagttttggctcagtcttcacatgttggtactggaagctgtacttcaaactgcattcttcaaacatgttggaaagttttgcacaccaggggggcaaatgatggattttttttaatttgattccctccttttccttgaatacttggtgtgcaaaattatttcagctatgcacattgagcctcacttcttgttatcaattatgacatgtcacatatgtataagttgcgatgatagttttgtttcgttgctgtttgtaaactgcaatattcttctcgccaaactgtgtgaacaacaaatcaatggccacgtcatatatgtacaagttgagatgat

SEQ ID NO: 394760 - DNA, 438 bp, Oryza sativa
tcgttctcctctcatctcctccacactttgaggaaacgtctaagcacaagtgctaaacgcgattagaaggcagcgaaatcgtacactaaattgcacggattagagatagatctcaagcaatgggggaggagaaagtggcgccgaagtctgacgctgccccggcggtggagttgctggggttcgtgatgagcgcggaggaggccgagcgcgccgcggcggcggccggggtggagacggtggaggacctgctgccgctgctcgtcccttccgcgatgcggcgcgcgcgtgccccgatctcgcggttccccgtgggcgccgtgggcctcggcgcgagcggccgcgtctacgccggcgtcaaccttcgagttccggggcctcccgctgtcccattcccgtacacgccgagcagttccttgtcgtaaacgcggccgccgcggt

SEQ ID NO: 394761 - DNA, 454 bp, Oryza sativa
atcgtgtgcaagctaacaacatcgctaggcaaaaggaagtcgttgctttcgagtttcccacccatggcatcctccgccggcgacccgctcctctccggcgaggccggcgacggccgccgcaggttcgtcccgtccaccatacggctcaagacgtcggtgtggtcggagctgggcggcgcggtgggcgatctgggcacctacatccccatcgtgctggcgctgtcgctcgcgtcccacctcgacctcggcaccacgctcatcttcaccgcgctctacaacttcgccaccgggctcctcttcggcatccccatgcccgtccagcccatgaagtccatcgccgccgtcgcgctctcctccgcgcacctcaccatcccgcagatcatgtccgctggcctcgccgtcgccgccatcctcctcttcctcggcgtcaccggcctcatgaccaccctctacc

SEQ ID NO: 394762 - DNA, 556 bp, Oryza sativa
  unsure (1)..(556): unsure at all n locations
acctaatacccctttggtgttatatcctcnagccccccagtagacgctgcctgctcctgctctctcctccgcctgattcctcattcctccaaccagtggtgtgtgcttgctgctgctgctgcttcagttctcgagtagtactccagtacagacaaggcgagtggtggtggtgtttgttgccatggagtcgcagcaggagaaggcggtttctgcgccggcggcgaacgggagcggcggcgccggcggcggcgagctgatcgggtacgtcgacgtgcacgtgcagagcgcgcgggacatccagaacatctgcatctaccacaagcaggacgtgtacgcgcggctgtcgctgccgggggagggggcgccggcggcgtcgacgcaggtcatcaacggcggggggcgcaacccggtgttcgaccagtcgctgcgcctgggcgtgcgcgccggggacgtcgacggcgcgctccggtgcgaggtgtggatgctgagctcggtcaagaactacctgcaggaccagctgctggggttcgcgctcgtgccgctcccgacgtcgtcg

SEQ ID NO: 394763 - DNA, 551 bp, Oryza sativa
gtttgttatattagatcgagcagttgttttcttgcaggaaggtgcaacaactcaacaacatttactcgataccggagttgcagtcgatgacattgttgccgaagagccttcacactcagaatctccaacttacatcattcacgaaacagctgccttggtagtttcgacagaagttgtaactcagacttgtcaatcaaatatacctatacaacaaaattcaagccaccctgcccaacaaagtccagaaacttcacgacattcaattgcaagtcctgtaggtttagaggcaactcaggaatttcagcctgaaatgcagccatcaacctcaggtcaggatcaatctgaagagctggaacaagaaggtatgtcgagctcagcaattcaagatttacagccagaaatgcaacctccaacttagtgcagggtcagtatccaggagcagtattgtgcattgctgcagcttgagatttgcagcctttaatgcaatcatcaaccccagtgccaaatcaacttgcagaggcaaatcaagaggtatgtgagtgctgagcagc

SEQ ID NO: 394764 - DNA, 565 bp, Oryza sativa
  unsure (1)..(565): unsure at all n locations
cctatatcgaaccttgcgaccacggccggccattagtgaagtaggactaagagcctaagacaataagtgatggaatagataagggacaccacgaaactaaggtgaaagcttgagtttctcagtaagataaaaaaataaatgaaggggagacctaaatttagatggactcaaatcatcaatgtcgttaagaaattttttcttacgactaatgactgtatggtaccatatgacccggccggctgctatgcctcttgaccctataagtgttttcttcttaacttgtagatgacgatgatcaagtacgttgaagtacatcctgctgctcagtggctcgagccattaagatcggagtaactcgcttagatccattggaaaattcaaaaagtgaaaacgaagaaaacctaagtgcctaatcagaaattttggaccactaatatacataggaccataatagtaagtagacatataatgaatgtagatgtatataataactaagaggcatcaacactagatagtatctaataacagcctangatgaagatagatgcatttgatgaacgatgat

SEQ ID NO: 394765 - DNA, 936 bp, Oryza sativa
cttcatatacacatttaccttgtatggagtctctaacagtgataagttgtcaaagcttagtagtgcttctcaattttcccctatatctgaaggaaatacacatttggagttgccctgagcttagatctataaggggaaagcaggatataaaagtcgaaagtaaatatgttgagcgtaataacggcatggctatatcagaatctagcagtgatctcagtgcatctataactatagaagatcaaggaacatggagaagcaaatatctcctgccatgcttagaatacctaagaatagcatattgtgtaagcttggtagaggttcttgctcttccttcatccatgagaactataattatttcagagtgtcctaagcttgaagtcctgtcagggaagcttgataaacttgggcaactagatattcgattttgtgaaaagctgacactagtggagtcatacgaaggatccttctcatcattggaaactgtctccattgtcggctgcgagaacatggcatcgttaccaaataaacattcaaatactccctgtacaaaaggtagtgcatgattgaatcctttctgtattcaagtcaagaggaatttcataatgtctatgggggccgaaaacaacttatttttgcatcagtaatttgtatcagggattgttctcttcagaggttcaaatatatggagatatctactcggtactgtctcaattttcattttccctccaaatgtggaccatgatgtggactatggaaaaccaagaacataatctttcttctgctgaattcttcaaatttgtctaggtaaatgacgttgacatatgtgagtactcaacttcgtacatccaaaaactctgtatagttgttcttgttcttaccatgaatgcaacacttaaattaatgtactcttcagcaataaaaaacaaaagcttattt

SEQ ID NO: 394766 - DNA, 479 bp, Oryza sativa
gaaatcctctctcttctcttgggacggactagggacgctgctgctgctcctccttgaggcagagctcgcagccttttgcaccctcacctcgcgggctccactcatcacaaaacctcaaatgcgcccgtgctcgtagaatcgattggatcaaaggttgtagcttttttgtatttcaaggtttgggggggtagcgctggcgaggctgatggtccaggacgaaggctcgtcgtcgtcggtgacatcctccccgctccacaacttctccaacatgccgctccacccggccgcggcggcgtcgcccacgccgccatggatggtgcgggagctgcgttccgacgagcgcgggctgtgcctcatccatctcctgctcaactgcgcccgcggcggcggcgggccgggcggcttgatgctgcgaacgccgcgctcgagcacatcgcgtcgctggcggcgcccgacggggacgccatgcagcgcgtggc

SEQ ID NO: 394767 - DNA, 334 bp, Oryza sativa
  unsure (1)..(334): unsure at all n locations
gttgagcttgagaatgactttgatagggggagcggcgggctcggtgttgggggcagtaagggggcagcgacaggattcgatgcggccaccaatgcagacatgggtggtggtaccaccgccggaggtgccagcggtgctagcggtgaaggtgccggcagcaccaccaccggcgtaaatgcccgccgcgttggtgttgctcgtcgctntagtcctatggcggctaggtggcggagctccggtgtggtgtggcgtggaatggatgggcagctaacatttgattgagtaaagagatactcagttttccagtcgtttcatttggttattcatgatataa

SEQ ID NO: 394768 - DNA, 550 bp, Oryza sativa
tttttcgaagccgacattttgcaacccaccatcattcagaaacaatgaagctcgcactttttgcacttttgggcatggcatgcacccttcaacttgctaatgcttccaacactttggaatcgaattccgaggtggatgagttcaatgttgctggaagcgacagctttcaagacttcgatgatcaagacatctcgctcgaagagttctgtgagcaagtcttgttcgaaaagcgcggtgatgttgagattcctgagtttttgattgaccaagtgagaaatcttggcaaggacaacaagaaggatgagaagaagaaggatgagaagaaagatgggaagaagaaggacgaaaagaagccgaagcaaacgtcgtcaccctctggtggcggcggagggcagaacaagaagcgaaaccgacgccgaatctaagatctacgcttgtgaagttgagtgtagggaactttgtcacggacgaatgtcttgtgaaattggaagatttaatcctagactaacagttaacattaattgtgtgtcctgtgtaaaaaaaaaaacaa

SEQ ID NO: 394769 - DNA, 649 bp, Oryza sativa
  unsure (1)..(649): unsure at all n locations
cttcgacctccacgccgacgtcgcgctgcgcctgccacctttatcttgaaccgcgacgtcgttgtccgcccctcccgcgccggcgaggcgaccgagccccctcccctccttccctgcctcgtgccactagcgccgcccttcgccgccgccgccgccgccgcccgcgagggagacgcgagaaggatgagggtgaagaggcggtccaagaaccgcaaggtggtcaggttctacgccacctgcttcggcttccgcgagccctacagggtgctcgtcgacggcaccttcgtccaccacctcctcagtcacagcctcctccccgccgacgacgccctccagtccctcctctccgcctccaggccccctcccctcttcacctccaagtgcgtcctcgccgagctcaggcgcctcggcaagtcccacgccgacgccttcgacgccgccgccctgctcgccacggccaagtgtgagcatgacaaagtagtcagtgcagtggattgtgttctgtcactgataggtgaaaagaatcccgaacacttctttgttgcaaccaggattctgatctccgtgcaaagtacgggaggttcctggtgttcctgtgatatatggtctgaagantccttgttaattgaanaacctctgtgcaagaacg

SEQ ID NO: 394770 - DNA, 820 bp, Oryza sativa
  unsure (1)..(820): unsure at all n locations
attagttgcatctgtcaacagaaaccgtagtacaatcattgttccggctggtagttctggtgaagaaggttgggaagcattcaggaatgtattgttggaaataaacaatgaggcttcccgactttatgttctaccaaaccatcctcaatcagcaacacttggaacctcccagagcgccttcctggacttttctgatgatgttggtgctggatttatagctggacatggaagtcaatctgcttctggaccagaggtagatgttgaacgcctggttgatttgcctcctcaggaagaaattagtggcatgggcatgtctaaggtcataagggcagatcaaaagaggttcttctttgaccttggaagcaacaacaggggtcattacctgaggatttctgaggttgctggagctgatcgttcgtccgataatcttgccactctccgggttgaagcaattccatgaaatggttggcccactttgtagatataatgaaggacaggctggaagggatgacgggcgcgaacgtgcgcacagtggagtccagtcagagatgatttagctttgaggtgctcgaccatggccgttactgctgttatgcctcctctaggtttgttatgtggtgtgtggctgtgcagatcacgcagtattggtggggataataatgttatttctcctttttctttctttcttttttttctgaattcagtggtgaggattgatttgtttgggacttttcttgtcgaggaataataagcagtatattgttcgtggggggtggtatnnnnnnnnnnnnnnnnnnnnnnnnnnnnnnnnnnnnnnnnn

SEQ ID NO: 394771 - DNA, 491 bp, Oryza sativa
cgagagcagaaaggaaggaccccttccaccactctccccctgtgttgtgcctgtgctcctctcatctttgactacccacgattccagtctcccaccacaggccaaaacactgcaacatttcagacttcacagttcacagtgagttcagaccaagaacacaagaataccaaaaagaacagcaccaagaactctcctccaatccatcacagacatttttcttccctccaagagaggcattgatcatcagagagtagagccagggcgtgtgtgtgtgtgatgagctcagtgctgctgttcttgcttctgctgctgctttctggagtgagcttgagtggctgcataaggcttggcaatggcgggtatgaggagtggaggatgggctcggcgacctacatcaaggagtccctggggcacccgcttgaatgatggtggtggagcctgtgggtacggcgacctggacatctttaggtacgggaggtacaccgccggcg

SEQ ID NO: 394772 - DNA, 500 bp, Oryza sativa
cttcttcttcctcctctcccctctcgccgtgctggtggtgagtgaggcggcgagcggcgagctcctccggtgatccgaggctcgccggccggcgagagcttgcctgtttcgggaggttttcagggtgatctgagagcacagcgagccgatggcggcggccgcgaacggggcggcgtgctgcggtggcgcgacggggccagggtacgcgacgccgctggaggccatggagaagggcccgagggagaagctcctctacgtcacctgcgtctacaacggtactggaattaacaagccggattacctgggtacggtggacgtggaccccaattcccctacatactcccaagtgatccacaggctcccagtcacccatgtcggcgatgagctgcttcactctggatggaacgcttgcagttcttgccatggtgaaccatcggctagccgccgttttttgaatttgccttccttgctgtctggccgtgtgtatgtcgttgacacgc

SEQ ID NO: 394773 - DNA, 417 bp, Oryza sativa
ccagtgcggtcctttccggcacaaagcacactcgcccgctgacagtgaccagagattctactccagcttgctactcattttcgagggtgccagatcatggatccgacctcggtgccatggagctccatggtgtacggtctcctggggctcgcgcttctgtggcaggtccaccggctgctggtgcggctgtggtggcagccgcggcggctggagcgggcgctgcgggcgcaggtgcgtccgtggcacgtcctaccgcttcctcaccggcgacctcaaggactacggccggctgagcaaggaggcatgggcgagggcgctgccgctgcggtgccacgacatcgcgccgcgcgtggcgccgatcgtgcaccggaccatcgcggagcacggcaaggcgtgcctcttctgggtcggccccat

SEQ ID NO: 394774 - DNA, 427 bp, Oryza sativa
  unsure (1)..(427): unsure at all n locations
gagcgataatgnatgttggatgactgtggacttgttgacgttttttttttatcaacgcaagatcaccggacgatttacggtgcaatcaattacaccgcaaaacagtgacatggagctcaacaaggcggtggccgtggcggcggcggcgatggtcgccgtggtggcaatggtggcggcgccggcgtcggggcaggcggtggcggcgtcgtgcacggcgtcgctgatcaccagcttcacgccgtgcttcaacttcatcaccagcagcagcgccggcggcggcggcaacggcacggccgccggcggcggcgcgccgacggcggagtgctgccagtcggtggcggcgatgatcaacacgagcgccagctgcgcctgcctcgtgctcaccggcaacgtgcccctcggcatccccatcaaccggacgctagcc

SEQ ID NO: 394775 - DNA, 601 bp, Oryza sativa
  unsure (1)..(601): unsure at all n locations
gttcgtattaccactcattttgcttactacttgatctgagccgcttagctcggtaagaagtaggtgagtagccttcatggagacggaggcctcgccgccgtcgccgatgagctcgctgcgtgacaggctgagggccacggtgtgctgctgcttcggctacggcggcggcggcggcggaggtggcctcggcgacacggtggcgcagtggcgccgccgcgtcggctcgccgggggagttccggtatgatcccctcagctacgcgctcaacttcgacgagggcgccgccgacgacgaagacgacgactacgaggccggcgacaaccaccgtgccgacggccttctctaccggagcttcttcatccgccggcggcggccatcgccgccgtgtaagcctccggcgaccggaagcttcgatcggttgcagaggatatgcgagtatatatatatttagccatgcacatattaagaagcaatagttcagagtgtgtagcacgtatggttgcatgtaaaaacttgattatatgtacgaatgatcagtgtttgatttggnntnnnnnnnnnnnnnnnnnnnnnnnnnnnnnnnnnnnnnnnnnnnnnnnnn

SEQ ID NO: 394776 - DNA, 724 bp, Oryza sativa
ttgttcccaacacattgtttatagacaaattaaagcagaaactcgaagaaggtacttctctgagaaaattttttaaacaggtattctactttgtattaattacttttaatgttcctttcagcaatggccagataaagcagattttaacaaagcaatgacaaatttcgttcagtctttagccgcttactcattagtatgttattttttacagataaaagacaggtatgtatttttaattattaaccctattgacttatttagacacaatggtaatataatgatagattcttatggcaatttgttacatatagattttggatatttattgtcaagaactgttgagtttgaaaaggctcctttcaaactcacagaagaaattattgatgtattaggaggagaaaagtccaagttatttgcaaaatatgaagaattatgtgttcaaggttttttcgcaattagaaaacattaccgaaagatattaacattagtacaaatgaccctgacgttacctataatgggtggccaatttttgccctgtttaaatggtgattctctcctaaagaatttgcgtaaaagatttcatttagaagataacaaagcaaaaattgaaacccttgtaaaaagtcttattgtagaatcaagcgataattggcgaacaaacatttatgatgcctaccagaaaatcttacaaggaattcactaaatcaataaatgccttgaagac

SEQ ID NO: 394777 - DNA, 439 bp, Oryza sativa
ctcgatcagaaatatttttacacagcctaataaacccctcgagaagacaagtgtaatcgccaggggaagcgcgcgagatggacgcagctggcgtcgccgcaaagccgtcgctgtcgaggaagccctcgccgtcgttccgcctccggaacggcagcctgaacgcgctgcggctgcgcagggtgttcgacctgttcgaccgcaacggcgacggcgagatcacgctcgacgagatggcgtccgcgctcgacgcgctcggcctcggcgccgaccgcgcggggctggaggccacggtcgggggctacatccccgcgggcgccgcggggctccgctttggcgacttcgaggcactccaccgcgcgctcggcgacgcgcttttcggccccgtcgaggaggaggagcccgggaagcaaggggaggacgacgaccagggcgacatgaa

SEQ ID NO: 394778 - DNA, 513 bp, Oryza sativa
cctttccccgggatctcctcttctattccttttcttccatcgccataagagcagccgcagatcgaattgcattgcagtctttgcagatttcagcttaattgccggacagtgaagtgaaagcatcttcaagggcgtggaagctctctgagattccaaagggtcacaaggcaggggatgagtacaaccaaagtgaagagacgtgtgggaaagtatgagctaggaagaacaatcggagagggcacattcgcgaaggtcaagttcgcgagggataccgagaccggcgatccagtagccatcaagatccttagacaaggagaaagttctcaagcataagatggtcgaacagattaaaagggaaatttcgacgatgaagttgattaagcacccaaatgttgtccgtatatatgaggtgatgggaagcaagacaaatatctacattgttttagaatatgttaccggtggtgagctctttgatacaattgttaaccatggtcgtatgagggaagatgaggc

SEQ ID NO: 394779 - DNA, 462 bp, Oryza sativa
  unsure (1)..(462): unsure at all n locations
gtccatcgatcatctcttctcttccagcaaggaagcagcagagaagacaatggcagcatcggccatgaagctcgccatggcggtggcgtgcgcgctggcgctcgcgtcggcgtgccacggcctgcagctgggctactacaagcagtcgtgcccccgcgtggaggccatcgtgagggacgaggtgaagaagttcgtctacaaggacgccggcatcgggccggactcatccgcctcgtcttccacgactgcttcgtcgagggatgtgatggctcggtgctcctggacccaactccggcgaacccgaagccggagaagctcagcccgcccaacatgcccagcctccgcggcttcgaggtgatcgacgccgccaaggacgccgtcgagaaggtctgccccggcgttggtcttcgtgcgccgacatcgtcgccttcgccggccgcgacgccgnctactttctcagca

SEQ ID NO: 394780 - DNA, 852 bp, Oryza sativa
  unsure (1)..(852): unsure at all n locations
gtcaaaagcaagagaaagaggggggggttgtgttgtgagcagcgatggcggcgaaacgcgggagcgggtcggacggcgacgagctcggcggcggcggcgccgccgagggaaccagccccaacgacgggggcgcgtctccgcctcccctcgccgccgcgcccgccgtatgcttcatccgctccgccggagacttcgccggtggcgccttcatcggatctatcgtcggatatggacaaggtttgttcactaagaagggatttaagggctcattcagcaccgcagggtcttctgccaagacttttgcagttctctctggcgtccagagtctggttgtgtgcttgttgagaaggctgcgcggcaaagatgacattgttaatgctgggatagctggttgttgcactggccttgctttgagctttccaggaacaccacaagccttgctccaaagctgtgcaacctttgcagcattctcatgcatcatggaggggctcaacaaacagcaggctgcaatggcacagacacttggtgggagtgctttgaccgtttcacaccagaatggtggcgttctcccaccattcactctgccaccacttcttgatgcatcagatgctttatcttcatgctgccagcccttagtactaaagccgaagcactagactcttcagcatagggagaaggagatgctcaagaaagctatagcttagtgaattttgttttgggacatgtctcatatctagatttgctttctgtatgacgccaggtttttcttgctgcactgtggcaagcgctggcttaactagatttcattggtttggcagataaaatttaagannnnnnnnnnnnnnnnnnnnn

SEQ ID NO: 394781 - DNA, 537 bp, Oryza sativa
ttcaaccacacacgcacgacacgaagaacgccatggcgaagctggcgtggagctcgctgttcgggtgcttcacctcgcaccacgtcggcggcggcaagaggaagaaaggcggcggcggcgggaagatggcgaagaagaaggtggcggcggcggcgagccagaagcagcggaagctgcagagccggctgtcgttctccgacctgtcgttcggagggatggtgtcgccggaggacctgtcgctgtcgctggccggctcgaacctcctcgtcttcaccatcgccgggctccgcgccgtcaccagggacttctccatgaccatcttcatcggcgagggcggcttcggccctgtctacaagggctacgtcgacgacaagctcaagcccggcctacgcgcgcagcccgtcgccgtcaagctcctcgacctcgagggcacacagggacacaacgagtggctgactgaagtcatctttctggggcaactgaggcatcctcacctcgtcaaactgatcggctactgctacgaggatgaacacagac

SEQ ID NO: 394782 - DNA, 464 bp, Oryza sativa
ctttaacatctacgggggggtgggcggcgaggtggctgtccccatggacgcggaggccgccgcgcagttggacccgcacggcgggatgctcgccgcctccggccctgtccagcccatggcgtccaaccaactcaccctctcgttccagggcgaggtctacgtcttcgactctgtctcccctgacaaggttcaagcagtgctcttgctactcggtggaagggagctgaacccaggtttgggctctggagcatcgtcatctgcgccatacagtaagaggttgaattttccacaccgggtggcatctttgatgcggttcagagaaaagcggaaggagcgcaactttgataagaagatccggttttctgttcggaggaagttgcacttaggatgcagcgcatagaggtcagtttacatcttcaaaaccaagggtgatgaagcaacatcggaattgacagcttcagatg

SEQ ID NO: 394783 - DNA, 901 bp, Oryza sativa
  unsure (1)..(901): unsure at all n locations
ttttgccggcctgcagaatctgaggtgcatgagtgtcacctcttgccctggggtcaccaatctcgcgcttgctgctatcgccaagttctgcccgagcttgaggcagctttccttcaggaagtgtggacacatgacggatgccggtctcaaggctttcacggaatcggcgaggttgttggagagcttgcagcttgaagagtgcaatggggttactcttgttggtattcttgatttcctcgtcaactgcggtccgaagttcaggtccctctctttggtgaagtgcatgggtatcaaggacatctgctctacgcctgcgcagcttcctctgtgcaaatcgcttcaattcctgaccatcaaggactgcccggatttcactgatgcaagcttggctgtggtggggatggtttgcccttacttggagcaggttgatttgagtggtctccgtgaggtcactgaccgtgggcttcttccactgatcaactcttccgagggtggtctagtcaaggtcgatttgagtcgttgcaagaacatcacagatgcacgctgtttctacccctgggtgaaggggcatggaaaatctctgaagcaagttagtcttgagggctgcagcaagataaccgatgctagcctctttgccatctccgagaattgcactgagcttgctgagctcgatctgtccaagtgcatggtcagtgacaatggtgttgctaccctggcatcagcaaagcacctcaagcttcgtgtcctgtcactgtctggttgctcgaaggttactccgaagagcgtgtcattcttgggcaacatgggggcagtctttggagggtctcaatcttcagttctgcaacatgattngtaaccacaacattgcatcgttggagaagcagctcttgtggtgcgacat

SEQ ID NO: 394784 - DNA, 612 bp, Oryza sativa
cacaagtaaagctcccaaaatcaaattaaattaaagagaaaaaaaagaagaagagaagggcaaatcgattcgccatggctgctccccgcacgcctctccccctcgtcctcctcctcgtctccgccgcgctcctcgcggcggctcccctctcgccggcggccgagaccggtgccgccgcgttcgacgtccgccgccacctctccaccgtcaccaggtacgatgtggcgaggggatccaatagtgtgtcctccgcgccgtctatgtcggatgagtgccgcgtgatccacctcaatctcgtggcaagacatgggactcgcgcacctaccaaaaagagaatcaaagagctggatagactggcggttcggttgaaggctcttatcgatgaagcaaaacaagggcctgaaagtgactccctgaaaaaaattccttcatggatgaaagggtgggagtcaccctggaaaggtagggtgaaaggtggtgagctggtcagtgaaggggaggaagagctatacaaccttgctatcagagtcaaggagaggtttcaaggcctatttgatgaggaatatcaccctgatgtgtattcaataagagcaactcaggttcctcgggcat

SEQ ID NO: 394785 - DNA, 458 bp, Oryza sativa
  unsure (1)..(458): unsure at all n locations
gtgaaacaaaagagagaaggaaaaaaaataacaaaaaggagtagatgcagttttagttcttattattctaatcttctctcttgttgcaatttctttttagaatccttgggatcatctctgtccccgttctgggtggtttctgtcatactccaggaactgtcttgttctagctctttgcttggtctgaaagtcgatttctgcacaggtactgcgaaanttgtgggaatagtattgcagaaagcgcanaaatctgaagcttactgtccaagccagtgtgcagctgaagccaaagactgaatctttcatcagggttttgataatatcaaatacccttgtgatgacagagtttaatcagtttgtctcgtcatctacgtgatcgattcttcttcagtctggtctctacctctgcttttgaagacgatggccaaatccttctccccttccaccaatcagagaga

SEQ ID NO: 394786 - DNA, 219 bp, Oryza sativa
  unsure (1)..(219): unsure at all n locations
tgtaacagcgctcgcgggttgcgcttgcgccggcgaagaagcgcggcggacgccagataaagccctccctccattgacatcaacatgggtgacaatctgatggataaggtcaatgccttgggtgagcggctcaaggtaagtggggcagaagttagccggaagatgtnagctggtgtcagtaacatgagtttcaagntgnaagaattcttccaaggccag

SEQ ID NO: 394787 - DNA, 527 bp, Oryza sativa
gttcttggtagtaggagattcttctccaatccgtgggagaagagctaggaggagcggaggaatccgtgtcccctcccgcggacctgcttctccggctgcccgaaacatgctttctccctatcagcctttgtgatgcattgaacaggggttgagaagtactgtaatttttgtaatggctgggtgttccttggcaacactgagaggacaacatcgagggagatggatccaatctcacagcaagctccccacaaggattatgtctattaatctgccaaagagtaatcacagtcacaagattcagcttccatgccagtccaatttaggaagaaaccaggaaacttggtgcatttgctcctttgggttttcatggaaggtgttgccggatcgaaacatcagttaaatgttatttcttgcagtcgcttgtggattctgagagtatgatctcaccaaatttgttattgctttctgatgaagctctactaactatcagtatagtttttgcatatttggctggagttgtaccctct

SEQ ID NO: 394788 - DNA, 474 bp, Oryza sativa
ttgatacagagcatgccagtaatggcacgagcagcaacgataatggccatgctatgtcagttgagaataatgcttctgaagttgcagatactgacaacaaggaagattgcaatttggatggccagaacactagtggaaggatcgaaggcccttctgaagaaataccacccaatgcaaatggcatggatatcgattccgacagagaggaaacctacaatgtggaaggaattgctgagaattcagaggattgcagggtaagaggaggtggagatattgatacagaatgcaacctgagtttacctgagcacgaattgcccttacatcaggagagcaagtcagactccgagctgaaggaagcaaccaaaaccgaagacgaggcaaccaagaaaggccatcttgtgagggtgcaatcccgttcttgcgatcttcgagagtcgcatcgcgcgtcggccggtagctcaatggatttccact

SEQ ID NO: 394789 - DNA, 521 bp, Oryza sativa
cactgttgctgctgttgtcttaagattgttagacctagattctgccatctcatacactcttcgtcagaaggtgggatcaaacaaggagcggggagctggagagttcatgaagcttccgccaagatatactcctgctaagaccaaacaagaaactgaacctatgggaacaggttttgatcgacaagaaacatggctaactccaagcaacggacgaggcggtcggggtggccgtggacgaggtagtcgaggcggtagcaggggaggcagatcccggagtcgtggtggcaaggtcccaagaggtattagcagctcccccaagatcgagttcaggggttacagtgccagcgccgtgtcatctgagaaagctcctcgaaagtatgctcagtcgagcgcgtaatcgtggacgtgggcgtggacttagaactgttagacctcggcagccatcagatattggagccagatcaattccaaagccaaacttgctgggcagcttagcatgctaaggatgcaagcatcaacag

SEQ ID NO: 394790 - DNA, 550 bp, Oryza sativa
tgacttccctacatatcgacatcagaaggttcacatatgcagagctgaagctcataactaacaatttccaatcaatcattggaaaaggaggttttggtactgtttatcatggcatactggaaaataatgatgaagtagctgttaaggttcttgtggagacatccatagcagagtcaaaagactttctccctgaggtacaaaccttgtcaaaagttcatcacaagaatcttgtcgctttggtagggtattgccaaaacaagaagtgccttgcacttgtttatgatttcatgcctagaggaaatcttcaacagcttttaagaggaggatatgacagtttgaattgggaagagcgacttcacattgcacttgatgctgcacaaggtctggaataccttcattgaatcatgcaccccatcaatagttcacagagatgtgaagacacccaacatccttctggacaagaatttggtggccagatatctgatttgggctctcacggcttttaatgctgttacacccatatatctactggtgctgctggcactctggt

SEQ ID NO: 394791 - DNA, 332 bp, Oryza sativa
ctagatcgcgagcggtcgtcctttttttttttttttctcttcatttattgggcgtttttttttttgctaatcatttcaatcaaacacgtaccatacaaagcatcacgcgaaaacattaaagcatctaatctagatcaacctaagtagtaaaaatctactagtagtgaatcaccggcgctaggttgcgcttgtacaagcttctcctccggaagaaatccccgaacttccttaggatcgacctcctcttcttctgcttcatggcggggtccaggtcgccgtactgcccgccgtcgaagtggtcgaactcgtagtcgaagtcgtccatggccgcc

SEQ ID NO: 394792 - DNA, 1035 bp, Oryza sativa
tcgttaagctagagcacgagggtcaggcaacgcgtttctctctcgctgaaaagtttgctggatttgctcctctccctctctccgccatggaggaggcccagtttgtggagtcaaaggatggaaccatctcagttgcttctgcatttgctggtcaccatgaagctgtgcaagatagagaccacaaattcttgacaaaagcagttgaagaagcgtaccggggagttgactgcggtgatggaggcccctttggagcagtcgttgtccgtaatgatgaagtagtagtcagctgccataacatggttctgaagcatactgatccaactgcacatgctgaagtgactgcaataagagaggcttgcaaaaagctcggaaaaatcgagctctcagattgtgaaatttacgcgtcttgtgagccatgcccaatgtgctttggtgcagttcatctctcccggatcaagaggctggtgtatggagccaaggcagaagctgccattgccattggatttgatgacttcattgcagatgctctgaaaggcactgggttttaccagaaggccaacatggagatcaagaaggctgatggcaatggagccctgattgcagagcaagtctttgagaagaccaaggagaagtttcagatgtactaatgtgcaggatagagtctcagatacgccaaagtccccctgatgatctagggaggaataaaactacaatgttcagcttttccattatttctcaaactgccaattcaaatgtattttcatcctgataacatttcaattgtctgcacgtctccagctctccgcgactcctcgccgccgccgccgccgccgcctgatctccccggaatttatcgtcggagagacgagatcccggcgccctctctctgctcccacgccgtcggagtaatttctccgcgggggacccgatctccagcttcagataccgcctccaacgtctcgctcttcctgcttagatagatctcgggctccccgtacctcgtactcctagggctaatggatcagaaggttcgac

SEQ ID NO: 394793 - DNA, 351 bp, Oryza sativa
gaatgagttcattcagtacactgattcactcactcccgagtcccgacctccctcgcacgtgcttccctgcgtcgaccccgtcccgacccgtccccctcactcgccgccgccgccgccgccgccgacgccgacgccgaggacgacgacgacgatgccgcggaaggcctcgtcgacctcagattcgcgcctgaaatggcggaagtggaagcggaaccccaccgcgtccccgtcgccgtccaaccgctcgtcggccgccgccgccgcggcggaccacttcgacgactccgactttcgcggcgttaacgaggacgacgactccgcggtccccgaggacgccgactactaaaccct

SEQ ID NO: 394794 - DNA, 434 bp, Oryza sativa
cgccgtcgaacacctcgccgccgtttactctctctctctctggctgcagcggacgacgagaacatgcaaggaggaggcggcgtgagctgcgcggctggccggggacgcgccgtcgtcgacgagggggggaggcggcggagggatgctggggctgacgctgttcgacccgccgggaggggagcagccggcggagaggatcgggaggctggtgcgggagagccccgtggtgatcttcgcgaggagggggtgctgcatgtgccacgtcatgcgccgcctcctcgccgccgtgggggcgcacgccaccgtcatcgagctcgacgaggccgccgaggaggccgcggggttcgcggccgccgccgccgctgttccggcgctcttcgtcggcggcgccccagtcgggggcctcgacggccttatgggccttcacctcagcg

SEQ ID NO: 394795 - DNA, 377 bp, Oryza sativa
tcgttctccttccacgaggctcctctcctggtcctcctcctcctcctccgacgacggcgccggcgccggcggcgagctgtcccgccctcgcaggcggtggcgggcgcttgtcctggggctcggggtgaggaggaagaggagcatggaaggggtgttcgggttcagggagatgatgggggaaggagttcatgggcatgttcctccccttctttggcaagatggttcagaaagtggtttcagatgaagcagagaaagcagtttgtcagacaaggcaccacaccagcgccttcaagactgctagtgggattggatcagcatcgttcaaggtatcaacttcgtgttcctgaatgaactaaagcctgtttacacactgatga

SEQ ID NO: 394796 - DNA, 364 bp, Oryza sativa
ttcgtagtgtgggagctaaatggactaacatcaatatagcaccagatgagaaagtggagtcatttgaactggattatgatggaaagcgtgaccgctggaacggttacgacccatcgacgtacacccgtgttattgcagattatgaagctagagaagaggctaggaaaaagtatctgaaagagcaacagctcaagaaacttgaggagaaggatggtgaggagggtgacgagaacgtggctagtgaggaggaggatgaagaagatggtttgaagatagatgaggctaaagttgatgagagtgctcaaatggattttgctaaagtagagaagcgtgtacgtacaacaggtggtggaagcactggaac

SEQ ID NO: 394797 - DNA, 369 bp, Oryza sativa
  unsure (1)..(369): unsure at all n locations
ctcaccaccattattttcttctctcctcttctcttcttcctcctctcctctcctctcctcgctctccatccatctcgtcttcttcttcctcctcctcagcttcgagatttcagcttctccaaacccccattcttcccgccacaagctctgctctgtgctttgctcgctcgcctttcccgccattggtgtgcttcgctttcttggcttcaaagatccgacgagctctgtgatagctggggagaagaagaggaggagaggaggatgctgggagcgagccctaaggccaagaaaggcgcgacggtgaagttcgggtcgatgaagaatcctcctcctcccccggtggttggngccgccgccggagcagcggcg

SEQ ID NO: 394798 - DNA, 768 bp, Oryza sativa
tcggtaagcactgaagatcaatcagtagggggccggttggatgttaatgatgcaggcactgaaaatgtgggttctattgtaacgcctgtgcgtctaccatttactaacagttctgatatgtcctacagtacacccagcgagtataccatgcctctccaggcagaagatgctcatggagatgtcactaatctcagcgcgtctgaactaaaaaataagcgttctagagagtggtacgcatcattgaccaaagagcaaaaggaagatagaaacaggaaggcacgcgatgccaggaggcggaggaaggatgaatctcaaggtaatgtgcctaaagctacgacgtcaaaattttctactcctactcctacgcttggagatatttctattgtcaccgctggagatcccgcaggaagggaacaatgggttagtaatgatgaattattggacacccctacaacaaagggaacaggttgacaaagcaatatggactatagacgcagtggaagcattgtaggcgtgtgcaaaaaatggtgaagggatgcatctagcacaaatttccttcctgatgaacattcattgttaacagtaggtaattgtataaaattaacttacaattccatttcaatcgccatataggacttctttggagaggaggaagtttactatatttgaacaaatttttgtaaagtcttatgttccaaacaagccctgaagctaacagatggcaagtatgtgatgtgaactttgtgcggtgaaaaaaaaaaaaaccaa

SEQ ID NO: 394799 - DNA, 885 bp, Oryza sativa
  unsure (1)..(885): unsure at all n locations
gaggaggaggagtcgaaacggaagccgcgtcggtnttcggtctggtccccccccggagccacgccacgccatcgtcgtcttcctcctccacctcctcctcgtcgtcgtcgtcgtcttcttcttcttctccccctgcaacgcaatcccatctcatcgacctgcttgcctgcatagtgcgcgccaaccccaaccccttcccctctccaaatctcctactgccccggccccgtgcttcttcgacctgggcacccgcactggtgcgggattggactcacagattctagggtttcgcccctcgcggcgattccaccacccaaggtttgcgttccttctgttggtgcatacacgactccacctatcaccgttatgttctcgctgcgcaatgcatagaagctgcactcacgaggctccatctcctatgcttgtaccagtatactaaacaatggccaaactttccaatagttggtcgtagtgcacctcgcaaacccaacgaaagcatgaggcttcttgtagtaacagttattggggtgatgttaggtttctttattggaatttcgttcccagcagtttgcataacaaagctccacttcccatctagtattgtttcgtacatagaagacaagacctcagcattgacagctcaagcgatactaaatcatgcttggacagctgctaggaatgcaaagggaaatgatactgaatcaagctcagacactgccatgaagatttatgtaccaacaaaccccagaggagcagagagcctggcaccnggtattgttgtaccagagtccgattttcatccacgcaggggttngccnccnggttaatgggnccaanggggggcccggtnanggaangggcccggtgnntcccnttttncctngc

SEQ ID NO: 394800 - DNA, 578 bp, Oryza sativa
  unsure (1)..(578): unsure at all n locations
cccacgcgtccgcccacgcgtccgcgagcacttctctctcttcctgttattagctatagcagcttaattagcttaagcacaaaaggtacagtaagcctaagctagctacacactaagcaagcttattagccatggcttcatcaccaagtctgccattggtgacgtgtgccctgctgctgctgctggccgtggcatgccaggctcacccttactggccactggagttggcgtactaccgcgacaagtgcccccaggccgaggccgtcgtcaaggccgtcgtcggggaggccgtccgccagaaccccggcaatggcgccgccgtcatccgcatgctcttccacgactgctttgtcgagggttgtgatgcttcgatcctcctggacccgacggcgttcaacccgacggcagagaagctgagcgcgccgaacaacccgtccatgcggggcttcgacctcatcgacgcgatcaagcacgccgtggaggcngcgtgccgggcgtcgtctcgtgcgccgacatcatcgccttcgcggcgcgcgacgccacctacttnctcagcggcgggaaggtctacttcgaca

SEQ ID NO: 394801 - DNA, 298 bp, Oryza sativa
  unsure (1)..(298): unsure at all n locations
cgagccacagagagagggggagagagtgtgagtgtgagatcacaactactgtagtgtttgtgtgtgcgtgggatgatggggacggaggctacggcgacgacgacggtgagcggcggcagtggcagggcggcgccggcagcgctgtgcctgcaggcggcgcgcggcgcgtggtcgcggacgagcaaggtgctcgacgtcgacgccgcgtcgcccacggcggcgccgttcgctcgggtcctccgtcggcgtgccgttcctcttggaagaagcgcccnggaagcctaangttgttgttgtc

SEQ ID NO: 394802 - DNA, 445 bp, Oryza sativa
tctaattcccccttccgccgccgcccccaaacctcaacccgccgccgccgccgacgccgccggcgagatggcgctgtacctgctcttcgagtcggcgtccggctacggcctcttccacgcctacggcatcgacgagatcgggcagagcgtggacgccgtccgcgcctccgtcgtcgacctcgaccgcttcggcaaggccgtcaagctcgccgccttcacccccttctcctccgccgtggacgccctcaaccagtgcaacgccatctccgaagggatcatgaccgacgagctgaggagcttcctggagctgaacctgcccaagcccaaggaggggaagaaggccaagtacagcctcggcgtcgtcgagcccaaggtcggctcccacatctccgaggtcaccggcatcccgtgccagagcaacgagttcgtccaggagcttctccgc

SEQ ID NO: 394803 - DNA, 407 bp, Oryza sativa
ctcccctcctccctctcctccggccccgccgccagagcccttccagaagcttccggagcccgcgccgccgatctgatcgccgccgcgtgccatggccgacgaggcgaaggcgaagggtaatgcggccttctcggccggccgctacgaggaggcggcgcggcacttcactgacgccatcgcgctcgccccggggaaccacgtcctctacttcaaccgttccgccgcgctcggcttggtccaccgttactccgaagggctcgccgacgcctagaagaccggcgagctgaagcccgactgggctaaggggtactcccgccttggagccgtccacctcgcttcggggggcagccagagcgccgtatttcgcctacgagaaggggtttcgtcctcaacccccacccaccgag

SEQ ID NO: 394804 - DNA, 372 bp, Oryza sativa
  unsure (1)..(372): unsure at all n locations
gttcaacttcgtgacccaggtggtggacgtctcgccggagtccatcgcgcggatcaaggaggacttcagcgcctccccgacgggcggcggccaggcctgctccaccttcgacgccgtgaccgccgtggtgttcaggtgccgcgcgctcgccgcgtcgtcgctccccgacgaccacgaggtccgcctcgggttcgccgccagcacgcggcacctgctcgccggcgttctcccggcggtggacgggtactacggcaactgcgtgtacccggtggggatcgcccgtcaccgcggcgcgtgcggggcgcggcgctggcggaggtggtgggcgtngtgcgggaggcgaangangcgctcgcggcgggttcacggact

SEQ ID NO: 394805 - DNA, 475 bp, Oryza sativa
caccaaccaaccccaccccccaaccctctctctccctctcggcctctccgcttctccgcccacctcacctcgccgccgccgccgccgtcgccgccgcggcgcaggcagcggagctcggcgcgcctcggccgcgccgtcgtctaccgtgcgggcgccgctcccgcgtcgcgcctcgcgcgcgcgcgcgagcgcgagcttaccctcctctctgtgcatctggcgacgactcggtaaggttggggttgtgcgccgcccatgcgcgcggctccctcgtggccactgcctcccgctcgccgtgtcctctgccacgggcgcgggtaccctcccatccggcggagttggagagtcgtgcctagggggaatctcagctgtcgggcacccgatctaccctccaaggagttggtctatgaccgggaatagctctctttgtgagataaaactaaaaggtcccttgacgctggaagggtctgctgga

SEQ ID NO: 394806 - DNA, 775 bp, Oryza sativa
gtcgcgagtgaatgatggtatctgtgattgctgcgacgggagtgatgagtatgatagcaatgtcacttgcaagaatacgtgctgggaggctggtaaagcggcaagggataaattgaagaaaaaagtagctacatataaaagcggagttgttattcgaaatcaggaaattcaaaaggcaaaagtggcatttgctaaagacgaggcagactagcgaaactgaagggtgaagagaaaatactacaaggccttgttgacaagctcacagaacaaaagaaattgatagagaaggcagaggaagaggaacgcttaagaaaagaaaaggaagaaaagaggatgaaggaagaagccgaaaagcaagctgctgatgaaaagaaagcgtcagatgcctctcaggaggtagattctcaggaaaatcatgaaactgtgcaagaagatgagagcaaggtagctgaacatcatgatggacatgccacgagccatgacaatcacacaccagaaagcgagtcatctgttgagcagcatgatcctgaaagccaagatgacattagcataaaagccgcacctgctgatgaatcaccaccagaggagacatctgcagcacctactaaagagcaggaatccactcctgctgactcagaaggtttatcaagagaggagttaggtcgtctggtagctttcagatggactggagaaaaggttgatgaggtcagtaaagatgataaaaatgagcatgaagctgagcatgatatgccaggacattcagaagaaacacatg

SEQ ID NO: 394807 - DNA, 506 bp, Oryza sativa
tttcattctcaagactctgacacaatcaattgctagccttctatactcattagcaagtgatgcaaggcttttcggaattgcactagttgagcgagtatggcgaccctggtggatgtgatttttgttctccaacatggtagatgaattaatgaatgactctccaagccctttcaactgaatccgctaaatattccaatgaatcactaagagatgctaacagtatcaatttctggtcatcatggatcaagttttcctgttttattgggcacatatccaataggagatcacttagttcaatctctacttctacagcttctgcatctggaatactgtggtcaagttgaccaaaagaattttgtaaagatagatttgctggatccaagcgcattaaactttcaacatcattccttgagaggagaatataactttgtttttcaaggacagcctccatataggatgcacggcatctttcatgtgtacgttctaaaaatgtgcgaacatactca

SEQ ID NO: 394808 - DNA, 563 bp, Oryza sativa
  unsure (1)..(563): unsure at all n locations
nnnnnnnnnnnnnnnnnnnnnnnnntttgcctcaaagaaaaagaaaatgcggcctaatggtgaccacgacgacgccggcgaggcgtggcgaggtccggtgaggtgacgttgttgatgtcagccctgggcctcgatcggcgacatcatcgccgagaaccggcgcttctggatgcgcggcgggaggtgcttgttgtacctcttgggcccgaccgtccacggcaggaagacgccggtgccgctgcggctcatccgcttgttcccgccggcgggggccatcaccatcggcctcgccggcgcgggcgcggcgaccatcatgacgggcgccgcgcgcacggncatgccccacgcangcccaacacgggcttgcggcgcccgggccgtaccgataatngccccccgtgcttgcgnttctgcttcatgccggcgccnggatnttctctgctgctgcggnggggncctgccaaacttcntgcctttgttgncanngaaagggttaattccccggttcaangctcccccncaaattntcccccgggttgananggcccaattgcaccntccct

SEQ ID NO: 394809 - DNA, 406 bp, Oryza sativa
tatctgaaatcacaaagcacaacaaaacctcattgcatctagctagcttttctgtctcctgaatttctgatcagccagcgaaaacccaacgcaagcttggtcaccatggggtttgcttcctgcgtcgccgtatgcctcgcgttcgccgttctcctcccttggcacgccacggcgacgtcgccgacgggcacgatacagcgggagacgaagcagcagatcctggccagcatcccgccgcactggcaggagaacccggtgctgttcctgacgtcgccgtcgggcaagtacacggcgtacttcctgcgcagccagaccgcgccgggcgccggcggcctcggcgccgacttctgctacgtggaggtgctcgacacctcggatcccggcgcggaggggccgagcgtgtggg

SEQ ID NO: 394810 - DNA, 484 bp, Oryza sativa
tctcctccaaccgatttcgcagcgccagcccactgattcctcaccgaattttttcattttttttctctctttccattctccccggcgatcgagtagccggcttctgctcgccgcccgcgcgccggagggaggcgaggtccaaagccggcgaggcgccatgcaccacgaccccaaccccttcgacgagggcgccgacgagaaccccttctccaatggaggaggtggtggagcacgtcgtggtggtggtggcggcggtggtggtggcggtggcggaggcaagtctcagttctcgttcgggttcggcggcctcggcggcggcggcagcaagggcggtgccactgtcgacatccccctcgacaacatgagcgattcgaagggcaaggggaaggagctgttgcaatgggaggcagatctcaagagacgagaggcggatatcaggagaagggaggaagctctcaagagtgctcgggtgcccatggaggag

SEQ ID NO: 394811 - DNA, 488 bp, Oryza sativa
gcgtttagtaggaaccatggcgacgaggccggcgcggttgtctgctcccgcagtggcggctatacttgtcgccgccttagccttgtgcgcagccacggcgtcggcggcgaacgtcacgacgacgacggcgacggcgccgagcggcgggtgctacagccacctgttcaccttcggcaactcgctgatcgacaccggcaacttcatccactactccacctcgccgggccccgtcgcccgctccccctacggcgagaccttctttcgccgccccaccggccgctggtccgacggccgcctcatcgtcgacttcattcgtggagaggctggggttcccgtactggacgccgtacttggccgggaagagcagggaggactttcggtacggcgccaacttcgcggtggcgagcgggacggcgctgaccagctgctgttcaagcgaagcaccttagcgtcgccggcattacgccctacttccttggcggtcaggt

SEQ ID NO: 394812 - DNA, 575 bp, Oryza sativa
  unsure (1)..(575): unsure at all n locations
agcnaagaaagcggngncttaanccgcgctaatcacccactaatactcttgtttaatcactnaggcctntcctcgcctcgcctcctccgcctgcttaaactaatctctcccccctcgtactcccgggccgggagggcgacgaggaatccatccagctcggagcacgaggtcgcgcccaggctgggatccgatcgggcggtcgatgccggcttcggcggcggcggaggcaggctggggatggcggggcggcgagctatgaggccgagcggcagcagcatgcgtggggtggtggcgcggctggccgccgcgcggtcgcacggccgtgtcgttcctggtggcggcggcggcgggcgcggcgctcgtcggaggggtgtacttctggctggtggtctcgtcgttccgcctccccgactcccgcgccgttgggtgcttgcctgatggcgaggggtcgtgggcgatcgggatgtactacgggaagagccccctcgagctccgccccatcgagctggaagggaggagcaatgggaacagctcggcgtggccggtggcgaaccccgtgctgacctgcgcgaccc

SEQ ID NO: 394813 - DNA, 351 bp, Oryza sativa
gagtaaaaacctgacaataatatgctactacagaagtatttggacaaggcagcttcagcagcagcaactcaagcacaagatcactgaactgattacaggcagcttaactgagcactcactcctaatcctcctcctcactcccccactccatatcctacacctgactactttaatcaccctcccaaacacaaacaacagctagtagaattatcacaagtcaacaccagcagttaacaatgagaagtaaacattactaaacacatagtaggccataccaacaacatggagtagatcaattctcatccatggcggctgttgctgcggcagcggcggcggagatcaccttggcct

SEQ ID NO: 394814 - DNA, 448 bp, Oryza sativa
tatttgaggaaaggggcaattaatgctattcaagatctatatgaagttgttcatcatgaagtgctgtctggtgatatgagtggcaatattgatgaatgggaacagattaagcaagcaagagctgaaggccgtctcttcaataatctcaagtggccaactgactctggattgaaggacttgatcaaacgattgtactctcttctgaccatcaaggagtcagctgcaaatgttcctaaaaacctggaagctagacggagattggagttctttacaaactctctggtcatgcacatgcctgttgcaagacctgtttcagaaatgctttctttcagcgtatttactccatactactccgagactgttctttatagtaaggatgatctccagaagagaaatgaagatggtataagtacactattttatctacagaagatttatccagatgaat

SEQ ID NO: 394815 - DNA, 504 bp, Oryza sativa
  unsure (1)..(504): unsure at all n locations
gaataatatatggcaaattacttccttttcaaaatctaggataccgttgacttttcgtactaacatttgacgttcgtcttattcaaaaatttaatataaatatgtaattgtataagctaagattatattgtagaaatttaatataattaaatgatataaggcaaatggtcaaacattatgctaaaaatcaatgacgtcatacattttgaaatggagggagtacttgatttttgttcttgtgagatgaggttgcaagtctcctctgtaatgatgtataaacttgcctggccaaaaataataataataataataatctggcccaactgttgttaggtttattttgtgacagaaaatttcgtggtagtaaaaattccagaaagtaatagtagtatatatagtagtaaataataacaaagaaggattttttttgtccatgtggagcatactgtgcccatggatctatttagttggngatgtgggccgaataagctgtttcgtgggcct

SEQ ID NO: 394816 - DNA, 522 bp, Oryza sativa
tcgttctcctctctcctctctctcgccctctccacactggcacactctctgtgaatctctccttctgttcctggttaattcgctcttcttcctctcgtatctccgccgcgatcgatggccatggagaaggtggacgccaaggagagggagaagatcgaggccgtccgcaagaccctccgcaagcaggctccgctcaccgccaagcaggcgatgtactgcaacgacgcgtgcgtggagcggttcctccgggcgagaggggagagcgtgaagaaggcggcgaaacacctgagaaccgtcctgtcctggagggacaccatcggagccgatcacatcatcgccgacgagttctccgccgagctggctgacggcgtcgcctacgtcgccggccacgacgacgaggcccgacctgtcgtggtctttcgaatcaagcaggactacccaaagttccactcccagaaatcgttcgtgcggttactggtgttcacgctggaggtggccgtgtcatgcatgttccgcttcgtc

SEQ ID NO: 394817 - DNA, 637 bp, Oryza sativa
ccttcacaaggaactcaagttgagatcacaacaatggccacattgctattgtcaagcaacaagaagccctgcatctcgtcgtcgttgctgctgcttgtgctcctcctcctgctcgtcttcttcgcacaccacggcagttgcagcaggcctctgcctcttccgtcgccgacgccgatgcagccacagctgaagcacgaatcggagacagcatcagcagatacgaccacgacgactgaagaacaagtgatgcagcagcagctgtcttggttgagaagcatgaagcccagagggaggccacagccatccagccccagcaagcgcacaaactagcttagctagctactcgtatttgccctcttcctctccctcctctgtaggctctctatcttagttgtgtatgtatgagtgtatgacacacgctacttggttttcttgtttcattctttttggtgattcgttcgatatacagaaactatgtacatatatacacatgagatcgatttgctagttagatcgcaacaattaatggaacgttattatttggttgccaaagcaaacccttgataatttggggagagcaagatccgggtttttccattggaacttggcctactggttaagagaaattttggggata

SEQ ID NO: 394818 - DNA, 534 bp, Oryza sativa
ctcgcctcgcctcttctcgcggccaacgagagagggagagggagagctaggaccaccgccactgcctcgggaagtaggtggctcccctgctttccctcctctcctccgccgtcgccgaggcagccagccaagtcgtcccagcaggtggtaggctactagtccgggtggccggcagtgagcaggaggaatcatctctggcgttcttgtctccgaggaactttgattctttctgggaggggatttggtgtgctgctgctgctccagatgcttcccaccaacaggaacaggccccagcagaggcctgccagatcttggtatttcatctcagacatggacttctccgatccgaagcgcaagccgcggtacctcagtaagatcctcatggtggcgctcctcaccgccatgtgcgtcgtcatgctcacacagccgccctgccataggaggactcccagtgtgttctccatccatgaaccccgcgtcacgcatgttctagtgacgggcggcgctggatatatcagttcgcacgctgcgctt

SEQ ID NO: 394819 - DNA, 678 bp, Oryza sativa
tcgctccctcccagtctctcacttctctcccccttgtttgcctatctcgccgcttccacctccttctcttcgcttcgatctccccgacttagttgatgaggatgcagattgaagatgatggcagcaccggccgaagagggacgagctctcctcaagaaagcttgttcctcttcagccaactccgccgtctatcccctctttatcggatcccgccgatgcctccgaggagcttcttcatcggatccgcacctacatcgctgatgtgcttctcccctggatcctcgtcgtgcccttccagatccatcaccacctctagctagtgatttagcggcggcttaggctaacgaggctcgtgccagcgtgcgaaaatgtgcaaccggcggtcaaattcggccagtcgcctcgcctccttccctcggagctcatggccttaatttggcagccacaagcttggcggccatcaaatccggctggggtgggtgacagcagaggtggtggtgtcattcttgtctttctatatttatgttgttggatgctgacatatgcatgtttgagtctgtaatttcgttcttcgatattcttgcaagccttttaaaaaaccgactaaaaaaaaaaaaagggcggcgaacactcaggggctccgcgccgcggacgccacatcggtgtcgcgctataaga

SEQ ID NO: 394820 - DNA, 414 bp, Oryza sativa
ctccttctcgtcgcgggggggcccgtctcggctgcggcggcggcggcggagtaggccacggtggtggtggtggtggcgagtggggggaccatcgccgctggtggtcggttcagtcgggcgggcgggcgggctcaccggtcgttgacgaggagtttggttgaggggggccctgcggcatcagcggcggcggcgggatgtacgtgccgcagccatctctctccgatgcggccggccgcgacgccggcgaccagcctagggtttaccaggtttggcggggaagcatcgaattcttcttgcgagggaggtttatatttgggcctgatgtgagatccatatttatcactatgttcctcatctatgcaccagtggtggccctttgcgtgtttgtcgccagacaccttattgatgactttt

SEQ ID NO: 394821 - DNA, 518 bp, Oryza sativa
  unsure (1)..(518): unsure at all n locations
cncacgcgtccgatcatcatcattcatcaatcgtcgcctgatcgcctccagcgaaattcttcctccatttctctctccatcgaatctcatcccagcagcagcagcagcagcagcagccgccatggattccaaggcggacgcggagtcagccacggccagggccgcccgtcgtgtcgccgcccgtctccgccaacccctacgtggtctccgccccctccgctcagccgcccgccaagagcgccagggagaatctccgggagaagctcgacgtggtcgggaggaggttcggggacgccgcgcgcaagaccgagggcatcgtcggcgacatctggcagcatctgaaaactgggccaagcattgctgatacggcgatggggaggattgctcagatatccaaggtgatagctgaaggtggatatgacaaggtgttccaccagacgttcgagtgcctgcctgatgagaagctcaagaaggcgtacgcatgctacctttcgacctttcatggcccgatcatgggc

SEQ ID NO: 394822 - DNA, 507 bp, Oryza sativa
tttgtttgtcggagtgggcgatggtccatgggatgagcagctgatgcactgtcaggaggatcgacagctgtttgacaatttccagtttgttgatttcaccaaaataataatgtcaagagaaatgcctgaaaccgagaaggaggaacaatttgctttagaagcgctgaagaagataccgagccagtacgcagccataatcagcaagaggatcagtgatctggctgcagatgcgccttcaaggatgcctcttcctccccctcctccaaggcctgttatttctacctaataattttcaggacaggggaaatgccagttgattgtccagtcccccaaacctagcccttggattaagtttcagagccgggagatactattaacctcttaggggaagggcaggcccctgtaaacctttttattttacaaagtggttgtgtaggcaatgcaagcctagtctgatgacttagcagaatacttttttaatttaaatattatttacttcattacttc

SEQ ID NO: 394823 - DNA, 390 bp, Oryza sativa
atcagttttaggattggcagccttatttggaatatttttcttagtaaagaagcgaagaacaatggcacaacaaagaaaagaactgtatgacctggttggacggcctgatgtctttagtagcgccgaactcaagctagctacaaataatttcagttcacaaaacattcttggagaaggcggatatgggccagtgtataagggtaagctacctgatggaaaagttgttgctgtcaaacaactttcagaatcatctcatcaagggaaaagccagtttgtgacagaggttgctacaatttctgctgtgcaacatcgtaatcttgtgaaattgcacggctgctgcattgatagtaaatcacccttgctggtttatgagtaccttgaaaatggaag

SEQ ID NO: 394824 - DNA, 568 bp, Oryza sativa
tcgttctctctcgccctcgccgccatcaccatggagcatcatcgtcatcggggagcggtggttctcgtggtggcggcggcggcgatggcgatggcgatgtcggcggtgaggggggatttcgcggcggacagggcggagtgcgcggacaagctgatggcgctgtcgacgtgcctgacgttcgtgcaggacggcgcgtcggggggcgcggcggcgccgacgccggactgctgctcggggctgaaggcggtgctggcggcgagccgcaagtgcctgtgcgtgctcatcaaggaccgcgacgacccaaacctcggcctcaagatcaacgtcaccaaggcgctctccctcccccagctctgcaacgcccccgccaacatctccgacttgcccaaggctggtgaacttgccaccaaactccaaggacgcgcagatcttccaacagttcgcaagcagcaggctgccatgcagggcagccccagtgcatcccctggtgggtcaagcgcaccggccgcgggcgcgcagaagagcggtgcggccgtgttgcggtggttgggagtggacggagttggtg

SEQ ID NO: 394825 - DNA, 619 bp, Oryza sativa
  unsure (1)..(619): unsure at all n locations
cacgcacgcacgcacgcctttccttccttcctccctcccctccctccttcccccacccgcttcccttgccgtcgccgccgccgccgaccgccgcgggaggggaggtccccggcgccatctcccagaaatggacgcctgtttttcaacacagcttattgatggagatggcgttttcaatgtttctggattggagaacttcatgaaggaagttaaaatgggcgaatgtgggctttcatatgctgttgtgtcaataatgggtccacaaagtagtggaaagagtacacttttaaatcaccttttccgcaccaatttcagggaaatggatgccttcaaaggaaggtcacagactaccaaaggtatatggatggcgaaggcccataatattgaaccatgcactcttgtaatggatttggaaggcacggatggtcgagagaggggagaggatgacacagcctttgaaaagcaaagtgcactgtttgctttggctgtttcagatattgtgttgatcaatatgtggtgtcatgacattggagaggaccagggctgcggaccaaccccttttcgaagactgttttcccgggtatgatgnggattgttccagtccncgtaaaccgacatt

SEQ ID NO: 394826 - DNA, 425 bp, Oryza sativa
ctctatctcacttagcctgagctgagcaatggggctactccggcgaggtagtagcggcggcggcgccgtgctcgtggtggtggtgtgtgtaggctgcattgcggcgacggcgatggcggcggcggcgggcggcggcggaggaggaggggagtgtcccaagtacaaggactcgaagcagccgctgaacaagaggatcgacgacctactccggcggatgacgctggcggagaagatcggccagatgtcgcagatcgagcgcgagaacgccaccttcgacgtcatgcgcaactacttcattgggagcgtgctgagcggcggcggcagcgtgccggcggcgcaagcctcgccggcggcgtgggtgtcgatggtgaacgagatgcagcgcggcgccattggcgacccgcctcgggatccccaagatctac

SEQ ID NO: 394827 - DNA, 502 bp, Oryza sativa
  unsure (1)..(502): unsure at all n locations
aaacgcgaacacgcgaggacatggacgacatggccaagctagctcagatgccgcgcgctcctctgctcgtcctgctgctgatgctgggggtcggcgcggcggtggccgtgccggagtacagggaggcgccgcacttcaccaactcggcggcggcgcggtgcccgccgccgctgccggcgacggacgcggacgcggcgtgctcgccgcacgcggcggttgcacgtggccatgacgctggacgcgccgtacctgaggggcaccatggccgcggtgctctccgtcctccgccacgcctcctgcccggagtccgtccacttccacttcctcgcctcctcctcctcgtcgccggaggcggcggcggcggtgcgggagctgagggacaccgtgcgggcgtcgttcccgtcgctggcgttccgggtgtacccgttcgacgagtcccgcgtcgcggggctcatctccaccttcattcgcggggcgctcgaccgnccgctcaactacgccc

SEQ ID NO: 394828 - DNA, 431 bp, Oryza sativa
  unsure (1)..(431): unsure at all n locations
aataaagaggaggctggtggagagcccctccctctctggccctgatctcctccccctctcacttgccctgcccaagcccaagagaggaatccaagctgctgcattgacggcggcggcggcggcggcggcgaggagatcgggagcaatggcggaggaggcggcggcaggcgggctgtactactgccacatgtgcgcttcgacggtgagcgccgtggcggcggcggagggggaggtggagatcaagtgcccgtactgccacagcggcttcgtcgaggagatcgagtccgcgcgcggcgtcgccaccggcggcggcggcgcgatctcctccgtctgggcccccatcatcgacggcatggttggcggcggcggcggcgacgccgtccgccgccaccgccgcagcncgtcgcctcgcggacgccgncggcgcggac

SEQ ID NO: 394829 - DNA, 637 bp, Oryza sativa
ctcctcccgccgccgccgcacgcggaaccctagaaaaccctagcagcggcgagcaccggggagcgggcggccatggcggcgacgacctgacggcgcggatggcggggcagatggactgccacctggtgttcccgctgctggagttcctgcaggagcgtgcgctgtacgcgaacaaggagatcctggaggcgaagtccgcctcctcagcgggaccaacatggtggactacgccatggacatccacaagtccctccacgacaccgacgaggtccccgacgacatggtcaggcgccgcaccgacgtcgtctccaggctcagggcgctcgacgaggccaccgcccccatcgtctccttcctccagaaccagcagctcgtccaggagctcaggccagacaagcagtacaacctccacatgctccaggaccgcttccagattggtcctgagcagattgagactctgtatcagtttgccaagtttcagtttgactgcggtaattactcagatgctgctgtctacttgtatcaataccgtgctttgtgcacgaacagcgagaggagcttgagtgccctgtggggaaagctggcagccgagattttgatgcagaactgggatgttgcactggatgagctcaaccgt

SEQ ID NO: 394830 - DNA, 524 bp, Oryza sativa
tgtttgtgtcagcaactacaaagagtctatatagctactaattaatcatcctcgatcgatcgatctcggtcgtgtatagcagtagcactgcatatggcaataagcagattaatggtgacgaagaagcagcaggcggccttgttggccgtggtcgccgtggcagctctggcgcaggtcgcggcggcggcggtgcatccggtgggaggcaatggcgcctgggacaccaccggcaactacaatgcctggtccgtctcccaaaagttctcccaaggcgactccatcctgttcacctatccctcctcgcacgacgtggtggaggtccccaaggccagctacgacgcctgctcacccgccaacgccctcgcctcctacaccggcggcagcaccaccgtcaagctcgacgccccgggcaagcactacttcatctgcggcgtgcccggccactgcgccgccggcatgaagctcgaggtcaccgtcgccgccgtcaccgtccaccaagcccaggcacaagaagggcgccgccc

SEQ ID NO: 394831 - DNA, 656 bp, Oryza sativa
  unsure (1)..(656): unsure at all n locations
agttgtctcaataagtttgcctgccctaagtgtgctgagatcatccttaatagcgatgatgctaaatcaggtgaacctatcgttgacagaaccactttttggccatccatcttccgttgagctgttgaggttccctggaggaattacagtaattcctgagcagtctggttctgtatgggcggatcctcttttcaactttgtgttgaacaattccatttatcagatcttgggtaatattacagagctaaaggaccagttgaagcttggattgaacttgaggtcctacgagaaagtatatttgcagttcaggaatgagattggatcttcagttgatgccccggcaactattgaggcatctgttctagatgggagcagcattcttttaccatatagattgaaacaactagctcagctaatcaaagaacccaatgcaaggaaccttgggcttaatcactctgtatttggtaaagtaaaaggtgttcaactgtcatcatacctacagcattcgatctcagatttatctccgagtccatctccttcaccatctccatccccatccccatctccatctccatctccattcccttcttcaagtgtaccaccatctttntcaccatctgggagcatccattaccctgcacctccaacatatatga

SEQ ID NO: 394832 - DNA, 474 bp, Oryza sativa
  unsure (1)..(474): unsure at all n locations
gtcggcatcaccagcctcagctgtggccggccgcgcgcgatccaagttgctagctagctaagcttttgtaactgagagtgagctagctaggtagctgggtattgggtattatattgcgagagatagagagagatgagctgcaacgggtgccgcgtgctgcggaaggggtgcagcgacgcgtgcgtgctgcggccgagcatcgagtggatcgacggcgcgcagccgcaggccaacgccaccgtcttcgtcgccaagttcttcggccgcgccggcctcgtcgcctccctcgccgccgtccctctccaccatcgtccagcgctgttccggtcgcttctgtacgaggcgtgcgggcggacgataaacccggtgagcggcgccatcgggctcatgtggacgggcaactgggacctctgccaggccgtcgncgacgccgtccttcgcggcgactccctccgcgccctctcggccgtgcca

SEQ ID NO: 394833 - DNA, 454 bp, Oryza sativa
cccatttctcacttactccggcgatcaccgtggttgagcgtcggcggcggaggaggaggcgatgattaccatggatctgatgggtgggtacgggcgggtggacgagcaggtggccatccaggaggcggcggcggcggggctaagggggatggagcatcttattctgcagctgtcccagactgggacgagcgagaggtcgccggcgccggcgcaggagcagcagcaacaggtggactgcagggagatcacggacatgacggtgtccaagttcaagaaggtgatctccatgctgaaccgcaccggccacgcgcggttccggcggggcccggtggtggcgcagtcgtcgggcccggcggcgtccgagccggcgccggtgaggtcgttcccgtcggcggtgtcgaggcccatgacgctcgacttcaccaaggcggcgtccgggtacggcaaggacgcc

SEQ ID NO: 394834 - DNA, 629 bp, Oryza sativa
  unsure (1)..(629): unsure at all n locations
agctaacccaacccaaaccaaacacgagccggacgagacggagcgctccctccctctctgtcgcccgcgacgccgcgaagccgcgggcgccaccgccgccgccgccgccgccgccggagatggacggctccggcagctgggacgccatagactggaaccaaatcaaggagccgaggccgccgcggagttcgtcccggggcatggaggacttcctcctcgaggatgaggaggtttacgcccagggtcatggtgttgttctactaaacacagatgaggctggcattctttcagtgacaaatttccgacttctctttgtgagccaagccacaaaaggcgttatagagttgggtaccatcccactaactgcaattgagaagataaatgttgacgtaaagcttcaacccttgccccgccagcatgataagaagcagccccgtgaacttcttcaagtcatcggtaaagacatgagggtcattgtgttcgattttcttcctaaaaccaagcagaaaaacgaagttctttgatgctttgagaagatatagcaaacctactcatctgtgggatctatatgcattttcttgtgatccctncactgtttatcagaaatctgatccaaagatgcggctctt

SEQ ID NO: 394835 - DNA, 495 bp, Oryza sativa
ctcggtcatcttcagctgggaaactcaatctatgattgactgggcaaacgaagacgctgcacgtccaaggctggcggcgaagcccaaagaacctgaacctgccaatcagtctcgatcatcagagcgtaaccagcgtctgagctcttctcatggcaccgatcccagttacaagaccagcaggtcaagctctgacaggagggaccataggcgctccattgattacgtcgaggatcaccgctctagtgattacgccgaggatcaccgcagcagcaagagaatgcgcgcgtcttctccatctccaaccgggtggtgacaggcacagcagagcgaggtccaggtacagttccaggaagcttacttacgaggattcatctccaccggtggtgacaggcacagcagagcgaggtccagtcacagttccaggagccttacttacgaggattcaagcgatgatgagcgcaacttcaagaggagatggggaggcaaaagatagat

SEQ ID NO: 394836 - DNA, 809 bp, Oryza sativa
tccgaatatacccttctcacctcgcgtagatcctcctcccccttcctcccaaaccaaatcccccaaaccaaaccaaatccctcattcccacctcggaatctctgcgcgcgatggccggaggcggcggcgcgggctcctccacgggcggctccggcggcggaggggggcgggagggcgactgggactgcggcggctgcggcaaccgcaactacgcgttccggtcgctgtgcaaccggtgcaagcagccccgtctcctggtcgaccccaacacccctcccgactccaagtggctcccccgcgccggcgactggatctgcaccggttgcagtaacaataattatgcatccagaaagaactgcaaaaaatgtggcctgccgaaggaggaagcagcaatgccagcattatcaatggcaggaatggccatgccagcttatgcaaattatattgctaggatgcaaggccttgctggctttaagatgaacatgaactttgggatggctggcaattcagctttgcaacagcagctacttgcaagtgcaaactggccttatgcgttggctggtagatatgggatgcaagctgctggctggccatttggcggcaacaacgcaaatcagttttcagcggctccaaaagactggcgtagggttgattggctttgtagctgtggatttcataactactcatctcgcacacagtgtaaacagtgtagtgctcctgtaccatcaggcattccctccacaacaatgaaaaccacagtaccagatacttcttccacattaggactaagcggttggcgtcagaggact

SEQ ID NO: 394837 - DNA, 443 bp, Oryza sativa
  unsure (1)..(443): unsure at all n locations
tcggttctgctctgaccgagcagagggccgcaacggggtgatgctgcccgaccgggggatcgtttggctctacccggacgtgattcgatgtgctgatgaatatccggaatgggccaaccactttttgagagaacacgatcgggcaatggtccaggtcgaacgcgtggtgcaaaccattctgaagtcccggcgctttgaggagtactatcacgccgctcgtctgcccaaccatccaatcgaagagcggttcactgcccctggcgaaggcgcgcgctgtgaccgtcatttgccgcttcaaaaactggattgctccgccccagttgccgtgcagcggtctcgtcaacctgatgaagcgcgaccccgccggacgcattcccttctcatcgttntgcggagtggtgacgaatgtgctgccggccatagaccgtcagatcagcacgggc

SEQ ID NO: 394838 - DNA, 519 bp, Oryza sativa
cccactacactacactgtgcacttctgcaggttgcaatggccaccatcccggaggtgccggcgagcgagcttatccagaccatgccgcgcgtcggcatgggcacggcggcgttccccttcacctcctcggaggacaccaccgccgccatgctccgcgccatcgagctcggctaccgccacttcgacacggccaggatttacgccaccgagggctgcgtcggcgaggcagtcgcggaggccgtccggcgtggcctcatcgcctcccgcgccgacgtgttcgtcacctccaagatctggtgcagcgacctgcacgccggccgcgtcgtgccggcggcgagggagacgctccgcaacctcgggatggactacgtcgacctgctccttgtccactggccggtgaaccttgcgccgggcagctacgacttcccgttcccaaggaggagatggcgccggcgttcgacatggagggcgtgtggcgcggcatggaggagtgccaccggctgggcctcgcgcgcgcca

SEQ ID NO: 394839 - DNA, 263 bp, Oryza sativa
catgtgcagagtgctgctttcttttagccatgcactggtccatctccatgcgtgcatggatgtatgttgcgttcagtttctgcatgtttgttacacctagtttgatcggtttggtgaatgttttctagttgggttcaaacttccctgttaaatttcctgcgtgaataaaatagagcatactcagtatgcatgagcatattggcatccaatataataaatttttttttgaggcttgaagaacactaccattttgttgcccttaa

SEQ ID NO: 394840 - DNA, 1257 bp, Oryza sativa
  unsure (1)..(1257): unsure at all n locations
gctccatctttgaagttaatgggaatcctattacaaaacacatgggtttcttaattttcaagtttagagagtacaattgcactgtggagtattacaggtctcctttcatagtccttcaaggtcgtgcaccagctggagcccctgcagtcgtaaaatatacaattagagtagatgccatggattggatgtctggccggggtaagtggaaggatgctgatcttttgatctttaacacggggcactggtggaaccatgagaaaacaatcaaaggtggcgcctatttccaagaaggcaacgaggtcaaaatggagatgactgttagagatgcttaccaaagatccatgcagacattgtttcattggcttcgcaatgaagttaacacaaacaagacccagatcatcttccgtacatatgctcctgtgcatttcagaggtggtgactggaagactggagggacctgccacttggaaactctaccagatgtaactccaattaaatcgctggaaccgtgggctgacctgcttgaacccataaatcatgtactggggaacagcatcacgaccaagctttgtcgggctggatatacctgaatgtgacctcagatgaccagctctgcgtaaaagacgggcccctctcggtgtacctgagtccttcagggcctgcatctcatcacaggcaggattgcagccactggtgcctgcctggtgtccctgatgcatggaatgaactcctctatgcccttgttcttgagaagaaagatggtgatgccccacaatgtttcaagtgtgggagctaaaagactcaacactgggtgataaaagccaaaggagtactgctggatggccatgtcctctcttactgaagcaaagctttcataactcataagctaggtagctgagctggggaggacacatttttggtagtacattagtacagtttggttggcaagaagttaagctgcaccactgtgctgtgattttcaattgcggaggttagcgaaaagagctgggcaaaggtaacagtagcccttttttttttttccgatagtgaaaatcattgcaacctctacatccaagtgtatatccggtcatggtaacaatagcttagcctgtattatgacggtgatttgtgtgtttcatacagaatgattggtgtaaatatatagcagctgcgaaatgggcagcttgtttcagttgtgtactactatgtaatttgaagaatttcgtttgctgacgcatatggttctgacttctcnnn

SEQ ID NO: 394841 - DNA, 499 bp, Oryza sativa
acggttttggcttcgttgtgatttaccatggcatgtgggccttgtagttgatggaacgtacgtcgaaattccagaggacgcagaaggtgtgattgttctgaacattcctagctacatgggcggtgttgatctttggcaaaacgacaatgaacatgatgatgattttggtttgcaatccatgcatgacaaaatgcttgaggttgtctgtatatctgggacgtggcatctaggaaaactgcaggtgggactctctagagcacacaggctagcccaagggaaagttattaggttgcatctccacagttcattccctgttcaggttgatggtgagccatggatccagccacccgggtgccttgagatatctcatcgtgggcagatgttcatgttgaggaggacatccgaagaacccaccgggcattgccgctgctatcatgagcgaggtcctcttgaatgcacagtgcaatggtgtgattgatgctgctcagaagagattgct

SEQ ID NO: 394842 - DNA, 456 bp, Oryza sativa
  unsure (1)..(456): unsure at all n locations
attctttctcctcttatccccttcgncttcctcctccccgcctacacgaccagttcctggtttctgctgccttccctcggtctggatcaacaagaggaggtcgtccaatggcgagtggtgggagcagcaatgccgggagcctgacgcagtggctgagggagaaggggttcgacgaggaggccatcgggcggatgtcgagacggtgcaagaaccttcacggccttgacgccggcgaggcctccggggtgtgggactacctcctgaacgtcgtcaagatcgagcggcggaagctccggtacgtggtcaccaagtgccccaaggtgctcaccctgtccgtcgacgacaagctcgtccccacggtgcagtgcctcaccacgctgcaggctaagcccggcgaggttgcgcaggccattgtcaagttcccccagatactgttccacagcgtggaggagaagc

SEQ ID NO: 394843 - DNA, 309 bp, Oryza sativa
  unsure (1)..(309): unsure at all n locations
tcgcgttagagagccagccagccagccagccagacagcttcttcttcctcgtccctgtgttgctgcttctgctgctgctgccgccttgtgtatagccttgtgtatctcctttggcttcttctgggtacctgccggccggctaagctagctgatcgccggccgccggctctcgttgagctcttcttggtgccggccgcggcgttgttagtgtcgtctttgctgggctgcaggaagatcagcagcaagctaagctagtagcctccaaggtgcccggagatgtcgtcggcgctggaggtggagggctcgggn

SEQ ID NO: 394844 - DNA, 805 bp, Oryza sativa
cattgatggtaggttctggatccagatcatgggggtgttcatgatgaccgtgttcatgctcgcgctcggcgtgccctacgaccactggacgcacccggcgcaccacaccgggttcgtcgtgctctacgcactcaccttcttcttcgccaacttcgggcccaacagcaccaccttcatcgtgccggctgagatcttcccggcgaggctccggtcgacgtgccacggcatctccgccgcgtccggcaaggccggcgcgatcatcggcgcgttcgggttcctcgtacgctgcgcaggaccagcacaatcccgacgcgggatactcccgcggcatcggcatccggaacgcgctcttcgtgctcgccggcacaaaacttcctcggtatgctcatgacgctgctggtgccggagtccaagggcttgtcgctggaggagatgtccaaggacaacgtcgtcgacgagaccgcccaagaagcgatcgcccaagcgtgatgtcataaacatgccgtctcgacgtgagtgactgaaaaaaaatgtatgctttattactctattggtgtgattacttaatctagttttgtatacttttgtagtgtctctccttttacagttgtggatttgtggggtttctctttctttctttttttttggttgaaacaattaaacttgtttgtgagattttgtgaactttccctgcaactgatataaatggcatacattcatttcaattgtattgtaaatggcgtgagcggctttgcaaaccgctaataatattgttacactttcgttaaaaaaaaaaaaaaaaaaa

SEQ ID NO: 394845 - DNA, 478 bp, Oryza sativa
ctgttatttggggattttcggcccaatctcgcttgtggcagtaccctcccgccgcagcggcggttctcgataggcggaggcccctcccctgatctcgcgtggagcggaagggagatccatgatccatctagggaagtgttggagaattttaatcataaattgacatgtaaaggagaggaggcaagctatctgtaactgaaatagtttcggtgggataccatggttgacataaaccctgatcacatctttgaggttccggacacccctgaccgaatacagcagtcaacatgccctgtatctagcccagctgctaggagaggtattgcaaaagcagctggaactccattaccatcgcgaagaatcaaatttaagatcacaaataactccatccagggtcaatcaagtagaggcaatgcaagtagtgcgtcgtctgcaccttagatgctgggatatttttaacaagccgagttgcacgatt

SEQ ID NO: 394846 - DNA, 428 bp, Oryza sativa
  unsure (1)..(428): unsure at all n locations
tggagttgagcttgtgactgtgcatggtacagaagcttacccttttacaacagagaggatcaatgaattgaaggaacaggaaaaggcagctaaggataatcaaactgttcaaagtgtgcttggtacacccacccgcgactacttactttcgaacaagggagatagggtacccatctctgaccttgagggcaagtacgttggtttgtgctttgtggtgaatggctatggcccagtagtccaatttacctcattgcttgctaaattttatgagaaactcaaagaagtaggggagaaatttgaagttgtagctgtatccttggacagtgatgaggaattatccaattgagagtttttggcaggcattgccttggcttgncatccctcaggaagtaccaagantggtggataagctgggntcgtttattttt

SEQ ID NO: 394847 - DNA, 505 bp, Oryza sativa
atttatcctggccttttctagaaccagtagatggtgtcattcttaccataccgggggtattttgatattataaaaaatcctatggatcttggaactattaaacaaaatctggaatctggaagttatactactgtaaatcaatggattgcggatgttaggcttgtatggagtaatgccatgttatataatcctcctggaaatgaatttaacacaatggcaaaaactttatccgatacatttgagaaaaaacttgctcagatggttcataaactaagttattcctcttcacagaaaagagatcagctacgtagtactctagagacgttagtagcacaatataagaattatgagtcagaattgggaatgctcacaaaacaggcagaggatgaagctagagagcatcctgatttgcctccccccatcaaaccaagttctgcactactcagggcacctttgaattttaatgagaagatgaaattatatcataatatcaactcgctggata

SEQ ID NO: 394848 - DNA, 294 bp, Oryza sativa
tctctccaccaccatcgcaagagagacgctggccttccgtctcctgacgcgcacacgccaccaacaccgcgacgcgacgcgacgcgagcgccaaacgtgagcgcggaaagaggagaggtgaggtgaggtgcgtggcccttggactttcgaggcgaaaccccgcgtgcgtgcgtatatgagatccacatccggcgcccgccccagcagcggtggaggaggaggggaccccggctacgccttctactactctttcttccaggacgccgccgccgccgccgcgtcgccgctcggcct

SEQ ID NO: 394849 - DNA, 629 bp, Oryza sativa
  unsure (1)..(629): unsure at all n locations
ttggtttgcgcagccgccgagcctgccgctctcgccgccgccggtgtcgccgtcgtcctacttcgccatcccgccggggctcagccccaccgagctgctcgactcccccgtcctcctcagctcctcccatatcttggcgtccccgaccaccggtgcaatcccggctcagaggtacgactggaaggccagcgccgatctcatcgcttctcagcaagatgacagccgcggcgacttctccttccacaccaactccgacgccatggccgcgcaaccggcctctttcccttccttcaaggagcaagagcagcaagtggtcgagtcgagcaaaacgttcgggcgccgccgcgtcgagcaacaagagcggcggcggcgggaacaacatgctggaggacgggtacaactggaggaagtacgggcagaagcaggtgaaggggagcgagaacccgaggagctactacaagtgcacctacaacggctgctccatgaagaagaaggtggngcgctcgctcgccgacggccgcatcacccagatcgtgtacaagggngcacacaaccaccccaagccgctctccacccgccgcaacgcctnctcctgcgncaccnccgccgcctgcnacgacgacctcgcg

SEQ ID NO: 394850 - DNA, 513 bp, Oryza sativa
ttgtttgagagctgaactgaagtcgccggcgccgccgtggagaagcgaagcccggcgagtctacccgaccgtggagagggagcagctcgtcggggaggagagggggaggatgcattcgttcgggcaccgcgccaacgcggtggcgaacgttcgcggtgaccatcctggccgccatgtgcttcgccgcctccttctccgaccacttcaactccccttcccccaccgcctctgtcaagatcttgaacataaactggtttcagaaggaagccaacggcaacgacgaggtcagcatgacgctgaacatttcggctgacctctcgtctctgttcacgtggaacacaaaacaggtctttgtttttgtcgcagctgaatatgagactccacaaaatgccttgaatcaagtttccctctgggatggcattataccatcaaaagagcacgccaagtttttgatccatacaacaaacaagtacagatttattgaccagggaagcaacctcataggaaaggatt

SEQ ID NO: 394851 - DNA, 778 bp, Oryza sativa
  unsure (1)..(778): unsure at all n locations
cttattccccaaacccctcctcctcgccatggcggcgccgtcccagaccaccgccaccaccacccaccaccgtgtnctcctcccgtcccaccaccaccaccgagcggtgcctccctcgctcctccgcctcccgctccgcgccgcgcgccggggccgcctctccgccgccgccgcggccgcggcgcccgccgcgtcgaccgcggcgccgtcggagcccgccgcgggtgccgtaccggggaagccgacggtgctcgtggccgagaagctcggcgccgcggggctcgagctgctccgggggttcgccaacgtggactgctcctacggcctctcccccgaggagctccgcgccaagatcccgctctgcgacgcgctcatcgtgcggtcggggaccaaggtggggcgcgacgtgttcgaggcatccgggggaaggctccgcgtcgtggggcgcgccggggtcgggatcgacaacgtcgatctcgccgccgccaccgagcacgggtgcctcgtcgtcaacgcacccacggcgaacaccgtcgccgcggccgagcacggcatcgcgctgctcaccgctatgtccaggaacatcgcccaggccgacgcgtcgctcaaggctggtaaatggcagcgcaacaggtatgtgggtgtatctctcgttggtaaaactattgcaattcttggatttggaaaggttgggtcagacgtcgctcgtcgtgctaaaggtttgggaatgcatgtgattgcacacgatccgtatgcctttgctgatcgtgcccatgca

SEQ ID NO: 394852 - DNA, 625 bp, Oryza sativa
  unsure (1)..(625): unsure at all n locations
ccctcgcctccttcgcgaagggccccccttcctcctctcctctcaccacacaccacccgaaaaacaccggaggaatattccccacctcgcctctctccagccaccgacatggccgccgccgccgccgccgccgcttccgcctcctcctcgtcgtcgtcctcctcctcggccgaatccgtccccctccccaccacgactctccccatcgacaaggcggcggctgtaggcggcggtggcgaccgggcggtggattgcggggtgtgcgcgatttgcctggataagatcgccctgcaggagacggccctcgtcaagggatgcgaccacgcctactgtgtgacgtgcattctgaggtgggcgtcctacaaacagacgcctcaatgcccacagtgcaaacatccgtttgatttcctcagcgtgcaccgctctctcgatggctgtattcatgactacatgttcgaggaaagcgtttgccttctcctgagggccacttggttggaacctctgatcgtagaggctcacgaagaggctctggatgaagaagagttataccacatctatcaatatgatgatggcgttgaagatgaccttgacgaggaagctattacatgagcaggtctncgagcat

SEQ ID NO: 394853 - DNA, 750 bp, Oryza sativa
tttgggtttaagatgcactgccgtggctggcgatccatctactgcatgccgataagacccgcgttcaagggatcagcgccaatcaacctttctgatcgtctccaccaggttctccggtgggctctcggttccgttgagatcttcctcagccggcactgcccactctggtacggctacggtggtggtcgtctgaaatggctccagagattgtcctacatcaacaccatcgtctacccgttcacctctcttcctcttattgcatactgttgcctgcccgccatttgcctgctcacaggcaaattcatcattcccacgctctccaacgctgcaaccatatggtttcttggcctcttcatctccatcatcgtgacgagcgtcctggagctgcggcggagtggcatcggcatcgaggactggtggcgcaacgagcagttctgggtcatcggtggcgtctccgcccacctcttcgccgtgttccagggtatcctcaagatgattgctgggctggacaccaacttcaccgttacggccaaggcgacggacgacaccgagttcggcgagctgtacgtgttcaagtggacgacggtgctgatcccgccgacctccattcctggtgctcaacctcgtcggcgtggtcggccgggttctccgacgcgctcaacagcggctacgagtcctggggcccgccccttcggcaaggtgttcttcgccatgtgggtaatcatgcacttgtaccccttcctcaagggt

SEQ ID NO: 394854 - DNA, 465 bp, Oryza sativa
accacctcaagctagtagccaccttctccccaagcacacactctcctcccaaaccctagcaccagctagctctctcactctactccaatggcgcgcttccagatcgtggccttggccatggcgatgctcttcgccgccgcatcagctcaggccccggcggccaccccgacgcccgctcccaaggcgtcccctcctccggcgacgcgccgccgacgcctgcgccggtgtcagcgcccccggctcaggccccggccactcctcccccgggtccggctcccgcccccaaggcctcagctccggcttccgcccccaaggcctaggctccggctcccgagcccgcggccgcggctcccaccccggagatcagctcgccaccaggcccgtcaccggtaggcttggccccgtctcccaccgccgaggagaccccttcacccagcgccgccgccggcgtctgcttcgacgacg

SEQ ID NO: 394855 - DNA, 513 bp, Oryza sativa
cggacgtgcctcgagctttctggggaagcaggagaggtagttagattgcattagctagctgtagaaagctagccatggttagtaggaagagaggaggaggaggaggcgtggcaatggcggtggcgatgctgctggcggcggcgagcgcgtcgcggccgtcgtcgtcgctggaagggttccagccgctgtcgaagatcgccgtccacaaggccaccgtcgacctccacggctccgcgttcgtcagcgccacgccggcgttgctcggcgaccagggagaagacacagagtgggtcacggtgaaatacggctgggcaaacccttccgctgacgactggattgctgtcttctctccggccgatttcatctcgggttcttgccctaatccttccagatacccggatgagccgctgctctgcactgcaccaataaagtatcaattcgcaaactactcggcgaactacgtgtactggggcaagggcagcatccggttccagctcatcaaccagcgctacg

SEQ ID NO: 394856 - DNA, 586 bp, Oryza sativa
  unsure (1)..(586): unsure at all n locations
gcaatctccccctcctcccgtctcgtcgtcgtcaccgccgccggctcaccccccacccgtcgccgccggcgcggaggccaagccctagccccagcgcggccgatcgcctcgatcccccggcgagccgatgggcgtgcgccgctgaagcatgccagcgcgccgaggccgtggaaagcggaagcagcagcagccgccgccgccgccgacgggcccagcggacgcgaggcagccggaggggaagcagcgggaggaggagcggaaggggatggaagggtccgacaaggggggcgccggcgacgacgggagccccgcgccgctcccggagacggtacaaatcggaaattcaccaacgtataagcttgagaggaagcttggaaagggaggatttggacaagtatacgttggccggcgtatttcctctcctactcatggtaacagaaattctggtgcaaatgcattagaggttgcgctaaaattcgaacatcgaacccagcaaaggttgcagctatggagctccctatgaatggcaagtctacaatactcttagtggaaatcatggtgtnccacgggtacactacaaaggaaa

SEQ ID NO: 394857 - DNA, 798 bp, Oryza sativa
  unsure (1)..(798): unsure at all n locations
agcaaggttcgcgacgaggtggaggcggcggcgtactggacggcggtggcgcccaatgtggaggagtacggcgggaaggtggcaaatgcgatcgcgacgggggccgggcacctggccaaggggattctgtggtgcagtgaactgacggtggacaggctccggtggggaaacgaggtcctcaagaggaggatgcagcccggcgacgccgacgccgaggtcagccccgagatgttgaggcggatcaaaagggtcaagatggtgacaaaaatgtctgagaaagtggcaactggaatactatccggagttgtaaaggttactggctattttacaaactcaatagctaactcaaaagctggcaagaagttctttaatttgttacctggagagattgttcttgcttcgcttgatggattcggtatgattctttaacttttctattgtatctggttagtgttacataatgggtctgcttggcattattgttttttttaatggtataatgagtgttgatatgtttgctttattcagacatgaaacctggtttcataatttaataaatttatgttattcttaaactcacctagacaacacctgtgtcatgactcatgagcagattggtttttctgtttctaatntgaatatccctgtgggttgcattatataagtcataattatctgacgtaggtcaggctttgcttgggtttttttggtcgcatatattctgtgaatttgcataacttgatggatacaaaattttgccaaatctgaggtagcataagaagcatatactttggtgac

SEQ ID NO: 394858 - DNA, 551 bp, Oryza sativa
aaggatgcagggcaactttgcgggtgcagtggaggagtacagcagagccctcagcctgacacccagccacttcaaggcgctgttcaaccgcggcttctcgtatgacaagctgggcaagtatgacttggccatccaggactacaccaaggccctggaggttgaccctgccaacagctttgcatactacaaccgcggtatcaccaaggaccgcatgggtgactttgagggggcagtggcagacttctcgtcagccatctcgctggaccccggcaacgccgacttctatcacaaccgcggcttctcgctgcgcaagcagggccgctttgagtcagccatccgggactacacgcaggccattcagctcaacccaggtcactgccgcgcctactacaaccgcgccttcagccacgaccgcttggggcagtttgaggatgcagttgcagactacagcagggccctgcagatagagccggcgaatgccacagcactgcacaacaggggcagcttgtttgagcggatgggcaggtggaggatgctctgacgacttactg

SEQ ID NO: 394859 - DNA, 697 bp, Oryza sativa
  unsure (1)..(697): unsure at all n locations
caaatattccacttccatttgttttctcttttggattcaagaagactaatgattcgtcagagggacctatattgaatgccatggagatctacaaatatatagagatttctgtgggatctcaagatgcaaacattatggccagcttggtctcacggtatccagaagcaggttgggcacaagagggtggtgacccttgcttaccagcatcatggtcttgggtgcaatgcagttctgaggcagcacctaggatattttcaatctcattgtcagggaagaacattacagggagtatccctgtggaattaacgaagctatcggggctggtcgaactaaagcttgatggtaactcatttactggtcaaattcctgatttcactggatgccatgatttacaatatattcaccttgaggacaaccaattaaccggtgcattgccaccttccttgggagaactacctaactctgaaggagttgtatattcagaacaataagctgtctggagaggtcccacaagcgcttttcaaaaagagcattattttcaacttctcaggaaacagtgaccttcgcatgggacacagtaacactggccgcactaatagtgcctaattgtatgtgctgtgggttggggccattttgatccttggttgctgcnaatggttggtaaccggtccacatgccaaagggaagaagaatcatc

SEQ ID NO: 394860 - DNA, 460 bp, Oryza sativa
  unsure (1)..(460): unsure at all n locations
caccacacaaacgcaggcacacaaacacagagagcagcccaaaccgaccaaaatcactgcagagttcaggcacttcttcagatagttctccccctctgtttctttctctctttatttctttctcgagttcagtttgagagatggatttggcgtggtggttcgcggtggccgtggtggtgtgcggccttgtggggggcggcagcgccgggctgctggagaccaacccgggtttggcgtacaacttctaccagaagtcgtgccccaacgtggactccatcgtccgcagcgtcacctgggcgcaggtcgccgccaacccggcgctccccggccgcctcctccgcctccacttccatgactgcttcgtccaggggtgcgacgcgtcgatcttgctggacaacgccgggagcaagaagacggcggggccgaacctatcggtgggggatacgaagtgatngacggc

SEQ ID NO: 394861 - DNA, 579 bp, Oryza sativa
cagagttcaaaacgcttcaaaacaaacactccaaaatgttttcagaacaaggatgcaggcatgcacaacgatccatcgatcgatcgccgcaacagaaaaaaaaaaagaactctttcttggcgtcgccgcggcagcggccttcactgcagctgctcgcggaacaccgtgagcacgtcggcgaacgtgacgatcccggcgaggcggcagtcgtcgtcctcgtcgagcacccacaggtagctggcgcggtgggcgagcgcctgcatcatcacggccaccagcgagctcgccgggctgcacaccaccggctcctccgtcgagcggcgcccgtagctccccgacgacggccgcctcagccgcgcggcgcggccgtgggcctcgtcgtcggaggacgaccaggtggcggaggaggagaacgcgaaggaggacaccgcctcgttctccaccagctcgagcatggcgtcgaggcccttgctcttcagcccggccttgaccgcgcgaaggatgtgctccggcggcgcgccgaagtagtcgacgtacgccatgaggtcggccaccgacagcgtcgcgatggccgcggcc

SEQ ID NO: 394862 - DNA, 484 bp, Oryza sativa
tgtgttttttttttttttttgttttaatataaaggaacagtacccatataggaatcgcatgaaaaatccactacaggcctaatatgaccaccagtccaccaacaatataaatctgagaccaaacaaaatctttacctaaaactcttgttcttaaattatcataggtaagcaggggtgctgaggaacgggagcgcggcgagagacatgagcatctccgtggcaccatcaggatgcttcccgtgctttgcctttgcaaagctgaagctgcacgtccacgaaagcctgcatccgcttcagctccagatccttgaggaacttgatcctctgcctctccatctcctccgcgtgcctctgcttagcgaattccatgcgctcgtacatctcggcaaatgtttcgactgccctcgctagctccccgaaccctccgccgccggcggccccgcggggcggggacggcttcttggcctaccgccacctccccaac

SEQ ID NO: 394863 - DNA, 439 bp, Oryza sativa
cttcttcttcttgtgtgtcagttggtctagccttctagggctatgcttcattagtgtacacttgggatgaaaagatttacagcaaagcaagcaagaacatgggcgaataaattaacaaaaaaaaccaagtgagattagtagataggatcaacaagggactaagctagctaccacctgaattatgatgcatgggagcaaaaaagacactagctagagaagatcgagctaatagtgctaactctatactagtgccagctctatgcattgcttcttgaacgccgccgcttggtggaggcgtcgtcgccgccaagtccctggctctcttgcacccggccatctgttcgaccggcgccggcgccgtgagcaggtccacgccgaaagagcctgacggccttcaccggcgacggcgctggctgatcagcgggcgacgcgagggcgg

SEQ ID NO: 394864 - DNA, 460 bp, Oryza sativa
aaccacggaaactctctgaagaatatattttcaggagtgaaaacacaaagcattttgtagtaaagatccttttattctcagccagccgtatacagtacagggctatttttctggacaaggatacaccccccatattcttacactcaaaagtatgtgatatatctatactttgctgcacacagagatccagatcacaattcttgttacaagcaaaaaaccacaactctgaacatcatttagagtttcaaaaagatcaggctgcagcaacatgagtttcttctttttcattgttcttgcactccctgctcccttccactgtctcagcgggcttctcctcaatgggcttgttgtgctcgatgcccttttccaatgtctgtgcaggcttctcttcaatggcattcttggacttgcctccttccagctcctctttcagctgctccttcagctgcctcaggatgtc

SEQ ID NO: 394865 - DNA, 503 bp, Oryza sativa
agggcatagattcttggagaactgggcaaattttggcatggattctggtgctgctgccgtctgcgcggagaaggcgagtgagatcatcaagatcggtcaggttgatgacgtgcaggagctgcagcgacgactgtgctccgccaccaccgtgccggagcggtacatcagggtcggcgacgaccggccggatcacgccgtcgtcgacgacgagcgcgcgcaggagcggattccggtgatcgacgtcggcgagctgcagcgcggcagcggggacgagctcgacaacctcaggctcgcctgcgaccagtggggcttcttccaggttgtgaaccatggagtggaggaggagacgattgaggagatggagtaggcggcgagggagttcttcatgctgccgctggaggagaaggagaagtaccccatggagcccggcggcatccagggctacggccacgccttcgtcttctccacgaccagaaactcgactggtgcaacatgcttgccct

SEQ ID NO: 394866 - DNA, 491 bp, Oryza sativa
tttttttttttttttttcagacataacatagttccttctttcaaaactcacaacaacatacaagagggtaaaaaaactgatggaaatgcaaaagaaaaatatggcacgacatacccacaaccgtgcacaagaaaaatacgaaacacaccaccaaccaagatctaagatacagtattcttttcttggaaaaaaattatgtacatagaagtagcatgcacagctggaggacagcaaataagaaatgacttaccgaagtcagagggaaaggggaatgtgcaatcaggcctgcaactcaacttgcttcctggattggttagaagcatttgcccgtggttttggatcagacttggcactggtggatctgcaaatcgagttgctgttggtcgcgccctttgctgctcccccaccaacattagttggcagagataaccacttcttgactggagtattcgcttgcacaagcttggcttttggttggcatgtggacaaag

SEQ ID NO: 394867 - DNA, 466 bp, Oryza sativa
ttctgcaaaattggtgatctttcattctcaatatcatgatgggagtacatgtatgtacaatggaattatggcaaaaggaatgatgggctttgcatcattctcatcttgtggcaaacataaacatattactcacattgcaaacaaacagttgccagaacacagcaacacacacaaaaaaaaccattacatcaatatgatcaaacaataaatccaccatgttgtgagtgatcgatcctattattcttctaccaagacagactctacagagttcagaactatactactaaatcgccaatactaactcatccagttctcattgactgcatattcaaccagatccactcttgcatgccttactctggagcatctttccttccatcagcttttgtggaagcaaacagtttgtcagatggaacaacttggtaattccgtgtaagagcacttcttaacttccttctcttgcatg

SEQ ID NO: 394868 - DNA, 675 bp, Oryza sativa
  unsure (1)..(675): unsure at all n locations
nnnnngnnnnnnnngnaattgtaatacgactcactatagggcgaattgggtaccgggccccccctcgagttttttttttttttttctgacgcttcaatgtcaaggtacattctatttcagtgatgagatttctgcctctcacacaggttagatcacttggaacagaaacacagcatgcatacgatctgtttctctatcaggtctccatatgcacacaagtcctcgaaaaatggataacggaatacaatcacaagtgcgggttgtcaaggtaatcgcctagattgttatcttggatttggcaactgcagatcatgcaaaaagatgtgccttgatggaaaccttccagcttcccatctcatgggaattgtctcacctccattgctacctatgtaatctgggctcaaatggcttgatgatgcttgctgattagttccggtgctgtcattcgatgggcattcccaattctttagctccaagtttaagctgatcaaatctggttctgcagatcaacactgcagcttgaatanctatatttttctgaaaaagctccgccattccgtctcaagggtggatttnacnccatgttttggtggtnaattccncnccnggtgaaagttctantcncttttttccanaccantttgncnccaaaaaatnatcnttntnttcnaancc

SEQ ID NO: 394869 - DNA, 483 bp, Oryza sativa
  unsure (1)..(483): unsure at all n locations
nnnnnnnnnnnnnnnnnnnnnnnnnnnnnnnaaacgtttcaataaatttagtgctggaattaactttccactcgtttgattggaaataattgtaccatcttcttggttggaagttgaaaaagggcacgggatgacaagatcattatttgtctgtaattaaaacagaaaatctataatctaaagtacagggttgcggcagtcatgccatttgcaaccgaataaaaaactaattgctcattggaacaatgcatggcccagccataggcgtcgttccttttattccaaagcccacccaatttttacacacatccaagaccggaaattctaagccagcaagcatatcctcatctacattgcattctccaaggtaaaccttgatgcttcgaggagaaccgcagctgccttctgctatgagcgctctatcatttgctgccatgtgctggattattttgtatataatctaatatcttcagggcaatgaca

SEQ ID NO: 394870 - DNA, 449 bp, Oryza sativa
  unsure (1)..(449): unsure at all n locations
ttnaaannntttttnttnntnaaattgtcatgaattgatattattaacaacagcacaccgaagtactcctcgaccttgtttttgattcaacaccaaacaacacccaattcagcataagctggctggcctggtaccatatagccatttacgtttggttcagcaaacccatcaacaaaataatctcatgggcaccacaaaagctactagcaacgagtaacggatcatgtacaaaatgacgcttttactatgccaaaaccaagaaaatatttccacatgacggcaaaaaagggaagaatgaagcaaatgctaaacgggttatatattctcgaggctgcttccaccacaagtttatataaacttgaaggacaaccgcatggatgcatctttgatatatatatccttttgcccaaaacaaaacctggggcttgaaacgtttgggtacacaccca

SEQ ID NO: 394871 - DNA, 519 bp, Oryza sativa
  unsure (1)..(519): unsure at all n locations
tcgattgaagaagcttccagctgagctgggggatcaaaatggaggtgcttcttccccttctccttgcctgctctctcctcttcaccattgcaacccctatcagagacatcaccgacgtttgtgcctcacagatcagtgatttccagcacctgaacagctccggactgcacctgacgctgcaccacccgcagagcccctgctcgccggcgccgctcccctccgacctccccttctccgccgtcgtcacccacgacgacgcccgcatcgcccacctcgcctcgcgcctcgccaacaaccacccgacatcgccgtcgtcatcgtctctcctccacggccgccgcaagaagaaggccggcggcgtcggcggctcgcaggcgtcgtcgtcgtccgtgccgctgacgccgggcgcgtcggtggccgtcggcaactacgtgacccgcctgggcctcggcacgccggcgacctcctacgtgatggtggtcgacacggngtcgacgctcacctggctgcagtgctccc

SEQ ID NO: 394872 - DNA, 512 bp, Oryza sativa
ggagtataacagactgatgctattattttaaatgtcgccacaaaccaattagccgtcccatttgtacagcagcaattcgcttacacagttacactttaaaacaagccgcttttggcatagcagtggctgggtgttcagacccttggcctcaccctgcgcccgctggtatcgccgccatccgagagctgcccccacacgctctggctcttccctccgctgctgcattcctcctcacacccggcgaccgtcctcagtatctccgattgcagcgcggggcagttgtctttgaggtaatcaaacccgtcggtccggattacagctgaaagattttcagcagcaaattttaggcaaacagatttaagctccatagcatgatgtcggtcagccaatgctagggtagttgccacagagtttacagaaatatgcttgcacaagtaagattcacacaataaccgtagtcttggcaactcatatctgtcagcagcagccaataatttcccagctaaagtatc

SEQ ID NO: 394873 - DNA, 463 bp, Oryza sativa
tttgtttgaacgaataaccaggggctattggcaatagccaagtgaagtattttcctcaaactggccctgggatttacaatcctccctgacgccaacatggtatacaaatagcatgatcacaattttgaacttgcttctcttctaattatacatggcagatgaagaggctttgaaaagccgtgagacgaaacaagtcgcaaatcgcagtgttccttccgtctagcatggctatggttggggattctacttccctggcatgcatatgcaggtcagcacacaagttgggatttgtgctgtctttcctcaacgtttcgagtacggcaaatctggcagtttttgcgcttatggagaacttcagccaccgtctcttctccacgtacaccaaagccggctggagcacgaaccccaccagaattgccatgatgctgaccaccatcaccttgaaggacgcgagcattatcac

SEQ ID NO: 394874 - DNA, 735 bp, Oryza sativa
  unsure (1)..(735): unsure at all n locations
ggccccggctgctccagcttcgacggcttcgtctacgagcacggaccattcaatttcgagtcaggagggtcagccaagagcctaccgaagcttcatctcaatccctatagctggtccaaggtatccagtgtgatctacttggattcccctgctggtgtggggctgtcatactccaagaatacttcggattataacaccggggacctcaagaccgccgcggattcgcatacttttcttctgaagtggtttcagctgtaccctgagttcctgagcaatccattttacatagctggggagtcgtatgctggggtttatgttcctactctttcgcatgaagttgtcaaaggattacatgatggagtgaagcctacaataaacttcaagggctacatggtcggaaatggtgtttgcgacactgtttttggatggtaatgctcttgtgccatttgctcatgggaatggctctaatttcagacgatatataccagggaagctcagactgcatgccacgggaaactactggaatactaccactggataaatgtgaaaatgcactctacaaagtcgatacgtcaattaatgacctaaatatttatgacattcttgagccatgctaccacagcaaaactatcaagaaagtgaccccagcatataccaaattgcccaaaagtttccaacatcttggtacaactaccaagcccttngctgtaagaacaagaatgcatgggcgtgctt

SEQ ID NO: 394875 - DNA, 443 bp, Oryza sativa
  unsure (1)..(443): unsure at all n locations
nnnnnnnnnnnnnnnnnnnnnnnnnnnngctaacagagttgacaaatgattattagtgtcctgaatggataatcgccgggcaggatgatgcgaattcgtttttctagtttggccacctaataatggaacaaaattctcttctgttgcttttgaggagattaattgaaccattatatcatggacacggcactgcacgagccgtaccatcaaaaccaatgtccacaggttgaaccagacttttgttgatgagctcataaaagtagctctccgcaacagcggccaatttctgcccacaggcttcacagataaagccttcagctatccatcgccatactaccatgcttctttcaataatacaatcccccggcaagaccctcaactatagcaaacaagtcttgaganagtttggaaggttattaaagctaagggacagtatgattttc

SEQ ID NO: 394876 - DNA, 396 bp, Oryza sativa
  unsure (1)..(396): unsure at all n locations
nnnnnnnnnnnnnnnnnnnnnnnnnnngatganaanacaatttgctctggttggcataaatttgaacaggtacatcaacaactgatacataaccaatgtctccccaaaggggaaaaaatagtactacatacatagcaaaaaagaattcacgacttgttaactcttaaccgctgatcgatctacactgcctaccgaatttagacgtcagtaaaagggatgatcttaaattccccttaatgattaggtagccatcatgatccagcctctcaactcaattgcatcagagccttatatacatatcttcagattgacggcaatcaactggtgccacccttgctctcagacttactacaggtgtcgtattttttgtgcagaatgtcctcaggagtcagcggc

SEQ ID NO: 394877 - DNA, 718 bp, Oryza sativa
  unsure (1)..(718): unsure at all n locations
nnnnnnnnnnnnnnnnnnnnnagtattaattactaggttcataccagagcagcaatagtgttacataacatggggattatacaagtatacaacaatgggagaaacaaagataaaaacctgacgccttcttttctgttaggtttcccccagcatttccagaacaagggagaaaaacactaatctaaataagccgtatacaaaatgaatcagaatcagatagtggcagccaatcatggtttccatggtgccggaggcggtgggggcgaagggaacatcggcggcacggcagaaaacatagtgttcttatccacgccatggccttcacctgacaatggctactaatgctgcaactagaccggcattgccagactagagttgcttccgtgtagttgtaattcttgcgaacatccttggaagccgtcgtggcgatcagggccagctaccctcgctccgacgatgatgttgggtattgggtttcttgggtttctctccaacttccaacctcctttgcaaccgtagtggacaccattctttgggatcgaggcaccccggatgatgaacacgtttagggtaacggtttccgtaaccaaccacatagctacatctttcaaagggatttttcctaagatgtattcgattttgagttctgcaaaattggggcagagnttcaattggggagaaatggggcccacaataaccanccaggggtatctggcag

SEQ ID NO: 394878 - DNA, 498 bp, Oryza sativa
gttgataaaaaaaagcatggaatttagcataattgagtacatcaaatgtgataatatcacgaaacaggcagaggctattagcatattacactccatatctacactggtagataataataataataatcgaaaagcaagggtgctactagctccccaagattttcgaaaaaaaaaggcaggcaaacgcacgccacacttacagttacggattgctgtgttcagattaacttgcaccatatttgtttatgtacagaagaatgatgcaacttgcgaaatgatcatcgaattgaagtgaacttaattagtgaaagctgttctgcgaggcgcctctgcatcttaatcgtcgccgccgagagagatgatgtctttgagcttgtcgggtgcttctacatcacaagctcggacacccacccgaaatccggcccgtcctcgtccgtcaccggcggtagcaccggcgttacggacgatgccgacgggcttaccttccggaggccgagc

SEQ ID NO: 394879 - DNA, 814 bp, Oryza sativa
ggtagataatttttcacggccaatgattaatggtaccagtactgtaccacgcatgtcacaaagcacggtaaaaactgaggtggattacatacatttctctctcactcgctcactcactcttaaaccagagatcgatattaggtagctcctatagctacctattctcgtactactattttcctatgaaaaaaaaatacatatataccacaatagatatacacgaacaaattaatattccgtgactaataatgttattggggcggccatggtatattagacgagatcctccctcatcctggcggcgaagtcgtcggcgtggtccttggtgacgcagctcgccagcagccgcgtgccggcgagcggcgccggcgcccgcatgacgaatcaccgacgaagatgaaggtcgcagttcaccagcggccccgccgccgaacggcgcgccgtacccgttagtcgacgtcgttgaacccgagcttgctccagtccgacacgtacacggactcgtagtcgaacgtcatctggaacgggtcggcgccgccggtgcgcccctccgcccagcgcaggcactcgccggccatccgccgtttcgcctcccggaccacgccgacgagctcgatcaccgacgacgccgccacctcccccgccgccgcggacaccttcaccgggaagatggcgttgccccagtagccggtctccaggccgagcacctggcgggcgctggcgaagaagcagagcttgacggccgcggcggggtcggcggcgatggcgcgcgtccggcactgccagagcttggcgatgacgatgtcgaaggcgg

SEQ ID NO: 394880 - DNA, 891 bp, Oryza sativa
  unsure (1)..(891): unsure at all n locations
ttttttntntttttttttgagtggcatgatccagtggatataaatgtatttattacctgcaacttgagctaggaagtgcattaagcaaacaaacgacggaatgactctgttcaactttcttaccagtaccacaataatatacctaagtcaagtacagtgtcaaaatgaacaaaagacaaatcccaagttcaaatctataaataggcgtacagtatcatccagtaatctgaaagagcactgaacgtatgaaatagtactttggaagcgattcagaagtagtcgagggcgacagatgtcaaaacgtttcaggaccatgattcctcgacactccgtccccagaagcacatcagcatcattcggacttggcatcaggagatcgggaacgtgatgggctcctgcttgggctacgtttcttgggggggctcctgcttgggctgcgtttcttggggcttgctgcatcaccattggcaggagaagtatttggagactgagatcttgctggtgatcttgatggagagcgcccctttgactctgatcttgaacgggaagaagctgatctcgatcgagatctagatgctgaacggcgtgatgactttcccttgggagacttgcttggactcctgcttctgctgtagctgcgacctcgacttcggcttcggcttcgtgagtatgaacggctgcgctttccatcataatccttcaaccttatatangccttgagaaagcattcttaaattcagaatcatcaagtttcctgatagcatacttcatgtccatcatagtttgtgtagtctaaaattcccataagtaccaccaacctcaacgggaaaactttcagagtaacnaaacatcaccagcatttccgcaaatgggccctttaaggccttgcca

SEQ ID NO: 394881 - DNA, 383 bp, Oryza sativa
  unsure (1)..(383): unsure at all n locations
ctgaaagagcactgaacgtatgaaatagtactttggaagcgattcagaagtagtctaggtcgacanatgtcaaancgtttnaggaccatgattcctcgacactccgtcncccagaagcacatcagcatttattcgggactttggcatcaggagatcgggaacgtgatgggctcctgcttgggctacgtttcttgggggggctcctgcttgggctgcgtttcttggggcttgctgcatcaccattggcaggagaggtatttggagactgagatcttgctggtgatctgcaaaaagttccagaaataacacgattcaatatccagattccagaatgcagctttaacagtttgcttccaaaaagccttcacgcctcccaatcattg

SEQ ID NO: 394882 - DNA, 357 bp, Oryza sativa
ctccacatgtactatatatgattagagaaatggaagtttttatttctgatatatacaaaaatggaacgaggaacatgtttcaaagtaacaaaccacccccaacacacacatgaagaccaattcgattcaatcagaagcagttcgaccatcacacataaccgagattttaatttaaagagattttacggcctagcagaacagtaaaatcactttaattttttttatcactccttaattcaatttaatttgagggctcgttttggcgccggcgccgctcgtcggagagctgctttgcgaacttggcaagctgatctctgttcgtgccttcgccggccacattcacgtaatggccggtct

SEQ ID NO: 394883 - DNA, 810 bp, Oryza sativa
tttttttttttttttttgtgtagaacaagtatttttcattatgataaataaccgagtaaagtgacacaatctaccaagtacaggggtacatcttcgaaagcaacagagccctttatttgtagctaccaagtagacataacaagtacgataaaaatacacggattcaacactattagttgggctccaactttgaactgattgaataaaggtaattatggagaggcattaccatacccagacccacctcctgcaccactaccattcccgccattttcaccattgccattgcctccaccattaccactagcacccgctcccgcacttgacccataccaattattattagcattgctataaccagagccagatccactaccagatccactaccagttgaaccatatcctccagcctgtccttgtcctcctccaccgccaccaccaccggcatcggactcaccaccataacctccttccccattgctagtctgactagagcttgagcctgagccatttccagaaccatatgccgatccaccatattggctagaaccaccgccgccgccgctccctccagcagttgcatgggcaccattactaccaccctgactgacgccataaccgctcccagaccctgcggcaccaccattgtcatacgcagtaccccctccccctccgctgccatttccgtcggaactcgagtatctagacacccttgcggcattggccagtcccatgctcaagagaacaacgaagccaagagctactagcttagtgctagccattgtgaaactacttgctatggtactttgg

SEQ ID NO: 394884 - DNA, 648 bp, Oryza sativa
  unsure (1)..(648): unsure at all n locations
tttttttttttttttgaaaccaaaacagttactatctttcttatcattcaggtgaactccaaatttccctatgctatctgcaaacgggtctttcagaattcagagaaagggataacattacatttatataatctgacacaaacttaaaatcacaaatccacaaactatcttagtttgttccttttttccccttatgtacagctccatccaaatggaaatttcatgaatggagtttcattccatgttggcatgatctgcttcctggagacctggactgaagtccccccctgcattgctgcctgaacttctttgttttctgacagcaagagtggtttgcgcttgcaaacaccaaattaaggcaagagatgaaaggatttgaatcaatcacttggtgctcctgtgacctgatgaagccatgagcaccgcgaccgcgacgatgaacatgaacagcatgaacccgagcaggatatacgtctttcgcgacgatttccggtactccccaaacaggagtattccccagaatgtgctcacaagtggcaatgcctggacagcatcagcagcagcatagccagcagcctgancacccatgaactgaaacccattgccaaagccacatagggaagccagccaggagagcncactgnctgt

SEQ ID NO: 394885 - DNA, 485 bp, Oryza sativa
ggttcaacttgaactgattgtattgggtaggattcaaaaacgcgaagtagcatatttacaaagttcatgcatatggtatacagttacaggggcagtagttgcaacatgccacgaatgcctgcctcatcattgggaaggcaaataattctatccatataatgtaaagcttccttaccagggcacaagtttcgcgatgcatgatgcagatctgtggttctccgggagcgtcttccaccaaatcacaaaagaagaacggctcaggaatatatccttccctaaacttccagacatggaccatccgggagcatcactcttaagcttaactactttatcttttacattcttgaatgttttgccgttaggaatttcaacctggagttccttagccattgcccagaagcaagacttaaggcttgaacccaaggagattgcctgcgactgtttgtgccactcctgggggtacttggaacgtcttgggctttcct

SEQ ID NO: 394886 - DNA, 749 bp, Oryza sativa
tttttttttttttttttcaaataagcatatgcaagtatgcaactccttttttccatatcatttatagaaagatcagcaatacaaacacaaccatccggacaagaggatggtaacatctggaagagaagtagagagctcttagctctaaattatcactccagttagaggaagacatagccacagctaatacattacacaagtgacactgcaaggcagagtgttgtgctcatatatgagcaactatggagcatacaaggcctaatggaggaaatccctcataggatcatcatggtgaattctcttcatgcggtaagcctccatgtcttccgcggtgacctcatcattccatttcacattgtacttcctcttcctttcatccatctcctctttcctcctcgcaccctccttctttagggcttcatcaagcagcttcttgtcaagaacaatatcattaggcacatcagttccccaggtggccagtcgcttttcttcatgtcgtacaggctcatcttctgcagcttccttgcgggccatatttgccttcatcaaatcagccgatgcttcagcagcctcaattccagctaagccaggtggcagtagctatttcggatagtctgcttgcagcatttgtagccccactggatgatctttccaccatgagccccatacggttgtatgggtattaatgaaaacatcctcttcatatttgctcttgggaagggctacatcctgtcctttgattattcgac

SEQ ID NO: 394887 - DNA, 919 bp, Oryza sativa
cctttttttttttttttttttcaaacacagaacaggctaagttattattttccatacgccatacaagatagatagaaaggttactacgatttccaagctacgcctacatcagacatccatcacagtacatatgaacaactctaattaactcctaaactcgcaagccaagccagtgggcaatcaggacaagcaagaaaaccttgacaggagacacctttgcgccaccgagatttactctagggagtcaatgatgcggtcgacgagcgcttccatgagcctccgctgcgaatcgaggtgccggagtgccatctccatgcgcatctgctgcgtcttcctcgccgcctccatccgcctctgctccgcccgcaggaaaccctccccgatcgccctcagcgccttcaccacgtcgctctccccgtcatcctccgcatcggcatcggcatcgccatcaggcagcctcctcttcttgggaggcggggaggagggagcgggaggaagaggcggcggcgaggctggcggcggcggggagggggattgcgacggggacgcggaaggggaaggcccgtcgaggagatcgatcgcgtcgaggagcgggcaggggcggcggcgcttagatcggaggcggcggcggagcttctcgaccttgtggcggcactggcgcgcggtcttggtcggggtggccgcgtcggcgacggccgcccagtcggcggaggtcaggtgcgcccgtcccaccgcgaggcgtcgcgcggtgtaggcgcgggcgagcgcgagggtctcgtcgggggtccagcacggcggcggcacgcggcgggcggcggccgcggcgttggtgggggaagaagaagccatcgcaacggtggtgaggaggaggcggaggcgaaggcggaggcggtggtggtggtgtggggcggaggttaaa

SEQ ID NO: 394888 - DNA, 836 bp, Oryza sativa
atcaacaggttagtgccttcaaaggccaccaacattgctcccagattcagaacagcctcatgcatatacagcgtcacaaataaacgggtccatcaaatagctgatagacccacataaaaggttacaagtctagcaaacctggcaatttatgttacatatgctctgcaccaagggagatgctatgtcaagacactaggctatattacattgtcgaagttattgtgcacaaatacgactgcagcgcaggcattttcgaagaggttccatgttgatgcaacccatgacaattagaatgatgggggccatgccaataagattagaccccataagtatagctggagctgttagaacttgaaggccaaatatgccgttgataaaatatggttacccttcttcaagctccatcatttgagctccaatagaagtcacttctttcagttgagtaaccgtatgggagatgaggcccataaacaacattgccattcaaatacgtcatctggtccggttgtgacactgcctgataagcatttggaatactgccttgaactgtagtgttctgaactaagtagatgttgctattgatatcatttggggtagcctttgtcctgctgcgggcagaccggttgttttcgacagggctatctgcactcagcctaaccatttgctgctggatttcattcagtggggtacaagctaattttgatttagcagtttcctttgcatcagaggacttgaatccaagcctgtatagggccaaagcatcacaatccattgatccccatactcatagaggtgccattcatagctgttagatggttgtggatccatgtaataga

SEQ ID NO: 394889 - DNA, 573 bp, Oryza sativa
aacactataacatgggattatattaggagagagacaaatacaatacgtttcaccggagaccagccaagttgagaaagcagtggcaggctgtatcaggagacgccatagccatacagtatttttcttggagcatcattattgctacaaatcatcatgtgatcgcagcaaacaagtacaataccactgaccttacatgcaaggcaagatgcaattgtttctactcaccttcacgtcatagcagaaagcaccaaacaagatcactgaacactctactgtaacccagcagatgtaagccgacaggcgaaagagagtgattttcttcaatgggatggcaaactaattcgtgatcctttgccatttcatatcgaccgaataaatgccggtaggtcattcgcgtacgggctccagtgtttgatatgaaactgaacagaggtcatgccactgctaacaaaggaatcttgcacagtgatgacctggggatcattctccgagcatatcacttcaacagtattaaggtgctcgcatgtaaacgatatttccgtaagctcgccaatgattcttcgacttattctc

SEQ ID NO: 394890 - DNA, 467 bp, Oryza sativa
tttcattaccgcagctgcacccgcatccgcacggcaccatcagtgcgcaccaagaaagaaacacggagaaaagaaagatcgccatggcgccgagaacgtcggacaagactatgtcaccggcggccgcggccaccggactcgcgcttggcgtgggcggtggcgccggagccgccgccgtgggcaccggccagcacttccgtggcgtgaggaagcggccgcggggccgttacgcggcggagatccgcgacccggccaagaagagccgcgtgtggctcggcactgctccacacggccgaggaggccgcgcgcgcctacgacgccgtggcgcgcgagtaccgcggtgccaaggccaagaccaacttgccctaccctaaccgcgcgcccgccgcccgtgtgaacagcggcagcagcaacagcagcaccgtcgagtcgttcggagcgaccggcatgcgcccataaggccatgc

SEQ ID NO: 394891 - DNA, 506 bp, Oryza sativa
gaaaatgtagaaaagtttttcgcagccgcgggggccggccaattaaccaacccgaccggtcaacgcggatcgcctctcgagcaccaaaccctacccggttcgccagcgcagccactcaccaagccttcccccccaccctgcttctgctgctcgcgccgggattcttggctcgtctgctcttcgcggtcggtgtcgcgccatcagcaaccatggagggcgagaggagggcggtgaggacggtgcgggtgcggaacatctcagatctggcaggggagcgggaggtgcgggagttcttctccttctccggcgaaatcgagcacgtcgacatcagatgcgatggggtggcgacggggaggacggcctacgtcacgttcaaggatcccaaggccctagagatcgcgctgctgctgtcgggagcaacaattgtggatcgggttgtcaacataacccctgcctgaagactacatctacatccctgttactggaccagcaacttgtgggtcagt

SEQ ID NO: 394892 - DNA, 556 bp, Oryza sativa
cacgaggtcattgccgacaggtggaagctttctgttcaggctgctggttgggaacccggacgtttcattactatccatcccacaccgaagtcaaaggcgcctgctcgcatcctgggttccaagccaggtgtatttgttgctgcttcccatcctttctttgatcccttggtggacatggacccaaggcttgttgttgcaatgctggacctgccccgggaatgctgatgttagcgctctggttttaaggtttggcggggagtgtgaattggtttggctgaatgacaagaatgctgtggctgtcttcaatgatccagctagagcagcgacagctctgaggcggctggattatggttctgcttaccagggtgctgctgtgtttttgccaagcagcagcgctcagccaggcaatgtctgggttgcagggcagaaagatggagtggcggctaccaagagcagtgccaatccatggaagaaggccactgcctctgagcctgatccatccctaggagactggacaggtgtgcttggtcaagcttcaggatcagtatggaggccg

SEQ ID NO: 394893 - DNA, 508 bp, Oryza sativa
  unsure (1)..(508): unsure at all n locations
cccangcgtccacaaacagcaacgacgaactaagccatagctccggtagctcttcgatctctctcaaggtctcaccaaccagccgatcgaagcagaagcagagctacagtataggcgtacgtactccggcgactggttcaggtgatctcgcggcgtacgtctagtagccatgggtaatctggggtggatggtggcggcggcggtggcggcggtggtggcgtcgtgggcgttcgacgcggtggtgaagctggtgtggaggccccgcgccatcaccaggcggctgcgggcgcagggcgtcggcgggccgggataccggttcttctccggcaacctcggcgagatcaggcgtctccgcgacgagggcgccggcgtcgtgctcgacggtctcctcccatgacttcggccccatcgtgcaagcccgactttccgcaaatggattcccccttctattgggaagacattcaagtattggttcggagcgcgggctaccatttgcttggcagacctg

SEQ ID NO: 394894 - DNA, 560 bp, Oryza sativa
ctgagacctgatgatttgttatctcgtcgcgtcgcgtcgcgtcgtgtccaggtgctttaaaaataacctcgggagtcgcgacacgcggagctttggcacctgcagcgatggcgaccgaccaccgccgcttccccgtcttcctcgccgcggcgctgctcaccctcctcctcctcccggcctccgccgcggccaccgacgtcgagtactgcaggcaggggcgggattatcctgtgaaggtgagcggagtggagatcgtccctgaccccgtcgtcagcgggcagccggccaccttcaagatctccgcatccacggataaaagcatcactaaggggaagctcgtgatagatgtcaagtacttctttttccatgtccattcagaaagtcacaaccttttgtgaggagaccttttgcccagtaactggtgaattcgtgcttgcgcacgaacagactttaccatcaatcaccccaccacgttcttacactctcaccatgaggctactagatgacggcaaccaggaactgacctgcattttgtttgggttcagcaatcggttcatttc

SEQ ID NO: 394895 - DNA, 446 bp, Oryza sativa
gacgggaataaaatcccccgcgtctcctcttctcctcgcgcaactcgctcatctcatcgctctcgcctcgactcgcctccacgaagcccacctcgactcgccatggccatggacgacctcgccggctcatcctcctcctccgccgcgatggacgccgtgggcgccgacccctcgcacgggtggcagaaggtcacctaccccaagcgccaccgcaagcagggggcggcggcgctgccctccgcggctgctcccgatctggggttcctgcccaacggcggcggcaaggtcaacgtcgttcgaggccgtcgacaggaacgccgagaagcgccaccgcgcgctcctggccgacagggacgcggacgaccccgacgccgcgcggatcgccgccgccacggcctccgcgtactctgacgacgactacaactccgactaggcgcaggcgactc

SEQ ID NO: 394896 - DNA, 396 bp, Oryza sativa
  unsure (1)..(396): unsure at all n locations
ctgtgactctagtagcagtcgctctcgtcgtcgggtcttttacaatttctgcgggctaccttcatccacacctcggatcggtggatcgaccgatcgatcgacgggtggtggcacgttgttttctcctccatccatccatccatccactcggtggctatggcgtagggaggaaaatcacgaaaaagagggtcactcggacggattctttcctctctctctctcttttcttcttcttggtctacttctttgatcttcttcttctctgctgctctgccgtccatggtggtatggtggtgatgtggtggcgtgcaaggtgaggtaaagggggtgtggtggtggtcggctcggctgtttatccatccatccatgngatgccggtnaggttggcggcgcgcc

SEQ ID NO: 394897 - DNA, 518 bp, Oryza sativa
caccagaaaccaagtagttctgatactctgtggcttgtatctgtggtcggtccacaaaaagaaaagaaaattcacaaagcaaaagattctgctttcttctatatttacaggtacagccgatacacatgcaaatttgcatttcacatgttcctggcgtgatggacataatccggccaagagtaatctacaagagaaaaacacggatttaatgattgcgcagattactaagatgcccgtgcctcttcgttttcatcgagcaatggcctgaggtttgatctctcgacggcagggacatcatgctcactctgttcggtgaaacgatcaacgctacggacaaatatgccaataaaccaaaatatagctgcaatgaagaggatagatgtcaaggtaagagctgtcgatctccagttatggattttgtcctgaagaagcccaacaagaggtgaagaaggcacatccccaaatatatgttatatgcaacactcgacatagccattgataatggccgcaaaaaaaaa

SEQ ID NO: 394898 - DNA, 430 bp, Oryza sativa
ttttttttttttttttttgcaaggcgtgggaaacctattcattcattctccctgccagaacggttgaatttccacaatggcgttcagtgcacttgtcaaaatttgcatacgttacaaacaaaataaacaggcagcttgattctgcgcactgttacaaacttgagaaaccgtgaattgtttcatcaccattatttctacccactgcaatcattctcctacctatcgattgactttgtcaaagaaagatgaatctaattacttggagatgagtttgatggtgaactctcagttgcagtagcttcgctctctatagtgccgtttgtgtgctccaccaatacatcagcctcaggagccttgagcagggaaggatctaccttctcttttgcagacatatcccctttgagaattccttagccaaactagagaatgc

SEQ ID NO: 394899 - DNA, 439 bp, Oryza sativa
tttttgggtaaaactgctgacaagggtatattctttggatgctcagaacatgatcaagatcttattttccttgacacaaatcaataataataatactaataataatacaaagaaacactctcatttggggaaaaaaaagagagaaaaattaagtactagtactactatttctcatctctattgacctaggaagaaagcttctgctcttcttccctcctctgttctttcatggcaacagctaaagaacagagggtggtcaccatgaactgcttctctagtgttcatcagctatgtgaggatcggatcgggttggattggattggattggattggcgttgagtttggccaccattgatctggttttggtcataatctcatgcgaagaagctggggatatcaatggtgaatccggggtccaacttgaaggcctttagggcgg

SEQ ID NO: 394900 - DNA, 448 bp, Oryza sativa
ttttttttttttttttccaatcaacaagcaaactagatatatggacaccccaatttcgtacaaaatggaatcaatgcattacacacagtaacatcatcagtaggagcaaatgctcatgaacaaaaactaatctcgtgtacaacaaagaagtactaaaataaccccctcctaatgaacaacttctacaccttgagactcttgaggatcataggcagcccatactttggccgaagcgtgatcacgtcggttggcacgtggacgtacttgggtgatagagtaaaggagaacctctgtaggatcattgcaattacggccttggcctcgatcatggcgaagttctgccccaatgcatgccctcggcccacgggagaaggagagcaacgcgttggggatattttcccgcctttggacaccccatttctttgcaacctctccgggttgaaatatg

SEQ ID NO: 394901 - DNA, 462 bp, Oryza sativa
  unsure (1)..(462): unsure at all n locations
ttttggtataaattccgttattggtcagtattcactgccaaagtgccaaggcagagttacacgtacgttgctgaatcttgagcagctgtgcttattaccacaaaactatatgctggccgtacgttcccatgcatgcatgcggtggtgcatttgacatgagcagctagcttattccaaatccaaatgtaatattagtatatcactcttgtctagtggaatctaattttgtaggacggcgacttgttggggttgaacagcccgaagtgcctctcggtctcagccccggtcttctggttctcgttgaacatggcgaacacgtacgtctccaacgccacccctggtctcttcggagtgcctccttggacatggctgataagcttctggttgtacgtctgcgcgttgctcacgctggncccgaacccaccggccgacggccacccggtcttcgacaccaccacgccg

SEQ ID NO: 394902 - DNA, 466 bp, Oryza sativa
cagtttcctcttttttttttcttcggtggtgttgggagtggacaaggtagtgtgagtgagtagtgagcaccatggcgagccgagagcacctcctgctcgacccggcggcgctggccgtctcttgggctgaccccgctgcggtggagatcccgcccgagctcctcgccgcgctgggtgagtacctgtccgccaggcgtagcgacggggaggccgaggccgacgccgaggcggaggctgatgatgagttcatgatgtacgagttcaaggtgcggcggtgcgcgcgggcgcggagccacgactggacggcgtgcccgtacgcgcaccctgtcgaggccgcgaggctgcgtgacccgagtcgcgtggcgtacacgggcgagccgtgcccggacttccgccgcctgccggtcgccgtgtgcccgaggggcatcacgtgcccgttcgcgcacggcacgttcgagctcttgct

SEQ ID NO: 394903 - DNA, 340 bp, Oryza sativa
ccaggggctattactctccttccctctcctctcctctcctctctcgccatctctctctcctccgatctgcgcagccagccggagccaccgccgcctctctgtcgccgcctcgcccgcgggggctccggcgaacgggccgcccgcctcgacctcccctccttcccgtcgccgagctagcctctccacgctgcgcggggccgcctccggcgatgcaggctgggcctcgggcctcggggcctcattccaccgccctgcgcctctcgggttcggatcgggcttgaaggtgaaggtatggacttcggtgattctagacgcaagcctaatgtcgtcgggaagttca

SEQ ID NO: 394904 - DNA, 810 bp, Oryza sativa
tttttttttttttttttgtattctgtgattgtccttttgaatttgattaatgggagcagcccaacattaccaacctgcataattcagaaggaaggggggtaattctcaattctgaccaactacccagccttattttgaatattgtacatgtatgcaaaactataacccaaaagctaagattttgtaaatcatatgcacaagcactggatgaaaaaacgactgatctgagcagctcattcttcgtcctcagtctcctcatcgtcgtcgctgctagcagctctgtacctcgccccgtccccaacattatctccctcttcctcagtctcctcgctatcgtcctcgtacagcacattcctcggccactggtgctcttcgacaacactaacaggaggttggtatggctctgtgtaacccctgcgcttagggaccttgggcagtggcatcttggccgtcaaggagggcttgcttcttcgcttcgacatcttcgaagaggcggcttgagcaccggcatcctgggtagtgcattagggtgctctttcttcagatggaggttaagtttggtactcatgaatgtatgccttggcacaaccatcataaggaccagacgtatgggcgatcagctgaggggagtgggtggaagctgctgacggtttcggtgtgtgactattatgggagtggtctgctagaccactgcggtttgttgcagacccacctggattctggagaccacccttttcatgctgttgcttgatatgagcccttaattttgattcctgtgtaaaccttcgagcacattctgggtacttgcac

SEQ ID NO: 394905 - DNA, 426 bp, Oryza sativa
agagagacaagccatcattagccaccaaatgcaggcatgcatcatatagctgacaggacaagaatcagaggaagaagaagaggaggaggaggaggaggaggagacagctgctgccatgtcgtcgtatgaccagatgctcgcgccgctgcttggcgccggccggtcggcgtggacggcgcacgacggcggcggcggcggcggagaagccgtggtgaggcagatactcaagtgcacgaggtggcagctggaggagacgacggacttcgtcacctgcccgtaccactactactgcgacagctcgtacccgggcgactaccacgccgccgtcggcgtgcttcgtcgccgccttcgccgcgtactgcttcctctcgacgctcgcgttcacggtgctcgacctggcgaggagcggcggcggttgctgtggcg

SEQ ID NO: 394906 - DNA, 399 bp, Oryza sativa
  unsure (1)..(399): unsure at all n locations
ttttttttttttttttaaatgaaatagaccacggtcatcgcacagctcattgtctcataagtgtcgtttggtacaattagggagtatgcaactctaatcactccacacactgttaagtaataacatacaagtatacaacaatggtttgctgagcacctgttcagctatgaatattgtcccctccagggacaacaaaagtaaaaagaaaaaaagaatcatgtatgtgaattctggctgttaagtggattttcctgccaaaagggcgacggcagatttttaatttagttccttgagctggttcccatgctgaatggccatcaattataactgactatgacctttctatagccgagnaactgttgaaatctctgttgtagaattancttgaataaatgtggg

SEQ ID NO: 394907 - DNA, 399 bp, Oryza sativa
  unsure (1)..(399): unsure at all n locations
nnnnnnnnnnnnnnnnnnnnnnnnnnnaaatgaaatagaccacggtcatcgcacagctcattgtctcagaagtgtcgattgatacaattagggagtatgcaactctaatcactccacacactgttaagtaataacatacaagtatacaacagtggtttgctgagcacctgttcagcgatgaatattgtcccctccagggacaacaaaagtaaaaaaagaaaagaaaagaaaaagaatcatgtatttgaattctggctgttaatttagttccttgagctggttcccatggtggatggccctcaattataaccgactatgacctttctatagccgagtaactgttgcaatcnctgttgtagaattatcttgaatatatgtggcggcatgccgtccccccgc

SEQ ID NO: 394908 - DNA, 680 bp, Oryza sativa
tcctctattttgggcgccctctgtttattcctgtgggttttttgtatgtgtggcccatggaccaaaattgggttttctttaaatgttatggaccattggacaaaagttacagtttagacccgtgttgtaccatggcctgtataaatgggaggcgggatgccctcttatcccgaattgaaccatgctaattaagagaggaaaaaataacgtgatttaagggacaagcaacgagcattttacccttaccaacatgtccatgtcacaatcccaaccaagtgaaagtgaccaccaagtacagcaccccaaaaaaacatccggttctcctagctcatttcacgggccctaaaaccaagtgaccataaccacatgaggaagcattcgatcacaggagttcttagtttgtcgacaacaaacttatgccgatggttcggcccaaccgtcaggtttgtctgtgtccatttgctcggcagtaggctcctgatcctgggcacctccctcgcttgtcggctcttcagcttcaccggcaccgttggattgctgctgctgctctggagtttgaggctcaggcgttgttgggctttcagtcggaggcgtaggcggaggaggggtctgtggcttcggtgcaggtttcggctttgacataactcggtctgcacgacctgtcaagtgcttcagctttc

SEQ ID NO: 394909 - DNA, 440 bp, Oryza sativa
  unsure (1)..(440): unsure at all n locations
gatgaacacatttatttattaatccatccatatttactttgttctcccaattggcaactaggattacattattttgcttacatttagttgctggagatgacaagctgcagcttgattctggcagcctggctcagaaaagagtgagagcagagagaaccagcccccagacccaatttttcccaactaatctgaaccacactctctcaactgcatgtacgctcgtggctcacacatacagctactagctgatctggtcaccttctcctcccaagcaagatccaaccacaatgatcatcaatgccatctttcactgcattccccatccatccatccatcgattgatcatccgtgagcggattggaggaatcgatcatgttcttgacatggttgttgatgctcatgttcttgggnttgggtgtaaangtgttggtggaatatca

SEQ ID NO: 394910 - DNA, 533 bp, Oryza sativa
  unsure (1)..(533): unsure at all n locations
nnnnnnnnnnnnnnnnnnngacacagaataaggctaacattttgtcacataacaatcaggttacaatcgatgcagtattcgccaggacatggcagttgcatcatagctcagaccacagcatcacaagcatgaacaagcagctacaagttacacaacacccacaggcacaggcacataaccatataactatgctaccccttgttgctaataccgacgctaactagtactcagatgtcatttgttgctcccagaacagcctaaatgggaggtaattctaaccaccaggggcaatgccaattaactgatacaatcatacaaatcggaattcttgaatctttcaagatgtaaaccgggtgccattactggctctcgtcctcctcgtcctctgcctcatcctcgtcttctttgttggcggtatcgctaccattcccggtacctctggcggcttcggcggcattgttctcgttgtactggtgttgtggctgctgcggggcagcatggcagtgcctgctgtccttgagcggtaccgaaca

SEQ ID NO: 394911 - DNA, 453 bp, Oryza sativa
  unsure (1)..(453): unsure at all n locations
cgtagtctcgtcttcgtctactccaccaccaccatctcctctcccgtctcgtcttccctggcgcgcgcggccggcgagccggcgagcggcgtcgcggcggtgaacttcctcgtcctcgtccccttcccgactccccgccccccacctagcctcctcccaagtgaggactcctcgcgctcgcgcgcgcgcgggccggcgaggggcgacgcagccggggcctccgtcctctcggcagcacgaattgaattggaggtaggtaggcacatttgtaaaaatgggagtttaccttagtacccccaaaaccgagaagctatctgaagatgggcgaaaatgataagcttaaattttggactctcatctatgcaaggatgggcgtgcaataatngaggatgctcaattcaagcttttgctagataatcgataatgganaatcattctttnggggttttcgat

SEQ ID NO: 394912 - DNA, 625 bp, Oryza sativa
  unsure (1)..(625): unsure at all n locations
nnnnnnnnnnnnnnnnnnnnnnnnnnnnnnnnnnnnnnnnnnnnnnnnnnnnnnnnnnnggggtacacgtctcatgttctgattcttgaggtaacaatgatgnaatagcatcactagaatacaatctctcatctcgnncataagntcattacaaaataccatttttgacaaatactcatttgaccccactaatacagggggcatcatccatctcataattctcagctacacactgagaatttaccgctgattttcctaataaaaatggagtagtaatagtaaattgtactgctgtaattacagcagtatactggtattactactgcacatatgtacagctacgagtcgcagcgtgccagctgcgtctacactgtctgcgcctgcttcgcggtggcgtcttctgcggcgcggccgccggacggcacggcgagccggccgccgtcgccggcggcggcggggaggtcgtcctcgtgcgcctcctcggggcactccatggcgcgcaccagctgcacgaacagcggccagtggtccggcgagaagaactccccgcccatccgctggtacctgaagatggcacggccgcgtgcgcctcgcggcgagcaggccgccccacgccgccggggcg

SEQ ID NO: 394913 - DNA, 626 bp, Oryza sativa
  unsure (1)..(626): unsure at all n locations
tgtttctccactgcccccgcacaaatcaactctactttccaaaacgcggcggcggcggcggatcaaaccctcatttggtgggattttttgctgcgtttaatcaaatcctctctctctcttcgaccgcggggagatccggggttcgattgtttcgtctcctcctccccctctcgtgcgggcgtcggaatcgatccacgccccgcccgctcgctcgctcgctcgctctgtgagcccaagaggacattttgctcagtgctgtgctagctttgttggctcaagttcacaatgggaggttgtgtgggcaagggacgacgacatattgaggaagacaagcttgatttcaaaggtggaaatgttcatgtcataacaagcaaagaggactgggataggaagattgaagaagcaaacaaggatgggaaaatttgttgtggcaaatttcagtgcttcctggtgtggaccatgtcgtgttattgcacctcatttatgctgagatgtcaaagacttatcctcaactcatgttcttgccaatagatgttgatgagctaatgggatttcagctcatcatggggatatccgcgcaangccggacctttttcttcataaaaaacgagaancaggtcggcaag

SEQ ID NO: 394914 - DNA, 465 bp, Oryza sativa
gcaagggcaaggaggggaagaagggcaagcgcgaggcaccggtcaccgactttgtgccggccaagacgcagatgaggctcgttgagaacgctgccaatgcagacaccacggccgcctccgagccggagctagttgtcggtgaagctgtcaatgacaatttaccggtggtcgaatctgagtctgaattcagccgcggaaagtatctcatctacatgggcggtggtgagagatgcaagagcatgaaccactacgtttggggattcttgtgtgcacttggtgaggcacagtacttgaaccggacacttgttatggaccttaatgtgtgcctcaattcacggtatacttcaagtggcaaggatgaagagagagattttaggctctactttgattttgagcacttgaagcaatcagcatcggtcattgaccagaggcagttctggacagattgggggaagtggcacaaga

SEQ ID NO: 394915 - DNA, 725 bp, Oryza sativa
  unsure (1)..(725): unsure at all n locations
ctagatcgcgagcggttttcctttttttttttttttgagcaaatttctgggttaagcaattagtacaaactagcaaagtgccgatgcatgaattcaacaaactaatgtgttctgggtgataaaatacaacaacagtgtcctgcagaaacactcatatgaactagctagctacaacaaagccatatgtgcttaagatacacggtagttcaaaaatattatatcaagcacaacatttgagactcagcgcacataattcacgagatgttcatgaggaagcagggcatgtattgacaccattcttgcaatcacgagtaagatcactgaatgtctccaatttcctcttcccccgaaggaacacctcagtgtcaactgcaaccctcatgtatccatcgaattcaacagcattaccattgctcagctcctttgtttcagtgtaccactcgctgttctcatcccataaatccttgaagtcatccaggaagtgtgttcgatacttacccttcattgggtcaaagaatgatttatcggcggacgcgtgggtcgacctcgagggggggcccggtacccaattcgccctatagtgagtcgtattacgcgcgctcactggccgtcgttttacnacgtcgtgactggggaaaaccctggcgttaccccaactttaatcggcttgcagcacatccccctttcgccagctggcggtaattagcgaagagggcccgcancga

SEQ ID NO: 394916 - DNA, 878 bp, Oryza sativa
  unsure (1)..(878): unsure at all n locations
ttttttttttttttttttaatgcaaaacaatgatacattgattgacacagatttatcattttctaccatacttgcagaattacaatgttaagaaagtacacacggtacaccctatccaaatgcagctggataacatgcaacagtctctaaaaagcacaaaggagttgccatttgatgattacactatgtctgataatcccatgaggtagctcaaattgttcattgtcagatgggtcacagatgatcttctgtagttaggcagcaagagggtgcctgatgatcccccgcccttcgtcgaggacgaattgttgtccctgaagtgggcgctggagaagaacggtctcaggtcatagatttcgtactcctgggccttgttcttcaggtcctctactttaacctcgatgtgagtcaggcgcgtcgttggtcctgaaacgatttcttcgaagtgcagcacatccttgaccagggtgcgcagaagaagcaagagcagctcattgtaatccttcttataggtcatgtatttcctgaaattcttttgaagtgctttctgtacaccaaacttctgagttgaaataaatgagtcaagcaggacgcggatagccatgtcgacatcttcctgagacacgtagctcctcaaatggatccttgcatgtgcctctgacatccggaataatgggttcgataagnccttacggcaatagggactccttggaccatggngatggactcacgacgaattctggcggtaaaaatgggctaaatcttgtccaagggccagcaatcatgnaatttttggggaacacggttcaacttggcataagtaanggaacttcttcagcatgtcttgnggaaaaggaatcttggggncaaccttttct

SEQ ID NO: 394917 - DNA, 752 bp, Oryza sativa
cggacgtgcatctctcgctcgctcgctcgctcgccgctacgcctcacgattccgacgactccgacgccggtagggtcataacaccctcctagacgccggcgacgacgagggtggttgggttgtggatagcggctgcgacgacgagggcgctctcctgaccgccggcgtggggtgccccagctccaccaccggcgacgactcctcctccgccgcgagcgctcccccagcctgcttcttttgcgggggtagccggggctccggcctcggcggctttcaaagcccccttcctcacaacaggatccaaaatcccgtcctagagttcttctacctccccttccaaaacttcctcttttggcatccttgattcaatttcccttccctttctttctttctttctttctttctttcgatttcttcttcttgctttagatttcttatccttcttcttgttgctaatctcgatcgatccatctatccatccaaacaacctcattcttttttcctttgatttgattcttcgctgctaacgccaccgaaacagacaacagatttacagcaaaagaaaaaaaaagaaggaaggctaacctttttctgtggattttagcgttctccggtttgtgacgagatgcctgcgctcgccgtggacgccgctgcacctgtcgcgcacgccttcgcgtgcgacgcggcgcgcttccccgcgccgctgctgggcctccgccgccgcggctgcggcggtggcggagaagccggac

SEQ ID NO: 394918 - DNA, 456 bp, Oryza sativa
gtgcactatgttgtttcgaggcaggagagaggcaacctgcacctgcccatggaggactcggattagactagagcacaagatggcgtgcttgaccaagtatcagcacgccacgaatgcaacgaattaacgcgagagatgttgtataagtagtgtgatttgatgccaagttcttgcatcttgtcaaatagtatttgggcgtgttgatgatgagcgtgcaaatggcggcgtcgctacgtgtgatcgttgtgttggctgtagtgtgactggcgggacgcctgccctcagccgacgcggcggccggcggcgtccgcgtcgggctgacgcgcatccactccgagcccggggtcaccgcgtcccagttcgtgcgcgacgccctgcgccgtgacatgcaccggcgcgcgcggttcgggcgggagctcgtgtcgttgtctgcgtcgtcttctacggcggccacgg

SEQ ID NO: 394919 - DNA, 600 bp, Oryza sativa
  unsure (1)..(600): unsure at all n locations
nnnnnnnnnnnnnnnnnnnnntttttttttttttagagcgaacgtggagactccttttttctattcctttaataatataatagatagattttccagtgcctagtttccatctccggttactgctaatgactgaatttacatgagattactcccaatttcgcatcacagaacgctcagttcgcacacagtatcgatgttagcaaatgaggctcaaatgtcatgatctgccgatggtgtcgacgttgtcgagccagctaaccacttcttgtatcgccggtcggctgaacggcgtcgagtcgacgcagaggcatgcgaggtcgagcacgtacagcatctgcgcctcgttgcctccgntcagccgcgtgtcgagcacctcggcctgtctcccctgcaaccgcatctgcagcacccaccggacgagctcccgctgctgcccgtngcggcggcgaggccgcctcgacggggcgtcttcccgtgagcagctccagcagcacgacgccgaagctgtacacgtcgccgcgacgcgtcgccacccacgcctggccgtactccggcgggatgtaccccggcgtgccgaccagctccgttcgcccaggtccg

SEQ ID NO: 394920 - DNA, 495 bp, Oryza sativa
tggtctggcagtaggagaacatgccggcggcgagctgggtgtatcgagcgacaggcgcgcccctgcccaggccgacgagccccgccgagccgttccagtcgtcgctgctggcgttgctgcacccgaaggcaatgccggggacgcgcacctggtcggccggcgacgagccgaacgtgaacgtctccgagccctgcaggccggacgtccacccggtgccgtacgtctggttgtacctgcacgcgcaccccggcggcggggtcgcgccggccagcctcgcctcggcggcgcacaggttcagcgcgctgctgcacgggagcacgcggaacgtcggcgagctcgacgggttgtacagcgggctcggctgcttgaagcaccgctccccgcacggcgcgcactgcgtccagacgaggtcgctgccggtgtcggcgatggccgggtacgactgcggcggcgtgccgatggccagcggcatgatgtactccccgccgttgggca

SEQ ID NO: 394921 - DNA, 553 bp, Oryza sativa
  unsure (1)..(553): unsure at all n locations
nnnnnnnnnnnttttggtattcctaccaaccatgctagcattattatcattatcaagacatgcaagatgcatgtgtgattacaaaaatagtacatctacatccatagtacatatatgcaccagctgaagaagcctagaaaactagtaagatacatcatctggtattctggttttggcagcagcactagctaggtagaaagctagctagaggaagtcgaagcgcatgaggagcctgacagacttgtacctggtgccccggcgatcgtggagaggcacagcgcggatgccctgcttcagctccgacactggcaggcatgtctgccccccaaagtcatgcttctccgacatgtcgtactcatgaanctcnaattctcagcacagccagctccgggactgtcanaaggaatgtgaactccnccatccccatcggtacccactgatcctcaatgttcantcttcttcatcacacatctgccgcncaccacgatccccccctattttgaatcnggagaaaaagngtcnaatgattttnctgantccncccccccccccc

SEQ ID NO: 394922 - DNA, 419 bp, Oryza sativa
gtggttttttacacacgaaagcaaaataatcacatgttactgagattttacagggttggcactctgctgtacatacttctcgttccctcatgcccattagaaaaaaaaataaaaaaggacacaccagggtagattaatacaaaactgcaagcctcaaaaccaaacctgtgtgaccctcgaaccagtactgaacgcttggtaaaatgggagatggtaagagggcacacccatgaatcgaaagaataagccgaaactagcaaaggcaaactcagactaaggaaaaatggaggactcatcccacacaatgtgaaaatagacacattgcacaacgaccatggctgtcaagggctattcaggcatatacaagttgacttggacgatcaaacaatgctttaactggaggttgaatgaggaaattt

SEQ ID NO: 394923 - DNA, 650 bp, Oryza sativa
  unsure (1)..(650): unsure at all n locations
tggtctttttaaaataattattgggttatttcaattaagaatacttttgtacatcttgtttacatgaatacaattcgttacatggatccatgattcatatctttgtttttgtttcaaaagctaaatcaaggattcatatgttagttaaggccgcgcacaaatggcatagtctgcatccatcttagctttgcttgctgattacaaccatcttggaataattccaaatccgcgtcgacaagattgaacaatatgaattcatacaggttcaccttctactgctgatagcgacgacggcgatgatccgatgcgattccggggcagtttggcagaaggcatatcgcagcttgtgatcaaaattgagatgtacacctctctctcttgcagttttgcttgcagatgcccccatggatggattgagattgatttttgcttcgtcttgatgctgtttggaacaatttgatgttactgttttcaattagctgcaaaacctggacggtgcacgcgaccgcctgcgcccaataacttgagcctcgccttcacctcatctgggctatccccagggctggagatcttccagttggcgatgggctgcgccggggaggagggggcnaccggagccggctccgccaccggcgagtggtagtgttcgt

SEQ ID NO: 394924 - DNA, 640 bp, Oryza sativa
  unsure (1)..(640): unsure at all n locations
nnnnnttttttttttttttttttaccaacatatgcctttgcattgcccaaatgacctggtatattacagcatttatgttccagcattgttcaattcttttgccttgtgcgcgatgcaatatcaacctataacctttacacataccagaggatttacttccatgaagctggaatctaaagactgtaaacataactcgaatggatcataactatcctgcagctgtaccttgtagcatgaagtagagatttagcttagaacacagggcaaacgcttgttggacccaagtcaaccccttttgcagtgggacatgtggccagtgggcagtgttctcctgccgtgccccaccagtcgatgctccggttctccatgggatagtgagaagtacagcagcaccgccatgaaagccacgccagcgtcgagtgcggcagagagaatgtagttgtacctctcccaccacttcttccggtaccggaacacgaagaaattgaagatggtaccaaagagcagccaagagttgtaattcacagccgtcgccggtgggcattgaaggctgtcgcgccggtggagcactggtaagttagtcagtggttattccatttcttgttttggggaaaatcttgtnggaagaagtacacggtaa

SEQ ID NO: 394925 - DNA, 453 bp, Oryza sativa
cctttttttttttttttttacagaaatagattatttcttggtctactaaatttcttatgactgcaaggcagagatggttacaccagaatgccccttgcaagcattcgggaactgcagacagtctactggatagtccataaagttacatgagcaaactgatgcaacggttacacgaaaaatacatgtcacatctaaaatcatatgtaaggctgcagatttgcccaacaatgtgaaaatggtttgtcataagaaactttaaacaaacaagctggactaattacaacggcttcagatgtttggtggggctcaggacctatacggctataccattccatctccagtcatatcggagcaaattagaagcatatgcctgacagctacgaaaatctagcagtgcaactgctgaagccaaggaaaaatgtttccgggaaggatgaaaatgatgaacattta

SEQ ID NO: 394926 - DNA, 640 bp, Oryza sativa
  unsure (1)..(640): unsure at all n locations
ggaaggacaaacaccatgaatctccaacgaaataaattacattggttaactcaatattccaatataaatataaaatcaaaacatcctacatcccacttatggacgagccacgcccacacaaaaccaatcaaacggcgctcctcctattcctgcaattcgtcgagcgccttgggcaggaacggcttgaatcttggcacattcaccgggacgccctgcttcatgacgatctcggcgagcgccggccagccctgcgcggggatggccatggggcccttgaacacgtaggggcccctggggtcctgggccttgagcgtcgtctcctcctccgagacgtaatactcgacgtaccggagccgcatgtcgcgcgccggctgccccgagaaagtttggggccatccagtcccatcttgccccaagggcacgaatctgtaacgagcacgggnggcccgttggggagggaagatntgggttttgtcagccccggcggccgtgcaccgccnagcagcaacgttccggcggcgttcaacctttctcgggngaaacccggngaaaggtccggcgncgggncttccggccaangggtcaaccggnaaaaaccccganggtcctcggnaaaagcgnngggccaagttngcgnagt

SEQ ID NO: 394927 - DNA, 652 bp, Oryza sativa
  unsure (1)..(652): unsure at all n locations
nnnnnnnnnnnnnnnnnnnnnnnnnnnnngtagctgaatcagcaaatgatgccattaattgatcaatacacaggggaagggaaacgtgaacgaactaccaaccacaacggtacaacaaccacgccaacgacaccatgcannaatgtacaaacacgaaccagaccggagcgtccagctaggcaaagnaacagcagtccagccccggcctcgtatccncctataccccaaaagacaaaagaattcaataataatcaaccaattaaacacactcctctcaaaatgcgctgtccaacccaacaaccgtgtgagagctaggaaaaaagaataataatcgctgttgtttttgctgtatgccgtggtcatcacttgtcgtcgaacgcggtgtgcccattagtccctgttcctctgtagactgaggacgacgcatcatcgccgtgatcgatcgagaatggatcggagatggacggacggacggagggacgggtcagtcgtcgtcggagtagcagcggttcatctcgaacgcggcgacggcgatgacccagacggcgacgaagacgccgtaggagacgatgtaggcgctgacctcctgcgcgatgtgcaggccgaggaagatgttgccgatggccaccaggatcgccgcccgcccgatgta

SEQ ID NO: 394928 - DNA, 721 bp, Oryza sativa
  unsure (1)..(721): unsure at all n locations
tttttttttttttttccctttaattcgttgaattcgtgttttctgcaacaataacgtgctcaagcatgatgtgcatgcctcgcacaaattttttatgtacatacatatttcagtgtctgctcatgtttatctgaatccttatgggtttcagaacttcatcagaagtgcagagtcctggttgatgtcgcttgcgtgttcttctccacattataatatgctgttgcaaactctaatacgattacacacgatgattaactttcggcatgcttgtactacatagttactgtagcataaagaaggtttagtacgctcccattttgaaattttatttgggtcgtgttcccacccgtattttaaaaaaaaatttaacccgggctagcaaacgcccttggttttgccggcgacgagcgggacgctcttgcgcacgggcacggcctcgctcttgaccaccctgatcgaggcctcctcgccggcggtccgggcggggccgagctcgatggtgagctgcaccctgggcacgggggccctggcggcgaggtccatctcgtccagggccatcctgacgtgggacaggaaccgctcggcgagcggccggccgaagtcttcccggangacgacgcggagaccgtcatgtgctccagnggcgccggcatcgtgtangccggcacgatccacccgtaacggcgcaggccgangacagcctgaagggctgcgcgccgga

SEQ ID NO: 394929 - DNA, 903 bp, Oryza sativa
  unsure (1)..(903): unsure at all n locations
atcattgcatatgcttatcctacaatggaatattcatttgttagtcctaaagatagttcttatctcctcagtcaaacatatcatatgaccttatgtgtgccttctaaattgggaattttgtggatgtgcaacttcattcaatagcatttcagaatttgtcattgaatttcacctcgagtgtgagttatgttatggggccacatgtaattgaaagggtgctacatcattgtatgccacataacttatggaaaatccttgtttcatcaatataatattgaaccttgcatatctatagatgaaaggtaatgcaattaataccgaacctttcatgcagtaggatataaattgttcgtatttaaaacttttaaatattttacatgggtttgttgatttggccctctttcaagatgctctaatactgaaccaccttctggtggcacaaaggaatgatcctcgttatcggttttccttgttcatgtgactctggcatcttacgtagcatcaaaccaaataggtggttgttttatgcaattggtttcaaacacacaaaccatcataaggagccattgaaatatgcaaatttattcagtattataaaggcaagcaacgaccctatcatgacctgttctcttccttgttactgattgtgccgtggtggattttgtttttctgcggatatgataacttcaattagttctcatccaagaatgtagtcccttccagtatcatgctaagtcgctattgcataagctactatttgcatattcgntccatctgacaggcttgtgatgacggctgtgacgttattcattgatgaggatgcaaatctggttgacactagaaactattagagtttgctaccaacttttcacacacagattgctaggaaaatgtgtaagatgc

SEQ ID NO: 394930 - DNA, 545 bp, Oryza sativa
tggggctccttccaaaccacctccgcccccaacgtcggcggccgccacgtcgtccccggcggcgtaacaacgacacaaaaaaatgaagccccgaaaaacgtctctgtaccagccactgcaaccaaatctctgccccaaccccaggacaagcttctcggaggactactctctgccgcattcgaagaatcctcatgtcagagcagatacaaatcatctctctaccggaagaagtctccgttccctctgtccccttacctggttcagaagctgcggaagtacgaggcctaccacaagaagtgcggccctggcacgaagcgctaccggaaggcgatcgagcagctcaaggcggggcgcaacgccgacaacgccgagtgcaagtacgtggtgtggttcccctgcaacggccttggcaaccgcatgctcaccatcgccttcaccttcctgtacgcgctcatctccaaccgcgttctcctcatgcacgtcgcggcggagcaggagggcctcttctgcgagccgttcccggggagcttgtggtgcttccggcg

SEQ ID NO: 394931 - DNA, 483 bp, Oryza sativa
tttggttttatgtgatgaacaataacttcattcattttcacagcatacaaaaatatgatcatgtatctcctgcatattacacaaggaaaaataaattgccctaggtagatattaactgcaggagaagagtttaagtttgggattgctctataaaattacaatgcaatgcatgacactctgtccaagcttgcttgaagtccctcgaagataatagcgcaaggaaaaggggaaatgaccagagggagatgtatacaaagcatcgctatctcatagacgagccacatatgagttagcctgcgttacgtatctcacccacctataggggttgtatgtcttggatttctttgctatctgaagatatctaacctgcaactttgaagtattgtacatcggcatagtgaaattcatgtttactggtccagcttcctttgtgagatttccatgtgactcctgggaaaatgtgagctttgccgaagggtgtgc

SEQ ID NO: 394932 - DNA, 480 bp, Oryza sativa
  unsure (1)..(480): unsure at all n locations
nnnnnnnnnnnnnnnnnnnnnnnnnnnnnnnnnnnnnnnnnnngcctnanaaatgattgggtttcttgcaggcacattacttatttcattcatattatcacgnttagtacatggatatgtaaatttatgatacagatacaccattggggtccaaatgttcagagatacatcatccagggaattcaggcaatggaaaagaatcaatcggtgtgtggagctaaatgcagaggcctgatcatgccacattagcaagcacaccaggccctgccctaagatcatatctgagtaatgatgaacatgtccatgcaagtcactagctttgcatcctctatctataccttcctcttattctgtatatattcccattgggtgtcccttttttcccctctttttgccacctacatttggtggtggtctaagaatgaatcttaagaatcttccctgaatggaagatgatggcagggaccattacaagggtat

SEQ ID NO: 394933 - DNA, 497 bp, Oryza sativa
  unsure (1)..(497): unsure at all n locations
nnnnnnnnnnnnnnnnnnnnnnnnnnnnnnnnacacaaaggtgactataatcagataatcagttcaagaaggcacatgtagatgtaggggagctttaggttttacagcagtaagcttcctgcattccagtcattaagcaacagtgtgacaccatagcaaagtctttgccttgaactaacacgtgcagagtggaaaaagtggaagccatggggtgatgggggccaggcttttagactatcactgtatcaactcttgttccccagtgaacctccatactgattggtatgtgagcttcaaaagacagcttcctgaaagctataaactagatcttgaagtcaacataagtgcaatgggcttctgcgctgcagtaaagggatcccacctgaaacttcatcatggcaattgtctctagaggggaatcaaaccatgaatcaaaatcgtccgacgcatttgagggtccggaattaggaggaacactgacacttgagatagttgct

SEQ ID NO: 394934 - DNA, 386 bp, Oryza sativa
ttttttttgggtgcaccacagatcgactcatcatttcatcaagcatgttcagctgaatataatgccagctccacttgacatgacgaaggttcaagtcgaacagacacacatattccctgtttagaatattaatcaacagtttaagtgacaactgatgtcactgacgaagtgaggatgaactttcatcagtgtatagacagacactcattcaaggtgaattgatactttggtacagctatgtcttatggtgcttccaatgctggagtagtttcatccatgcaaagtctatttctacatcagcagcaccaagaatagtcaccctcaaggtacaaactacatctcaccacactcgctttatgacacatgcgagcttcggtcggctgttt

SEQ ID NO: 394935 - DNA, 499 bp, Oryza sativa
tgtcgcgtggggcgtcgccgctgagcagccacggccaccaccaccgctcgcgcaagatccaccgcaccttcaacaacgtcaagatcaccgtgctctgcggcctcgtcaccatcctcgtcctccgcggcaccatcggcctcaacctctccctccccaaccagcccaccgacgccgacgcgctcgccggcgccaaggccgtcgaggacatcgaccgcatcctccgcgagatccgctccgacggcggcgccgacgacgacgacgccgccgccgccggggacctcgccggctccttcaacgccaccgcgctcaacgccacggaggcggcggcggcctacgcctccgctgtcgaacgctacgcgctcggccccaagatctccgactgggacggtcagcgccgccgctggctcaggcagaactctgggttcccgtccaccgtcgccggcggcaagcccaggatcctgctcgtcacgggctcgcagccggggccctgcgacaaccc

SEQ ID NO: 394936 - DNA, 376 bp, Oryza sativa
ggaccaatgtggttccattgcttgcaagaacttgatgcatgcggcttgaacaagaatgaacaaagatttgtcgtgagcttgtgaggctagtagaacaaggtgacaagaagagcctatcgaagtataagcaagatttctggggaggactgggaagtatagaaaaggcacagggaggaaatggtcttgttgagttttgagcagaaaacatcaattatagaggagtgtggcaaggagatatgttaaggagatgggcaagaagggaggctggatcactgcactcaagaaggctttcacctctggccctaaggacaagcctacaaatggggcagctggtagcgcagtactctcaccagcacaggagcggcggcggcgcgcc

SEQ ID NO: 394937 - DNA, 384 bp, Oryza sativa
  unsure (1)..(384): unsure at all n locations
nnnnnnnnnnnnnnnnnnnnagcttcaaactgcacaggtgctcttcattgttaagggctaatactaggacacattagcaggtaccaagtatccaacgcccccaaccatcaagttggtgcagaaaaaggagtgcttgggccacctcaccacagacctaaaacagctgagcaactgtatacagggatgattggtttcatccaattacatgttcttaagtgttacatgcagctgaagcaagaccttttacaatctacagggcataaattatcttctcatgatcagagaatgcttacaggtctgatgtcccctcatggatagaccatgataaggacttggtgccacttgcccttttgaagcgccggtgtctatcttcagcaaacttga

SEQ ID NO: 394938 - DNA, 445 bp, Oryza sativa
ttttggtattgtcaagaaacctcgacaaccgattccataaaattcaatcaagtacaagcccacatatatagtatacagtacatacatgaaagaatgacaaaatatctgtacgccatgcaaaaacgtacaatcaacaaaatagcattaaacacacactgacactcatcgtgcacacatggcgaagcgagctacgtttaggccttgggtggtggcgcgaggaatggcattggaacgttggggacggcggccatcggcggcagcgccacctttggcaacgccggcacgacggcggggggaacgacgacagtgttcggcggcacggggggcaccgcgggcattggcggcagagtcaccgccggcacggacggcacggcgggcatcggcagcatggtcaccggcggcacggtcgggatggcgggcataggcggcatgtcacctttggcac

SEQ ID NO: 394939 - DNA, 395 bp, Oryza sativa
gttaattagaacactgaatatattagctgtgctgagtgtagctagctcagtgggcaaagcaagcaatatttcaatggcttccagctcgaacttgctcgcgatggccattgccgtggctgccgtgctcctagcgggcaacggcaacaccggccacgcagcgcggcgcctcgccgacacgaccgaggcgccggcgccggcgccggctgccgccattcctgctgttccggccatgccgaaaccgacgatccccaccatcgtccccgcggtcacgttaccgccgatcccgggccgtgccaataggtgacattgcacgccgatgccccgccatcccgacccgtgccggcggtgaccatgctgccgatgcccgacgtgccggccgtgccggcggtgactct

SEQ ID NO: 394940 - DNA, 473 bp, Oryza sativa
aaaatcagagaagaacttgaccaaaatagctctttggagaggagaagtaaatttacaggaattcattgactgcacattcaaaatcagatggaatcacaaaaggagggagaaatctggcacattccaaaattacaaaaattgccattcatcctcagtctcattgcctactctgttctaaattcaccaatactctgttctcttttttcccccaatttctggagaatcaaaatttgtccacacttttcagtgcgagattttgattagtagctccagagcggcatgtcggagccggcgagctcgccgtcctcccaccacgctccggcggccggcggctcgacgagcagcccctgcgccaagctcgcgtagtacgacccggcgtccatcccgccgaacctgaacccgtcgtcgagcttcaacgcccccgcgttgaacaccttcgccgacgacaccggcaacacgtccttgctgtcttc

SEQ ID NO: 394941 - DNA, 605 bp, Oryza sativa
  unsure (1)..(605): unsure at all n locations
ttagatgtggtcccatttagttttttggcatggattcgatactatgcttcggccctgtttaatagtccgtcttggtcttgcatgctctagtctagccccttctgatagacctcggtttgggcaagcagtagtttctcaaatcgacaatggtattgtatacttgaccaacaaagaagatccgagaataactgttttgctggattgtcatgggatttctccattcagatttccaatgcaaatcgatgaggtcgtttatcactatagttcaagaaaactatccaaatcgtcttggggtactatttatggtgcgtcttcctcctgttgtcagagtaattgcgcagactcttattcaggttctgaaaccatccacaaagcagaagttgcgttttgagggagaatcatataagaagacattagccgagttcttgcagattgtgccaacttttcttggtggcaaatgcagctgcccgcaatgtgagaagccgcgtaatatttcagtaatacaggcaggggaaggcagcaagagccaacctcgccagattaaccattgatggatggatcacctgtcgcaagcatgaactttgnatgaggcgggagcttccatc

SEQ ID NO: 394942 - DNA, 487 bp, Oryza sativa
ttccaatccccaaaccaccagatcgaatcgcggttgccgcggcggaggcgaggaggaagacgaggatgccggcggcggcggcggcgaagacgctggtgccagcccgcggcggcggcgacatggaggagccgctgctggcggagtcgtcggatcgcttctcgatgttcccgatcaggtacccgcagatctgggagttctacaagaaggcggtggcgtcgttctggacggcggaggaggtggacctctccgccgacgcgcgccactgggacgccgcgctgtcgcccgacgagcgccacttcgtctaccacgtgctcgccttcttcgcggcctccgatggcatcgtgctcgagaacctcgcctccaggttcatgtgcgacgtgcatgtcgccgaggctcgcgccttctacgggttgcagatcgtgatggagaacatccactcggagatgtactcgcttctgctcgagacgtacatccgcgacgacgtcga

SEQ ID NO: 394943 - DNA, 453 bp, Oryza sativa
tcacttccccaaatccccatccagaaaccaccccgatccgcgacgaagatgccggccgcgccgacgctggtgcccgcctgcgacctggaggagccgctgctggcggagtcgtccgagcgattctcgatgttcccgatcaggtacccgcagatctgggagttctacaagaaggcggtggcgtcgttctggacggcggaggaggtggacctctccgccgacgcgcgccactgggacgccgcgctgtcccccgacgagcgccacttcatctcccacgtgctcgccttcttcgccgcctccgacggcatcgtgctcgagaacctcgccttcaggttcatgtccgacgtgcaggtcgccgaggcgcgcgccttctacggattccagatcgccatcgagaacattcactctgagatgtactcgctgctgctcgagacctacatccgcgacggcgccgag

SEQ ID NO: 394944 - DNA, 483 bp, Oryza sativa
ttatgtttctcggtagataccgtgatgatttgcacttgataatgccaatctaggtataacatatgtgattttacatcagcacaagacatcaaaaattgcaagattatacaatgtccatgttctaacatccccagtgcttatctatacacataagtgaagcggcatacgcagtctgcagtctataataatctcatcatctttgtaaggttagcgatcttaaatcaccgaaacagctgccattggcaggcatagcggtctagtttttaactccggaatcccactcagcttcacggatagagcagtttcgacggtttgatgagggaaaccgggaggcgacattggcggcatcgcttcttcctgggcatcaaccatttctaggatcctttccttactgtggcttgcaaatgatcaccctggggtatatttggatgaatagactccttggttttgagatccgtatttgatgacttaaattttgcatgc

SEQ ID NO: 394945 - DNA, 579 bp, Oryza sativa
cgagaacaaccccttcggcgcccgcgccgtccgcctctacctccgcgaggtccgcgagcaccaggcgcgcgcacgcggcgtcagctacgagaagaagaagcgcaagaagccaccccacccctcctccgccgccgccgcgcacgacgacgccgccaacggcgccctccaccaccaccaccacatgccgccgcctcctcccggcgccgccgcctgagccgagccgagcttgctccaagatcgccggaaaacgagctgctagcctcctacgcatgcactagttactccactcccactccactccactatgatccctagctaggctgctcttgctactagcaaaactacggattaatctccatgcttgctactgctgctgctgctgctactgcatctaattaattaggttgattatttcctgatcgtttcttcccaactgggtcgctctcgcacgtcgtctcgtctactactatttgctggtaattttctcctctcctcatctcttcggccttctcctccctacttcatgtgtaatcaactactgctgtttgtgatgatgatatgatagctagctagcttctc

SEQ ID NO: 394946 - DNA, 372 bp, Oryza sativa
tttggggggactggcaataagccatatatttacaaaaacataagcctacagagagatacttctggtcagcaaacgcacgacagctgatcttcattgtgctacacggataagtccacatggtcaacccgccagcctctgatgtagaacgttccaacattcaacccctaaccagcaattttgcagacttcaggttctgacttctgaccgcaccatttactaagcgtgatgcacctagccagcaatttggcaatctgatcttcagaaaaatatacaggtgggtgagattggatccaaattttcgttcgcattgcatcaagccgacaaccattccagaagtggccaaagacaacacaattacacaggttcttgtag

SEQ ID NO: 394947 - DNA, 597 bp, Oryza sativa
  unsure (1)..(597): unsure at all n locations
nnnnnnnnnnnnnnnnnnnnnnnnnnnnnnnnnnnnnnnnnnnnnnnnnnnnnnnnnnnnnngattaactcttccaaggaatcagcattttcaacagcagtgttcaacggnaaagcaccaacagaaaattatacacggaaagcttttaacaccacaatcatatgctacatgtaaactttgtccaattacatgaaattacagtggatggccaacgaaaactttgatctcctagaagacatgcgatggctatggtaatgtggcatgtactacacctctctatagaaattattaagaaaacccttcgttacaaccagctctgcacccaaccccactgatttcaggaacgtgaagagtgggtgttaaaaatgttgcagggacgaaagagtccccttttttgcaccaaaaaaaaaaccgggctnggattganaccctngganaaccngccnccctttnttgaattttggatttccttnaaagantnaaaaaattaaaccccaanggncncctccccttgnaaangggcngcccttgggctttcttttntttanncccttccccccccttccttaaaaaagnntncgggcccctntttnaatt

SEQ ID NO: 394948 - DNA, 494 bp, Oryza sativa
agcaaaggagcatggcaaaaacaatgttgctttcctctgtctctttatgcttggtaaattggaagattgcatacaattgctgatggacagcaatcgtatacctgaagctgcgttaatggcacgttcttatcttcccagcaaagtttctgagatagtagcaatatggagaaatgacctcagtaaagttaatccaaaagctgcagagtctctggcagatccttctgagtatccaaatttatttgaagactggcaggttgcacttactgtagaaaagaatgttgcttctcggagggtccattatcctcctgctgatgagtacttgaaccatgctgaaaagtcagacatgactcttgtgggaagctttcaaaaggatgcaggtcattgaggatgaggaaacagaggatgcactagatgaaaatgggcagcccgatgaagaggtttgggaagagaacaaagtggacgagagcacagatgaagctgtcgaagttgatgct

SEQ ID NO: 394949 - DNA, 640 bp, Oryza sativa
  unsure (1)..(640): unsure at all n locations
gnaattgtaatacgactcactatagggcgaattgggtaccgggccccccctcgagttttttttttttttttttttgtttggctccatttaattacatgcatgcaatggcctacaggcctaggatctaacgaacgatgaatctgcaaaaatataatagcagctgctaatatcacgaattcaagaaatcatctcccatcactcttgttgccatctggttgcagctaactcaccctctttgttctgactgataccggcacgctcctggtcagaccccgcggtttcacctcgctctctgcagtgatctcatggcggaccacttcatcatcctcagctgaatcctcgatctctgaactgtagttccggccgaggctggcacgtctgatcctgccagatttcttgccatcacccgaaacctcgccgccggggaagcgtctcttcgtcggccctgtcnaactgcgcgcctcccgggcgtctcctgtctcttcgcggccccngaattccctncccaaaactccatggcggcttcccgggggcgttgcggtgcgccaaatcaaaacggctgggcccggctccacttcctgttctcaaaancncnctccaattcactgggtgatgacngtcccttccctccacgcccctt

SEQ ID NO: 394950 - DNA, 469 bp, Oryza sativa
  unsure (1)..(469): unsure at all n locations
attgagcagattgagtacattaatttttagattgaacaaatatacaaagaatcaaatgaatcaacactcctagaaccatatatgtcccttggcgacaatcaatcttggaagatccatggtcaccagcttagcttgttgcatactcgatgacagaaaccaaacaattagtgagttgaaaagaaaaaaaaaatcaaagaatagactctgttcaatagagtcgatcaatgggcagatctcttgtttttacaagatggcgtatgatgaattagttggacatcctgagcttcttgaccggcagtggactctgcacctcctcctcctccgcccacctcttgatcccggcnnnntttgtgctctccggcagcggcatcaggttgaggtcgaagttcctgacggccgacgaggcggccgacgcggacgccgagacggagacggacacccacgtgccgtcccaatagtggcagcgctt

SEQ ID NO: 394951 - DNA, 595 bp, Oryza sativa
  unsure (1)..(595): unsure at all n locations
nnnnnnnnnnnnnnnnnnnnnnnnngtatagaatcaactgatatatagatttgcatagcaagaataagtttctcccataacaagtgattcatgcccagacccacgcgtcatacaaagctaagtctatgaagtctgatactcaccacaaaagaagaattctttttctgttgcaaataaaaaaagagtttaacaatcataacaaacaccccggagcccagttgcaatggcaattttaccacggatagtgcaacgtgtacttcatcagtttacatgttttcgagctctggctagattactggccgcctgtgccgatctttgtcacggagatgagtgcgaactgtagtgatcaccacgatctctttgatggagcggtgccttgacttctctttgtcagagtntcctngaacttctgtccttagaatggngnctccgctgcctatccctgtcgggcttctctancanggttnccgctcccggatcggggtcccngnccttggctnancacgtattcagagtcccgggnccctgatancangggtcccgngcctctngnancaaagcncggtncncttngcccggagaanngganaaatnn

SEQ ID NO: 394952 - DNA, 582 bp, Oryza sativa
  unsure (1)..(582): unsure at all n locations
atccaaatgtaattttttcaatcctacatggcatgccatgtgtacaaagtatgctcgcgtggatagttagatgggtaagtgactcacttacctcatattagtgacccaaatatgtattttaaaagtagagtgacctatatgacacacttaaacaagtttaatgacccatcatgtattttactcttttttttaaggggaagtaactctgtcaagagagaccagagtgacgttcgctttgtagatatcctccatcgtaatcgttagcactcgagtccccangtggcggcgcccagacgccacgtcaccatcacgctgctactcagtgtatgccaggtggggcccacctccgtccacgtcgtcgtcgtcacacggtcgccggcgcgggaggctcgccctcgatcagcagcgccgagcgccagacggggtccacctcgccgtcgccggcggggcgagccacgcgcccacgtcgtcgaagagcgcgcgccgcagctcggccggcggcggcggggagacgagggcggtcgcccggcaccccgatggccgccgcgccgggtccacganggagcggaagaacacgtcccg

SEQ ID NO: 394953 - DNA, 333 bp, Oryza sativa
  unsure (1)..(333): unsure at all n locations
nnnnnnnnnnnnnnnnnnnnnnnnnnnnnnnnnnnnnnnnnnnnnntttttgggctttttgaatctaatgggggtttggtttgccgacatatggagctccattacatacatgttattgacatcaaccggtcatgtaaaatctccagaagtcgcatggttcaaatgtgtatattcagtttggactatgaacggatgcagccatccgactgcgactaaagaaagaaggggattgacacctcatggtggatctacaaaatcagcttacactagttgagactggggaagacaccatcatgctgcgggacatactcctggccattgggaagaagacaa

SEQ ID NO: 394954 - DNA, 466 bp, Oryza sativa
  unsure (1)..(466): unsure at all n locations
aggagcaacctaggcggattttgattttgcgccaaagaaaattcaacatttatatatgtacatacacagctcttactgcgacgcgacgggaaaaacaaacagggagacgaagaaagctgcgaaaaaagaaagaagaaaagatctactcctataggtacataacaacttcgactgatcaacctacagctggaaaattcttatcttgtagcaccatcagaagcgattgctaagcttgtgtggagagttcaaaatggcatccatctgattctgaatgactgttgtttctacgggcatttcgccgccgactggcctcgttggtggccactcaccgccggctgtttctcctgtgtgtcggtggttgttgtttctaatccttctcctccttggcttccctgangggcatgtcaaggaccccatagcctccctcatcgatcgancccgctgccgccgacgaggtcttcgagtc

SEQ ID NO: 394955 - DNA, 424 bp, Oryza sativa
  unsure (1)..(424): unsure at all n locations
nnnnnnnnnnnnnnnnnnnnnnnnnnnnnnnnnnnnnnnnnnnnngaaaagggaaggaatgatttacttatctcctcaaagaatgcaaaattttattccatggagaaacatgaattgcctcagaggggaaaaaaatcatgtaaaagagataattacatgtaaagaatggccaaaaaattgttaatgatcttgtgctgaacatgtttacaaatctcttcggcttctccagctagcttggctcatctcgtcactacaatctcggctgccgaattctctcagctggaacaatctaatttcttcgggactgtggttctaaggaatacttcactgcggccaggttgaaggccattgttcaagttagagtctgctaaactatctagngctctaaccacctgagagatgcaaaggnaacatcacattttgg

SEQ ID NO: 394956 - DNA, 330 bp, Oryza sativa
  unsure (1)..(330): unsure at all n locations
ttttttttttttttttnatatccaacaactcttgtaactctcccctgcgttttattatttacagcgtctccgctatacagcaaattcaatcagcaacaggattcgatccatccatcgatcgatcggtcggttggttggtttgacagcgtgcgtctctaacatgttgttccactgcaacattgtacgcgtgatctcgatcatggcggcatgtaggagtggtggacgtcgtggtcgtgccgcggccagtgcaccccttccctcgggcacggcgccggcggaagcggcgcccgggcgccaggtacgtcgggtaccgttgccccggcatcaaca

SEQ ID NO: 394957 - DNA, 506 bp, Oryza sativa
  unsure (1)..(506): unsure at all n locations
nnnnnnnnnnnnnnnnnnnnnnagaagggcacactggaataacagctacaaaacgttgcagcacactaaagaacaaatgaacaaccagttgtttacaacttgccggtagaataaataattgcctaagacgacagggacaggaaccaaaatttttcagcatacatgtgtatatattttatatatactaaaggaacagaactaataaaagaatgaaatgtctcagaatcccagaaacataagatgaaagtgagaccaaaaaagggtggtttagggagcctcttatataatagggtgccaaatcaaaaacattttggccagacttatttgttagcagtgtatattttgctcgtatttatagttggtactctccatatcctcaaaaaacggttctgttatgttcctcccttctggcttaagtgggntcctccttccaagatgccaatttcttcaggattccatcacctcagctgggncccgtacggnatagaaagcatcagtatcctggg

SEQ ID NO: 394958 - DNA, 420 bp, Oryza sativa
  unsure (1)..(420): unsure at all n locations
gcgcccaaatcccctccattgccttcctcgcttcgcatcgccgctcccgccgccgccgtcgggctgctcgccggcattgggtgttggttgtgaccgtatacaattattgtttttggagctgagcgatcagatgcatgagccttccttttaaatgatctgtgtccaccatggcgatgaaccaaatgcaggaacttcccgcttaatgggctggatgcgttgtatgcacgtttgcagtgacaagaagacattgaaacgttggttttttattgacaagagggttggttgagtgtctaactcttaaggaatcctatagtctacttgcttgctcttgtgttgttagtaactgttcttacaacaactctgcggagagttctgttgatggatttgaagncaagcaactctcctgttattgctgatcct

SEQ ID NO: 394959 - DNA, 839 bp, Oryza sativa
  unsure (1)..(839): unsure at all n locations
agagatctgatctatatatccaggtattatttacatatcaggtgcacttaacatgcatgtacgcttgatctaccaaagatgtcttcagcaagtttattaccatctatcataaaaaataagtatattacaagatgcaacaaagcaaaggtgccactatactgcatatggaaccttaagtgaagtcacctcactgggggttttagagttggagatgcctccattgtgtgtgatgcatattttccacttcggatggctaataaagttttgctgcctcaagcttactgcctttgtttgctaaaccatgaaaccagcacaacaataagagactccaattgcaagagaccttccaggaaatctttagtaggcatcatatgttcaatacaaatatacctgaggttgttagagcaaattatctgctcatgtacgattacactatctctattatcagaaaatcacaagaacttttgttgctgggttttgcattagtacaagtatctggctcctgatttttcttgacgtttatcattttccattctgagctatacgagcaataggctccggattgtagtgatctcctgtgcaagttttacctcttcggcaaaaaataattgtcggcctacggggcaaactattctgtcccctctaactaataatgtctttgaacattttgatcatataccctgccattttatcaaaaattgaggatttattcttctgtcactgacatgtagggtttatctgagggcattgacatgcngaccatgagggtanatcctcaattgtatctaatgggagggcatatgatcaagatccacattaaggacccagctattaaaata

SEQ ID NO: 394960 - DNA, 494 bp, Oryza sativa
ttgtttgtcatagaacatcaaattggcctatatttgactcggatgctcagttcagagagaagaaaaaacaggagcatcaaatcaaaaatacatataggataataagctccttttggagagcaagattgggcgcaaaccaattaaaccgacgcatagacaaatcagaccaaagccgctcagatggatggacgagcgccgcaacgacgaacagtgaaggtgaaggcttgacaggcaaaacagctcaggtctcatttgtgtgattcatgcaaaagatgttacattccatggctagcaacaagtagaaggtgatttgtaaagccctgtcgaccaagcttcaggcccaaccaaacatgtcttcttcaagatacataaaccataacgatttaactccagcatatcatgcatggggctgcagccctcgagcctcatcacaaaaatgcaattgagtcaacctaaatgcttaagaaattcaagacgcctttcctgcaaagctc

SEQ ID NO: 394961 - DNA, 612 bp, Oryza sativa
  unsure (1)..(612): unsure at all n locations
aaatcacacaaaaagagaagaggaggaagaagagaagagagagagagagagagagagagagagagagagcaacggaaaagctacccaagggagaagcgagcgagagagcgaagcagcctcctcctcctcctctctctctccttcctccgattcacacacactcctcgccgtcttgtttcttcttcgtctgggtggttgatccatccatccagagattgcctgtgcgaggaagggagcgggcgagtggcggatttgtttttggtttgtttttgagtttgtttttattggtggtatcctctcctcctcctgtgcgaggagcagctggtggattgttcgttccagctccgtttcttgtcttgatttggaatccgggaaatttttccgcctcccgtttcttgatttccggtccccccccttccttggtggaagtgggaaggggagggggaaggattttttggtggggaattcgagggggcgaggtgatgaactcttgcctctttgaccagccttgattttcctggtgattttgcttggaatttctcggattttntggggggggttctttgatcccgggctccatggngtctctgccatggcaaagtcggcggcngg

SEQ ID NO: 394962 - DNA, 423 bp, Oryza sativa
aacctacccaaattaccaaactatactactgctcgacacggttcgttttttttcaccgacccaagaagcagagaaagaaaggaggtgagaaatctggtgggtgtggtgatggccgcggcgagtttgatcaaggcgcccgtggggcagaatcctgcgaggatgggcgcggggaggagcagcggaggaggaggggtggtcaggtgctcgctgcagggcgccgtggtgggcggccgggcggagtggcagagcagctgcgccgtgctgtccagcaaggtggccgcgctcggggcggcgtccccgcacgccgcggcgccaagctttcgttaatgggcatgtcgcgccgctggtcccggagcagcatgcggcggccgaagacggcggtgcggtgcttgatttggtgcccgtgagcagcgttaatggcgg

SEQ ID NO: 394963 - DNA, 523 bp, Oryza sativa
  unsure (1)..(523): unsure at all n locations
atcttgttcggccgccctttntttttttttttttgggtttttaaagaaaaggtaatcatctatgtataatcagatgaacaaatcaatagaacacaactcgatcgacctcttcccttgctgcagccatggctcatgcgtgtagagccatgcgagcaattaagggaaaattttgtaaaccacctaaattatctacaattttgatgaactaattaatttacaagcctatacatatgcaaaccaagatgattttaagctcatttcggaatttctttttcgattattacgccgtgcaagtgcaaggtcgcgagaggaaaaccctaattggcgaccatgcatcatgcacagcgactgcgtcgccgtcgccgtcgccgttgctccggtgagatttgtatcattattggtgctgcgacggcagcggcccgaagatgtcgaggaaggcggaccggcgagccgagcgcccccggcgcgccgacggggctgaagaaatggtcgccgacgggctgaaaccagccggcgcccgggg

SEQ ID NO: 394964 - DNA, 1276 bp, Oryza sativa
  unsure (1)..(1276): unsure at all n locations
gttggtctccgcccatccttaggaaaccacccgcccccggtccccggaggaaagcttcggccatggcggcggcggcggcggctcggaggggatgcctggtcgcgcttctggcggtgctcttcttggcctgcgccgctgaggggggtgcggcggcggcgtcggcggcgcagcagcagcagcagctacggcggcggaggcatctgctgcggcggcagcggcaggtgcacagccacctcaggcggctcaacaaggcgcccctcgccagcatcgagagtcctgatggagacatcatagactgtgtgcacatctccaaccagcctgcctttgatcaccctttcctcaagaaccacactatccagatgaggcctgattaccacccagaaggcctgtatgatgagtccaaggttgcatcacagcagaacacccagacaatcacccaaatgtggcacatgaacggcgtgtgcccggagaacaccataccaatcaggaggaccaagaaggaggatgtcctaagggccagctccatcaggagatatggcaagaagaagcacaagagcaccccaaaccccatgtctgtcgaccctgatatgctcaatgagagtggccaccagcatgcaatagcatatgtggaaggtgataagtactatggagctaaggctaccatcaatgtgtggcagccaagaattgagcaggccaatgagttcagcctgtcccagctctggatcttgggtggttcctttgggcaggaccttaacagcattgaagcaggatggcaggttagcccagatctgtatggggacaacaacactagactcttcacctactggactagcgatgcgtatcaggcaacaggatgctacaacctgctgtgctcggggttcatacagataaacaatcagatagccatgggcgctagatctccccactctccaactatggtggttcccagtatgatatcaatattttggtctggaaggacccaaaggagggcaattggtggttgcagttcggtaatgactatgtgttaggctactggccatccttcctcttctcctacttggcagacagtgcctccatgatagagtggggtggtgaggtggtgaactcggagcctgatggcagccacanctccacacagatgggcagtggccactttccctgaggaaggatttggcaagtccagctacttcaaggacatacaagtggtggattcatcaaacaatcttangggcaccaagtggtatttgggcaatcactgngcaatccactgctatga

SEQ ID NO: 394965 - DNA, 990 bp, Oryza sativa
gggggcggatgtcaacatgtttaactttaggaagacaagtatacaaggcaaaattttgttgacaactgtacaatgagatcaaaacagtttattgttttacaagatcagttcttaatcttagatttatatgctttccatgcttgtccacatgcctgaatatttgctgacgcttgatttaagaacttggcaatgttttcttcatatttatccaccaatgcagggatggtgagagcaagaacaaggcatgcatataccaaagtaatgagatcagtcacacggccaactatggagatcagcagtaatactgaagccatcttgtaaaagagactggagtcctttccgtgtgcaatgttttcaaaaccctgtagtgccttatgtaggatgttacccactgcagctgctgctttgctcattgagtcttcagatattttgatcagtggaacaggtggaggtggcctgttgagcagccgcgcggccttggcccagacgaagaggacggcgagcacgatcatgagcacgctggacacgaaggagagcagcgtgtagccaggcaagcagtagaagaggacccaggacgccgccaccgccgccagcgaccagccggccacctccttcctcctccacagcaccacattccccacttcggcgcccacaaaacccaccacatcacaaaacgcaaattgcaaacgaagccgcgcaaccacagcccgcaggggaggcgatctacggcgggcgaactgaagaagataactgagcttagctcactggcgccgccgccgaggaggccgtgcagcgatctctgggcgccgagcagccggcaaccttggtcagaggcatccattgccttgctgggtggatgaatggatctctctgatcgggggagaccgatcgggagttcagctggtggaaaggggagaaaagcgcacggcaagaacagcggcgtgatgcagaagtggtatctgctgaatcccccgcatactccaactcctc

SEQ ID NO: 394966 - DNA, 646 bp, Oryza sativa
gtcgcctaccggtgcctcagcgggagccccaagaacggggccgacatgtccgccgggggcgacgcgctcgagccgctgctcgtcgccaccgacgacgtccccctcggccccgtcgtgctgttcgtcgcgccggatcaggaggccgacgccgccgccgccgccgacgacgacgaggacgacaaggcccggcggcggcagcggcggacgcggaaggacgagcagcaccgccgccgcagccgcctacggacggtcgcccaagggcagcccgaggaagcccgccgtcgccgccgcttgccggaacgaggagttctgggtgtggcacgtccccgccgaccacaaggcgtgagcgagtgacacgtggcgcgttgcatcgcacgccatgtcagccgccgctgtgctttgctccacgtgtgcgacgaacattgtgtgtgtgtgtgatgaggtctagtactaacactggcgatttgattaggatttgcatgcatccctgtactctgtttgtttcagtgagatgcagagtgagagagcgatcaattcataattcacagcacaacgaagatcagatcagaaaatatcttatcaggtctcgtcttctttaatccaacccactgtttgatttgattcgttgatcacagtgcaaaccaaa

SEQ ID NO: 394967 - DNA, 750 bp, Oryza sativa
  unsure (1)..(750): unsure at all n locations
agtacaattcaccttcttggggaataaactatgtaacactactagccctaattatttggacaaaagagattctttgtccaaagaacacaaaaaaaaaatccaaggattacaagagtttgctttgttctcataaatatcaatgtgaaatacttacaccaattaacttagccacttatgattcacaaagataagatataactaactagcctatcaatagcaatttgagaggacccaccgtcttccaagcagcgtgccactttgttcttaagctcatttgctctttccctcatctcagctccctcatttttccccattaatttcataatcgctttctcaattttgcaccactctaactttccctcgagctcaaaccctacaccccacaccccttccacgtaccttgtatttatcatctgatctgcgaattgaggcctacatatcataagaactccctcacatatactctccaatatcgagttccatccaccgtgtgtccaaaaccagcccacngganagtgtgccagcacctcctgctgtggggcccacttaatcaccttacccctaccttccancgcacnctcaaacccatccgggaagcatgctctcgccacccccctcacaaggtttggacgaancacccatagaaaagggatggccggntctttctccaaaccaaaatgcgaccgccaaggaaancgtcggagtccaatgggatggnaagctcccaaaggctcacggtacaacacggga

SEQ ID NO: 394968 - DNA, 988 bp, Oryza sativa
  unsure (1)..(988): unsure at all n locations
agttgatggaaacgatgataaattaataagctaagtggtagaaatacaactaaatttatagttacaaatcagcgatcagcaccaaggtttcaaaacatgaggtctcccaaagccaccatcatgttatactgaactccggtcaacataggaaaagcatcacgtaagatcaaagcatgctactgacattaattaatgttctaacagtaccagcaccctctaatgcgcttgtcatagcttacagcttataaacacgtacttagatggttccagcggcgacaaatgccgctgacagttaaagttgcagaggcaacaaatgcagacgagcagctaggtactatgtcacatgataagtgctccaacgcctacatctaagataaaaatatcagaatcatcagtccctccatctccctgatactcggccaccatctggagatccacagcaaaatatgtggttggaagcaatcctagtgttacttcacctccaggataattttgcaaatccagctcatagatcagatcatcatatccatagttgaaatatcaatcaccctgccaacaacaggcctttgctcatgaacggtagcacaactattgcccaggggttttggnacttgcttcaaagactggagtgaatagttggcgtcgccatcatctagttcttctcttgctggaaccttctcagtcaaagagatgccaaatattttgcaactatttggtgccaacagctttggttatctggaccatcctttccatgtcgaccaggggagtgagacttctcaactggaacctggtccatctatcacttctccagaagtaggataaggctggagtggtattctttgctctcttctttcaattccttcagaaggaccaaacctaacacgcctatcattctcgtgcttgtccaactgtccatgcccaaactccaacctgggcatcttgaattagcttgctgaaacattaggacagatggcggagatgatgattg

SEQ ID NO: 394969 - DNA, 528 bp, Oryza sativa
  unsure (1)..(528): unsure at all n locations
nnnnnnnnnnnnnnnnnnnnnnacagtagcctgaactttgctgatgctgtaatgtaatgggatttaatttacatttttactccacaaagttcggtacagtgcactggtcaccggccttcgacgatggtgacggtgacgtcgttgacggtgcaggtggacgaccactcgccgtcggtcgagccgccgccgccgccgcggtcgctgcagaagcccgggtgcctcggctgcggcaccaccgcgctgaggttgcccagcatcatgaacaccgccgccatgtgcggccggtcctccggccgctcctgcacgcacaggagccccacctgcacgcaccgcagcacctccgacctgctgtaccccccgccgccgccgccgccggccaccgcctcgtcgagcagcgccagcgcgttgccctccctccacagcctccacgcgtggctgagcaggctcgtctgctcgccgctgctgtacatcccgcggttcttccggcccgtgacgagctccagcaccagcacgccgaagcttgacacg

SEQ ID NO: 394970 - DNA, 415 bp, Oryza sativa
ttttaatggaataactttggcatcaggctgggatattatcaatatgtaagagaaaaggaaatatcattcttttcttgtacaggaaaaggaataaagggaacctcacagctgttccttttttgtacacttgagttacagctgaatcactatgaagaccaaagaaaagagagagagaaataataactggaaagggaattgctagtctataactctgatgatgagaggaaactagctagttcttcttctaaccggatgttgtgtaagagcggacttccttgagtcacagtgtggtgtgctttctggcatgattggggccatcctcatctcttgctcgcgaattcggtttatctccgcctccaccaagttcatcgatgggcgatgctcgctcgtcgggttcacgcaccacgatgtcaac

SEQ ID NO: 394971 - DNA, 601 bp, Oryza sativa
  unsure (1)..(601): unsure at all n locations
nnnnnnnnnnnnnnnnnnnnnnnnnngagagtgagcaagagagcaccatccaatcctgttaacaagaaagaagntaaaactagaacatcaacagcaacaaaaggggcatgcctcctcaaatctccttgttgatcgatcactgtacacataacgttagatagcaactttcctctctttggagtacatggagaagatggatggaatgcgagattaaaagaaaaaaaaacatgcttcttctctccatcaaccaaagtcacaacagtagtagtactaatggaggcatgcatgacagacatggaactaccctcaacttgtcttgactacactgaccccaggcaaaacatggaaaacatggatcaaagaacggtccaaaccacaaaaaaagaaaaggatgaacgatgattagtgggacaaggacgacgacgacggacgactttcttcttcttcctcgacgcaaccgagtcaccatttgattagagctgatcagacagcatggagctagcttctccttcgccacacaagagcagacgacggcattgcgatcccaacagcagcagtagtataggaggtagtagtagtagtagtagtaggtactataaca

SEQ ID NO: 394972 - DNA, 520 bp, Oryza sativa
cttaggaatatggaggagggcctggataggatcagtctgattgaactaccttccaaaagaattagtttagtttggggggcaagtgtgttaaatattaccccagaatatgaacactacgtgctagagattaccaagttgtgatttatggaacaagagccaaaggctgcagatcaccaagtccttctcatcttgattactaagctcattttcttggttgctccttttcatcttgttccaaatccagcagattaatttgatgagctttaaatcttcagcaacagccatattccctttccggtctgaagggtgaaaattcagtgcataagcagtcagcaattaatagtacagcacaaacccaagatcatgcagatgatgcattggatatcttatgcccaataagacggatcaacatcaaatgctccaaaaagcctttagcaagtttgactagattctgccctgatactggaagtgtaatttgtagtcctgcaccagatttgcaaaagttggtcggcatggaccc

SEQ ID NO: 394973 - DNA, 862 bp, Oryza sativa
  unsure (1)..(862): unsure at all n locations
tatnaaanntnttttgattttttcaacaacggataaacgccggtattccattataaggctgggcatctataataacaacacgccatcaagaacatggcttctaaaatggtcatctacgtcgagaccggctggggttcatcagcatcatcatcatctatgaaccccaggaacaagggaggaggcaaaattaacacaagtgccgatagcttcaagaacttcccccagaatgggggcaatatatggatttgaacacgtacaaaaaagaaaggaacaagaagaatgaataaataatatgtcattagctagctcttcatctcgccttcctcgaggtcggacgaggggaggccgctcaccctggccttgaggggaacgtcctcggagtcgtccagcatgtcgctcttgttccgggggattggggcggaggccttcttctcggtctccacggcccagctgtagaccaccatgcccatcacggcgagcagcatcccgaggatgttcttcacggtgagggccgagtcgaacaggatccagccaagaatcagcacgcacacggtcttcatgtggcccaggaactggaacgaaagttgcaganaaccggccgatgcagaagtactggctcatgttgcagaaganagccaaggagcaagaaagcaatatgaagaaagttgcccccanttgaaaaatttgttnttttaataaccatcgcccattgangttatnttccgcaaagggaccanttttntaaaaaacccncctntttggtgcattttgctnaaaattcaataaccttnttttttcttctttaaccnnttcaaaaaacccccncccnaaaatccttggtttacccncccnaacggaacct

SEQ ID NO: 394974 - DNA, 431 bp, Oryza sativa
  unsure (1)..(431): unsure at all n locations
nnnnnnnnnnnnnnnnnnnnnngctataagagcttgaatatatagatgaaagtatggttatactatttctgcagccaaaataaaaaccttaatgataccaacacaaaatacaatggaattggggaataaaaatatgcggcaactttaaaacagccatctactcctggggacaaacagccatctacatctggagtatgtagcaagagacgagtttgatcacgagtttactttggctgtacagcacagataagtgacacctggggagcaatgccatcgggtgaacacagaagtcagcagctgacttcatttagatgttaacattttagtgggtaatgaaataaagagctcattttgattcctgcatcctgaagtttttgcccatgttctatcgccactggcccttggtgggacaaatgaaaacaatggaaggt

SEQ ID NO: 394975 - DNA, 331 bp, Oryza sativa
atggtacctaaaatgaacggttttgtggttgggggtgattttgtaacccgattacaagttgatggaccttcggtgtacttttcctaggctaactaactaggcttgtgtagggacaaggctttggcccaaaaaaaaaaggaataagttcaccggaggtccctcaacttaacagcgagattattttgagatccctcaactataaaactagaaatgttcacccctaaactcactcaaaccgttcactggaggtcccataaatgttaaaaaaaaaaaaaatatagttacaaaattattttaaattaaataaaaaaaaaaaatgttcatttatttg

SEQ ID NO: 394976 - DNA, 475 bp, Oryza sativa
  unsure (1)..(475): unsure at all n locations
nnnnnnnnnnnnnnnnnnnnnnnnnnnnnnnnnnnnnnnnnnnnnnnnnnnnnnagataacagtaaactaaaatattttctccactctgatttgaaacaatataagaaaatcttctcttgtttgagttaacaatagaatcttttcttaatcacaatttgccccccaaaacaacccccaaaaaatttccacatgatgaaatttgggcgggtaatattactaattctacatgtataaacccgctgcggatgaaattatttttttcctttaatataagcttaattattgattgacaactagtagggggtgttgaccatgaagcacttctctctgatctctccctcggcacccgggagcacgtcgatgttgcccatcttcaccatggcggcggcgaacttgacctggaacaccttctcgacggcggagtggagcttgacgacgccggcggtccacgggctgtcgagcagccctggtcgg

SEQ ID NO: 394977 - DNA, 483 bp, Oryza sativa
ttgttaaatgcaagttaagttagtgcactgaaggagagcctgagatacgtcgtcgtacacacttgattaattaatggcgtggaggaacagcgggcgggtgaaggtgatgaacaggaggagcagcaggatggcagtcatggcagccgccgtgctggccgtgtgcagctttgcggcggtgaccatggcccagctggagatggacttctacagcaagacgtgcccgaacgtcgaggagatcgtccggcgggagatggaggagatcctccgggtggcgccgacgctcgccggcccgctcctccgcctccatttccacgactgcttcgtcagggggtgcgacgcgtcggtgctgattgactcgacggccggcaacgtggccggaggaaggacgccaagcccaacctcactctccgcggcttcggggcggtgtagcgggtcaaggacaagctcaacgccgcctgcccggccaccgtctcctgcgccgac

SEQ ID NO: 394978 - DNA, 422 bp, Oryza sativa
tttttttttttttttatacacatataatctatttagagaacattatgttacacagtacaaagtaggatacgaggagagaaaaacgcagagaaaacatctgttagtacaatgccatccatcaagatcgtcgtcaatggaagccatgagatggcagcagtagcagaaacagggaagcgacggcggcggccagcacacggcagccaccggcgccggcgctggatctcgccgccgccgccgagctgctgctgtcggtgggcttcgccgccgtcgccgcctcttacggtgggctggcaatggctacaggcggtaacggtgggtccagcacgtagcccggcttcagcaccggcgccggcgggagcgtctgtggcagcttccccggtgcctccaggtgcaccagcgcgccggcgttcgccggcaggatc

SEQ ID NO: 394979 - DNA, 621 bp, Oryza sativa
cccaaaatggggctttcatagttcgacacaaccaaatccaaatcggatgcacaacaccataaggcaaacacaataaccaaagattcacccaaataaaatcaacaaagggatccatgggagaactccaatccaccccaacaaaattagcattgcaacctaaagcaattgacaaatcccttcttacatatccatcttgacctctttcttcagcttcttcaggtccggcactagatcgatggcgactagcctggatagaagatgaacagcgctggacccactttgatgttgtggtcaacaccgttgccgcctgcgcttgcaccttcctccattgccacttacaaccaccagatccggagaagttgaggtcgttgccagccttcacgctgccctccaccggtccaccccaacgccagcctccgccttgctagatccaccatcaccatggccactgctggtctgctgccgccttcttgtccccttcgccgtggtcgttgcgaaccggacgctcggggcgggaggatgagagggaatgctcgaggcggaggatgagaggtggaggaaaggagaggtagaggtagcgaaccggacgctactgctcggacgcgtgggcggacgcgtggg

SEQ ID NO: 394980 - DNA, 438 bp, Oryza sativa
aatcgtcaacaaggacattttttctttcttcctttatttcttacaatctatgggcaaatggtttgccaatgtaacactactctctggagctaaaaaactttcatgaaggtatccaaggtagatcaaaatgttgaggttgcaccaaattattaatctaatgctgcgctgcatgtcccactttctggaaaccatttgcaggccctccaaatggaattaaaatgaagagattagacataagcaagtaagaagctacatgagaaattctacccaatcttcagctcagcctaaaatgccagagaaggcagaaattacccatcgagcacaatcactaaacaagctcagaagaatttgcctcttttatccttccttttggtcaagatgtacagtcgataatgtaatagccctggtatgtcaacagcccatcacagcacaattgtc

SEQ ID NO: 394981 - DNA, 756 bp, Oryza sativa
  unsure (1)..(756): unsure at all n locations
tttttttttttttttattaaaggatatcttaagctgctgtgtattgaatcaattaaaatctcagagaaactatccataccaactaaccatgtacagaggcaaatagtagccttacagtatgaggtgagtagtaactcgccttattacattagaatcaaagaatgaattgaatcagtttacagaaagaatggtgctatgaataaaaagaattgaatgttggaaccccagcaaaatagtgcaagctcctaaaattttgcttgccaagtgacatactatctgaataccctcctcttccacacttctttaccaccgctctgttagtgcgctaagctggagcgagttcagtctcccttcaacaagttaaaattatgctatctgaataccctgctcttccacacattttaccaccgctgtgctaataagctggagtgtgagttcagtctctccctccaacgacaagttaaaattatcttgagaattgctgcagctgtatgatcacaatgctgatatcgtcagtcgagcccctagtaaccgcagtttcgacgagcctcctgcaagcagtcatgcgagaagctttgtcgttgctgatgcaaagcggcctggcaatgtcaactgcctcctggttctccaccttgtcccacaaaccatcagaggcaagaatcaagaattcgcactgcgaatcaacacccagagttgtggtgtctggatcagacaccncccactgcttgaggtgtgctcgtgccgattcctgcagcc

SEQ ID NO: 394982 - DNA, 525 bp, Oryza sativa
  unsure (1)..(525): unsure at all n locations
ccgccggcgacggcgatgatggtgcccaagaaagaatcgatggagangccacngggcngcngccgcngcngccacnatccccaggaacaacagcagcctgttcgtggacctgagctacgacgatatccagggcatgtacagcggcctcgacatgctgccgccgggcgacgacttctactcgtcgctcttcgcgtnnccgcgggtgaaggggacgacgccacgcgccggcgccggcatggccatggtcccgttctgaggtgacggcgacgcgatcgaacaggtggtgatcgatgctgcaacgtgtgtaaatatacagcgccggctgggtcaagagatggctcgggtgacgcgcgcgcggcgtgtcctggcgttggcgccggggcattctttagttttttcatcttttcatcatctcagatggtagatacaaaacagtgtatgtatgtagctctgtttctctctatagaaccccaacatttttgttgggaaaaaaaaaaaaaatatcgaacggctcctcnacccaaa

SEQ ID NO: 394983 - DNA, 585 bp, Oryza sativa
  unsure (1)..(585): unsure at all n locations
acggcgaggcggctgcggcggcggacgctccaccgccgccgncgccgccggtaggaggtggtgatgcttagtctacatgcactgcgagggctgcgccaggaaggtccggaagatcctcaagggattcgatggagtggaggatgtgatcgccgactcgaaggcgcacaaggtgttggtgaaagggaagaaggcggctgcagacccgatgaaggtggtggagcgagttcagaagaagaccggccggaaggtggagctcctgtcgccgatgcctcctccaccggaggagaagaaggaagaggagaagaaagaggaacctgagcctccaaagcctgaggagaagaaggagccgccggtgatcgcggttgtgctgaaggtgcacatgcattgtgaggcctgtgctcaggggatcaggaagaggatcctcaagatgaaaggggtacaatcagctgagcctgacctgaaggcgttggaggtaaccgtgaagggtgtgtatgaggaggccaagctggccgagtacgtgcacaagcgcaccggcaagcacgcttgcatcatcaagtctgaaccggtagccccttccgagaaggt

SEQ ID NO: 394984 - DNA, 543 bp, Oryza sativa
  unsure (1)..(543): unsure at all n locations
agaagagagagtgtgggcgctcttaaataggagagaaaaagaaaaccaccgccaccgacatcgcctcgcctcgtaacccccaaatccagcgcctcccttcctccccaataatcgaatccaatccatcttccacgcgcattccggatccgcggaccaagggaggatgtcgtcgtcgtcgtcgccgcccgccgcctccgccgccgcgaggtgtgatctggacggcaaccccatcgcgcccctcaccatctgcatgatcggcgccggcggcttcatcggctcccacctctgcgagaagctcatggccgagaccgcccacgtcgtctacgccgtcgacgtctactgcgacaagatccgccacctcgtcgaccccgccccttcccaccttcatggccgcatctccttccaccgcctcaacatcaagaacgactccaggctcgagggcctcatcaagatggccgatctgacgatcaacctggcggcgatctgcacgccggccgactacaacacgcgcccnctcgacaccatctacaggaactttatcga

SEQ ID NO: 394985 - DNA, 478 bp, Oryza sativa
  unsure (1)..(478): unsure at all n locations
cggacgngncngngacgcgtgggtggatcgaagcggggagagaggacttgaggagangcgtcgtggagggaagtttttgaaaaaaattttccccaacccgctgggcgcgatgccgtcatgatcccccccctcgcctcgctgcccaaaaatttttcaatctctctcgcccacattaatcaccttcctcacgaggccaacgagcagaaatcccatttcatcatcattcataccaatcctctcggtttcttccgcgtccccggattcagtttcctcctcctctccccccctctcgatccctcctcctcttcccctcgttccagcgcgctcgccgtcgcccgccgccgtccgccgaccatggaagcagctggagtggaggtgaacggaggaggaggaggcgacgtcctggtggtggtgccgcagcagcatgaggtggcggcgaatcaagcggcggcggcggcggcggcgaaagggaagtccg

SEQ ID NO: 394986 - DNA, 580 bp, Oryza sativa
  unsure (1)..(580): unsure at all n locations
tccgatttccgatctctatataaaagacctaggatttcgaaatttgtgggtccccctcccccttcgcgcgcgcgctctcttcccgccctttttttttccttcttcttcaccggtgggattgattcgtggggtgcggatctggtttttgggggtgtgtatggcggcggcggaggcggcggcggaggcggcggcggcgctggaggggagcgagcccgtggacctggtcaagcacccctccggcatcatccccacgctccaaaacatcgtgtcgacggtcaatttggattgcaaattagacctcaaagctatagctttgcaagctcgcaatgcagaatataatccaaagcgttttgctgcggttatcatgagaataagagaaccgaaaactacagctctgatatttgcatcgggtaaaatggtctgtactggggcaaagagcgaacaacaatccaagcttgcagcaagaaagtacgctcgtattatccagaagcttggctttcctggctaaattcaaggatttcaagattcagacattgttggcncttgtgatgttaatttccatcaggctgggggacttgaa

SEQ ID NO: 394987 - DNA, 531 bp, Oryza sativa
tgtgtgaggagctcgcgaactccaaaaccctaaccctctcggagcttcacatcggcggcggcggcggccatggcggagggtggcggcggaggaggagggtcggcggcgtcggcggcgctgaaggatcaggggaacgagcagttcaaggcggggaactacctcaaggccgccgcgctctacacccaggccatcaagctcgaccccgacaaccccaccctctatagcaatcgggctgctgcatttctccatctagttaagcttaataaggcactcgctgatgctgatacgacaataaaactcaagccacaatgggaaaagggtcatttcaggaaagggtgtgttttagagtcgatggaacactatgaggaggcaatatcttcttttcagatagctttgcaacacaatccacaaaatacagaagtttcaagaaaaattaagaggcttactcagctggcaagggaaaagaagcgggctcttgatgtggagaacatgcgttctaatgttgatgttgcaaagaacttgattcactga

SEQ ID NO: 394988 - DNA, 388 bp, Oryza sativa
tttttggtgttttttttttttttttataccaacagaattgattgatctctctcatagaggaggaagaacttgcaagggaggtaggtaccaacaaattaattaacaaaaaagcattgaaaaatatctggaataaggcaaaaaagagaaaaaaagggagaggaaataaacaagagaaagggagacgggagaatttcgcaaaaggatctaagcccgcgcgtctgtgctgtgcatgcatccatccatgcatgcgatgtgatgcgtagctgcgcctgcatggctcgctctggacgccgcgtgcgccgcttgatcagcacacgccgtagtcgcggaacatgagctccggcctcccggtcgccgcggcggatcccgcggcggcggcggcggcggc

SEQ ID NO: 394989 - DNA, 457 bp, Oryza sativa
ttcaagcttaattaagctcgtaatctcatataacctctttttggacgaagcttgccactcgatcgtgttaaccactcgagcttgagcgagcgagctagctttgctctgacgagaaaaatggcgtcctttcacatcgccacggcgctctcggcgactctgctgctctccttgctcgtcctgggccgctccgacgccaccctgccgccgccggccacgccggtgccgccgtccacggcgtgcaatgggacgacggaccccacgttctgccggtccgtgctcccgtcgaacggcaccagcaacctctacacctacggccggttctccgtcgccaagtcgctggcgaacgccaacaaagttcctttcccttgtcaaccgctacctctccggcggtcggctcgccgccggcgcggtggcggcgctgcaggactgccagctgctgtccgggctcaacatcgac

SEQ ID NO: 394990 - DNA, 443 bp, Oryza sativa
cagttcacaagcttgcatctcagaatggcaagagacaatgtacacttctttttatcagcaatttgtgtcaaaaaacaatgaaatttgcccttacaggaaggcttccaggatttccagcatatcaagatcactgcttatggttttgctagaaaataacaacaaacctttgaaaataaaaagagaaaaaaataacaaatgagtgactgtggaagcggtatcgcaccaagatcctataccactaactaaaaaaatcaatatatcgacgattcagcagaattattgatcagcaagctatatttagtttgacccatatccgcgtggatgtgacttttgccatctccaagcgactgacaggctctccttgaggtcggtatattgagcagtccagttgagctccgcgttgatctttgttgggtcactgtatacttcagcatagtcccctg

SEQ ID NO: 394991 - DNA, 511 bp, Oryza sativa
tttttttttaaaaagaaagacacgcaccaagtgatacgtacgtaattgacaatcaagcttcttgcctagttagggacaataatctacacaagcacacacatacacacactcgcaaatcaatacccgttctgtatactactacttgaggctatctcatctctcactttttctctttccttcttgttttttctccttgcttccttcggggagctggccggtaactgttttggcgatggtcagatcggttaagcggaggaggaggagcagacgcggtggcgcgggcatgacacgaggtggtcgttggtgagcccgacggcctgcatgaacgagtggatgacggtggggccgacgaaccggaagccgcgccgcaccatgtccttgctgatcgacttccgactttgacgtcttcaccgggatctttccggctgtatttgtaagctcggcgacacgggcttgttgtttacggacggccacacgtattttcttgacgaccccgaagtccctcctaact

SEQ ID NO: 394992 - DNA, 542 bp, Oryza sativa
  unsure (1)..(542): unsure at all n locations
nnnnnnnnnnnnnnnnnnnnnnnnnnnnnnnnnnnnnnnnnnnnnnnnnnnnnnnnnnnnnnnnnatacaaataagcaactttattccaacaagctgctacagaagatttcagagctggtattgcttgttaatggtatcaaactattacatatttcacacatctttcaaatactccgacactttgcttccttgacaatggaaacacagagccccacatcagtaatcaaagcatgaagaacaccgacaactaaaattacaatgaagaaacttgcaggggaaccatgctatgaagcaaatcagtgcaggatgttcacctccaagccattaccatctctcaatagaagatcgcttcagttccttcccaggggaagtgaccggcatgagtatgtctccttggaaatctgacttcttggaagaagtaaaaatcgatgcatacacttctttgtttgcatatgctggtgcatggnctccagccttgaaccgcttcaaagagggagcctcccccttcttcccattttcaagcttctcagnaccccctgcc

SEQ ID NO: 394993 - DNA, 290 bp, Oryza sativa
  unsure (1)..(290): unsure at all n locations
ggtaattgatagtagcaagacaatgtgtgggggagcgatcatcgccgacttcgtcccgcccgccggcgcccgccgcgccgctgcctccgacatctccgacaacgccgtcctctccgctgccggtgccggtgacgagtcgttcgcggcggccaaggcgccggcgccggggaggaagacggcgtaccgcggcatccggcgccggccgtggggacgctgggcggcggagatccgcgacccgaggaagggcgcccgtttttggttcggaactacgncaccgccgaggaaggccg

SEQ ID NO: 394994 - DNA, 535 bp, Oryza sativa
  unsure (1)..(535): unsure at all n locations
nnnnnnnnnnnnnnnnnnnnnnnnnttgtttttgtgaacatagagaacttcatagaaatacttattcggtcacgctggtgcacatgtaacaacaacaggggtgtattacagggcttcagaccagacaaaccagcgaacactactactttggttttacagcacggtaaacactaacacgatatggacatttttcctgctcttttgctctgctgttttcctcatgctcggatggcaatcccgccctggacctcgccggcctcctcctccgtcttctcggcggcgagcaccggcaggtggcccttctcctggaggcacttcaccgtctcgtacagcgactggctcgccggccggaactccagccccaggtcccggagcttctggttcgacatcttgtacggctgcttcctggggttcttctcgtcggagcacctggtggggacagggtactcggggaagagcttggcgaggatgcggacgacaccctcgcgtggaggacagacttcgcgcataggaagcctgccgcggcggtagggga

SEQ ID NO: 394995 - DNA, 466 bp, Oryza sativa
gttgagaccccaaagcatgggggtctcatccgaactgatttattttggtcggacaacaaagtgccgttctcggaagtcgaggaactgctgagcacatagcaatgaaaaattaaacacataacaacagttctgataccgataccagtaacacaatagacggtagttctgataccgataccagtaacaccatagaagatagtcctcgtgacctcgctaccagttggtaacgagtaacgaccctgagcagttccggtagacacttgggttacagatacaggaggaaggaccatcttggtccaacattttggacatgatgagtgaagcggacgcaataactatttatacctccaaaggtctttcaagcatagatcacgacgatgaccatagacagacacatgactgacgggacgggctacatttgttggacttgtgccagacttcaacactgggatatattcaaccacat

SEQ ID NO: 394996 - DNA, 505 bp, Oryza sativa
ttttttttttttttttttgcaataaacataattcacctcggcaatctattgattcttaaataaatagtctttaacaacaaattctagaatttaaaagttctgcttgagttcatcgaaccaccaaaacaagtagaactggtcaactaacaaacggtcagggatgtaaatgaactagggcgtacatacactccacattcttgaacctccacgactagggtctaaaaaatcatcgatatactcaagcatccatcatatgagctttctgtatgcattcagcaattgagcatgccttcacgggctatcaccaatcccattttgctgcatacagaaaagcttatctcctgagaagtacctcaaatcaaagcagaaagctgatctattctcccatcagattgcagggatttccaactattctcagcggtagccccatcctcttccccggcctcccctgccccggcctcttccactccctgtaccaccacgggataacccttcaaaagctctg

SEQ ID NO: 394997 - DNA, 606 bp, Oryza sativa
  unsure (1)..(606): unsure at all n locations
tttttttttttttttttgcgaagaactacttnnnatgtccatctttcattagagcatccctnntggatacaaacatacatgcccatacggtatttatcctttgcttagctatgtacatatagttaagagatagtagatgcaaacatgcaagaagaggagagtgagatttatttacgaactaatttcattggtggcacttaactcataaagcttatatactattttgatgttcaatgagaaaaagggagtgtgcgcaactattttcaaccttttgtttccatctctgtttcatttccggaggaactctcttgaaccaacgggctgagttcttgggggtatctcttcattccgttatcgtaatccacaaagtttatcccaaaccgaactgtgtagccctctgaccactcaaagttgtcaagcagagaccatgcgaagtaccccttcacatttgctccatccctcatagcacttagcagggcgagaaggtgcttgtgatagtattcaatcctgatatcatccttcagggcctccttgagtcgcatggtcttattattgatttcatcaacaccattttcagtgatgtagatggtaggattgccatagttt

SEQ ID NO: 394998 - DNA, 471 bp, Oryza sativa
gaggggattgacactactatgcagtctcaaatcaacacatatatataactgatttgatcaagtctggtcgacaaatcaaatggggatggatataacttaacaaaacaaatttacagaacaaaaacaacaacactcgagatcagattacaaatttacactcctgccgtcccgtcgtctcacaaagacgtagccgatcacctcgtcgaccagtgagctcagtatttccctctccaactcttctcctgtctcgaactcctccacccgaaaatcaacccatgtgcccagcccactgctcatgtccttgtcgacaagttcatcctccacccattcgcccatgctcctccaaccacctatctcattgcagacttcagtttctatgcccctgctcatcgctgccatccctttgctccatgctgcatatcctgcccggtagtatgagagacgattttgttacaagcattcacttacgca

SEQ ID NO: 394999 - DNA, 530 bp, Oryza sativa
tctagatcgcgagcggtcgttcttttttttttttttttgtgcaagaaaaattatctgcaaaacactgattctaaataacttaaatgtatatatacatatagttcatctaactaaaatagtaaaatggagacatagggtaaaatacataccatgactacatcggacacatacaccatgcttaaccttgcaaatgctgcacaccaatttccactgattctcctggacacttccaacattagtaacaggttccattgattccatgtcttccacaagagctcccggtgtccaaaggctacaaaacaagtgcacaaatttaaggttccccccatgcgctgtttgaccaggctcccctttgacaggttttagagcgcctttcttttttgggcatagaacacaaggcatcgacaaggtgttgtccgcatctttctttaacgactgcagtgacttcaaatccttacaccaagtgcacaaccactggtcattaagcacaacatgccaaccataacacttctggggcacaattaccttac

SEQ ID NO: 395000 - DNA, 447 bp, Oryza sativa
tttttctccaacagagccaccttttctagattttcgggtcttcaactggagggggattttgctgaaattccaagtctgttacttgagaattggtgctatgagaacatttctctaaaaatgatgtctggcttccatcaggacattacgaagtctatcactagtgaggcttgccaatcactgaaaagaaggcgtgacatatttgctggcctgaaactgaaacaagagatccttttgtgccttgttgatcagataatacatacaggcgaaaatgtgaacattgatgacttaatcaaggatcttcatccaaaggtaatgctaggtatacctttgttggaagggaatagcccaacttcatgtttttcacgtattgctattggctatgatgctgtgtgctacagttacatatggagtgaggtgtttgctgctgatcttgttgcatcaaaattt

SEQ ID NO: 395001 - DNA, 430 bp, Oryza sativa
  unsure (1)..(430): unsure at all n locations
ttttttttttttaanttttttnanntnntntaaagaaagattacaagtgtatgccgtttatttatctctgttttcttttcctggttttaagtacagtttacagccttctctacttcccaaacaaatgtaccgggcagatcatatatacttccttcgtttcacaatataaggtcattctagtattttccatatttatattgatgttgatgaatcatcaacatcaatataaatatggtaaatgctagaatgacttatattgggaaaggagggagtactaattaatcagcaancattttatcatctgtccatntcaccagcttcaaagctaactttgtctaatgctctagtacatggacaagttggcatagttcttttaatctatggcagccatcttttgtgtttntcaacctgtccacacctcatggatcag

SEQ ID NO: 395002 - DNA, 436 bp, Oryza sativa
tttgctgtaaaatccgacgagctgcttttattatttcccaacagatggaaagaaaggtccccctatacactagaagcgggtggccatactggccatcctaattgctacaggtatgaacttcttttattctgacaaatgccagaattcacaaccctcgaagctccaaccaattcacagataccaactttacttgccactccagttcaaaaaaaaaaaaaaaaacaagaagaagaagaagaagaagaagaagttcacttgccaagtagccactcgtttatttcaagactagaatgaacatctcctggacggaaagccagaggatgctttcttgaatgcccatccagtcacctgctggagttgcagatcagcttgctgaacttagagcccgctcaatctcttccagagaacgccccttggtctcaaccacatttccagc

SEQ ID NO: 395003 - DNA, 577 bp, Oryza sativa
  unsure (1)..(577): unsure at all n locations
agaagaaagttatttcatcataggcgtcactttgtaaacacttcaaaattggtttttaatgcgaatttctttctatcagcctggcacttttttcgaacgtcagaacagacactcgtttgatattgcaggaagccaaatgaaatccagtcggacaacaacagagagtaactatcgagagatcatgatgtcacatatcaaaaaccgtttcaagtcggtacacattgcaagaaatgccaacacctatccaacaaaatacagacgactgccaatttgatgaaacacagagtatatcacaaactgtaatatgttgggcttgctatccccaatctatggacatcactaagctcgtagattctgagcctcctgaagtgcttcctgcagattctttacggcgctgtcatagnacacgaagcccatgaaccagaactcatgattatcaacggaaaccacctggatgtattnctcagatgcatttgttctgctcgttgaaggattcactgatctnagttgggtgtggggaatgacaacctganagtagctccactcatcttggtctccaaccttgtaagcaagtgga

SEQ ID NO: 395004 - DNA, 345 bp, Oryza sativa
ggcttaaacacctttctaagttctaaccaaacaaaattcaaatgtgtttttatttgaacacacaaacacatcgcttcaaacaaacttagtttgaacggtaacacattccgttctcgcaaacatttgggtggttctgcccagcaaatccccaaattacagtagcttctacatagacacatctgctgcacgtcactggcacagtggctacaatctaggacttgtacgtgtgtgccacgtacgagaacgatgatacttactagttcatacgagcccgacacgttacgagacgcgtggcatggcggtgtatcgatgacgtgtacatgtgctttgacccgccgggtcaat

SEQ ID NO: 395005 - DNA, 567 bp, Oryza sativa
  unsure (1)..(567): unsure at all n locations
ttttgtgatttttaaaccaacatgacgttttataacaacttttattcacggtttgatatatgtagatagatacagcaatcattagtggacatgaactgtttcggccacgattaatgaatggggtgatagaaatcgaacatgcatgcagcatgtgtacatacagttaattaaacaagccaaattaagcatacatacatgggcgcaggaattgaagaaatgaagcagtgtaatactaggatggatggatcagtcccagatcatgacgacagccatgacggcgacgccgaggaggacggcgaggaacttgaagagcggcttgtcggcggcggtggggtggtgggggcggtagcccttggcgatgaggtggttgatggcgacgtagatgaagacgccggtggcgaggcccatggagatggcgtaggtccagtcggcggcgcggccctgggaggtggcgtcgatggcgatgccgatgncgacgccgacggggctggagacggcgaangcgagggagtagacnacggtcatgaggaangggcgctttggggatcatccggngcagcgcgattc

SEQ ID NO: 395006 - DNA, 372 bp, Oryza sativa
tgcgccgcgccgacagaaacctctttactatctcctctctctcgcgtccatggcgggtcagatcccccaacccatccgttgcaaagcggccgtgtgcagggccgctggcgagccgctggccgtcgaggagatcgtcgtggacccgcccaaggcgcacgaggtccggatcaagatcgtctgcacctcgctctgccacagcgacgtcacgttctggcgtatgcaggatttccccggcgttttcccgaggatttttgggcacgaagccttcggggtggtggagagcgtaagggagcatgtggaaggggttcgccgccggcgacccggtggtgcccacgttcctgggccagtgcaccgagtgcgtggactgcgcct

SEQ ID NO: 395007 - DNA, 490 bp, Oryza sativa
tcgcgatctagaactagtaggaaagagatagacatcctaccaaccatatgcaccagcagcctgcagtatgagccataaaaaggtatagtatagtatacttcaaccaaaaagttatactctcacaccatcacaacactaagcaacaagaacagcagctagcagcaatccctagtgctagtgggcagatggatcaatttggattctcttctctccaaccaatcaaacttttcatatatttttttccctttgggtagatcagacatcaactattctgaaaaatagtaaaatacaaagaggagtttgatctactgctgctttcttctaccatcacagggagagtgagagagagatcacttcatggcaatgccaagaacgagaggaggaggacggtgaaaaagatggccggctcagccctcgggagcaagccggcctccgcggccgccccgtcgaagttgctcgtgcccggcgggctcagggcgctccccatccc

SEQ ID NO: 395008 - DNA, 753 bp, Oryza sativa
agatgatctctccgcacgccgtcctgtcagtcgcgacccactccatcggtcccaaccctctgtcttcttctacccgcgtactactccagtgtgagagcagagagctctgagctcagctcatccccagctgcctacctacaattgcggtgggtgcggcggccctcctcctccctcccgcgcattacaacagctacgctacggccccacccaactgctcttcctacgcgcggtcatcgtctgcttcttgttaattcgaccggcggtgatggagtcagcggcggcgttggcgttggttcttgcggtgctcctcctctcctccaccctcgcggcttcagatttctgcgtgtgccggtcggagcagccgacggcgctgctgcagaaggcgatcgactactcgtgcgggcagggggcggactgcacgtccatcctctccagcggcggctgctacaacccaaacaccgtcgccgcccactgctcctgggccgccaacagctacttccagaagttcagggcctccggcgccacctgcgacttcggcggcgccgccaccctctcctcctccgaccccagtttctctggatgcactttcccttccagtgccagtgctgctgggacaactggcttgagccctggagtcggcaccggcaccggcaccttgagccccggaggcggcatcggaaccggcaccaatggcaccgggatggggagcgccctgacccgccgggcacgagcaacttctgacggcgcggccgc

SEQ ID NO: 395009 - DNA, 483 bp, Oryza sativa
ttttgtttttttttttttgagggaactctgaaagcaaaatgattttattaactttcattattccatgtgaataattcctaatgaaattatccatgcctcaaggttactcacatttgcaacgacttatccctgagaccctgaactacgaagaatcacggtaatgcacactgatacaaacaatgaaacaaatcgacgacggcaaacgcgcaacactagcaatagcacacgtatatcgatctaaagaatgcacgcgagactcacatggagatgctgttggggatgcccatgggcggtgagcccttggcccttctccctggggacatccgacgtgttggggtacagcagcatgtacggcatcttcaccggcccgttccggttcttgagcgccgagttgccgttcatgtccttgatccggttctcgatatccaccagccggctgccgaacctcttgaacgcgtccagcgccttggcgtccgacgtcca

SEQ ID NO: 395010 - DNA, 569 bp, Oryza sativa
ttggcgatggcggattcgaaggggagcggcggcgccgccggcgacaagcccggcgccgacgcgagccccgccacgaatccggccccgccagctgccgccgtggccgtcgccgctgcggccgcggacgccggaggggacgacgacgtggccgcggccgcggaggcgcggcggacgttcacggcgctcagccaggtcgacgccgacctcgccctggcccgcgtgctccaggagcaggagcgggcgtacatgatgcttcgcatgggcggaggcgccggcgagggcagcgattacgggagctcggatgccgggagctacgagtacgacgacgaggccgaggaggactaccaggaggagctggagcaccacctccgcgtccaccaccacgagcacgccgctggggagggtcggggcgagggagagcgagatggggagggggctgagggaagcgagttcgaggaggaggggttcgacgaggagtatgatgaggaggaagtcgagccagagctagaccccgcggagtacgaggacgatgaggcttattcacgactcttcaggattccgaggagcgc

SEQ ID NO: 395011 - DNA, 540 bp, Oryza sativa
  unsure (1)..(540): unsure at all n locations
nnnnnnnnnnnnnnnnnnnnnnnnnnnnnnnnnnnnnnnnnnnnaccaaaagaaagttccttttcaccgggatcgtgaagtgttgtatttacatttagatgcagcaccattacacccgaaaatgaacaaaacaaacaacctgttgatccaccaatatgaaacctacctaaatgaatccgaatgaaattcactctacctataagaattccaacgactgaaaattctgtcaaaattccagcacctgaatctatctctagttctctacactactatgacttgatcctgattgctcccattccagtcgtccccttgctgttgagtatccccggcaatggccaaccggaccctctcagcctcgacctcttcagcgcgccgctgcaatcctcgtctgagtcatcgtcgccgccgtcgtcgtcgaggtcgacgcagacgcctttccctttccggtcgtacagcgcggcggcctccggcgtcgtcctctcggagaagctctcgtacaggtcaggcgagtgctgccggaacagcaggtcgctcgccgag

SEQ ID NO: 395012 - DNA, 510 bp, Oryza sativa
  unsure (1)..(510): unsure at all n locations
ccagctaatcacccantgaccccaactatcacaagtttatttcttatcgtttatcttaactcctttttttatgaacattatctcgttccaaacctcacctcctacactccctccccacccaccacggggatcagtgatgcgcatcatgcatcggacggtgtataattgtacacgtggaaggtggcctgtggggccaccgcggccaggaagatcctggccgtcgcttcctgcgacaccaaccccgcttccttctccacgagcgccgccgccaccacgtctccggcggcgccgcccccggcggccaccatccctatgatggccgcctgcacggggcctagtgtcggattatacgccgcggactccaggcatcctccggcgtacaccttcccttcgccgtccgccacggcgaatcccgacgggcactcgctatacggcgcatgcgccgcccgcgcgggcgcctccgctgcctccctcaggcgcgcctctaggtcaccgtgggcgaagccattg

SEQ ID NO: 395013 - DNA, 400 bp, Oryza sativa
  unsure (1)..(400): unsure at all n locations
gccgatcaaggaccccaagtccgtcaagttcaaccttcctcctcccgaggatgacttcggcgacgatggcagcgagtttgatgacgagttcgacgagttcgatgacgaggacgatttcgacgacgacggcctcgacgacgactacttcgacgatcccaagatgatgaagcagatggccatgccgccaccaaacgccggtggtggcggcgacaagaagggtggcaacaacggcggcggcgccggcaatggcggcaagaagggcggcggtggcaacgagatccccgtgcagatcaaggggaacgccaacaacgccgctggcggcggcaagaaagantccggtgccaagcagaaccaaggtggcggcggcaagaacggcggcgggcagccgaacaacgccaag

SEQ ID NO: 395014 - DNA, 319 bp, Oryza sativa
ttattctttttattttttttttttttcaaagaaactatcaattctttctttattaaacaaagggtagaagcagtgttaagaagatccctcagccaccaatgggaatcataggtctttttgccgtcttagcattatcaaacatcccagcatgtttagctttcttccttttaaccgcagcgcttattatttctctgagtccagcatcatcaacaccagctcgaataggctctctcaggctcacctctggggggccaaataagcccactttcaagttgccatcagccaatagtcgaaatttattgcacccagcccaaaaatg

SEQ ID NO: 395015 - DNA, 315 bp, Oryza sativa
tgttggcctcttttttttggccgccgcccttttttttttggtttttttttttgacaaggacaaaggccctcaatatgcagacccagctgcagcagcagcgatgaatattgatagagtaatactagtaattcccatggtcgtacagctccaaatgggcggatttatggggggcaaagattacatctttcattgagtttgcacaatcaacacagcatgattacccaataaatagtaatctttacacaaaaaccaccctgacctattgcaatggggttgcaatagttcagcaggactcaccagcacaccacacaaaga

SEQ ID NO: 395016 - DNA, 337 bp, Oryza sativa
  unsure (1)..(337): unsure at all n locations
atcccgggctcctcgcccagcaccgacgggcggtcgcgccggagctccagagcgtcgcggaggaagcggttgtagtccaccatggtgtagttgcgcgggttgcgggtcgggtgcggggagatgatgaggtcgcggtcgcggtacagaccgaggtacccctgcgggaagcagtgcacgccggcgtcctcgtcgaagttgatgacgtcgtagttggacagcttgcggagcagcggcgtgtacttctgcacccaccacggcttgtagttggtgatgaggatctggacctcgcccttgaggtgcgccgtcgtcaggaatagcgggacttnagccaggtccg

SEQ ID NO: 395017 - DNA, 453 bp, Oryza sativa
ttgtgtttttgaccttcaacgaagacttttaaacagatggacatcgtatttattcgactataaacatgcccatgtttattacaatgatgtgaatgaagatgataaataaatgatacatagagtagaaataatggcgtgtccatcgagcacttgggatcaaaacctgacaaaacgacgacggcgcgtatagttgcaggaaaatttctacatgatctcgacctagagcctcggtagcagcaaatggaatgcttccatgttttttttatagaacatttggtgatatatccttattgtttacacagaatctacaataattattcaccgtgcttcgtcttctagattgcggaacccggcggtaaggtcatcgtacagcttctgaaatttcgcaatcaaaacttctttgccctctgcgggatcctcgaatttttgcgacactaggcggtagctcgtgcc

SEQ ID NO: 395018 - DNA, 474 bp, Oryza sativa
tttttgttttttttttatccggtgtgcatgttgatactatatatattcgctcgaacaattcacaccacactcaaaatctcaaatcaacagatgttctcaagatttcgatcaagcatctccagccccatcttcattggcctcgttggtcgattgccgccgtcccgcggcccagcgaccgagcagtcctctgatatcccactccaaatccctcaggcgtagcaacaggtacagcacgattccggagatgaagcccagcgcggcgctcgagcctgtgagcgacacgccggcgcagaccagcatgacgaacgactcctgcttgctccccatgtcgcgcgacgccatggcgagctcgatcccggagaagagcagcatgacgcccagtatcccgatcgggaactgccccaggatcgtcacgaacgagttgccgaacaccagcccgagcgccagcttgccgatggccaggaacaccacgga

SEQ ID NO: 395019 - DNA, 680 bp, Oryza sativa
  unsure (1)..(680): unsure at all n locations
tgttgttctcagttctcaccaccatttttacctcgaagatttctagattcgatcagcaaaccaattggaagcacaatgcagttcaggctggtgatcttggttctgctcctctcctgctcgcttcagctgcttcgcgcgtttccattccccatcccgttctttggccccttcacgagcccacaagacgttgatgcgataaacgagctgtacgcgtcgctgggctcgcctgacctccatggctgggcttcttcaggaggagacccctgcatggaagcatggcagggggtgcaatgccttggacccaacatcactgcaatagagctcagaggtgcaggcctgggaggaaagctgagtgagacgctgcggaagttcactgccatgacagcattggatctgagcagcaaccgcattgggggagtgattcctgagagcttaccacctgcagttaaacaactgaatttatcttcgaatagtctcagtggcaaactcccagattcgatggcgantgaaactcgctttcgacactgcatgttcagaacaatcagctcactggcacacttgatgttctagggagatcttcccctgaaagacttngatatagagaacaatcttttctcaggaccaatccagagaaactgatcaacatccaaaatttctgagaaacggcaacatcttaccat

SEQ ID NO: 395020 - DNA, 486 bp, Oryza sativa
tttttgttttttttgaatattgagggtttttattgaaattatgtttacaaggggagacaattagagatatatagttcatatatatagaataagagacactgggtaggggcatttatacaaataataatagatgctgcccatactccatcaaatgttcttcttaaacaaaatctgaaataggctaatacaaaatcatgtgatctccacacaataaaaactaaggttactttcagatcaaagaactattgtcctgagcttctctctgaatctacatcgtcagttggccatccgcagattcttccttccccagttagtcaggctctgactctgcaaaggatccttcttccaattgacatttgcccgtcttacagctatcttcatacccacacgttcatacatcattcagttccatcatgcaccagtgcattcgcttattcatcagcctcatcttaatacaaaatctataatgaaatacccacaagttac

SEQ ID NO: 395021 - DNA, 483 bp, Oryza sativa
ttggtttcgaaagtctgtaagtagtgaataacaaacataatccgttcaaaggcgacaaggtcacacgcaaaccatcaacgcctaaacgtaggacacagaaggcgagaacgacacaagtcagtcataggggcgcacataatggtaagacgccatcacgcattcggcagcagaggttaagcctcgtattctgcacatagcgggcggcggcgcgcgcgggctttagaagaggaaacttcgcagagccgctgtaaacggactccgattcctacgaagtccggcacaaaaggatacagtaaatgtgttcgtgtaattgtagacgactgaacgaagaacgaggcaggaggcacatggtctgctgcggcgatggcaccaacctacagcgagatgcgcaacggtggcgtctgatcggtgtaaaggtcatagttcggctccacctcataccgctttcgcagtatgcggtatccaaacatcgcgaccagcacg

SEQ ID NO: 395022 - DNA, 509 bp, Oryza sativa
  unsure (1)..(509): unsure at all n locations
nnnnnnnnnnnnnnnnnnnnnnnnnnnnnntttgttttggatcggaaatgcaaaatggtccatatattgcgaggccgaatttataccggaaaggcacacggacgttacatggacaagtcgtcagagtctcacacaaacaagttcaagaacggatcatacggatgctgccatgagggtgcacggcggcgatcaggcgggcggcgcgtcggcgtcgtcgatgttgctgccggcgacgtcgacgacgaagcggtagcggacgtcgttgcgctcgaggcgctcgagggcctggttgacgtagtccatcttgacgacctcgatctgggaggtgagccccttgtcgacgcagaagttgagcacctcctccgtctcggccatgctcccgatgaagctgccggtgatggccttccggccgagcatcaccatgggcgagatgaagctcagcggctggttgatcacccccatcaggatcagcttcccgtccagcttcagcagcgccaggtacggctcca

SEQ ID NO: 395023 - DNA, 502 bp, Oryza sativa
gacaaaagggggaccacgaagatttcttcagtcttaaaaaggttcagtagacgactatattctgtgaatctctgatccttcacaggagtgctactagatgcttagaccagtacaaagaggactttgctcgtgctgctcttcactaaacatttcgtagatgattacatggtctcatgatctcatctatatgctagttttcgaatggacttcattaaaacgattacgattacatgctagttttgtgaagcattcaaggtcgcttcaagaataatagcactattgatagaggtaagcaattctgaaagtctgcctgtctgttagactactgaactaggtcacgtcatccttctttcgcacctgatttcaatgccaccagcaaccacgtcctaagctatgcatgtcttgtactttttggtaccatatcctatgattgctctttgtaagtgagacaccatcaaaattattggtgttaacatggatgattctttcctgaggagttcat

SEQ ID NO: 395024 - DNA, 793 bp, Oryza sativa
  unsure (1)..(793): unsure at all n locations
acaagaatgtaagacattgtttatgttttagaagaacagtgcaagcatatacattatatatggaaagaataaataagatacataaataacaatggggatggtaaaaatgcacagaagaatgtggttggccgaaatggggtaaattttcacatcactcgcttatattcactcgccttcgcagagggcaaacaaatattgccttcttagctgtggctatcatgtgtcaattttggggatgttgaacttgcaggtaatattaaataattgaagtcatggtctagacctcgtattgtctcagtgaggactccagcagctgatggctggggcagatcatctccatcactcgtgtcccatccttgtaaatttttgagggttggaactgtccttgacattttcctaattgtgtcactgtggggttctcagttatatccaccttgaggaaattaacagatggatatctggtacacagtgcatccacaaatggggcgatatcagagcattgctgatttaaaggtgccatgaaatgaacaacagaaacacctggcaaggntgtagccatctggaattgttctgctcctacaagtgcttcaacctctcctccaaacttcatattggatacatcctcacctcgtgatgacctaagagcaanaagggcatggaaatgcccctctgctacctcagtgtcaccaggaagttccctcctaagaacctcataatctttcacggaatctgcccattgttcaatcttgccataggaagctgcacgccttaggagagccttccaatagttggg

SEQ ID NO: 395025 - DNA, 649 bp, Oryza sativa
  unsure (1)..(649): unsure at all n locations
nnnnnnnnnnnnnnnnnnnnnnnnnnnnnnnnnnnngatgtaaacataccaattcacactggtaaaaccctgagtacgtacgtaatcacctagatatagccctattggcacatacagatgagacaggcgcccgtgaccaagttttgatgtcacgtataccttattgcacagatcggaaagctacaagcccacaagaggacaccgtgatttcagaaagggaaaagaagagaatacatagactgcacaagccgttctcgtgcatttgctagcagcagcttggctctagatgagatagcggtagatcatcttaattaatcttaattcttaattagttgcaggactccttggcgaagccgaccgcgggagttggcgacgtcgaagacgacccggatgttctgctgctgcaggttggcgatgacgttgacgacggagttgacgttctgcggcgcctcggccatggcgaggcaggccagcggcgtggcgctgctgtggatgagcgtgttctccatcggcagcgccaggtccacgccgccgtccatgtgcaccgtcaccgcgggggctccgncggcggccanctngncggtgttgaagcacgtgtcgaacgcgcncagcgacgtgtanccgctcggcgccgctanctgccgcnggt

SEQ ID NO: 395026 - DNA, 498 bp, Oryza sativa
aatcagaggaaaaagccgaggctatatatatcaaggatttcgcatccactcggagaaagaggcacttctattctttttctgagggaaaaaaaggggcaaaagaatcccaagacaacccattgtcaggaacatggcttccaaaggccagagctcctatataacacgtaactaagagcaatctaatcctataatcctccccttaaaaagaaaaccccctagatgaatggaaaacggctttttcgatcaaccattcattaatatatgtacagttcgccgaaaaccttggttgtcaaaccatattgctaaggggtggccagtaatcaacgccacaactcccaaacgggcagtggcactgacaatgccaaatagctagaagggaaattttccctcgctcctccttggtgtgcttcatgagatttcttctacagatccaccttcgactgtaattagacagctgctctatgcagctctcaggtaacaagtgcaatgaaagtttga

SEQ ID NO: 395027 - DNA, 451 bp, Oryza sativa
  unsure (1)..(451): unsure at all n locations
aaaccaatgatacctgttcaaaacatgttatagatacaaagggaaaaaaaacattccaccagtaaccaagcacacgcttattacaattttaattaacaaaaagaccattgttctgatataggtcacattgttcttcttacatacagaaagcttattggattaggaggaacacaatgacacagatgcgcacaagacctatctggctacatgcctagattagggaagggtaaaaccaagagttaaacaaacagtcctgaaattacagtcatcattaccggctttaggcccaacttccaccaacccctgaatcagtattggctggaaccaatccaggggtaaggttatggctcctagatcaatcttcagaggcttcagaatatgacacacgggggggggccaaaggacggnggccttattggccgccgaaaagcgccccacacggggatccctt

SEQ ID NO: 395028 - DNA, 492 bp, Oryza sativa
  unsure (1)..(492): unsure at all n locations
gctttttgtgagcgggcgacctttccatcttctcgcgccaaatcaactcaaacttctgtactatggctcgcccaggttggaaatcaatggagaccgccacgtccatgcctcattttgcgctcgtcccatggataggtagcatcagccacatcctccccatgactgacatcggctgcctcctcgcctcgcacggagcgccggtgaccatcatcacgacgccggtgaactcgccactcgtccagagccgcgtggaccgtgccacgccacacggcgcggggatcacggtgaccacgatcccgttcccggccgccgaggccggcctgccggagggctgcgagaggctggacctgatcccgtctccggccatggtgcctggcttcttccgcgccagcanagggttcgangaggccgtggcgcggcactgccgtccgcaggatgctcgttcccgccgccggncgagctgcatcatcgcggngatgtgccacacgtggg

SEQ ID NO: 395029 - DNA, 571 bp, Oryza sativa
gggcctctatccccaaaccctcttttattccctaactctagtatttatcctgctttttttttttgtctgtgcaaatgattatgtctgaacattgcaaatgattattagcactgacacggaaactgcaatgattcagagttccatacacagcggaattagacggcgacgatattacaacgggtttatgtccagatcagataaacgccgatgctctctgcaccccacttacacttcatagaggctatgaaaaacagcacgggatttttatacagtttacggcaaaaaggaaggctactagcttactgctactggtggtcgttcgcttcggtttttacttcctactgaagaggttgcgcagcttgcctcgctcaagcttctcgagcagcttcttggcgccggcgacgtccatctcggagagcttcttgaggtagccaatggcgccgtgcgagatcatcagcttcttgcagcgcttgctcgccgacagcgtgaggaggcaggagatggcgtacttcttggccgtgttctgggggctcggctccagcagctgcaccaggttggggacgctcttctc

SEQ ID NO: 395030 - DNA, 488 bp, Oryza sativa
  unsure (1)..(488): unsure at all n locations
nnnnnnnnnnnnnnnnnnnnnnnnnnnnnnnnnnnnnnnnnacaagcaagacaaggatcggtttacattcagccccgattatgcccatcacagcatggggtattttaagatggtttgccccaatggagtcccaaatccatccataccacacgtcatttcacgtcaagatccaaggggaaggttccaaagcaaaggaaaaataacagagccgaaatcccaaaaacccaagattagtctgaatgacaaagccccgagggaaatgctcacacttgaagacctcataaccatatgtaacaaggggaagactgattgaatcggttcctcatgcctggcattttggtgcattttttggtgatcaagaagctcacaccaggcggatgctcggatgatttacaacaactgaacccagatcatcccgcaggttactggtgccatcataaacactatgattcttcagtctaggactgctttcggggctactggatact

SEQ ID NO: 395031 - DNA, 567 bp, Oryza sativa
gctggctggcccgcctgcacggagccgggacttactggctggaccgacccacgcggacgtttcgagctgggctactccggcagcgcggatccggagcccggccggtgccgccggacggacggcaagaaatggcggcgctcgagggatgcggtcgccgaccagaagtactgtgagcgacacatgaaccggggacagccaccgttcaagaaagcatgtggaaggccagcctggccatgccgcgaaagcgatgcccgcggcggtggcagcagccgctgcctctgctacccagcctagggctccggccgcccacagtggcggagctgttgctggcctcgctattaaccattagcaccagcaaatgaagaactacgctgccaacactgccaatccttgctctctgcaatatagcagggatctggcaaacaagcataatgagagtgaacaagtgcaagactcagacagtctctcgatgctgacttccattagcacgagaaatacgggcaggctgtttgcgttttcaaacaacataatccttttgaagtggtcaacttaagggcagattttggc

SEQ ID NO: 395032 - DNA, 517 bp, Oryza sativa
  unsure (1)..(517): unsure at all n locations
nnnnnnnnnnnnnnnnnnnnnnnnnnnnnnnnnnnnnnnnntttgtttcagggagaaatacaagtttttattcagaattaatggaagtgatgaatcaatcctagataataataataataaaaagataatcaaacaagctcctctgatcgtggcacaaatgggagcagcagtagcataaaccaatggaggaagaacagctcaaatccgtaacgaattcctacacgcacgcgtgccatgctcacatcacatcgaaatcctcaaatgcgtgcaccgatcaagattgatacagacggtgataggcttgccgggttcgtcgtcgacgtcgagctcacacggcggagacggcgtagacggcggcgacgacgatgccggcgaggatccccaccggcgagacacggagcggcgcgacgccggagcccacgggcgtcgccggcgtcgccttcgaccctgtccccgccggagtcgtcggcgtctgtcccgcaggaggagcagcagcgccactcttgagttgctgacc

SEQ ID NO: 395033 - DNA, 512 bp, Oryza sativa
atgaaaaatcaagattcattaagctggaaaaaagggatggtatatatgttatttatacatgaaagataatgaccaaaaatacttacagggtaattaaagtgcagtaacaagcgagcaaacatgagaatttgctactacagaggagatgaattaacagctgtaataaaaggaaaaaaagtattaattacatttagatccagacatttctgtcaaggccctccactttaactagccttctcatcccagtccacccctctcggctcagtacactaccaagctgtgttgttattcaccgatgtatttttgcagccaaccccctctccttgactgaaattacgtacgtaacgtgggctgtgtatctactcaactacatggacaggattgagctagcggcggcggcggcggcggccatggccggcggcgaggtgggaagaagcgagcgagcgagcgagagagagagagagagagagctagccgcagagggcgccgacctccctgaggcgggggacgag

SEQ ID NO: 395034 - DNA, 514 bp, Oryza sativa
  unsure (1)..(514): unsure at all n locations
nnnnnnnnnnnnnnnnnnnnnnnaacagtatcaaacacgacatttcctttagacagcacaagataactgtactatttagtctggcagcccaaaagaaaaaggtatggctaaaccattacgaaccctctttatctagacaagctgatatatacactaacttacatggcgagcacataataacgtatagaaataaatttcagcagcacggaaaacataaaaagacgcgtctgtgatacatacacaatcctgaaattggagagactgctttgtttcagtaaattttcggcttccggaccctctgacttctccggctattcaccggccaccaagactgccttttcaatccctccggttttggagggggtgctttccgcttcaatatccttcccttggcaggcacagggtgaatttctccagctttcctggattcttggtagatgagcatgactttccagcttttcgcttctttccagttgagtgagtcttcacagctttcttcccttcatctggggct

SEQ ID NO: 395035 - DNA, 419 bp, Oryza sativa
tcgttctccgactcccctgccctaccctacccacgcccaccgatctgatccacctcgcccctcccctcctctccttgcccgcctcggcctccgggctccggcgatggcggcggggaacggccggatggaggcggcgctgggctgcctcgcggcgctccccgacgaggtgctctgcgccgtcgtcgacctcctcccgcccaccgacgtcggccgcctcgcctgcgtcagcagtgtacatgtacatactttgcaatgaggagcctctctggatgagcaagtgtctttcagttgggggtcttcttgtgtatagaggttcttggaagaaaacagcattgtctagacttagtctttgttcagaaaatgatgagatttaccagaagcctcgccattttgatggggtcaattccatgcacttatac

SEQ ID NO: 395036 - DNA, 490 bp, Oryza sativa
gttgataatagaggtgactatatggtccctctaattttatctatttcatatacacataaactaatagacaacatatacaacatgttacctctaataaacaaacccctaattagtgctatcatatttgttatagtgtacatatagaggctacctcttgcacgagagatgcctcatcttctccctttttcatcacttctcttctcaaactcatcacataatcctatttaattaacaatcttagaggcagcacatcaaatttcattacgcttgctctaattctatttcatgagcatggtctgcaaatggatcctttgcctcaaaacatatatttagtagctgcagacaagcatccttgcctcaaggctgcctctccatgttgaaccttgcaatgaaggcctccactctacgattcagctcatcaagttggcaacccaacatcttcctcctcaatcattttccttcttgattaccttgccttgggaaattggtc

SEQ ID NO: 395037 - DNA, 308 bp, Oryza sativa
gcatctgaagttcagacagtgcattatcaattacatatacaacaataccatatccctaggtactggagtactggatggataatgttgtgggtcacaggtaattcatgtcccactatcttgtttacactgaacattttacactgaaattacatgtatggcactggagactactcatccaattttttaagtaaaagttacatgaatatcaatgtatacgggttgcttggaatcctgattattgggatagaggtgcatctggttggttttgaggatgtgcagcttgaaatgcatgatgttctgggtatact

SEQ ID NO: 395038 - DNA, 510 bp, Oryza sativa
  unsure (1)..(510): unsure at all n locations
cccacgcgtccgctcaaagccgccaagaacagcaagaaaagttgccaaactccatcgagaaatcttcgaagcatctcgctcttggaagtcggagcaccaccgccggttcgttgttgctgcggatcgaatcgcggagagagcagggggtggatggggagcagggtgaaggaggaggagaggaacgagagggccatccgggccctgctcaagctgcccggcaaccgccgctgcatcaactgcaacagcctgggaccacaatacgtatgcacaagcttctcaactttcgtctgtgttagttgcagcggaatacatcgggagttcactcatcgtgtaaaatcaatatcaatggctaaatttacttctcaagaagtttctgctcttcaagaagggggaaacgagcgtggtaaggaaatatatttgaaacattgggacttccaaggacagcctcttccctgacattagtgatgtagntagggctcaagaaacttcatcaaggatttgtatatgttg

SEQ ID NO: 395039 - DNA, 424 bp, Oryza sativa
cgaaaaaaaaaattgtccgtgcaaattaacaaatgagcaaatcccaaactggcttaagctagctagtaggctagtagccgtggcatttggacatgatgggcgggtcggcgaacgggccgtcgagcacgccgtgcgccatgatccggtacaccgcctccgtcatgtgcaggccgtcccacgagatgcgccgcgacgggtccgcgcactgcgtcgcgccggggtcggagcagtgcacggtgaagttgccgttgtacggcccgccgccggcgcagtacgcggtcagggcgtcgtcgaacccgctcgccgcggggttcgacacgagctccatcacctcgccgtagtagtcggcgtaggcgatggtgacgcccgggtgcgcggcgcggagctcggcgaggcggcggcggaagagcgcgttgtggagggc

SEQ ID NO: 395040 - DNA, 496 bp, Oryza sativa
  unsure (1)..(496): unsure at all n locations
acgctctctcctgctctgngctcctcctccanttgtctctctcttttcttctctcagtccaggctcagcttcatcagccacattggaaggcttgtccaggtccattgcttcgccgtcagcttcagctttagacttctttttcttacttttcttggcagatgcatcgaccttctcgccatcatcaacatcatttgtggcatcattaaccatgctgtctatcgcagctttcatcacatcaaggtttttacgaggtgcaacacccttgtcatagaagtctaaccgctcctcaacttgctcacgaagcttttgcccaaagactgcggtagctgactctgaataacaatcaatgcgtgatgcaatggagcacttgttcgccagatatctagccattctgcctttgttcttggttgaagcacggccaatgaaggatgagtggaatataaggccatactttggcgtattccccctagttttcaatgcccctgaaagtgccttt

SEQ ID NO: 395041 - DNA, 448 bp, Oryza sativa
cccatcttctctaaactatgttacaatagactatatttatctactaattcatactctctctgtccaaaaaaaaaaaagagtcaaattccagcgatgaatctggacacacatatatccaggtccattgctaggatttggttttttatgggacggaggttgtaggtatttgcagcacatcaagatcaacaaaaactgcaaaaacacggacaatatcgagctcgccggagcgagagcttctttgtgtcctcagctcgccggcggcgtggcggtggaggccctgcgcgcctttctggcggccgcggcggctgcggcggaggcggcggcggccgtgccgagggtgtggtcgtggaggaagaggcagacggcggagcagtcgtccaccctggacgtcgggaacttggcccgccaccgctgcacggcggtctccaccaccggctttgacgcgtgc

SEQ ID NO: 395042 - DNA, 472 bp, Oryza sativa
tacatcttcagcttcctgccggcgcagcgcgaccgcaacacggtctcgctcgtctgcagggtgtggtacagagatcgagaggctgagccgccgcggcgtcttcgtgggcaactgctacgccgtgcgcgccggccgcgtcgccgcgcggctccccaacgtgcgggcgctcacggtgaaggggaagccccacttcgcccacgtcaacctcgtgccccccgactggggcggctacgcggggccgccgaccgaggcggccgccaggggatgccacggcctggaggagctcaggatgaagcggatggtggtgtccgacgagagcctcgagctgctggctcgctcgttcccgcggttcagggctcttgttcttatcagctgcgaggggttcagcactgacgggctagccgccgtcgcgagccattgcaagcttctgagggagttggatttgcaggaaaatgaagtggaggatcgaggg

SEQ ID NO: 395043 - DNA, 402 bp, Oryza sativa
  unsure (1)..(402): unsure at all n locations
gggaacgaatgatgaagcctatacgattatattacaagcttaatcatcggccaaaatactactcacaggaggaagaacgatcgaatgaagtagctagcagaaagaggataatgaatatgaccaagaaaagctgcgacaggtgaatcgacctggctgctactgcgatcatgtgatcaagaatcgtggctctcatggggggtatcgccggcgacggcgacgtcggcgtcggcgtcgccgtctgtcggctcccacgacgaggcggtgagcagggacaggtccttccacccgagcttgaggcagccgtccttttcgacgagagggtagcccttccatgggtacatgccaagaagcagccttgcctgccggnggggctgccggccagggtcaccggccggaaccccg

SEQ ID NO: 395044 - DNA, 451 bp, Oryza sativa
ggaacaaaatccacaatcttatttctgtcaaaaaacgagggattaaacttacattcataccttttgtataggccaccgatacaccctagatacagcttacaatgctcattgaaccctatatgcagtaacagtgtttctacgcgctacaaaactcttcgtaaactggtgaatactcaccttgatgagcccacagcccagtaaacaaagaagcagatcacctagtgtgaaaaggtaatctatgtatgtatacgtcaaatcatgaaaacaggaaatcttctatttcctctgtgtaacatcctaccgtatgccttttctacacctgtgcaaggggaacttctcaacacaaaagggtgtggattcggtatcagcaattagtacggcgagtaagagatggaggggacgggctggactgtcaagaggacaaacgtagtgcgatctatgaaggagcaat

SEQ ID NO: 395045 - DNA, 421 bp, Oryza sativa
ggcagccgccgccgcggtggcgtctggtggcgcggggggctccgggcggaggctgcccccgccgtgctggacgcacgaggagacgctggcgctcatcgaggcctaccgcgataggtgggaggggctccgcaaggggaacctcagagcctccgactgggacgacgtcgccggcgccgtcaccgcccgctgcgggaggttccccacggcgacgcacaagtccggcgtccagtgccgccacaagatcgagaagctccggaagcggtaccgcgccgagagggcgcgcgccgccggccgctccaagggccccaagtggcccttcttcccgctcctccacgacctcgccggcggcggggcgcccgtccctagcccccaaccccatcatcaggatccaaatccagggccccgccgccccggtcgcctt

SEQ ID NO: 395046 - DNA, 503 bp, Oryza sativa
  unsure (1)..(503): unsure at all n locations
tttttttttttttttaaggttcaaaaatgtacatatgccataaaatggcgcaccagtagagcgtaataaaatgtttacattagataaaattactacaataaacataaaacttcaagaaatcagcacataaaatattgcagcagcaagtcaccaagcgattaaatctagcatcagagatcactacaagattcctagacgtcaatttcagtttcaagaattccacaagaccagcctaatgggacaatgcatattacatagctctgaacactatgcatttgcttcctacaaaaagaacgatatctctggtggttgaacaaaggagaagatggcttcaccgaatacctcgtacaatgaactcaacagatgcccagcattttggtcctccctcctgcatagtgttcagagctatgtaatatgcattgtaccantaaggcnggcctnggggaattctngaaactgaaattgacgtctagggancctgtagtganctctgatgctagatt

SEQ ID NO: 395047 - DNA, 404 bp, Oryza sativa
gatgaacaagggttccctgcttcctttttcccaagtccaggaagaatgaattgaacaacaagattaacctaaggctagaatgaaatcgcccaaatcgcagcatcgatgcgtagtcatgatcatacacattgaccagtactgatctaacaacaaccatgatcagctggtgctcgaggtccacgaaaggaaccatcttttttgctcggcaataatggccgtcatttcgcgccgacgccgagcgtgagctcgagctcctcggcggcgacctcggggatcctctcgccctcccatggcgtcaccctccccttgtcgaacttgaactccccgccgtctcggccggcccgcccttctatttccatggagttggaggtggaggccccccggttgacaaggttttaggtggg

SEQ ID NO: 395048 - DNA, 434 bp, Oryza sativa
acgcggaacacatcatttttatgataattaacatatattcgtccatataatcaaagtacgggaatatcatatttcatctacaatctcatacagagtctactaaatatatttcttctctttgaacatggtttgacaaaccatttttatttgttgggcctgttaggtaagctggttgcagtggctgcggctgcgctgcagcacatgcagccgaacaggcccgttgttaataactaatattatttttacttttagctcgattattaaaaaatattaaaagttagttaggaatttccacagcaaagcgtggggaatcacccacagcaaagcgcgggaatcacccagtatggcacaaaatcatccacacccatcgatgccaccctctgagccacagccactggcgcggtggcgccgttaggaagaaactgggggagagg

SEQ ID NO: 395049 - DNA, 552 bp, Oryza sativa
atttagtcgaagtcttgtattaagaatttaagattaattttgatgaacatcggcattaattttaatgccactttactggaatgattaaactgatgatactgttagtcttctgttgagcagccaatatttgaaaaggaaactcctatactgcctttgtaagcagatattggcttttgagatgtagtcctttctggggatgattcaacacctcttgttgtgatgactggattaactagtgattttactgcttctatcccctggttgaaacttggatcccttcacgagagtggaaatgggagaagtggagtcaagcctaaatcaatgatggagcatgtggaaattagcaaaccctcaaatacagaatcttgcaccaggaaaaaagatgtcacagaattgcatgtttggtagcaattgctgaaacatgttcaactggtgcttgttcctcaaactatttatccttgcagtatgattgtttctactgtgctggatggacagaagatatccatgtggttttccaattaccttcattagaagtatccacaggctcctttg

SEQ ID NO: 395050 - DNA, 727 bp, Oryza sativa
tttttgtataaaacgtggcccattaggcccatcccatgctatatcagttacacataagtttatacaatttggaatgatttcattttccttttccagcccacatcatctatctcaggctctcaggctctcagctacgatgaatccaaacatcaggttccaaaccaagtcaccttagtttaaaccatcatcaaatttaaataatgtttacaggttgcctgacgttatagcgtacattaatttgaatttgatggtatatacttcaaaaccccaaaagaaaaggaaagaaaaaaacaagaaagaaactaagaaaaacaagtcaaacaaccgagcctgcaagaaccaccatcatcctcgtcgccatcgccggcggcggcgatctcacgacgactcggcgtcggcggtggcggtggccacggccttcaccttgggcacctcgacggggaagctgtcgatctcccccgcccacgggttgcgctcgtcggcgtcgggctcgacggtgcggagcgccctccacacggcgctgttgcacttgaacccggagccgaacgcgatctgccacgccgtctgtccgcggcggacgcggcccttggcctcggcgtacgcgagctcgtaccagagcgagctgctcgacgtgttgccccaccggtagagcgtcatccgcgacggctccatgtgccaggccccgaggcctaggttctccccgatggtgtcgagcacggcgcgaaaa

SEQ ID NO: 395051 - DNA, 512 bp, Oryza sativa
gggaggaaactgacgttgaaactgaacaagtttttgtttttgcataacagaaacttgtttgcaaaattacacccatcatttgaaaaagtagccatgcataaccaaaattacacaccggggtctctagttttgaaagggtatcggttctctccctggccacgtttcaatcttctctaagtacttgacaggaacaacgccatccaaaaacccagaatcacctttttagctatcagaacttgcagcgcttgttgacatccaaacattacatcttccgcatgccgaagcttcaaaacccaatgaacttgacaatcacttcagcgtaaacaccatcgccctgagcactgtacaggctgggaataggatttttttccctaatttgcagatcttcatatagattgtccatcttgaattccttaaatatcgggttgagatattttgggaaaatgtgaccaatgagcgcgagtaccttcatgcgcgtgaactttataccagaaaagcccgggaaattggaa

SEQ ID NO: 395052 - DNA, 653 bp, Oryza sativa
ggccgccgccggccacgcgccggagaatgccttcgccgccgccccgaagatgccgccgttcgactacacgccgccgccgtacgacgggccgcgggcggaggagatctcccggaagcgggccgagttcctcagcccctccctcttccacttctacgaccgccctttgaacatagtcgatgggaaaatgcagtacctgttcgacgaggatggccgccgttacctggatgcttttggtggcattgcaaccgtttgttgcgggcactgccatccggatgttgttgaggcgatggtcaaccaagcaaagaggatacaacactccacagttctttacctgaatcatgctattgcagattttgccgaggcattggcagccaaaatgcctggtgatctgaaggttgttttcttcacaaattctggcacggaggcgaacgagcttgcactgatgattgcccggctttacactggttgccatgacattatttcactcaggaatggataccacgggaatgcggctggaacaatgggtgctaccgctcaatgcaactggaaatttaatgttgttcagacgggagtgcaccatgcacttaatccagacccatatagaggtgctttcggttctgttggcggaaaagtatgcccgagatgttcaggaa

SEQ ID NO: 395053 - DNA, 538 bp, Oryza sativa
agattgaataatgttcagacttgttgcctttcaataaactggtgaaaattcaaacatcgtggttcaaaagaattacagtggtacaataaaaaaagaagggccctatcatccaaaagctccagaacagttaaacacaatctgaagcacaattgtttactcttgaaagaatttctagtggtcctaacccttggtgaaaaatgtaggatgtaaaatcaagttggtcagctacatccttggagagcctgactgctgtaccgcatcagctcgctcttgcaagactcgtcaatgctactgttgcgactcaaatctttagtgctattgacgccgtgaacttgttgaataggtctatctattacaagaaccattgtttctttttccaattgcaagcagtagcttccgaacgtctcttaatccactttcagcctgaagtccagattgaacaacaaatccagctcaagtcggttcatctctactgtgctgattcccccaactctagcatagaatgcattgttgaaaaacctgcaagaaatctcgtgcc

SEQ ID NO: 395054 - DNA, 649 bp, Oryza sativa
  unsure (1)..(649): unsure at all n locations
nnnnnnnnnnnnnnnnnnnnnnnnnnnnnnnnnnnnnnnnnnnnngacgagcaattatcatctgagcaaaagtgaaagcattcgggtgaattccacgtgtggttattttacacagaataccgcgaaacacttgggatgagatgtcgaatttatgtaattgcctagctaggattttacaggtattacacaatattaattcaagaccgagttactccccaaaaaaatgaagccaacttatagagatcccaatagcctctatgctaaagagccagctaaagaaatggtttgtgtacaggtacaacaaaaaacaagcattctcctccctagccctggatctttaaaacctgcagggctcgttgccattgtttccatgcatcaatataagttcattggatgcgattgatcagaaaccttccctggagctattttttaatgccgatgtggttttctgcatcccataccacaatcttaccatccaatcctggacgtggctggaaccggttgacaatactgcgcgtttccttttctcaatggcacgatgcaagttatgcaattttaatgaaccaccaccccgagggtttgatggtacaacagtatcattgcttgtcacttgctttgattgcccatttacttttccaaggcttaaaat

SEQ ID NO: 395055 - DNA, 499 bp, Oryza sativa
ggggtagaacttttaaaagatgccgtatatatatatttgcaccatgccataccgtgaagaacagggtgaacgaagaaaaaaaagagagaaggactattctatgtgttgatatacctacagtttttctttccagttgtgagaaaatttcagcgggcggtgagcgtcaacgccccaaccacctcgaccgatatatagaataataacgcaactccactgtggttggctagcccccacgtttgccacggccacatgacgattgatcgatcgaagcgattgcgccaactcgcacccaacgaaccgcgcgctggctccgtctactcccccttgcctagtcaacgtacgcgccgcacaccttcctgatctcgccgttgtcgccggtgagcacctcgatcctccccatgtttggtcatggccttcgcgtagtccctgaagtactcgtccgtcgaattcgcggacgccatcctctccacgtactgcttggaccacttgtcattgagga

SEQ ID NO: 395056 - DNA, 517 bp, Oryza sativa
ggaatgcggtgaattggcggggggccgttcgtggagacactttcttggccgggagtgcttggttcgggcgccatggacggtgcgaaatcggggaagcactgccatgtctgccagatctgcggcgacggcctgggcacggcggcggacggcgagctcttcaccgcctgcgacgtctgcgggttcccggtgtgccggccatgctaccagtacgagcgcaaggacggtagccaggcgtgcccgcagtgcaagaccaagtacaagcgccacaaggggagcccgcccatacttggggatgaaagcgatgatgttgatgccgatgatgctagtgatgtgaactatccaacatccggcaaccaggaccataagcacaagattgccgagaggatgctcacctggcgcatgaactctgggaggaatgatgatattgcccattctaagtatgatagtggcgagattggtcatcccaagtatgacagtggcgaaatccctcggatatatattccatcggtcacttcac

SEQ ID NO: 395057 - DNA, 1046 bp, Oryza sativa
tttttttttttttttagcaaaacggagctgtgtaaagatttatttatgcgcttctctcgttttggccgaatcagttttaacaggagggaacctgtctttccccctccaattcattgaaacaaaatttacattagtaagatatatcctaatatcctactccttccagcttataaaacattatagcgttaaacaagattaacaatggatattaacaatttaacatgaggataacctgcaccttttctttatgaaaccaaagcgaaaggaaatatgcaagatcaagacatgtttcaaatcttctatatattagacaagaccaacaatgtgtcttcagagttttggatagaggtgaggcgcctggctgtggataatcgctattcctgccgagaagcattgcaaaggcgaaagactggagtcgaagtatatgatgtgcaggtcatctgtgatgttcacaagcctgaacattggtcccttcttcgcacccttgactgagagctctactgatttcctgtcctgtgactgggactctgcctgaggcgaagtaccacagccatcattctgcagtactctgattgggcaaccaatatcccatccgccacaatcacagcgcccaccggacctccatcttccgatgaggctggcagggctgccgttcttggaagccgcgccgcccatgggtagcctcggggaaatatggcacttacactccctgcattatttttcttgttctgaacatcaccatcttcagtgctccctggatgagtagctccagctttctcaaggaacttgagcccccatccaccaagaacaggtgatttccgacgttcgcgccgctgttttcgtactacaattgctgctatctcctggttggtaggcaaatcatcagcgacgaggttcttgaggactgattctttggcactgcactgttcaccttcaggtatttcagtcatctcatcaatctgttgggaggacgatttgccaaacttccacacatgtttcggactagagttcaaattggatggcttcataatgtctgccactctctt

SEQ ID NO: 395058 - DNA, 524 bp, Oryza sativa
gttcagtgcttagcttgcaggccggcgttggatgctgcgtggtgagctctgaggtgatcaaggtctcgtttcacgacgagtagtagagttcccattaccagagctaaagatggaactcgtctacttggaaaggagaaatggattcgatgaagatagcacctctccagagttcagtggaagccattgccatcagatgagaagaaaagcaggagctgccagtcatgtcacaagtcaccatgttcttgcaggagcgaagtattccattcagatttgtacccgacacttcctgcgaagatgatgatactggaattcctcatcagaagcctgaggcacccaagaagaacccacaatgtgagtgatcttgatgaccatgatcagcaatggagcttgcacagggagtgtagttcttggtccctcggagaaaatgatgttggattccttgcattcacttggtgatgcgaaaaccaggccacaaagtccttcattcttccactcaagaaccaagatgagaaaagctcggtcaa

SEQ ID NO: 395059 - DNA, 401 bp, Oryza sativa
  unsure (1)..(401): unsure at all n locations
nnnnnnnnnnnnnnnnnnnnnnnnnnnnnnnnnnnnnnnnnnnnggccaaaaagatcagttgaatgaattacataaaatctggcaaaactggaaagaacacatggaacagtatatgacacgtttacaagattactaccaatttaaggctagtttagtgtgtaaatagtacaaaaacagccgtggggttccttttcctataaaccgggttaatggatcaacaacaagcagatgtggtccaagcattttacaacactgaaatcactgccagatttaatcttcacgttgatttctcctgcaacaccgaagcatcagactaggatttttcacacagaacaaggactgacgatgcttacaaattccgggagagcaatttattgccttaaccatttaacaccttaag

SEQ ID NO: 395060 - DNA, 566 bp, Oryza sativa
gaaaaccgaaacatataatcatgacatgaaggggaaaaaacactcctgtttgagtgcaataacatcacatcaggttcagcaatatcaatcaacaggttctaactgcgttaacaacaataaatcacagagttagttaatgtgatagcttaaactagactgctgacatggtagcctttacatgttctaatattctaatgtaatcgtagaagagcgcggagtgctcgccctccagaccatctcggtgatggcggttgctgccagcaaggttgttgcacgggctgccaccaatcaccaggtcaaaaccgccaaaccttctgatgaatgtttcaattctttcagtaagtaagatgccgcacgtcggcgatttcaatcagcgttccagtttgtgtctgatcccaccagctcttcagaatcgttctgttcacttctgatttctcaacagagatcactgttttcatatgtatccccagtctggggagagctacctttgctcctccaatacccagaaaacagggataagaaatttatccattgggaaacaggtttttaatacaaagagaagggat

SEQ ID NO: 395061 - DNA, 651 bp, Oryza sativa
  unsure (1)..(651): unsure at all n locations
tcgtcctcgtttcgtttcttgcagcaggaagccaaagtgtatttcccgagctttgatgtgagctagctgattttgctagagctacaacatggccggtagtagcgagcagcagctggtcgccaacgcggcggcgacgacggtggccgggaacgggagcaggttcgcggtgacgtgtggcttgctcaggcagtacatgaaggagcacagtggaagcaacggcggcggtggcttcttgccggcggtgacggccatgagcctcatgaccggcggcgctgatgcggaggaggaggcgccggaggtgaggaagaccatggagctcttccctcagcaggctgggacgctgaaagacacgcaagaaaggaaggagatcaccgagaaggcgcagctgaccatcttctacggcgggagcgtggtggtgttcgacgatttccccgccgagaaggccggcgagctgatgaaacttcgccggctcccgcgacagcacggcggcggtgggcgtctcagacgccggcgccgcagcggggcactcttgcctaccagacatgcccatcgcgaggaangtgtcctgcnnaagttcctggaaaanaagaanaacnngatcntcctggcggaaccctgccngantcnganaanaangangnngantcnanc

SEQ ID NO: 395062 - DNA, 785 bp, Oryza sativa
  unsure (1)..(785): unsure at all n locations
gtttctccaattttccaagcctgcctccaagcgcacgccacgatcttctagaagcgattcgcgcgcgccgccgcctcctcccctccccttccccggagcgaagccgccccgccgggggggatgtcgccggcggcggacagcgcggcgtcgaagcggcaggcggagctgctcaagcaggagggcaacgccttcttcaagaaggaccgcatcagcgccgccatcgacgcctacaccggggccatagctctctgcccaaaggttgcagtatattggaccaaccgagcactttgctacaagaggcggaatgagtgggttagggctgaggaagattgtagaacagctattcagcttgacagccactctgttaaggcacattacatgctcgggcttgcacttctcaacaaggacgaattggccgagggaataaaagaactagagaagtcgttggagcttggaaggggtgcacatccagcaagttacatggttgaagagatctggcaagagctttctaaagcaaaatacatagaatgggaaaatttatcaagcgaacgagtccgtcaattgcataagcttgaaggaagcatgtaaagaactcttaggaattataacagccttggacaatcctcctggcatatgtccccgaggaacagctaaatggactttgaggaagttttcggatgccaggagtctgatattccaacagagttcctgatcatctctgctgccaattactcttgatattttccagaaancccggtgataacccccagtgggatcacgtatga

SEQ ID NO: 395063 - DNA, 355 bp, Oryza sativa
tttttttttttttttaaagatccaaggacactatcaattaaattaatgttcaggtccaaacctgtacacgggtaatatgatacaaaaggagtcaggcccataattatacatgttaaaaacctaggtggtggttatcatgtctatttcaaagttctttttcagccttcatttcgttcttttccccctgctttatcaacacgaaatacaacccgccatgcctatgcgatggtgcctatgtgcaacttgcaactccattgcatgattgggaccttactaaatttgaaatactgcacaatggaagggagcaagaaattaggtaaatggggttaaaagaattccgtgagactatgaacaa

SEQ ID NO: 395064 - DNA, 678 bp, Oryza sativa
  unsure (1)..(678): unsure at all n locations
agtagttcccgaaccttaccaaacaaatgaacaattcgatattaactacatcgatgatcgatcggggttgaacgcatattcgtctatccgtcctgttagatgagtactactagtacaaagtgcatcgtacatacacaagtacgcgtatacatcacgactcacgtaacacggagcacgtacgcctacgcgggcacgggcgagcgtcacaacttgttgcactgcacgggcgcgaaggagagcgtgtcgtggccgacgtcgtacacgaactggaaattctgctgctggaattgccgatgatggagagcccccgggagcccatcaccgtgaggcacagcgcgccgggagccgccgtcgagcaccatgtagttctccgccggcagtccaggtcggcgccgcntcgaatggaacaccagcctcggcacctccacctggtccangcccttggccggcgcccggaagcacaggtcgagcccgacgcccganccgtccgccgccggnagcgccatctgcgccgagaacgccttcttcagggcgcggtacccctgcacctccaggtaggtgatcgangtgccggagtccacgatgaagccgnccgtgccgtcgtcctggacggcggaangcgaagctcgggagggtgatccgcgtcgacccgaggtgatggcttgagggacacgtant

SEQ ID NO: 395065 - DNA, 168 bp, Oryza sativa
  unsure (1)..(168): unsure at all n locations
tntttttttttnttttgcaaacaatgcatgcacatcaaattatcgaggcttaatcaacaacacgacatgacaaaacacgacgcacattacgaggacatgtcgacatcaatgcatgcatgcatgcgatgacgtgacactgtcacacactgacacacttagctagctaaa

SEQ ID NO: 395066 - DNA, 503 bp, Oryza sativa
tttgtttttttattttgggggggttttttttccaaaaagccaaacggaaaagctacatgtttatttaggcttagactttttgacttataagttggcttataagcctaaacaaagagggccttaggatttagacgaaaagcccaaaccgaggcacacttcttacgaataccaaaataatgacaattacctccaagcctcttgcaaatattacaaattatatggggatgtttctattccattaatctaagcccataggattcaaattagagcctactaaatattggatacacattttcattcttcaatgtacatatagtctcatgagattgtctgtaaacggtcatgtaaacccacatttcaagggatgaactacagaggtcaacaagactccagcttgggcaaggcatcgaaaaattatcttgcttgacctcacataaaaagcacacgtttgctttttgacgattgcctctgcatgaggggctgcatagggaagaagcagggca

SEQ ID NO: 395067 - DNA, 515 bp, Oryza sativa
  unsure (1)..(515): unsure at all n locations
ggcacattaaaaaaagaagataattgggtgcggggattgagaaacaactttctggattttgtatgtagccccgtgcttacaatatttatgcctgaaaaataaacagacgataaaaaaatagtctcaaacatagagttaagagaacagtttttccactgtcagtagcttgcacagtacagcaatctaacaataatctaacatcagtcatgacacttctaaatgctaaaactaagtacgcaagatatccatatctagttctgtatatggtgcccatcgtttttcatcatcacacgactctgcaagaaattcatacactggagccttttgcttgtctgaagatggacacagagatgaacattctgccttttcttgtgttgtgcagttgtgctcaatctcncttcttcnctttctttggagcaggnttctggnacaacactatctgacccaagagcgtaccattcatcacaatgccaattgcagatcccagtatcacacttaagggagtcttctcctgg

SEQ ID NO: 395068 - DNA, 482 bp, Oryza sativa
tttgttttgaagtaaaatggagtccgtttttatagaccgtgtttcaaaatgtcacaagtcgggccacgtaatgaaaatacaactccacggaagcccccgtgtaaccaacaacatatggacactgttagatttacatgacagatcaataatgcagggagcgcaaacaagtacagaaatataaactttcatggggttattggtcttcgatttatactctgaagtttcaatgtgccccagaatatctcatcgtgctctacctataattccgttgcctaaacagcctattgccatgactttcagcccttatactgctacaggcagaatcgctgctcctgtcagaaccttggatcaggcaggtcaaaaatcagagggcagatgaaaaattcctgtgctctatggttcaaatctactcttgtttcccctgcttcctcccgaacggtcgtaccgtcggtgttgcaatgcctactgagtgggctctgcta

SEQ ID NO: 395069 - DNA, 780 bp, Oryza sativa
  unsure (1)..(780): unsure at all n locations
gcactcccttgagcactccgtgccgcgccggagctcggccacgaggcgcaccaccgcgccgtcgatgttcacgatcgcctccgcgccgccgcgcttggccagcgacgccagcaccgccacggcggtctcctcctcgctgatcgccgacagcgccgcctccgcggcgccggcttccacgagcttcccgacgttctccctctcgccggacaggcacaggagcgcggcgatcgcgtccttcttggtgctggaggggccggtgcgcacgaggtgcacgaccctctcgacgacgcgtgggttccggccaagccggcggcggtaggaatggacggacgccaggctgagcacggtggccgccccgttctccttggcgcgccacgtcgccccggagcccatggcgtggcagaatcgcctcgacggcgccctcggcgtgcatgatgcgcttcttggtggccgtcgaggatggacaggttgagcaagcccgtgacggcgttgagctgggtgncggtgtcgtnggantggagcagcggcacgaggagcgggacggcgccggcctccccgatgaaagcgcgcgtgtcgttgccggacctggcgagctgccggatttcgtgcaccaacggttggccgcggcggggganaaggananggagagcttcttnacgaggaacgangccgtnatgcgcgccgcctccaacgccgccttgtttgcggtcaccaccggcgctggctcgggcttgcttggctcggagctctccatggcgacgccgttctcccggcaccanc

SEQ ID NO: 395070 - DNA, 593 bp, Oryza sativa
  unsure (1)..(593): unsure at all n locations
tttgtttaactggttggcatgaaaaatatttttaacggttttcaacttcttccatgtcactatcgatgatgcttatttattgcagttttttttcactattttttccccatatatatgtcactgtaacaaaacaaaatgatcgattgattcatcatctcggattgtaatcagctgcatcccttggcgccgaagccgatcctctggttggcaacgtcgtacgcgacggcgaacgtcttctgctgcgtgttcccgaggatggcgatggacgagtcgtcggcgttgggcgcgaacgccaggcacgcctgcgacaccttggagacgtagagcacgccggtgaagtcgaggctgacggtggcgccgccggcgaacgccagctccaccgtgggtatctgcgccgtccggtggccggtgaagtcgtagcacgtgtcgaggatggacagcgcgggcgccttcttgtactgcgccatggagcgcgcgaacgccgcgcggaacgcgcgttacgccgcgggcggggangcgggtgatcaacgtgccggagtcgatcaccgtgccgccggccgccgcgaacgccgtcgccggggatcctgatcgcg

SEQ ID NO: 395071 - DNA, 540 bp, Oryza sativa
  unsure (1)..(540): unsure at all n locations
nnnnnnnnnnnnnnnnnnnnnnnnnnnnnnnnnnngttgatccttgcttggccacgaaaagagaccgggtttaggcctttttttttccactgggcatttgcacagctcctatcaacataggggtttaagcatagaagaaggggaaaaaaaacaatacgatatctgcagcatgtgatgtttcgcactatcacccactcgagcgcaaagccaacttgagtttggcagcagtacattagacagtgggttgctttatcgtcaattcagctctcagatgcaacacgccgtcgaggaagaagaggctgtcgtcagccatgaacgtcgaccatggtatcgcaaagagattcctgtaaccaaccgccttcccaccggtgaacgtgtagttacccttgtacttgctcacaaactctcctgacggtcttgtccttgcagcaaactccataatctactgtcacgctcattgagcccttctcttgcatccctaagaagagaccgaagcagtagaacgtactctgctgttccatgttacagtgtgctgagagc

SEQ ID NO: 395072 - DNA, 678 bp, Oryza sativa
cgaagccagaggcgttggtttggcgacgagctcgacggagagaacgacgatgagctcttcaatccctggccaccgtcttcaatcgtcgccgtcccgcaccttcttccgccgccggccaccagatccgggagggtagccggtagcgagcagtggggaaagagagggggctgcagcggtgaccagcgcagcgagtggaggacggtggcagccagcagagcgggtggaggacagcgacgaccagtgaccggcgcagcgggtggaggacgaccacgaccggtgcggaggaggagggttgcggcgatgaccagcgcagcgagtggaggacggtggcagccagcatagcgggtggaggacgacaacgaccggtgcggaggagggctgcggcgatgaccagcgcagcgggtggaggacggcgaccggtgcagcaacgattagtgcggcggcgggaggatgacatcgacgagaacgagatgcacattttttttcttttctttctttttatttttttccctcacctgttatagcgtatataaagcggcgaattattgatcgttggcaccatttattttttttataattcttgagaccaattcacccattacatatgcaacagattttaacaaaatttggctgattgaatagtactataactacaattccatggtacactaaaacaaa

SEQ ID NO: 395073 - DNA, 769 bp, Oryza sativa
ggaacatgccggggggcatctgacccctggcttgctgaatctctcaccatatattcggcattaaaaaaagaacaaacaacggcatttcgaactcatctgaacagcaaaacatgtttatctcaactgaacgatcctgaaaaatagccattgcccaattaaccaagcaaaatcttactactactccatagtctgatctggtgacagtatttaccagagcacgtttattcagctctagaacacatcacagcctcaccattcaacatgaaaggaactctgttactacagtctatagctgtgccaagttgttactacctgacaaacagtgcaaggccaagactcatatatgttacctaaaaattgcacactatgttcgctatagaagcttcacacatcaaaacgacaacactactctgcacggtccaccattgttgccatgatttattattcaggaaaagaagcgaacacttgagagaagtaggcaacgaaccgagctatggagatttgagatgaaaagtggaggatggcttgagttgttcacgcttcagagcgccttgagcatctcctcggcgctgctggtggtgaaggcgccgccctcctcgaggttgagcaccttgacgacgccgtcctccgccaggagcgcgtagccgcgggaccgcacgccgaggccggcgggcttgtcggagaggtcgagctcgacggcccatggcgcgggcgagctcgccgttgccgtcggagaggaggagcacctcgtcgccgacgccgaggctct

SEQ ID NO: 395074 - DNA, 408 bp, Oryza sativa
  unsure (1)..(408): unsure at all n locations
nnnnnnnnnnnnnnnnnnnnnnnnntcaacaaaaaaataaaagtagttttttttcttttgttattccgtcatttcgtcaagcacatggcatgcaacattcaaccgaaaaaaaacacacacaaaatttcctcttcacaacgacgacgctactcaccaacgcgcgagagcaacgggctgatcctgccattgttgccacctacgagagctcggattccatcttcagagcgccttgagcatctcctcggcgctgctggtggtgaaggcgccgccctcctcgaggttgagcaccttgacgacgccgtcgtcggcgaggagcgcgtagcgcgacctgacgccgnagccccatgggcttgtcggagaggtccatctcgacgccgnagcgcgtcgacgtgaancttccaaggtttg

SEQ ID NO: 395075 - DNA, 521 bp, Oryza sativa
gttgacctcgcagctttaatccccgcccccagcctctgtcccgtggactcgcagcagcacacggcatccgtagccgagggcggagcggggatcgacgagcggcgaggaggcgggcgagcggctggccggcatggaccggaatctgagcgggttcctgatcgggtgcgtcggcgccgccgtgacgctgctggcgtacgagcagacgctggtgtcgagcacgcagtgcttcgccgccggcttcgtcgtcctcctcttcgcgctcttcgtcaaggagggcttcatctcgctctgattttctgcgtgtcagcggcgacttggttggggggttccccttctctgcagctcgtttccgattctttgcttccgtttttctggacctcatgtcctgtagaagtgtagagtagccactagttggaaaaggaatagcttttgcagcaaaaactaatcctttccgactatgaatgccatcttggtgacttggtgatggttgggtcatgtaatcctgcaattgctgatgcttg

SEQ ID NO: 395076 - DNA, 602 bp, Oryza sativa
  unsure (1)..(602): unsure at all n locations
ttttttttttttttttgtaacttcaaaacgagggatgcaaacccaggacaggggtaatcgcccctaagccgttcgatcgtaaattttctacaacgtcaagtagaagagttacatatgaaacatttcacaggctaagggctatgaggtgctacaactacaagatggcttcatgtagatgctgacaacttctaacaagttaattcagtgcctcagtccagctccatggcattatcttgtgccctgcttctgcaggaccaaatcttgatcgttctatcatgtgacacagtcacaatctgctgtccatctccactaatatccaaactagtaacctttgactcatgggccaccaaactcttgattggtttgtaatcacgagctgaccacagtgctgctttggtgtcataggacgaagttgccaaataatagccttccctgggttcaaacttgacatgtgagataagactcttatgtgctggtatagaatataacattcttttagtcctcaaatcccatattcgacagaaattgtcttcacntccagttgcaaccagataaccattaggggagaagctcactcctaagacaggttcacatngtccctt

SEQ ID NO: 395077 - DNA, 531 bp, Oryza sativa
  unsure (1)..(531): unsure at all n locations
gtggccggcgcggagcgtctcgatgatgtgctgcacgtccaccttcacgccgtcgaccccgcacgacgccaggtaggcgtggagctcgtcgcagacgtcgagcacctcgcgcgggtggacgaggcccaggccgagcacggagagggagtccatgacgatgcccggctggttcgccgtcacccccggcgactgcaccgggtacgccagcgccgcctcgtaccgctccatcgccggcgccggcgccacgccgccccagtacccggccatggcgtgccacacgtacacctgccggacgccgtgctcccccttcacctcctccaccagcatcctcagccccggcgtgtcctcgccggcgccgccgttcttgctctggaacttgacgttctccttgatgcccgtgagcccgctggcgaactgggcgccctcctggaccgcgaccgcggggtgttcgttcgtgttgtcatcctcgagcccatctgctgccagccgtcttccaaaataaggannnnnnnnnnnnnnnnnnnnnnnnnn

SEQ ID NO: 395078 - DNA, 478 bp, Oryza sativa
  unsure (1)..(478): unsure at all n locations
nnnnnnnnnnnnnnnnnnnnnnnnnnnnnnnnnnnnnagctggatagcccccgtcatatcacattttatttcaaccaagcaggatacacattgtttctttattcccaacgtaactaaaccaattttaatgaaaataaaagaaagaaagaaatgtcccttatcccttttacatcctgcattatactgttaactgtatgaatctatctccttctatatacagctcgaaggactgattttcagtcccagtagctactaaccagttgctaactcctctagtgaagaacgcctaatgcccagttagagactattacagaggtattccaagaaacaaccaacaaagaaaaaaaaagtgagcttggcgtacttcatggcaaaaatggtttaaaaggcatgtgatcatttggatttttgcttttcccgcggcatataggcttggatattagggcaccgctgcgggacttggaggcgccaacttgtg

SEQ ID NO: 395079 - DNA, 619 bp, Oryza sativa
  unsure (1)..(619): unsure at all n locations
ccgcgaaacgcacggcgtcacgagtccagcaaacagcaagagaagagaagagaagagaagagaacgcgtcccgcttccgactccggcgagagcgagaccgagagcgcgcggcggcggcggcggccggaggaggagaagacgatgggttgctgctgccggtgcctggagatcctctgcgccatcctcctcccaccgctcggcgtctgcctccgccatggctgctgcaccatggagttctggattagcgtgctgctcaccatcctcgggtacctccccggcgtcctctacgccgtctacgtcatcgtctccgtcgaccccgaccgcgaacgccgccgccgcgtcgaccccgacgaatacatctacgtcgcctgaccatctgtggagtacttagtaggtgattaatttagctcctggaaagcatatccttgttcctagtcctattacctatatctgctcctgttccacccttcaatttgtaaactggtactagcacatctgcagcctttggacaagtcgaatcgggtcggaatttgttaccgtagttcaactgtgttactgtgaccgtttgattgctggatcaattgctctcaaaaaaaaaaaaaaaannnnnnnnnnnnnn

SEQ ID NO: 395080 - DNA, 773 bp, Oryza sativa
  unsure (1)..(773): unsure at all n locations
gataggaatgctgtagtaatgtcttccccttactgctgtagtggtacaactcacttgggcatttcaactgagaagagcatgccgacaagaaaattcatatgctttgcattgctttctcttctgcgaattgatgcaaggttatacattaatcatgacactgaaagaggcaaatttgcacttgacattccagaaaacacccagtaaagcaaaatgctttgaattctcgatgtccaaaatgctagtacaaaaggaaaaactttcacctgaaaaataaacatgctacatgggaactgaagagaggatgcatgcctaaactgctgcaagcaaaccaaatttcatggcaaacttcttctgattacagtcaagcatctcactgaggctgcaccttgaattcatctgcttgagcaccttgtggcggtactccaggctcctcttgagaccaggcgaaagaactgggggtaatccaccacctcacccatgtcccgccccattcntcaacaaggaacttcatcctaggntccaggcaatgcttgacactcttgatgagaacaggagggtatccagccaccaatgccatgacctgatccttgctgaaaccgcagctctgtaagaacggncaaattggggccgcagaatcttatcgacatctcgcgacaaaatatccgggaaactccaggatcancccctgaagattgacccctcaagcccgaacgncggacttgaggaantcgggcagtaggacggaaggggctgtcaaacactgtaacccatga

SEQ ID NO: 395081 - DNA, 464 bp, Oryza sativa
atctcgagtttccgccctttttttttttttttgaagccgaagcagagcacaagcccgatttttattcaactccgatcgatttgtacaaaagcttagtacttacgttagcgtatatacaacctgactcatcatcatacaaaaaaaaacaaagcgaaaattaaggctctctgatctctctagagacagagcaaacctggaaccgtgaaagaaaaaagaagcctagcatgactgcacgagcttcttcttcaatcaatactctgattattctctctactgcagatctgcaataccgcgacaccctacagcggatccgctgcagggatctctctctaccgtctcgtcgtatatacaaaaccgtatagactacggctgtaaaatatcgccgtatctccctaggactacggcgacacgtggcaccgactgattcgctgcctctgtctgccccctcttgacgtggacgcggc

SEQ ID NO: 395082 - DNA, 833 bp, Oryza sativa
  unsure (1)..(833): unsure at all n locations
nnnnnnnnnnnnnnnnnnnnnnnnnnnnnnnggtgcagactgtagtttattcatctcattaccaggaaagctggtgctgttgtacacaacataatgaacatatcgcagtttacaaatagtaaaacaattatcaaaatgccatacaatatgctgcgacagaaattcctctgccagcatgttcaggaagatacaattaccctcatcaatcattcttgatcacgagaagcgtatgctgaaacccttgtcggtcttggtgacatccatgctgccgaattcatcgaagtctgaatctgaatctccacccctgaaattagcccattcttctgtgctgtcatcatcttcatcctttgattctgggacttgtaatccttcaataggtacaggtaatggttcttcggcgaagtatggatcattcagcaagtcggcagcactggccctctttgttgggtcatagccaaagtagcctctttatgatactaacttcagaagcagatctatcaggcaggcatgcttcgaggcctattgggcttctcgactttgttgaagaaaatcttattgtaatctgggcagatttgaacagcctgggaaaggtttcttctgtgatggttgcccagaacacggataattctaccaatctgaatcggtatccagatggggcctggggaataatagggccctaaattaaacagttcagccaaaatacatcctagtgaccagaggtcaacctcctgcccatagtttgttgacccataaaggagctctggagctctaaaccagcgtgtgccaacacaagaagtgaaagcaccggactcttcttccaacatgccttcttc

SEQ ID NO: 395083 - DNA, 470 bp, Oryza sativa
cgctggagtgcgggcggatcacgttcccttcctcgctgaagcagcctggaccaagggatgctccgatgcactgcttcatcaggaggaacaaaaagaactcgaccttctacctttatctcagcttaacacaggccctaacggataaaggaaagtttctgctggctgctcgaaggttcagaaacggggcacatacagaatatatcatttcctatgattgtgatgatctatttccaggaagcaattcgtatgttgggaaactgagatctgacttcctgggtacaaagttcatcatctatgatagccagccaccatacgatggtgcaaagccctcacggagccaatcgagtcgtcgctttgcaagcaaacagattaacccaaatgtttcaggcggtaattatgaagttggaccagggtcatacaagttcaactttctcaaatcaagaggaccaagaagaatgcagtgcaatatc

SEQ ID NO: 395084 - DNA, 639 bp, Oryza sativa
gacggcgcgtaccactacgagctcggcagggcgctggtgccgctccgcgacgacggcgtcctcgtcctcggctccggcagcgcgacgcacaacctccgcaggatggggcccgagggcacgccggtgccgcagtgggcggcggagttcgacgggtggctgcaggaggcgctgctcggcgggaggcacgacgacgtgaagcggtacgaggagaaggcaccgcacggcagggtggcgcacccgtcgcccgaccacttcctcccgctgcacgtcgcgctcggcgccgccggtgagggggccaaggcggagctgatccaccgcagctggagcaacgcctcgctctcctacgcctcgtaccgcttcaccaccgccaagaactgaaaaccggtcgacgcgatgcacgccggctcgccgcatgcaaccacgtgtttgcttgtaacatatttgactcgaacaataatccccgtgggctcacgtaaacgtgtgtgccgtgttcgtgtttgtatttctcggacccgtggcttggggttgtttacttgtttttttttttgtaagattgggttgggcctgggcctgggcctgggccgtggcacacccttatggcgttaattggtgttcttatttggacccaaaaaaaaaaaa

SEQ ID NO: 395085 - DNA, 471 bp, Oryza sativa
ttgctcaccttgcaccacctgctccgccgccgccgccgccgtcctcgatccatccatggccgccgcgagcttcgacggcgccggcggggcgctcggcgtgcacgcggcgtcgcgcaagatcgggaaatcggcggcgcatcagcagcagcggaagccggtgatcatttacatggtgtcgcccaagatcatccacgtcgaggcccacgagttcatgtcgctggtgcagcggctcaccggcccgggggcgtgcggccgcgggcgacggcggcaagaaggcggcgtcgtcgtcgccgagggaggcgcgcaggggggcgccgccggtgcgcgtcaaggcgcgggccctgaaccggcccgccggcggctcggccgtgtccgtgtccgtgacggcgacgatgcggcagcagcagcagctcgcctctccgtcgtcggcggcggcggcgggcccctctccgtttccgacgacggggtttc

SEQ ID NO: 395086 - DNA, 472 bp, Oryza sativa
tttctttgcggggtcttggcaaatatgaccgtatcttcattttcaaacaggaaaaggaatctttgagcttaaggaaaatatcttagatacaaaattctcatctttaagatataaccctctccgttcattttcaaacaggaccaggaatctttgagcttaaggaaaatatcttacgtacaaaattctcatctttaccaggaacagacaggtaaagtaggttctaccaaaaattcatagatcatcgcaaacgtagagcaagttgcaactatctcaaaaaagtcgcagcatgttcacccatacacacagcatccagaaagaggcaaagggggcggagcaatgttgaatcagggccagcaaatcatacaaggaatccccattcggaagagaaatgaagaatgaaaaactgcccattgccaccatgcaagaagcccctaacttgaacctggccattcagcaaaggcccccccgagct

SEQ ID NO: 395087 - DNA, 619 bp, Oryza sativa
  unsure (1)..(619): unsure at all n locations
gccgcctcgccgccgantcgatcccatttcagattgcgcctttaagaaggaggaggatggacagttgctaacctcacctcacctcgctttcgatttctccggtcttctcttctcttccgttccatccactttcttcttctgctggagcgcgcaaaggagcttgctttgcttccgccgtcgccgtggttgccgcgccaagattgtgtgactgcatattttccttggtcaactttgtttcataaccggatagatgggttctgaaggaccttctggtgttaccgttcacgttactggattcaagaagttccatggagtcgctgagaatccgacggagaagattgtgcgcaatcttgagtcatttatggaaaagagagggttgcctaaaggtttaacacttggaagttgcactgttcttgagactgctgggcagggtgggcttggtccgttgtatgaagtgtttgaatcagccatcgtagacaaagagtatgggttgaatgatcaggggcaagtgattctgctccattttggagtcaacagtggcacaacaaggtttgcccttgagaatcaagctattaatgaagctacctttcgttgtcctgatgagctgggatggaaacca

SEQ ID NO: 395088 - DNA, 673 bp, Oryza sativa
  unsure (1)..(673): unsure at all n locations
aaggaaaggccaaaattttttgttccattattgaaaaaatagcaaagcccagcaggcattgagagggtataaagaaattagcaaccaaattcagattgcagacactcattgtattcagcctgcatacatggctgttcatgcaaatttgtacacggacaccggtaatttattctgaataaacagtcgcatgttctttcatgtatttattaagtttcatcacttcaagtgtttctgaaaccagtccagcattaaggcgagagcttgtttcccggtttcgagagcaaacgggtcgctggtgttatatcgaccggcaaatccatgggaaactcctggaaaaatcttggcgtagaaatcaatatcgtttctttgacgcaaggcatgcacatactggtagactaatcttggtggtgtaactgtgtcattctggcctccaaggatctcgatgggccatttaacctctttcatatcatcagcagtcacgccgtagggtgggggatgacaaccgcttctacctcattggttttcgctacctccacagcaaactttccaccccaacaatatcctccaactccaacaagtgatttcccttcgtttcttagaaaagcaaagattgatttagctttttcagctctttcaccggagagtgagactcnagctattcggtcggacctgn

SEQ ID NO: 395089 - DNA, 819 bp, Oryza sativa
  unsure (1)..(819): unsure at all n locations
agattgccaggttcttatgatgcgattagaatccgatctagcacaagttctgatgtctgcatgcagaggagaacttggcaatgtttcactaacctggtcacctgaaatggcgatggtggttgtgatggcaagcgaaggataccccggatcttataagaaggggactgtaataagaaatctcgagaaggccgagcaggtctcgcccgcggtaaaaatattccatgctggaacagcactggatggggatggaaatcttgtcgctgtcggaggccgggtgctcgggatcacggctaagggcaaagacattgaggaagcccgggcaagagcatatgatgcagtagatgttgttgactggcctgcaggattcttcaggcgcgatattggttggagagcactgaagcacaagcaagtggccaattactgatgcggattttcctgagcacaccacaactatggtgagcatgtaatcttaagagcaataaagagaaaatttgtcacttctgtggttgaggaaaggcaaaaccatagctcaaatttgagtttttttttttgtaccaactgttaaatttgagttgggcttgcattttgaggaacagccagatgaacaatgaccgagttttgacttccacaagtagagagagagcattgttcggtgcttaatatctacttccgttggttagtggtattaagggattccatatgtaagtcgttttagacttgtgcacaagaattaagataacaatctcaatgattttgttacccttcnnnnnnnnnnnnnnnnnnnnnnnnnnnnnnnnnnnnnnnnnnnnnnnnnnnnnn

SEQ ID NO: 395090 - DNA, 752 bp, Oryza sativa
  unsure (1)..(752): unsure at all n locations
ggagcactagtagtcttcgtctgagagagagagagagagaggtttggggggtaggtgttgttgggggagtcgtcgagatggagaaagagggcggagtgaaggcggcggcggaggcggaggcggaggcggagggggagatcgtggcggcgccggcggagaaggtggcgtgcttcaagaagacggcgggggaggaggcggacgcgacgttcatggagcgcgtcaaggactactataaccagctcaaggagagctccgccgagaagcactggatctgcatcaaggacaagttccgcgccgccggcgagtacgtctcacagaagagcagctcggtgttcggcaagaagaaggtcgagcccgtggtcaaggatgctgcagttccaggggaggcgagttcggtgacagtcgagtctcagtgagggggggctagcttctgatcagtaccaactttgatgagacaagtgtaaatcctcttaggtgctcaacggtggaacttgaattgtgaggtcttatcgatcagcgagtagtttttttgctatgtcatcttgttcgtagattctagtaggaagagtagtttggacatggttggctgagtggttactactgctgtgatctccggatgtttctacctgaaaaaatatgtganccttgaatctgcttggtagcatctatgatcaatctgcagtgcagctggttaaattcgtgccgctgctattctnatatagacatatagttatatgaaaaaaaaaaaaaaa

SEQ ID NO: 395091 - DNA, 769 bp, Oryza sativa
  unsure (1)..(769): unsure at all n locations
aatctgatgaggagtaacggaaagggagaggtggaacctgcggaaaacttctcctctctctcaacgtgggtccatattcccctccccatcgctgcacctttcttctgcatggtcggtgatgtcgtgccggatccggctatcccgatcgagtccggtcgcttgttggtgaggtgccgccgcggctgccgccagatccggcggatctagggtcgtccatcgccgtcccgagcgccgtggtggctctcacgtcgtcgggggctgccgaagccgggccgggaagcacgtgcacgatctccggttaattgaggagcacagggcggtgcggcccttggcggcacagcggcaaaatctgatgataatgatccggcgacaatggcgtgtaatgatccggcgacaatggcgtcttggacttatattttgctgctgtgtttgccgatagttcggttgcattgcttgctattgacctcttctcttgttgatctggtgggtggctcccgtctggttgcgttgattgctatttacctcttctcttgttgaactggttggtggtggctcccttctggtgtttggtatttattggagagtcaatcaagattagtttaggaatcggtgacaatcaagattgtcagagtcggattgtttagggtgtttttattttggaatctactgtcttaggccgtgtttngatccaaagtttggatccaaacttcagtcctttttcatcnnnnnnnnnnnnnnnnnnnnnnnnnnnnnnnnnnnnnnnnnnnnn

SEQ ID NO: 395092 - DNA, 571 bp, Oryza sativa
  unsure (1)..(571): unsure at all n locations
caaagactagacaaagcagctaggacagtaaagctaagtgttttcctagctaggtagctagctagctagacaagcttgccggccggccggccggtgtcggcgaaccatggacttcgatgaccatgacgacggcgacgaggagatgccgccgatgccggtgagctcgagctacgagactccgccgcagcatggccttgccggcggtgggatggcgcccaagcctcctggtgagattggcagccgtgtgaagggccccagctcgcggtggcggtaggtaccgcgagtgcctcaagaaccacgcggttggnatcggcggccacgccgtggacggctgcggcgagttcatggcggccggcgaggagggcaccatcgacgcgctccgtgcgccgcgtgcaactgccaccgcaacttccaccggaaggagtccgagtcgcttgccggcgagggctcgcccttctcccnggccgccgtcgtcccctacggcgccacgccgcaccaccagttctccccgtactaccgcacccctgccggttacctccaccaccaccagcaccacatggccgcggcagcc

SEQ ID NO: 395093 - DNA, 772 bp, Oryza sativa
  unsure (1)..(772): unsure at all n locations
ctctcactcccccactccactcttccttatttcccaagccaaagcaccagaagcaacagcacatccccacatcgcgttccaagtccaagaaaacacaccccacgcacagaatgcctagagctcggccatcttccccggcttcggcgaattagccatcgtcgccgtgcatccccggaccaatctgtcgagcatgtggtgggcgtcaccgtcctcgccgccggcacccgaaccaccgacgccgctccggccgccgttcctcaccaccgaagcaacaccaagctccgttcgcgccttgagtcgacccggcgacgtcgacgccggagttttgccgccgttggccatcaaccaccgtctccgccgctccctggacctcgctgcctccgtttctctgcttgaggaagaatacgtcgaagaagaagagggtgagtttgttgacgaccaggttcaggagtttgcagacgaaggtaatgattgtttggatgaggagtttgatgcagcttgtgatgttgcagattttcaggatggttctaactagggatttaccctagtcggtttgcctatgggcttttgggtaagcacgctttaccggcatgaacccaatatttaatggctttgtcgccaagttctcactttagaacccttcatttaagacttaatttatgctttatggcttagaaccacttattatttggatatcatgcttgagatgatttatgtgagactatgttgcattccnnnnnnnnnnnnnnnnnnnnnnnnnnnnnnnnnnnnn

SEQ ID NO: 395094 - DNA, 818 bp, Oryza sativa
ctttatttcccaagccaaagcaccagaagcaacggcacactccccacaacgcgttccaagtccaagaaaacacaccccacacacagaatgcccagagctcggccatcttccccggctccggcgacttagccgtcgtcgccgtgcatccccggaccaatctgtcgagtacgtggtgggcgtcaccgtcctcaccgccggccacccgaaccgccgacgccgctctggccgccgttcctcaccaccgaagcaacaccaagccgatgtacttcgtcagcaagctcgcctcgaccccatcgaggttcgactgaagccgatcgagccgacgcactctgcaccgccggaacgtcgccgccccctcccccttttcggccatccgccgccgccgggaatcctcccgctccgttcgcgccttgagtcgacccggcgacgtcgacgccggatttttgccgccgtgggccaacaaccaccgtcttcgccgctccctggacctcgctgcctccgtttctctgcttgaggaagaatacgtcgaagaagaagagggtgagtttcttgacgaccaggttcaggagtttgcagacgaagaccctgctgcaggtaatgactgtttggatgaggagtttgatgtaacttgtgatgttgcagatttccaggatggttctaactagggatttaccctagtcggtttgcctatgggcttttgggtagcacgcttaccgcatgaaccaatatttatggcttgtcgccaagtactgcttagaaccttattaagactatttatgcttattgcttagaaccacttattaaaaaaaaaaaaaaaa

SEQ ID NO: 395095 - DNA, 388 bp, Oryza sativa
gtgcttttctttattgatatttttattattttctttggtctatccgcttgccggtggactggagtggagtggcggtggcggtggcgcacactcgcggcggctcgtgcgcccctccgcctatcgccgccggggccgtgccacccaccctcgaacgccgcggtgacgccgggatgttggcaggctgggaaacattggcttcctgtcctgcgagtgtcattcattcgttgatcaaagtgttattagtggttaccttcatgcagtggccagccactgctatcgttgttgttccgaattcaaactgttttaccttcgacaacaatagccgccttgtggactttgcagatctaatcgggaagaactttgaatataatgaaaagggctcagtacc

SEQ ID NO: 395096 - DNA, 597 bp, Oryza sativa
  unsure (1)..(597): unsure at all n locations
ctggcttgtggtacttctagtggtatatcagtttggagccttctttcaaatgagtgcatctttaatgtggattgccatgctcctgttcaagatttgctgtttgacagaaaccaaatcttagcagtcggtgctgaacctctgctctctcgtttctctatcaatgggactcttctttcacaaatcaagtgtgctcctcactcagcattttctgtctccatacattcttcagggatggcagctgttgctggatatggaggccttgtggatgtaatatcacaatttgggagtcatttgtgcacttttggctgccggagcctggataagtaagatctattggaacaattagctaagcactcttaatagtgtaaagaactggaaaaacactgccaagatctaattaagtactactactagtaatcatacacttgggagctgttcagctgtaacactagttcatctctgtgctaacttatgtaattcacagttgtgccgttgctgctccgatagagatgactctagatcccttaagtttattgctgttacaatttccctaatgaattcccttgtacggattnnnnnnnnnnnnnnnnnnnnnnn

SEQ ID NO: 395097 - DNA, 524 bp, Oryza sativa
  unsure (1)..(524): unsure at all n locations
gcaggctctcctctggtcttcaacccacatgcccaggaccacatcagttccccccactcagggcgacaccaattgcagtaaaccaaggatcataccttgctccatcacctgcaccaggagctggggaggctggcggcgatattccgggcttccctgggagctccaacgtttctcctgcaaacggcccttctgggagtgtctcccaagcggcttcggtgaatcggccacaccaaatcgtcgccctcattctttctgtagccttgtacttccagatgtgaattcgtgtgcagagtattgttgttgttgctggctgtgtgtattgaacagggggccctcatttgggcctggtggaaccctaatgtcaaggtcctttctatcgccgtcgtggtgtctcgcagcgatccaattcttaatgcgtcaaacggaagccccaattggggcgggcttattcagtttgtaaccacatgggcgttcaaattcaaaacctattgcttgagatnnnnnnnnnnnnnnnnnnnnnnnnn

SEQ ID NO: 395098 - DNA, 406 bp, Oryza sativa
tgcctcctcccgctccgagaaagcgcagctcgctcgagctccgccgattcccacccgtggctcgtcgccgcctccgcctccgctcctccctcccgccgccaagatgaagctcgtcaggtttctgcatgaagctgaacaacgagacggtcaccatcgagctcaagaacggcaccgtcgtccacggaaccatcaccggtgtggatataagcatgaacacccacttgaagactgttaagctcacattgaaagggaaaaatcctgtaacccttgaccacctcagtgtgagaggaaacaacattcgctattacatcctccctgatagcttaaatctggaaactttactagtagaggataccccgagagtcaaggctaagaagccaactgcagggaaacctttggggcgtgg

SEQ ID NO: 395099 - DNA, 516 bp, Oryza sativa
  unsure (1)..(516): unsure at all n locations
atcgggggcaggtcgtcgaggtcgcggcggcggcggctgaggctgcggcgggaggacggctcattcctgaacctccacgagacgggctgcgcgaggctggacttctcgccgccgccaccatcgtcgcctctcccggccaaggaggaagggtggaggcgggtgctcaaggcggcgatcaggaagttcaaaccccgccaccccgttcccggccggctcccctgctccagatgatgctgccaacgctatgatcgatcgatcgaccgagcaatcgatctcgtggttcgctcgttcagttcgatgttgcatgaatcaatcaccacgcgttctttcagtcggatttgaancgccggccgcccgcganacgccccttcttcgtgtagtataatttagaagttactgaatttatccgtataccacatgtaatttgtaagttgtgctttgtaacgncctctcgctacagattcaaatttgaatatataaattcaatcgactttttaggcgaaaaaaaaaaaaaaa

SEQ ID NO: 395100 - DNA, 510 bp, Oryza sativa
  unsure (1)..(510): unsure at all n locations
ggttacatgtacatttctcaagtggcttaccgacagatgggggagttattagcggtatgcggcagagtgttaacatcttgatatatttggatgtcagtatggcactgcaagatggaatgaagctgtacatttcagacaacaaggtgattctgacagagggtttcgatggcgttgttcctgtgaagtacttcgagaaaattgaaacatggccagggagagcaccgataccatttgaaaaatagagaacactgttgtaattttgctcatgcgtatagcgatctacttcttcagttcatgggaattgtgccctgaaaggccgaaagaaatgtaattttgcaaacaagtttaggttatgctcgtttgagaaatggagaggtagacattgttgtgaagcttcagtaagctgttcttaatgttgattgggtcaatggctcctccagtttatccaattccatctttgcagttactactaatctnnnnnnnnnnnnnnnnnnnnnnnnnnnnnnnnnn

SEQ ID NO: 395101 - DNA, 505 bp, Oryza sativa
agggacaacagagtgacagatcaccggttgaagatgaactttgaactcactggtttcctcatgggagatatcgagtcggctgtgcagtcctgttcttcaatggagcagaaggaactcctggaggagatggccacatctgtgggcgcacgaatggtatgatcagcgcgatcgatctgtctgcagtcctccttccacctgagtaccagaccatcagatagaaatcatccaatggacattgtgttgaaacgggtggtgatcaatggacaaatgtacatgaagaaatccgaagatacatatacatatgcttccgtttgctcatgagcatgactaatgtcagaaaacacactgatgcattttcagttcctcttacagttacaaattttgagttagttggatatatgcaatgtgtacatctcaacagttggcatagctacaatatgcattatgcacaattcaacctggttaatagatgggaatgaattatggtgatttgtcaaaaaaaaaa

SEQ ID NO: 395102 - DNA, 574 bp, Oryza sativa
  unsure (1)..(574): unsure at all n locations
gaagaccatccttcttcttccacggcctcgctactctcatgagcaaggatgaggagggtgtggaggaggagcagcagcagcagcagcaacggcccaatgccatcgttgggatcgcaggagtcgccggcgacactgggatggccggccggtgagctgaatccaagataggatatagggaggatcgatatataggcgaagaaatatggaggggagttttggtgatggtgatggtggtggtgggttttcggtcgacggccggcgctgcaatgcggcatacaagggaaagccaggcattttctctgctgttccaagtactacctttcctttagctttcctctccatggaagaaaaaagaaacggttgcattattcatgtgttttctctgtttgttaattacctctttgagggtgattaattacttcgggttttttaagctaggcaagttaactagtagtagtttctgctacagatggtcaatgaagatcatgctaagacgacagtcacactgtatatctgcattgattccttccttctagattgttatgcattttcnnnnnnnnnnnnnnnnnnnnnn

SEQ ID NO: 395103 - DNA, 457 bp, Oryza sativa
  unsure (1)..(457): unsure at all n locations
tcattcctcgcggggaggggcggcgcgacgctcatcgactagttcactccatctccatctccatctccatctccatctacatatacggccgcttccaactgcaatctcctgcctgcccagcgattcttcccacgatttcctttcctgcttttctcatcccttttgtttcttcactccggctcaccgcgcgaaccaatcttctgccttcacacaaccaattcatcaagcagatcgagatggagtgcgagacaactacagcaaggagcagaggctcaacggcgacacctcgtcttcgaccttgatgacacgctgtatccggtgacctncggcattggagccgacgtcgtaaggaacatccaagcttatatgatcgaaaagcttggtgtggaagagagcatcagtttggagctatgcgtcctnctctacaagcagtatggactaccatggccggttttag

SEQ ID NO: 395104 - DNA, 740 bp, Oryza sativa
  unsure (1)..(740): unsure at all n locations
ttgttgaggagcggctgactgaggggagaccagaccaatggttggcggcggggcgggcgagccgctgaggagggcgtgggggtacaccccgagtgccccggatgcagggtggcaggaggaaggaggagagggaggggatccctacacgagctctccctcatctggctcgtcaccgtctctcaccctgccgatacaatccctgtttcccttcttgtattttatgataagggacctgcatattctaaacaagaagaagatattggttttatgctggttttgtcggcgcttcatatatgtttggaagagcactctcctctgtgatatggggcatcgtggctgataagtacgggaggaagccgattattataattacccttatttcaataattattttcaatacactctttggactcagctcaagttattggatggcattaacctcaagaggtttgcttggtctgatgtgtggtatacttggcccaattaaggcctatgctacagaagtgtgccgaaaagaacacggtcaccttggactatcccttgtttcttcctcacgtggcataggccttattgtgggaccagctattggtggttatcttgcacagcctgcagntaaatatccaagcatattctctgagaaggctataatttggggagggtttccgtattttctcccctgcttatgnatatccctccttgccattgntgctctaacttgctccttctgggttcccggaaan

SEQ ID NO: 395105 - DNA, 738 bp, Oryza sativa
  unsure (1)..(738): unsure at all n locations
aaccaacaagaagagttgttgcttgcgctcacgcgaagaatgnaggagcaaggcgagaaaagagagagagagagagagagaaccaaaccaagcacgcgaccgagatgggctccttcttctcgacgatgttcacgccgccgcccgccgccgacgacggggagactcgcgcgtggtggccgtccactccacggccacctgggacgagcagtggggcgcccacaagagcaaccccaacaagctgatcgtgatcgacttctccgccacctggtgcgggccctgccgcttcatcgagccggccttcaaggacatggccggacgcttcgccgacgccgtcttcttcaagatcgatgtcgacgaactttcggaagtggcgaggcaatggaaagtggaggccatgccgacctttgtgttaatcaagggcgggaaggaggttagtcgcgtggttggtgctaagaaggatgaactggagaggaaagtcaacatgttcatttcatcctcctcatcctaaatcccaaacttatgcctgcattcctcatttagtaccaggctctggtttctctcggtgctaggagtgagagaccctgtggttgtcctcttaaaaatgctgcaaaattcgatgtgaagtgggagtaaacgcgtttaagacaataaacttgtgatacttgggaatggaaatgtaattgcctgttgctcttgagtcatcnnnnnnnnnnnnnnnnnnnnnnnnnnnnnnnnnnn

SEQ ID NO: 395106 - DNA, 675 bp, Oryza sativa
gaaacttgcaccgacttctatgcacaacaaggtgttgcgtaccttatagacaaggaagactctattgaggagtatgagaaggttgctaagcagaagagggaaaagaagttggagcagcaggaaggagttgaagcaaactttcttaattccactcgaccatgtacagaagattgagattttgagtggcatcaatgacatgaagaatgagcttcagtcttttctggaaacttttgattcatcaaaaccggtcacatctgaagatatacgagctgtttttgagaatcttgctaagaagaaaaaacagaggttgtcatgaaactcagctgcttggggttctgtttgagactaatatatcccactgcccggtcgatcgagcagtttttctggccactcccccgtgaatttatcgttcgctatgtcatggctattgtgtcctgttacctagcttgtactcgacttctaatgtagttagcagaggtagtaatgctaaatgctccgaactgagcttctggtagatgctccagggcagcagaacaaaatgtttgctcctttgtatcaaatcaaaagaactttgtgacgtggtaatttacattacccaaaaccgtgtaaccctttgtgccgctcctttaatcatctgttgcctatgtgctatttgtgcttaaaaaaaaaaaaaaa

SEQ ID NO: 395107 - DNA, 603 bp, Oryza sativa
  unsure (1)..(603): unsure at all n locations
naaagtnncgccnccntactgcatnnncnnctcatatnccgacttcnctcntannancgaattnggttcnccggtcccccccntcganntccancctcncctcgtnccgggaaaaaatagtgagggcccacagaaaccagaagaacccgcggggagaaggtcgagaggggggatccaggaattcaggatgcggctctccttccccctggtggcccggcgccgtccgtgcattggagtgacctctgggaatgttatatttgggccacctcttccagaagtactgggtcagagaagcagtcagcagcagccagccaagagggagtcaaaagtaggggcaaactggaacgacataattaaacacaagtgaagccagttttgctgattcaacttctgccaagcttacaagaagtcccaatatcagaacgctgaagctacaacattgtgaaaactattccattagtatgctctagctctagcctttgttagaacagtttcaggtagctgtatctgtatgccctagttgttgaaaggaacattgcaacatccacagatgaaaggaacattccaaaccatcattttgggcnnnnnnnnnnnnnnnnnnnn

SEQ ID NO: 395108 - DNA, 451 bp, Oryza sativa
  unsure (1)..(451): unsure at all n locations
cccaagcttctctttancccctccatccctttccccactcaccagtagccaccaccacatctcgcaaggccaaaagccctagccaccgtagtagtagctagtagctatagcaaggtagagagagcgctctagatctctctctcgcggggcgctgggcagatcgacctggcgatggcgaccaaggggaataagctcggggaggtaatgtgggagcaccggctgcaggcggcggccgtggtggcgctggtggcggccacggtggtgtcgatctccgccatcgggcccaggctcggcgccgtggtctccttcttctgggccgctgctcgtcttcacggggttcttcctcgtggccgtggccgtcctgctccggatctngccgnccttttncagcaccatcgacgagtccggcaaggagctcatngacttcgtgccgggtgccgnccggagcaac

SEQ ID NO: 395109 - DNA, 395 bp, Oryza sativa
  unsure (1)..(395): unsure at all n locations
cttgttttgccgctgcgactcgccgttcctagcctcgccgccgacatatccactcacgagctcgcacccgccaccgtcgtcgccatcgcctgttctcggccagggttaggattggagcagcatagagaacaagcgacgactacttaacctagtatatatagtagtatttttctttcaactacttgcaagcgtgagcttcttcagttgacccaaattgaacaacatattatggaatttatcaggatgtacgatccttcattatttctacatcctccatttcaaaatgagttaacctattgttcagatttgcagtactagcatattcaatattagattaacttattttggtacgnnnnnnnnnnnnnnnnnnnnnnnnnnnnnnnnnnnnnnnnnnn

SEQ ID NO: 395110 - DNA, 751 bp, Oryza sativa
ctccaggtgttgttgcttcttgtgatagccttggagctcttcgtactactgctccgtgcgccggtgaatatcttgagctgctgcttttctacaacggtgaaaacattggtgtgggtatggcatcttatttctccaatctgaaggttacttcttcgttgggagcttgctccttttcatttgttgtggtccgcttcagttctacaatcctgcagcaatcctcggccttctacaaagacagaagttttatcaaccatatgatttctcgtcatgtggactacctgttctaccgaatcttgcttccttttgcttcaaaacaacagtatccatacagggtctatcattcgggttgagcaatctctgctcctcagatctaatgaaagactccatggaaccaacctgctgagtccggtgatacctacaccaaaatctacggctcagaaacaaacctccgatctgtgccgtttccgtggtgacagctgtaggagccttccagtctgtcaagcggtgtgcatgtcaatggaggccaaaggattcaatcgtcgtggctttgctgcaaaactctgttgatctgatttcctactgttgttttgtttcatcagaaagtttgcttttttagagtggttactctctaccttgttaaaaatggtttcttggcttaagttgtatctttatgtgatgtattggggtatatcccctaaattctgtctttttgaataaagttgttcatgttatcttcaaaaaaaaaaaaaaa

SEQ ID NO: 395111 - DNA, 581 bp, Oryza sativa
  unsure (1)..(581): unsure at all n locations
cccagtagnnagtccaaggagagggtattcgaggggttcagtcgaccggcggcgagcatggcggcggcggcggcggcggcgggtctggaggaggccctcaggcccttccacgatagggcctccgatgccgagacacgtttagcaaagctggaagccttgctgctgaacaaagatggcctgacgagtggttcagagacaaattcatcagccgtgaaagatcttcagtcaaagcttgatgcagttaacacagaatgtcttgctgaaaaggaaaagaacaagaagctaatcatagagaacgagaagctccagtaccgtatcacccatctcatccgcgcattgaaagaggcagattcaagatagagagccctaccaagctggacctaaagctaaatttgtttaaattgaagcactgtgtatgatcttgtggttttgtggactgcgtgttcttagcaccatccatgaatttagccaaaactattctagcgatcttgatgggtatggttaaagcaaggtattgatttcgaatttttgaaacataattaaactgcttgtatttgactattacacaaaaaaaaaaaaaa

SEQ ID NO: 395112 - DNA, 459 bp, Oryza sativa
aagatgctggaggggatcattgcaacttcatacagtgaaggcgataagttctacatcgaccccatgaagcttttgcctctctcacgcttcttgccacagccaaagggccaaagtcaaggagggggcagaggtggtggccgtggtggtggaagaggcggtttccgtggccgtggtggtggtggcttccgtggaagaggtgcgccaaggggccgtggtggacctcctaggggtggaggtcgtggtttcagggggcggggcagattctagtttcttagcttaagacccggtgtttgttgagacatcatatcctacatgccctctgctcaattgaaaacattcatgttcttgtagcctgatgttaagttagcagagcgtttccagctcttcatgtgtggaagttgaatctctatggaacaaagttttcatttctcttcagtacctgcccgggcggccgctcga

SEQ ID NO: 395113 - DNA, 502 bp, Oryza sativa
ctccaagaagccccgccttctcacctcccaaaccacgacgtcgcacacctccacctccaacgccaccacgccccgcagcttcgacaccacctccagccatcaagacgcgtcgtttagggagagcttgccaaggcaggtgcgcgcgccggcggtgttcaggtgcgtgcgcgtgacgtccatcgacgacggcgaggacgagtacgcgtaccaggcgacggtgaccatcaacgggcacgtgttcaaggggttcctgtacgaccagggagtcgacgacgccgcggctcgcgcacgagcaatgacgactcgacggcggcgcgtgccaacatctccgagctccacctcggcggggctccatttccggcaatgcatgagagaaggcggctcctccatggtgcactcggacttgtacggcggcggcggcggcagcggcggaggccgcacattctcggcgatcgagctatggtacaacatgactgagcttttatagagagtaagttattac

SEQ ID NO: 395114 - DNA, 741 bp, Oryza sativa
  unsure (1)..(741): unsure at all n locations
cgcttcaagcggttgataaaggaccggaatgaccacaagcaagtcgaggagggtatcaaacgccttgtattgtgttctgggaaggtgtactatgagcttgatgaagaacggaagaagactgaacgcagtagtgttgcaatttgcagagttgaacaactttgtccattcccatatgatcttatccagagagagctaaaaagatatccaaatgcggagattgtctggtgccaagaggaacccatgaatatgggcgcatatagttacatctcccctcgcctgtacgcctctatgaagactcttgggcgtggttcattcgatgacatcaagtatntgggcagggcgcctttcagctgcgacagctactggctncctgtcggttcatgcgcaggagcagacagagctggtaaagaaagcactgcaggcagagcctatcaagttcccctgatatgatgcatctgtggtttccacttggtgcttatacttgtgcaagacaagtgtgtgcgagctcagctcgtccagcctttgcacacataccataccatcttaaaagttttgctatgtatttacaagctactgtttctctagcttgtttgaggcgattcgatttgaatgtcgtgaataatgcactatttgagccttcttatcgttgaggaggaacctgtttcgacgtgagcaacaaattttgcaatatagtagaagctttagcttcnnnnnnnnnnnnnnnnnnnnnnnnnnnnnnnn

SEQ ID NO: 395115 - DNA, 637 bp, Oryza sativa
  unsure (1)..(637): unsure at all n locations
cgcccacgcccaggtcgccctacccgctgctatcgccgggcttccagcacccggggccactcacgcccaacttccccgcgctgtcgccgctgccgggcactgggatcctgggtccagggcccatggctccgncgtcgcctggcctctggttcccgcagtcgccgtcagggctgctctcgccctccgggttcttgccaattctgagcccaaggtggagagagatgtagtgcacatcgctcgccgcagcgcagacaaagctcccgtgaaggccacagccgggtaacatttgacgctagggttgtagctactgtgaggtgaattggtcgctgccccggagatgggcgcaggtgggttgcagcttcggacaccactatttgttgctctcacttactgcttgtgtgattagtcagtcattatatcagtcagtctataaggtggttgctcatatatttgtaattgtataactgggaaagtttttaattcattcacttctcttagctgcaaaaacctggacagcaaaaactggggcangttgtagttagactctttgagttattagggttgaaacangtaagttgtaaaactttaggtcagtaaaggttagccctttntcactgtaaaaaaaaaaaaaaaaggg

SEQ ID NO: 395116 - DNA, 798 bp, Oryza sativa
  unsure (1)..(798): unsure at all n locations
gcgacggtgctataagaagagcgtggaagagagggaggagaggggagagagcaatgccgacggggaggttgagcggcaacatcacgcaggactgggagccggtggtgctgcggcggacgaagccgaacgtccggaccttaagtcgacgagggcggtgaaccaggcgatgcggacgggggcgccggtggagacggtgcggaaggcggcagcgggcacgaacaaggcggcggcgggggcggcggcgccgcgcggaagctggacgagtcgacggagccggcggggctggggcgcgtgggcgcggaggtgcgcggcgcgatccagaaggcccgggtggcgaaggggtggagccaggcggacctcgccaagcgcatcaacgagcgggcgcaggtggtgcaggagtacgagagcggcaaggccgtccccgtccaggccgtgctcgccaagatggagcgcgcgctcgaggtcaagctccgcggcaaggcggtcggcgcgccggccgcgcccgccggcgccaagtgaatccttcgtggccggaatcgcacctccgatccctcctagttaggcgttgatccgtttgtgaatgtgcagtttgtttgtgttcttggcttaattttggggggaaactatgatatgctaactggctcagacgcatgtgaagtgatgatggctagaaattgaatttccgttggatttgtgaacacatagtttagttgaagcgcttttcgatccggttgtgttcaatcgtcgttgtgctctgcttctnnnnnnnnnnnnnnnnnnnnnnnnnnnnnnnnnnnn

SEQ ID NO: 395117 - DNA, 462 bp, Oryza sativa
cctccctagaaatcatcgtccctaaattggacaaaattacactgaactacgcagatccatcgttgcgaccacgcagaagatctccgtgctcgggtggcgcggcgggatggcgtcctcatcggcggcggcggcgacgtaccggtgcgcggagtgcgagagcggcaaggccgtccccgtccaggccgtgctcgccaagatggagcgcgcgctcgaggtcaagctccgcggcaaggcggtcggcgcgccggccgcgcccgccggcgccaagtgaatccttcgtggccggaatcgcacctccgatccctcctagttaggcgttgatccgtttgtgaatgtgcagtttgtttgtgttcttggcttaattttggggggaaactatgatatgctaactggctcagacgcatgtgaagtgatgatggctagaaattgaatttccgttggatttgtgacaaaaaaaaaaaa

SEQ ID NO: 395118 - DNA, 572 bp, Oryza sativa
  unsure (1)..(572): unsure at all n locations
atcatctctgcctctctctgatctccagaggcattctgagaaatnatctgatacacatggatcagataaggaagatgaagtggtggattcttcagacgatgattgtgatccatattttaactatttggttgatagctttatgactgcaactaaagctcaaccaaaacagttgtatggcaatattgatcttgttgcagctgcacaacgtcagtctaatgagtatgcaagtagtgctttggattactataacaaggatgaaaccaataagattcaatacagcttaatcaaagccttaaaaagcagtacaattagagagaagggtgagaaatatggacatgtcaacttcatagcatctttagattcaaaggaagagctatttttcgccgaagtttgttgggatcccaagaactatgatatggtgccgacctgcattgtatctcttgaggagaaaaggagaattgggggacgctcctttattaatgacgngtatgtggtgtgtctgggtctccaaaatccggctataggtggcaagcactgctatgggtgtagcgaggaggttaagcacccagaag

SEQ ID NO: 395119 - DNA, 645 bp, Oryza sativa
  unsure (1)..(645): unsure at all n locations
gaagcagccgaagagaagagggaggagggagggagggagncaatgggggactcgagcgggtcgggttcgggttccgggtctgtgtcggtggacgtcgagcggatttccttcggcggcaaggagcatcaagtgaggacgagatgcggttcattatccgtcgcgatatacggagacgaggacaagccggcgctcatcacgtacccggacatcgcgttgaaccacatgtcctgcttccaaggatttgctgttttgccccgaggtggcgtcgctgctgctccacaattttctgcatataccacataaatcctcaaggggcacggagctaggagcggctccaattccatccgatgtgccggtgccatctgtagaggatctcgccgatcaggttgcggatgtgctcgatttcttcggattaggatctgtgatgtgcctgggtgttacagctggtgcctatgtcctcactctgtttgcaacgaaataccgggagagggtaataggcttgatgttggtttcccctctatgcanagccccatcatggagtgaatggttgtataataaggtattattaaatttgatctactattacgggactcgaggcttggtcaaggaatgcttgcttcagcgggtacttcaagcaagaaagcc

SEQ ID NO: 395120 - DNA, 547 bp, Oryza sativa
aaatttatgtgtgattggcctgtaattatgtctttgcagttgaattggaattccagtgcttgcttggagctttacttcaactgatcagaggtgatgggtatgtttgtcaggtgtgatcatcatgccccagaggatgtgcctgaggcactagatgctaccttgaatgacttacagcttgagtacctggatctttacctcattcattggccattcagaaccaagaagggatccagcattggcaaacctgaaagctacttaccacctgacatcccatctacctgggcagcaatggagaagttatatgattctggcaaaagtcgtgccattggtgtgagtaacttctcatcgaaaaaattgggtgacctgcttgctgcagcccgtgtacctccagctgttgaccaggtggagtgccatcctggttggcagcagatgaagctgcataacttttgccagtcaacgggcattcatctttctgcatactcgccgctaggttcaccttggttcaacatttatgaacgggaatgtccttaaggacccatcattatct

SEQ ID NO: 395121 - DNA, 794 bp, Oryza sativa
  unsure (1)..(794): unsure at all n locations
tcgagcggccgcccgggcaggtacattatgcatgtagacgtctcctttcgctgtcacgctctttcgctgtcgttttgggtgacttgctccgcagcgcaagcttgatcagatgacgtgaacagttaccaaacgaaccatggctgcaccgatgcagtctgctaacactgacaccgtgacacagaacgtgaacctagcttggattcatgtcggatcggactatcggagagacacgaggcatctcacagagagagacaccgagacaatgccacctcgccggatgctgctttgtactactcgtgattcggcttttctctgcggcatttccggggagaaaaacagagtagttgtggcgcggaacagaggaggaatgttcaggagagggggcatgtgttccggcgtccatgttgccgacacgaggtgataaagaaggcaaccgacatggggcttgtcgtgatggttataatacacaagaaggttctacttgtattagtagtgcagctttatttgtgacaaaagggatcaggagttcaggactatgattatctccattttttcccctttctgccttgttcccatagacaatcgacaaagctgcatcgagcagcgtaacaaacagactgctttgtatcaggatgtataatactcccagtaatactataagatgcagattctagaaangggttaacatgtactcctactangtcgtgctatagagcagtgaagtgtaagtttcgaattatgaatcctgaactcatcgtctcgagacgaggaaagcagattcttctaaaaaaaaa

SEQ ID NO: 395122 - DNA, 341 bp, Oryza sativa
  unsure (1)..(341): unsure at all n locations
gcctgccctactgcagacctaggaagaagaagggaagaagaagaaagggaaagaaggaagcggagggaattgaggtgaagaaggaaatgaggcgttttggttgccgttgcccatggaggcttaggtgatgccacttcggaatgcaactagagttcatctcatcatcggtgaagtcttttcaggtacttgctgtgacatgtttgcatgaagggatgggattagctacacagtcgcacgacatgatctcacttagtcatgattattgtaatatcttgataagaatatttgtgtttagacataatgggttaattaaatactagagttgttggccaaaaaaaaan

SEQ ID NO: 395123 - DNA, 539 bp, Oryza sativa
  unsure (1)..(539): unsure at all n locations
acaccaaccagcagcagcaagcaggttagctgcttaggagcaatagacaccggaggccagggtcgccggcgatcatgtggccggagaagatgagggcttgggcatccatggccgaggacccgctgaagcgcgcgtcggcggcatcgtcgtcgtcgacgagccccgctgcggcgctacagcccggccacgctcgccgccggggcctcctcgtcggcgccgtcgcctacttcatgttcaaggggaagcagggccaaggaaggcaaggcgaccaaccggttcgccgtccttaactagaaggagatcgcttatatcacctagcttatctagtaatcgcttgaataataatctcctctccctttgcctagcggtcggcatccatgtataaaccactatctttgtgcttaggtttatgtatccgttttatccatgaactgtcaaagaccatgacagaagtcctctctttcctgtcatcccttgtaacagtgtcatttcgatttcaactgaaaaatgcctgtggttnnnnnnnnnnnnnnnnnnnn

SEQ ID NO: 395124 - DNA, 728 bp, Oryza sativa
ctatccccccctcgccatggcagccgcttccttggctccgcccaccgcctccttctcgccggcgccggcgccggggagggttaaggcggcggcgcctttgctctccaggaggcctcccgggcggttccttctcagggtggctagcgaatcctcctcgatttctggtgacacgctgctgggattgtatgagaaagagaggttaagccactcgctatatgctaacgaagattacgacaaagagatgttctgggacaacttggatgcggatttgcgctactggaccagatccctgcgcccagtgcagtggtatcctggtcatattgcgaaaacggagaaggaactgaaagaacagctaaagcttatggatgttgtcatagaggtccgcgacgcaaggattcccttggcaaccagccatcctaagatggatgcctggctaggcaatcggaaaaggatcatagtcatgaatcgcgaagacatggtgtcaaatgaggacagaaatgcatgggcctcttactttgctaatcagggtaccaaagttgtttactcaaacgggcagctgggcatgggtacaatgaaattaggtaggatggcaaaatcactagcatctactgtgaacacaaagcgcagagagaaggggttacttcctcgtgcggttcgagcttggaatagttggatatccaaatggttggcaaatcttcctaaattaatcgctttctaaaacgagggat

SEQ ID NO: 395125 - DNA, 401 bp, Oryza sativa
  unsure (1)..(401): unsure at all n locations
gagattgttcatttgttccattgcttcttctcttgatcacttgctacctcactactgcgatttgccaacaatttttttggtttttggatggccatgtcgtcgtcgatgtcattgcttacgtcgccggccgagctcggccggcgcgggccggcgttgaaggcgaggaggtcgtcgccggcggctggctgcgccttccggcgagaccagtacagcggcggggcgctggtggactcgagcatggcggtgctccggcggaggatgagggaggcgaggatggcggagaacaactacgaggcgccggcggggtggtcggcgtgggagaagcggtacttacccggcgtacgtctccgacgtggtccgccgccgtcggggcgctgcaagctgctgctcangggcacccg

SEQ ID NO: 395126 - DNA, 770 bp, Oryza sativa
  unsure (1)..(770): unsure at all n locations
agcgccgcccccttgtccctcttcctctcccgccgtccgtctccaccgccgtcgtagaaagcccgtaggccacctgtgtcctcttgccgcccgatgtgacgaggagctcggcggcgccacacggagctcaaccgatccgcatcatccacgccacttaaagtgattatgatttgtgaatcaacggatttgagatttgaacctagacaaggaagggctcttggagcaactgctacagtcagctgctctactggttagttggtcacttggccgtcacttgtcagctgtggcctcggtgccggtgaagtgacctgccgcggtggacaagtgcaaggaggagctgagcaggtgccacgactagcaccggtggcacaaggtgtgtgaggcgctctccaagctgcccgtcgttgtcgccgattgctaagtatgatggggatgaggaggagcagaggtggcctaaatctgatggacaagattttggcagtttgggaagcatttgggatatggcaggtaatttacacaagcatgaaccataaaaagcaggatttctcctacatgattgcattagctcaagtatcagaagtaatggtgtaactggaatctaagtcttactgaggcatatatgtgtgttgcacttatcaattaacgtgtgactgggagagatcaactttactgcttgttgttgcatttacatatctttctgtctatctatttattatttgactttgtgattcttcacatgtnnnnnnnnnnnnnnnnnnnnnnnnnnnnnn

SEQ ID NO: 395127 - DNA, 408 bp, Oryza sativa
tcttcatgatagcttgctaagagtgcattataaagggatgctccttgatgaaccaaagtcaatattttatgatacccgagttgataatcatggtgaaccattggagttctgttctggagaaggcctggtacctgaaggatttgaaatgtgcgttcgactaatgcttcctggtgaaaaatctattgtgacctgccctccagattttgcatacgataaatttccaaggccagcgaatgttcctgaaggagctcatgttcaatgggaaattgaattacttggatttgaaatgcccaaggattggactggtttcaccttccaagaaatcatggatgacgcagaaaaaataaaaaccacgggtaatcgacttttaaaagagagattgcgtcatacgagattaaaagtttgagg

SEQ ID NO: 395128 - DNA, 972 bp, Oryza sativa
  unsure (1)..(972): unsure at all n locations
attgatgcatgtgcggctccagggaataaaacagtccatcttgctgcactcatgaatggagaggggaagtattacagcttgtgaacttaataaagagaggccaagactttgcaaaatactatccgaagatccggagcaaacaatattgaaacaatcaatggtgactttttggatatcgatagcaatgaatccatcatatgccgaggtccgagcctattctattagatccctcttgctctggttccggatctctacagagagcttgaccatttgctccccttcgcactcaagaggtaatcaggatgatgcaagtacgagttccaaggataaggaaaactctccgccttccagaggaaagcgctcttcacatgctctgtcattcccctctgtggagagagtggtctacagcacctgctcaatccaccaagctgagaacgaggacgtcgtgagctccgtcctgccattggcgtcatcgctcggattcgagctcgctactccattccctcaatggcgacgccgtggtctccccgtctttgaaggatctgagcatctgcttcggacggacccggaggacggcctggagggcttcttcatatcgttgttcgtgaggaaagcagcagcagcagccgatgctgtaaagcctagcaatggtggtttgggagtgagcaagcaggtttttaagagacgtaacgggctcatggctttcggctcatcgagactgtccaggatgatgatgctctgctctacccggggtctctcgagaagatgatcctttaggatctcttcgatcttctttctttgaaagctaaggaaactgagtgttcaactggaaaattttgttttgaaatgcttagacgaggaatttttctttttctttttttggtttttgtagacgcaatgacatttaagggcaaatttcattccatttcacggctaccaagccacacnnnnnnnnnnnnnnnnnnnnnnnnn

SEQ ID NO: 395129 - DNA, 751 bp, Oryza sativa
gagataggatccctccttatatagatggaggactccttaacctaatcctaacagaccccgactctatccaactgagatacgtacttattgtgaggttgggatatcgttcccattgggcctaggactcccggcccaaagccccatgacatgtttctcaagtaaaggaacacgattaacacttttcacatcaaaagatatcttacactaaaaatctgttaaagatatctaacatctttggttttgtgttgcagttttctctgttatcacttggaggtgatgtaactgacaaacatatcacattactggatgaatgctggtctcttaactcgccaattaattgatccaaacatgtactggttttctataccaagtattggtcccgtcttgaaaggcctaacccagggaaggaaggaaattctttcattattgaaccgcaagaagtacaaggagatgctactctcttcactggagaagacaagattacggttttcacctcttgatgtgcgctttcacattcgcgacttaattggatctgggcacataaaaacagttcaaacacccactggtttacttgttcgcatatcaaaagattgataaattcgagtttttattatttgtttggttatctgcttccggcccttaccttgtgatacctgctttagttttctgcttttatttgccaacatgaaaaacttctggtacatctaatagaattcttggatgcccctgattgttaaaaaaaaaaaaaaaa

SEQ ID NO: 395130 - DNA, 670 bp, Oryza sativa
  unsure (1)..(670): unsure at all n locations
gaggtcgaccacgcgtccgggaatcgcttgattccgatgagctctccggcgaggtcgaccgtgtcggcggccagcgcgggcgcgatctcggcctccgacgacgtcgccgactccatcgacgcgctctaccgcaaggatgaggccatggcagagctcaagtcggaggtgatggaggcgctgcaaaaggaggtcaggtcgctcgatgacgacagctggatgttcgccgcgccccgctcccgcatcaacctcgtctctatgtctggtggttacctacgcaagcagcaggaaaaattggctgacctcggtcaagcatccaagaagacgaggaatttctaggaactaggtgtcttccagggaagcctctgcaagtttacaagtccagaattctaccaggcatctgtttgaagggaatcaaggaactgtgacccggtgtcaatccattgcggttgtgtcctgcacccaaatttggtatgagtaatcctttcatgccattgtaatgtagacaagaaaaaaatcaaaacacttcaccagcatgttcagctaggcttaaagctcagtaccatgcaatccttataaaccgtttatctaaatgaaaaatgtaggcggattttcattttccacctcaaagcaatgcatttcacagtgaaattnnnnnnnnnnnnnnnnnnnn

SEQ ID NO: 395131 - DNA, 644 bp, Oryza sativa
  unsure (1)..(644): unsure at all n locations
gagtcactaaaagatttctacaagagaacggatatgtactggcagatggctgcatatgagcacactcaacacactggaaaggagctccgcaaagatggttttgatcttgccgaaactcgatataaggaactgaaacccatactcgacgagctggctgtgctcgaggctgaacagaaagctgaggaagaggctagtgcttccactagttccaagaaagacacgaagaaaagcaagcagaagagtggcatgagatagctttggttcgaaatatcgaaatagagagtggtttaggccaatgctttaagccatctgggattttttcctttctgagccattggtcagctcgatcgattaatccacacgaggtgcctataactacctgtgtaggttggcttaatccatggttaaaattttccaacgtactgtatttgcgattcctcggaagcattcatggagagattgtacacagttctattcatcggaaattcgttatacgtacaagttttgagttctctactgttcagtgttcacagcctgcgatgtaacacggtacaccctaacagtatctgggtgcggtgtaaattcactccatccgtttcaggttaccagacgtttatagacnnnnnnnnnnnnnnnnnnnnnnn

SEQ ID NO: 395132 - DNA, 467 bp, Oryza sativa
cgtttgtcgattgactggggtgaaggattcaagaagccaatgctgacgacattcgagtttgatgttgcactgggctatgttcctggatggtgggagaaggggagtagggaatgtggcagtggagatgccaccggttgttgttcaggatcaggaacttccacagattgtggttgcagcaatggtggttgtgctgacaaggactttgggggggagtacccaatggattactactctcaggatggaggtgattggaacagctgctacatgaagaagaagccctctactggagagagaaagctgcgagttcggattggtaattactcaaattcatagtagtttacatgtggcctttttgtctgtcctttttcccctgtatactggggcgaaatgcttgtgtaactcttacattctgaatttttcaatattaccggcatatctatatgttttgtcaaaaaaaaaaaaaaaaa

SEQ ID NO: 395133 - DNA, 622 bp, Oryza sativa
gccaaagaaggtgatagccctgttcattcgttcccatggttcgatccttcccagtaaaacgcggcgtgttcgaatgatgatcgcttttacgcgagaaagggggaccaccctctaagcctaagtattcctcaatgaccgatagcgtacaagtaccgtgagggaaaggtgaaaagaaccccaatcggggagtgcaatagagatcatgcattggatggatgcccgggcattgagaaggaaggacgctttcagaggcgaaaggccatggggagagagagcgtctgtgatccatggatctccgatcgggaaaccgtatccaagctccgtggctagtctgcgctctttggacttttcaaacttagcgaactgaaacatctgagtagctaaaggaaggaaaatcaaccgagaccccgttagtagcggcgagcgagagcggaacaagggttttcatcaaaagaaatccgaagcggtttcattcgatttgttgtggattggatgatggaaaaaccagcaagcagcaagcgtaggctgtgttgccgtagcgcgcctacggagttgtacaaagtcagcaaccgttttggggtgcaagcataggcaacacaggactgatgacgggggggggggg

SEQ ID NO: 395134 - DNA, 379 bp, Oryza sativa
  unsure (1)..(379): unsure at all n locations
caccctctaagcctaagtattcctcaatgaccgatagcgtacaagtaccgtgagggaaaggtgaaaagaaccccaatcggggagtgcaatagagaacctgagatccgatgcgaacaatcagtcgaaggagcggangngnggcgcactcactctaacggcgtacctttcgcatgatgggtcagcgaggaaatgggaacagcggcttaagccattaggtgtaggcgctttccagaggtggaagatttacgttcttcctatttgacccgaaaccgatcgatctagccatgagcaggttgaagagagctctaacaggccttggaggaccgaacccacgtatgtggcaaaatacggggatgacttgtggctaggggtgaaaggc

SEQ ID NO: 395135 - DNA, 499 bp, Oryza sativa
tttatgtgcatatgctgtccaggaatttctcaggaaggaaagaagcacgtctctaacaaaacagtgatagttacactgctagtatgtgtgatcctcaccactattgcattccttggcaccacggcgtactacctgcgtcgcaaggatgcgctctctccacattcgcatgcatactcctttgataagtacaccagctggagcagcagatcaaacctcgtcagtcatcgatcttctcctcttccccaaccaaagccaaaaccaaggatcagtgtacttaaagagtttctgtgcagctgcaatccaatatgtggcaatgaaggtggtccgcttcccggtgtcatcgtcaggttctcctactcggaattggagcaagcaaccgggaaattttcagatgaacatctgatcggagttggaggaacaagcaaggtgtaccgtggacagcttagcgacgccaaggtcattgccgtgaagaagctcaggcccttggaggcgcagacga

SEQ ID NO: 395136 - DNA, 578 bp, Oryza sativa
  unsure (1)..(578): unsure at all n locations
ncattacagtacagtgtggttgttgctagtcgatcagttataccaaagtgtagaacactaatataagctcagatctacacgagaccgaacctctcgaaccctttcttgctacagtaaattccccaccctcgacccctcttcctcctcgattccggcgacctcgtcgcgctgtgcgggaagggagaggggtcgtcccccctcccccatagtagttacgtagtcgggctagtctcgttaggtcgggttcttcccgttttcttctcgttagtgaggcgatggaagttggagatggcggcggcgacggattgtgaccagcgacggtggaggcgacgaggttacggctcgcaactgcgatggcgacgcggatacgacccgaggcgacggcggccggcaccggcggtggagctccactttttttccctttagtgagggttaattncgcgtttggcgtaatcatggtcatagctgtttcctgtgtgaaattgttatccgtcacaattccacacaacatacgagccggaanataaagtgtaaagccttgggtgctaatgagtgantaactacattaattgcgttcg

SEQ ID NO: 395137 - DNA, 904 bp, Oryza sativa
  unsure (1)..(904): unsure at all n locations
cggacgtggccggaacaatctatatattgtcagagacgcacactttactgatcagctagttagtcccagttctgaagaacaactggaaaaagaaaatcgagctgtaaaaatattagtaccagtgatcagtgacagttcagagcatcaaccatgtcgtccaacaattccatggaggccaacaatggcgatgatgagaagaagcaagagcaggtggtgtgcgtgacgggagcgggaggcttcatcgggtcgtgggtggtgaaggagctcctcctccgcggctaccgcgtgaggggaacagccagggatccccgcaagaacgcccacctgcttgatcttgagggagccaaggagaggctgacactgtgccgcgccgacgtcctggacttcgccagcctacgcgccggttcgccgggtgccatggcgtcttccacatcgcctccccggtgtccaaggaccctaatctggtgccggtcgcgattgaggggacgaggaacgtgatgaaggcggcggcggacatgggcgtgcggcgcgtggtgttcacgtcgtcgtacggcgccgtgcacatgaaccccaaccggagccccgacgccgtcctcgacgagtcctgctggagcgaccccgaattctgccagcgagaggacatatactgctacgccaagatgatggcggagaagacggcgacggaggaggcgtcgaggcgtcggctgcagctcgcggtggtggtgccgtgcgtgacggtgggtcccatcctgcagccgtccgtcaacttcagctgccaccacgtcgtccgctacctcaccggcgccgcggccacctaccccaacggcgtcgccgcctacggcgacgtccgcaacgtgccccgngcccacgtccttgtctacgagcaccacggcgcgcgcggccg

SEQ ID NO: 395138 - DNA, 585 bp, Oryza sativa
atctatatattgtcagagacgcacactttactgatcagctagttagtcccagttctgaagaacaactggaaaaagaaaatcgagctgtaaaaatattagtaccagtgatcagtgacagttcagagcatcaaccatgtcgtccaacaattccatggaggccaacaatggcgatgatgagaagaagcaagagcaggtggtgtgcgtgacgggagcgggaggcttcatcgggtcgtgggtggtgaaggagctcctcctccgcggctaccgcgtgaggggaacagccagggatccccgcaagaacgcccacctgcttgatcttgagggagccaaggagaggctgacactgtgccgcgccgcacgtcctggacttcgccagcctacgcgccgcgtttcgcccgggtgccatggcgtcttccacatcgcctccccggtgtccaaggacccttaattctggtgccggtcgcgattgaaggggacgaggaacgtgcatgaaggcggcggccacctaccccaacgccgttcgccgcctacgccgacgtccgcgacgtcgcccgcgcccacgtcctcgtctacgagcaccacggc

SEQ ID NO: 395139 - DNA, 474 bp, Oryza sativa
  unsure (1)..(474): unsure at all n locations
cagagattctgcgtgaacattttaagaaagagagggaagcaacaaagactggaaagcgaccatattatctgaagaaatctgaaattcgtgaaaggaagttgatgaacaagtacaatgagctcaaggaggcaggaaagcttgatgccttcatggagaagcggcggaggaagaacgcctccaaagatcatcgctacatgccatatcgaaggaatggagatggtgcataatgatgtctctcaagctgcctttagcttgattctttcatgatccactggtccagcgtcctgtacaacctagagcgaaagctatccatggacgtttgatttgtagctgaaatttgattactgataaccacaagctgttgtaaacttaaatcatggataaaatattgttttgtttgctgctttaatttatcattttctggaatcnnnnnnnnnnnnnnnnnnnnnnnnnnnnnnnnnnnnnnnnnnnnnn

SEQ ID NO: 395140 - DNA, 483 bp, Oryza sativa
  unsure (1)..(483): unsure at all n locations
caatcacttgaatgggagggatactcatattcgacagatcaagatatatgggccaagaccgaatcatgttccccatcagccatttcacttcacttcaagggaattcgtcacctactctactgttaggtgacagctgactaatttaattccgtggaaccctccacattggagcttttgttgaagattttggatagctcagcacacatgtgaacagattgtgtggtcgatcccattctctgtgcttcagaattcagtctcgcatgatgtgcacccagaaatcaacactggaagaagcatctgaagcatcaagtctctcattgcctttccggaggaattgctgtatttttaatatggtagaaaaattgatattggattcatctgtgtgtacgagctacattttcgtccatggagtgtaacattatcctcctctcgtgtgcaagagaaggttatttattcattgnnnnnnnnnnnnnnnnnnnnnnn

SEQ ID NO: 395141 - DNA, 462 bp, Oryza sativa
  unsure (1)..(462): unsure at all n locations
caagagatgggtatcaatacgattgatcaagctcatcaagttcaatttcgtttacacaagcaaacatcccttaaagaagcaacagatataaagatgatgatccaaactggaaggcatggattcaggttggttaaccctgagcttttagattgtaagtttgatgccagggttaagctagaggagtggtacaataccatgctcgacgcatgcatggcacagtgtgatcatgagctgttctcgcttgaagctagcattgcggantaaaggatctcatgctttccacagacgatcagattccacatattggacctgaagttcaccacaggaaccgtggagtgcaacaaatgctctacccaaaccctccattcccgatcgatcctgattatgagtttggtactccgcaanaacgagtcccatatcaagcggcatacactacagatgcagagagaaatgacgcagttt

SEQ ID NO: 395142 - DNA, 558 bp, Oryza sativa
cactgttcattgacctatgggctgtgctatgaggcgtcgatccttcttgacccttctagctaaatttcgtttgattaatttttgagattgtttttgtcctacttattatgtttctttatcttactttttggtgaactgcaacagttctcatgaaacagtaaatggcacaaatgctctctttttatcttcagcagtttctgaccttaatggttgtgcaggatgtttgtggaaacttgccagcgccttcgtctcatgaaaagctcagaggctgtcaacttagcaccaagagccgctcaatgaggcattcccggtgcccatgaccgtgtggttggattgaaagaaagtggaagctttgccccgccgatgttcgcccacgtgtgatatgaacatgtacagttgtctcctactacttttggttccttgatgatgctgagttgagaaaaaggttgtagtttcgttactcgtctgtagtctctccatatatagataatgaagcactgaagcttgaaatatacacctacagtttgtctctttatgaataaaaaaaaaaaaaaaaaa

SEQ ID NO: 395143 - DNA, 498 bp, Oryza sativa
ctcgactggagcggcgcccaagccgacgctgctcgtcccgtcgcccgccggcgcggcacaccgcatctgctcgcgccggcgcctcacgtcgcttcagcctcctcctctcgccacaaatgacgccgcctcctctcaccgtagatgccgcctctcgtcagatctgacggagctcaacatcggtgcggccttctccgttcggtctccaccatccggccactgcgtcttccccatcaagaacctcaaggacctcgtcatcttctactaccttgtctaggtcatggagctactattatttggtgaagatcgaatggtggcaaagataggacaacaatgcatgcagttaccatcttcatttcttaaatttatggacaaatcagattttgggacctgggaacttagtttgtggttgtactcaatgtttaggtgttgatggtccctttgctttccgattttaattttaaccttactgtggggatgataagaaaacttttagtgggt

SEQ ID NO: 395144 - DNA, 368 bp, Oryza sativa
  unsure (1)..(368): unsure at all n locations
acgcgttcgacatcatcgcgtcgtcgccgagcttcgacctgtcggggctgttcgaggagcgcggcgagaggatgcgcttcgtgtccggcgcgccggtggccgacattatcgccaagctgcaggagatcgccgggatggtgagcttcacggcgcggaccaaggactgccaggtgagcatcgaggcgacgcggaacgggcagaagggcgcgctcgccatctccgccaaggtgttcgagctcacgcgggagctcgtcatggtccaggtgtgcaagaaggccggcgacaccgccgaagtaccgcagttcttgcgacaacgagctcaaggccggcctgcgcggcctcgtcgtcgatggcctgccgncttcggt

SEQ ID NO: 395145 - DNA, 590 bp, Oryza sativa
gcatcaatatggcataatactgctggagatattgaccggaagagttccctactctgagtcagatgggccactggagcattgggcatctggttactttgaaggcaagatgactcttgcagagctgattgacccaagcctgggatcattccctgaaggcgctgcgcgtgcattgtgcgatgtggcgaggtggtgcattgagccagagccgagcaagaggccgctcatgtcacaggttgcaggtcggatgaaggagatcacctccctggggcctgagggagcgactccaaaggtgtcgccgctatggtgggcggagcgggagatcatgtctggccaagctacctagctatgctgatgtcaacaccaccagcaacagcaattgattccccaatggtgatatagtagcaaattctttcatttcttttcttgtttgttaatcatcaagactactcaagagtttggtggttgtggttatagttatatatgtatacatacaaggtgttttgagcattgtaacttgtaagcatgcaaacgtgtgaaggaaggaaggaaggatgtatcatgttgagtttgttggcaaaaaaaaaaaaaaa

SEQ ID NO: 395146 - DNA, 493 bp, Oryza sativa
  unsure (1)..(493): unsure at all n locations
ggttttttgctgctgccgagaggagtggaggcgcttccagatctcctcccctctctactcccgtcatgagccgatcggggcagcccccggatctcaagaagtacatggacaagaagctccagatcaagctgaatgcaaaccgtgtaattgttggtacgctccgtggattcgatcagtttatgaatttggtggtggacaacacggtagaggtcaatggaaatgacaagactgatattggaatggtggttgtcagggggaacagtgttgtgatgattgaggcattggagccagtgcccaaatcccagtgactcccgtggcatattcctgattcagtagctatagagctggtagcaagaaaactgatgtatatgctgttgatgttcttgttgtaccttgtccttaactgatgtgtggaatattgacttcgtttcttgaatatggaatgacaaacctttgatatttttgtttgcaaaannnnnnnnnnnnnnnnnnn

SEQ ID NO: 395147 - DNA, 380 bp, Oryza sativa
  unsure (1)..(380): unsure at all n locations
cacatagctagctcagctgagacacacacacacacagtgagtagttcagctcaaagctagcatcagcagcagagctaattaacaaacatggcgtccgggagcagcggcggcggctacgggacgagaaggggccgggggcggcgacgatgcaggcgctggggctgcagcagcagcacggcggcggcggagaggtggaagaggagtcgtcggagatgggggagaagacggcggcgaggacgcggctgtcggggctgctgtggcacggggggtcggcgtacgacgcgtggttcagctgcgcgttcgaaccaggtggcgcaggtgctgctgacgctgccctactcgttcgcgcagtggggcatggccagcggcttncctnttnc

SEQ ID NO: 395148 - DNA, 456 bp, Oryza sativa
  unsure (1)..(456): unsure at all n locations
ccccccgcccccgcttcaccaatcaatccaaaccctagagcaaatcccctccctcccttgccggaatcgctcgcaagctccaggcagcccccacaccagtccgcggcggatcagggggcggggcgatctctagcgccctccgggatttgaagggttccgagcgtcggcgatgtcgtcgtgggccgggcccgacgagatcttcctctccacgtccctggccggcttcttggacaagaaacttattgtcctactacgagatggacggaagctgcttggcacactctgctcatttgatcagtttgcaaatgttgttcttcagggtgcttgtgaacgagtaattgtaggtgaactatattgtgatgttcctcttggtctatatgtgatccggggagagaatgtcgtattaatcggagaattggatcgtgagaaggatgactncctgctacatgacttgtg

SEQ ID NO: 395149 - DNA, 592 bp, Oryza sativa
gcaccgagctcgcgccgccgccatcgcacccaccgaagagggagaggaacccaaagctcggcgccatggtgaacgtgccaaaaactaagaagacttactgtaagaacaaggaatgcaggaagcacaccctacacaaggttacccagtacaagaaaggaaaggatagcctttctgctcaggggaagcgtcgttatgaccgcaagcagtcaggatatggtgggcagacaaagcctgtttttcacaagaaggccaagacaacaaagaagatcgttctgaagctgcagtgccagagctgcaagcactactctcagcacccgatcaagaggtgcaagcactttgaaatcggtggagacaagaagggcaagggaacttcactcttctaagatgctgatattgccctgttccccaattctctgccaggagttagcattaagaatgttcttgtcttgcctttctagtacaagttatatatcctcttgttttcagtcaggtctttttgatacataactacactactagtatgtatgtgatgacaagtgattatcgttctcacgatcattttgattttcggcgttccctttaaggattgggc

SEQ ID NO: 395150 - DNA, 815 bp, Oryza sativa
tatggagcagttccagaacatgcaccttgtccggccacaaatgcagccattatgggttccccaggatcaacagaatcttcaagaggatatccgcacgcagatagaattctattttagcactaataatctgtgccatgacacattcttgaggagacaaatggatgatcagggatgggtacacattgacgtaatcacaaaatttaaccggatgaggagatttacaaacttggtagacaccaactatatactagatgctgttcgtggctcagagctagtagaagtgccagggaaataccgtccgaagccgcaataattgggcagaatggttactcctttaagcccccatcctgcaaatcaggccaaatgcagattgagatggtgatatacggctggttgctatcctggatacccgatttgaaagggttgctcatttgatcacggacttaggtttcgtgatgaatcatggttgtacagtgggtcatttcggagtaagaagattttgtttgtttaggtcagacttgttggctgctcggaaaggcatattaaaggcattgcaagggggcaaatacaccaaaaataggaaacaatttccagaatataaatccttttttggtctgtatagtttttgtcggataaagaaacggtcggtgccttttcatcataagacggtgccctctttactgttgtggatgttcggtggggtttattttgggattaccccgtcattttttggttgcatgcacgatgattcaagctactgaagcagcgaggtttaccagaatattttttccttttcaaaaaaaaaaaaaaaaaaa

SEQ ID NO: 395151 - DNA, 670 bp, Oryza sativa
  unsure (1)..(670): unsure at all n locations
tcacttataggccgatttggttacgggcccccccttcgagntcgccccacgcgtcagcaccttcatcctcactccacagataacagccatggtaacaagcaagaaggtacagaacaacgaagctgcaatggcggacggcgctgttaaggaatatcgccatggtctgtgcatggatgtcccgatgtacattgaagattcggagtattgtggagaggagcttggcaccagactaacttgcaggcatggcctcacgccgaaacggaggacagcttgggaaggacctgacacaggaagaaggttcttaggttgtccgctggaggaagaggatcagtgcgataaatttttttgggtcgacgaaccatggcacccaagagttcagaagacacttgagcagatgtggcatgcagtggaacgtgctaccaagctaaccggttcgaaacaatatgactggtgttgtttcgttcggaatacaaaggccgaggaagaaaaaatgaagttagagttagatacggctgaccatatctctgaactagaattggcgtataaaaaaaattaatgaaaaagaaaaaagagctcgacgatactcgtgcgtggttaatgggatcgtttgtagtaattgtcattatgttagtgaaaattagtgatctcatgtacaaaaaaaaaaaaaaaa

SEQ ID NO: 395152 - DNA, 821 bp, Oryza sativa
  unsure (1)..(821): unsure at all n locations
gtccctcctccaggatcggaggattaaagagattgttctgaaggccatggggcaggcaatcagcaaatctgttgctgttgcagaaattatcaagaaaagagtccctgggctttatcaagataccaacatcagttctgtcagcatcactgatgtctgggaacctattgaagaaggccttgttccactagagatgactcgtcatgtttcgatgatttcaattaccttatctcccagagatctggacaagaactctcctgggtaccaaaccccagtttatgttgaacaaccccggcaacagccgcgcctccagcaggcgccaccaccaccacagcgccaagttcgtcaaccaccacctgattatgaagactcctatgtccggggtcgtggcagaggaagggggcgtggacgtggaaggggttggggtagaggaggttatggtggttatggtggatatggaaacaatcaaggtgggtacaaccaaggtggtgggtactatggtaaccaaggtgggtatggtggctatgataatcagggaggatatggtngntatgataatcaagggggatatggtggtggtggatatggctacaaccaaggcagatatggaactaccangaaatggtggatataaccgaggacggggtnggangcgcgggaggggnaattggaattaccgtggcgggtacgaacgaggnanaggtggcggttttcctggtggaagggntatggcgncncgggcggggaagaatgggtggcctggtggncgaggaaactnaanatccaancantgagcaatgggtgagnnatccatgggtactggt

SEQ ID NO: 395153 - DNA, 557 bp, Oryza sativa
  unsure (1)..(557): unsure at all n locations
cccacgcgtccgcccacgcgtccgcccacgcgtccgcccacgcgtccgaaaagataagcacagttacgcagcgagagcatgagaggagtggagagccatggcttccatcgtggcatcgaagaggatcccactgttccgcctcgtggagcagctcctcgccgcgtcgccggcccaaggcgccgcctccgctctcaggccggtggcgtccgccggcgggtcccgtgcatacaacaccggcgcgcagtccgccggcacgagagggacgagtcggacgacgacagcggccgtgggtacgacaccaggcgccccacacgcgacgccaccatgcccgccttcttctcagatgtgttccgtgatccgttcagcgcgccgcagagcctcgggcggctgctgagcctcatggacgaccttgcgacgcggccgggcgcgccggggccgcgaaggttgcggcgcgggtggaacggaaggagagnaagaggngttaaattaaggntgaaatgcgggtttgggaagagaagttaagttttggggaagaaaaagtttttataaagggaagg

SEQ ID NO: 395154 - DNA, 753 bp, Oryza sativa
  unsure (1)..(753): unsure at all n locations
cttcttcttcctcccctttcatcttcactgcttgttctttcttttcttcctcaagctgagctctcatctcacttctcctccccaaatcccatccaatagcccaagatcaatccctgcatgttagatcacaacaatccccatcatccaagcttttcccatccatccgaacatcttgcacatgcatggagagttgagagagatcgaaataggagaagagagtggtggtttcagcctgcatggttgcagcagcaacatgactttgtttccctccatttggtcatccatctccattattgcagctaggatgtggctgcagctcatttcggttgaagcagccttaggttgctgccatgtgagcgaagtccggtggaagttggagaaaagattcggagattccggagagtaacgagccatatcccgaggaggatagtgactaccctcagcagcaaggagaggattccggttatgagttatgcttcttgtgtggtcattgctctaccgagggcggcgagggccaatgagtgacctccttgcagcttggctcttgcccggtttggtttgccctagtggggttgtggcaccaccggttttatcttttgcttatgaactctatttgagacttccgctgctatatttatgtgttgtatgttgggacctcggaccctattatgtgtcatgtacctcgctgctctttgaccctattatggtacttgctatgtttattaaaaaaaaaaaaaaaaaaannnnnnnnnn

SEQ ID NO: 395155 - DNA, 585 bp, Oryza sativa
  unsure (1)..(585): unsure at all n locations
ctatcttttcttcatcaagctgagctctcatctcactcctcctccccaaatcacatccaatagcccaagatcaattcctgcatgtttgaccacaacaattcccatcatccaagctttccatccatcccaacatcttgcacatgcatggagagttgagagagatcgagaaggaataaaagagtgctggtttcagcctacagggctgcagcagcagaattctttgttttcctccatttgatttggagattccggagagtaatgagccatatccagaggaggatagtgacttccctcagcagcaaggagaggaatccggttttgagttatgcttcttgtgtggtcagtgctctgccaagggtggtgagggcaaatgagtgatctcttgcagcttggctcttgcccggttgggtttgccctaagtggggttgtggcaccaccgattttattcttttgcttatgaactctatttgagacttcccctgctatattatgtgttgttgttgggcctcggncctatatgtgtatgacctgntgacttacccantatggatttcatgttataaaaaaaaaaaaggggccacccgg

SEQ ID NO: 395156 - DNA, 475 bp, Oryza sativa
tcttttcttcctcaagctgagctctcatctcacttctcctccccaaatcccatccaatagcccaagatcaatccctgcatgttagatcacaacaatccccatcatccaagctttccatccatccgaacatcttgcacatgcatggagagttgagagagatcgaaataggagaagagagtggtggtttcagcctgcatggttgcagcagcaacatgactttgtttccctccatttgctaggatgtggctgcagctcatttcggttgaagcagccttagattcggagattccggagagtaacgagccatatcccgaggaggatagtgactaccctcagcagcaaggagaggattccggttatgagttatgcttcttgtgtggtcattgctctaccgagggcggcgagggcaatgagtgatctcttgcagcttggctcttgcccgtttggtttgcctagtggggttgaggcacactga

SEQ ID NO: 395157 - DNA, 833 bp, Oryza sativa
  unsure (1)..(833): unsure at all n locations
cccttccagagaaataaacgcaaggtgagagcacctcatttcgcccccatnttccttcttcctccttgccggccgagagaacttcatcgtcgccgccgtgtttctgtgaatctccgggaacgcacatctctttttggaggcccggagcgcggccggcgtcgtcgcgtcacccaagcttccagtgttcccgacgttccaggccgagatactgggtggtgctgctcattctagttcatcttccatcttcctcccagatgtaacaccgtcaagaatcaccccaagccgagctccaggcgtggagaacgctcgccttctttcctcagccccgatctagacccgttggctttgttcctccctgtccgatctagtcgttctcgggtcgtcatcgtgtttgttgtgttgccgggcatctccaacgccgtcgctgcttcctggacctctccgacccctttcagctgcacgattcggagattctggagagtaacgagccatatcccgaggaggatagtgactaccctcagcagcaaggagaggattccggttatgagttatgcttcttgtgtggtcattgctctgccgagggcggcgagggcaatgagtgatctcttgcagcttggctcttgcccggttggtttgccctagtggggttgtggcaccaccggttttatcttttgcttatgaactctatttgagacttccgctgctatatttatgtgttgtatgttgggacctcggaccctattatgtgtcatgtatcctcgctgcnctttaaccctaaaaaaaaaaaaaaannnnnnnnnnnnnnnnnnnnnnnnnnnnnnnnnnnnnnnnnn

SEQ ID NO: 395158 - DNA, 484 bp, Oryza sativa
  unsure (1)..(484): unsure at all n locations
gagaaaaccccttcttcttcctcccctattgtnctttcttttcctcatcaagctgagctcccagctcactcctcctccccaaatcccatccaagagcccaagctcaagccctgcatgtttgaccacaacaatccccatcatccaagctttccatccatcccaacatcttgcacatgcatggagagttgagagagatcgagaaggaataaaagagtgctggtttcagcctgcagggctgcaagcagcagcattttgttttcctccatttggttgtccactccattgctgcagctagaaggtggctgcaactcaccccgagttcatctcttttggtttcgggttgaagcagccctaggcaacgtctcttgccgtcagcccaagaccttgctccatcttttgccatcagnccaaggccttaggcttcgaacaaccctacgtcaggttgttgccatgtggttaagnccgtggaagttgggaaaggggg

SEQ ID NO: 395159 - DNA, 431 bp, Oryza sativa
  unsure (1)..(431): unsure at all n locations
cttttcctcatcaagctcatctcatttctcctccccaaatcccatccaatagctcaagatcaatccctgcatgttagaccacaacaatccccatcatccaagctttccatccatcccaacataatgtgcaaggagagttgagagagatcgagaaggaataaaagagtggtggtttcagcctgcagggcagcagcagcattttgttttcctccatttgatctagtcgttctcgggtcgtcatcgtgtttgttgtgttgccgggcatctccaacgccatcgctgcttcctggacctctccgacccctttcagctgcacgattcggagattccggagagtaacgagccatatnccaaggaggatagttactaccctcagcagcaaggagaggatttcgggttatgagttatacttcttgtgtggtcattgctct

SEQ ID NO: 395160 - DNA, 351 bp, Oryza sativa
cccacgcgtccgcagcttgacgtgatctggagcctcctgacggggcggctggtgcgggagaaggtggatccggcggtgcagaacgcggtggacagccagatgaacgccgccgacgcgcccttcagggagagcgcgccgacgctggcggagatgttcgacaccggcatccccggcgtcgccgccgccggccacgggcatgccggcggacgcatcgccgcggctcccggtcaccacgttcgccgccgccgccggggagcggaccggcgccggctgctcgcgtgtgcctccaggacttgggaggacggcggagcgggcgcggaggctgccggagtgcggccacacgttccacct

SEQ ID NO: 395161 - DNA, 559 bp, Oryza sativa
  unsure (1)..(559): unsure at all n locations
gatttaaatcttgagagcaaagagcagctacaattcatatatctccactccagcaacaataacccatgtttcctttgagttcctctgttttgattcagatgtttcggagtacgtggagcaagaacctgagattgagtctgatgatctgcaacaacaaggttgtgccatgatgatgtggactttggtagttccatggtggatgttgtgagcgccgttcaggctaatttacttgtaactttcagattaatttgtttgctgtcccggaattttataatggttgctaatcagtttattgtgctatcgcttccacttatatctgctcaataaaattggctttatgcaaatgttgaacttaggtttctctaggttaaggtaaggactctggcgtagaattgttcttcctgtgtggttactgttatgccgggggcgcggagggcagtntatgatcttctgctatctttagcttggctcttgcccggttnggtttgcccttgtgggggttgtggcaccaccggcttttggttttggaacttaatggcttttggtttgaaatcttccg

SEQ ID NO: 395162 - DNA, 514 bp, Oryza sativa
  unsure (1)..(514): unsure at all n locations
gagagaggagatggtggatgtgaagcacacggccggccacgccgcggcgaggagagtcaagctgttccgggtgccgcggcggccggccagagccgcggaggaggcgggggcgccgctggtaccggctggcgagaggaggaagaggaagatggcggtggcgaggctcggcggcggcgccgcgggcggaggcggctgttcggtgcgttccggcggctgcgggtgcggtggctggcggcgctgtaccgccgctcgctgcggcggctgcgcgcgtactacgccaaggcggtccaggacctcctcgagggcgcggcggccatgagcacgctgcgctcgcaagccgccgccgactgctcgttcggcactgcgttcgcgccggtggtcgccgtcggtactgatgagcgcgtgcatgtcttcaanaacgttctggcctgtgcatgaagancatgaagccatggagcagtanaacccctgtgtatagacgtggtaactgtccatgntgaattccagtgcttga

SEQ ID NO: 395163 - DNA, 981 bp, Oryza sativa
  unsure (1)..(981): unsure at all n locations
atcgccttcccctcgattcctcctccaccngctcctcctctccttccccacgtcgatctcacgctaccctcgatcgagctctctctgcggcaaacccctccctccttcccacccaagggggaaagctccgccgccatcgtcgtgctgctccccgttcccgcggatccatccggggctctgggttgatctacctcgccgcttaagttcactatgtctggaatgccatctgatgaggcaactggtcaagtgaggctcgaaggagatgtttctgacaaaaaggaagaaaaaactcaagagcagagcatagaaaggtgggaatgccctcaccacaagaagaggaagcagccatcaagaaaaaatatggtggaatactgcccaagaggacgccacatataactaaggatcatgatcgggcttactttgattctgctgattgggctctaggcaagcaaggtggaagccacaaacctaaagggcctcttgaagcacttcgaccaaaacttcagcctactcaacaacatgcacgtgctcggcggactccctatgcatctgctgacaatgatgagtgtatgaatttgcctcctgaggatttgatccagaatggtgatcccatcgaagacaagaacaaggaagaacagtaacgagtagctgcaccctgtctatttggagcgttgccaatcctgtcctcgagccaaactgttgccttggtaaataactagagccaatgcctacacttgtggggttgagctctgcagtgtttaacttaaacgtaagacgtggtatgtctggcgtctaccacattcagctgttcagtgtctttctggcatctgtaacagctaggaatgaaaacttacatatgatgctgtgataccgatgctgtagtacctgatgtgcaaagaaacaaataatgcttcaaattcagctccccatgaatggaaattagtcaaattactggtgatgcactacgaaaaaaaaaaaaaa

SEQ ID NO: 395164 - DNA, 546 bp, Oryza sativa
cccggaagcaaacacaattacacgacgagctcgatcatcaagtggctctagctagctcgatcccacgagtgctccattttggccgtgcgatatcgcgatcaatggcttcgtttaggctaatgatagcggcggtgtctctgagcctcgtgcagctctccatggggagcaggaggttaatggagctgtacatacctccggcgagtgaccagctcacgtaccaccacggcagcgtgctcagtggcgacatcccggtgtccatcctctggtacggcaaattcacgccgacgcagatgtcgatcatcgccgacttcgtcgtctcgctcaccggcgcgccgaacggggccacgccgtcggtcgggcagttgtggggcaccatcgaacagctctacctgtccaacggccgccacgaacagccagacctccacacgcgtgctcctcgatgagcaggtctcggacgagcagtgctccctcggcaagtttctcaccctggctcagatcgaccagctcccggcgcgcgtcggcaccaagaggggaggcgtcgcgctc

SEQ ID NO: 395165 - DNA, 338 bp, Oryza sativa
  unsure (1)..(338): unsure at all n locations
cggacgggctgnggacgcgtgggttggggtaagctagggtttaggtctcggcgcgcggcggaggggaggaggaggcgatggcggcggcggcggcggcagcggcggctgaggaggagatcgcggtgaaggagccgctggatctgatcaggctcagcctcgacgagcgcatctacgtcaagctcaggtccgaccgcgagctccgcggcaagctccatgcatacgatcaacatttaaacatgattcttggagatgttgaggagatcgtgacaacagttgagattgacgatgagacatatgaagaaattgtgcgcaccacaaaacgcactatccccttcctt

SEQ ID NO: 395166 - DNA, 580 bp, Oryza sativa
  unsure (1)..(580): unsure at all n locations
gtccacatcgccattagagcagctcgaggaaggaggaggaggaggttgattcgatggggatggaggcggagtgcgataggataaaggggccatggagccctgaggaggacgaggcgctgcggcggctggtggagcggcacggggcgaggaactggacggcgatcgggagggggatcccggggaggtcggggaagtcgtgcaggctgcggtggtgcaaccagctgtcgccgcagtggagcgccgcccgttcacggcggaggaggacgccgcgatactccgggcgcacgcccgccttcggcaaccgctgggccgccatcgcgcgcctcctccccggccgcaccgacaacgccgtcaagaaccactggaactcctccctcaagcgcaagttcgccaccgccacggacggcggcgagatcgaccggccgtgtaagcgcgtgagccccgggccggggagcccgacgggatcggagcgcacnagactcagccacggcggctgcggaagcggnaacgacggcgggcaggtgttccgccccgtgccgcgccccggcggcttcgacgccatcagcgcggcggacgtcgt

SEQ ID NO: 395167 - DNA, 463 bp, Oryza sativa
cgagatcgacgagaagggagctcactctagctctagctaaagcttagccatggccagcaccgcccgcgtcgccgccgcgctgttcctcctcctgctcgggctctccgccacagcccccctcgccgcccgcgacctcatgtccgccgcgccatccgccaagaagcagccggcggggaggaagccgtccgtgcagccgggttacccgggcaccaatcccggcggcggcggtggcggcggcatcccgaccatcccggggttcgggagcatcccggggatgggcggcggcatgggcgggttcaacgtgcccgggatgggcggcgggtggggcggagggtacggcacgccgagcggcgggtactcgcgcggcggcgtggtggtgcccacggtggtgtgctccgacaagcgcccgtgctacaaggaagaaggtgacgtgcccaagaagtggttgttggtcctacaggag

SEQ ID NO: 395168 - DNA, 663 bp, Oryza sativa
cggacggggccccatgacctgcattacatatcatgggacaaccctccgcaagcagcatccgcactacctcacaattgaagacttggacaggatggttgctagcgatgcaccatttgctcggaagtttcatgcagatgacccggttctagacaagatagatgcggagatcctgttgcgtggcccagacatgctcactcctggaggatggtgtggagggacacgagaaaatggaagtgacccttgctcagtcatcggcaataccactcaccttcagcctggtcgaggagctgtacggctgcagcggctcatgacgtcgctcctgtcagaggagaagtttcacccaaggcagtgcaagtgatgtgtttctgactgaagaaggctctgtggatggagagtgctcctggtgatatatggctgttctgacccatatttcaccgttttgtcgggcagcttcctttttttttgaggttttttttttgagggaggcagcttccattttaacctgtgcaatataagttttaggagcacgccactacatcgatcagtttgttgtatgctgatattgtgtcatcccttagtacaaacacgagatgaatgtatcatccacggtctgaagtgaaaattgaatggaaaattaaagttggtgaaaaaaaaaattaaaaa

SEQ ID NO: 395169 - DNA, 443 bp, Oryza sativa
  unsure (1)..(443): unsure at all n locations
ttcgctttcgcctcttctccccctctcctctcctctcctctcctctctgcgtgtgcatctctcgattccgatgccgccgccgctcgaagcgcgagactacatcgggctcgcggcgtccccggcctcgtcctcctcctcctgctgcgcgtcgacccccgtcgccgaggtcgtcggggcgcacctcgcgctccgcctcggcctcccggggtcggagtcgcccgcccgcgctgaggcggaggctgtcgtcgtcgacgccgcgctcacgctcggccctgctcctcctcccaggggcggcgcaagcgcgggttcgtcgacttcctcgaccgatccgagggccgtcgtgctgttgcaacgcggtgatgatgagaggggtgttnagggaggaggaggaggaggagaagnggtttggggaagtgntgtnggagttcggagntgcaaggaaa

SEQ ID NO: 395170 - DNA, 717 bp, Oryza sativa
  unsure (1)..(717): unsure at all n locations
agggccgcggtgcccggctcgcggggcgccacccgcgccgcacgactgcccacccggtcccttccccttgccggccggcccaaccaatcccccgtgcccgcgcgcaccaaaccgaccatcccgacggcgaatcgcgtggtgtgttccgcgcgcgcgcggtcttagctctcggacgatcgcgctcgcggagtcgcgggggttcggccagtttccgcgaacgttcgctcggcggagggcggagagtagatcctgtccaccgttgcgtggaccggaggcgggccgcgggggaggcaggcggaatcttggggcggccagtcggcacgcacgtctcaacgtggcccagatgcgatccgggggggaggactagtttactcgcggccgtacggtgccgcacctgtacgcttgtactcctacgtgactgaacgaccaggaaacggaatgtgttgttggcctttggttctgaggagagaacggccggggaagctgcagagatcgagtcgatttggatcgccgacgcccgttgatccgtagagaacgatcggttgaaattggtagaggaagaagcacggaaattacaacagcacatgtacagctagaggagagtaggagacagggttttttttcttggttgacccttcatacaaatgccgtgcaaaatattcacaaaacccaaccctgcatcaagctagagtatttnnnnnnnnnnnnnnnnnnnnn

SEQ ID NO: 395171 - DNA, 357 bp, Oryza sativa
ggcgaagacggagccaatgtggcaatagagaagccaataggatatggggcacgatctcctctcctcgtcgcaatccacgcacgcacaagcgcctccgcctcctcacctcctcggtcgcagtcagcagcagcatcagcagcagaagcagatgggtggcctctccgtaatcgcgccgccgggggcgactcggcgtccccggcgcaccgccgcgcgcgccggtgtacctggtgtcgaactacatgatcctcggcgcggcgtccgggtgcggcttcctcacgctctcgctccgcctcgtgccctccgtcgacggcttcctcctcatcctcctccacgcgatcaacgtcgccgccgccgtcg

SEQ ID NO: 395172 - DNA, 445 bp, Oryza sativa
acgcctcgagcacgagcagccgaccgagacccttccgcaagagcaacatggcggcggcggcggtgtacggcggcatgaagggcgggaagctgggcgtcgaggaggcccacgagctgcagctcaaccgcatccgcatcaccctctcgtccaagaacgtcaaaaacctcgagaaagtttgtgcggatctagtgaagggggccaaggacaagcagcttagggtaaaggggccagttaggatccccaaccaaggtgctccacatcactacccgcaagtctccctgtggtgaaggaacaaacacctgggatcggtttgagttccgcatccacaagagggtgattgaccttatcagcttccctgatgtggtgaagcagataacctgcataacaattgaacctggtgttgaggttgaggtgacaatagcagatgtgtaatgatggaatgccg

SEQ ID NO: 395173 - DNA, 579 bp, Oryza sativa
  unsure (1)..(579): unsure at all n locations
tctctatcgtcacctcgtggagctcctcagccgagtggagccccttgttactgctagccagctatcatgtagctagccagaaagcaggagacttggacaggatgacggatctggatgctcgagcggtggtggcactgtcacccggcctcatctttctcatctcatcgccctcttcctcgcgccttcttacgcgttggccgccagcctcccactccatttttagccgccggatccagcggccacgagctcgaagtcgtcagatctggtgacccaaagctcttgatcaccggatctagttgttccgatggaggtgagccgtgcggccgacgagatatgcgaggctgcatcatgtcaggcgagctgcgatgctgcttctctattctttttttttgggcaaccagagtaattgtagccactagttatgatgatcatgatgatggccggctcgttgtttaaccggcgtgattatatccactaatatatgttgatgaccggcatttactttgtgtccattctcataaggaatcttttttttaatatagcaggtattttttgccnnnnnnnnnnnnnnnnnnnnnn

SEQ ID NO: 395174 - DNA, 538 bp, Oryza sativa
  unsure (1)..(538): unsure at all n locations
cagctctcacctctcctgctctagatcactttttccgtccgcacaaatcgcctactcctactccacatgagccccaccgccgttcatcagagattcggagtcaatttccaccgccgttggaaaccacgtacgccgcgaagtccgccactgttgccaaatcaaagcccacgcacctcatatatcatgttcctctcatgctgaaccatcagatcgatggttgctgcgcgctagatcgatgttgtccttatgaagaagaagaagccgttgttgccatgccatatctcatgccgccttgtggctgttctgttgattgagcaaacaagcagctagaagaagtggttctgagttctgttgtgtcagtggatttggggatctttttttctgtttctttttacatcttctctcgatatatacctgttggtttatttacacaaagtagatgatttttttaggagcgatgcaattgtgataagatttggatctttccatcaacacttcactagcagtaattatctannaaaaannaaaaaaaaaaaaa

SEQ ID NO: 395175 - DNA, 607 bp, Oryza sativa
  unsure (1)..(607): unsure at all n locations
aaaacactggtagtagtaatttcagtagctagcaatagcatgcagcatcaaaagcaagcaaatccagcgcacgcgccaacaaacaaccacaatgcgcgcgcgcgccgcgatgcatgcacgagacggacagaggcagtcgtcgtgaagaaaaaagcacacacacaccaacctcgatctctcttcttctagctctagctcactcactctcaaacacacactcactcacacactgattaattagctagcaccgtgtaaatgggctgtatctcgatcgatggatatcctattagcagcagctaaatcaatcaactacttgctagtcatcatcatcatcttcatcttcttcattagcagcagcagcagcagcagcaggtaaagctttttgcgtgctaggtatactaggggggctaagccagagcacgccaatggcgggcgggcgaggcctagagccagagcgcgccggcctccttgaggagggggacgagggagccgttgatgtgcgcggccatgacgcggtccatggcgccgacgagcttgccgccgatgaagacgacggggacgacgggcggcgactncgggcggggccgccgtacccgacgtacgagcg

SEQ ID NO: 395176 - DNA, 477 bp, Oryza sativa
  unsure (1)..(477): unsure at all n locations
aaggtgttaaccggatgatttcgaaaaagatcatcaaacggaagaaacagaaccctggtgattcttccgatagcgatgatgaggagtgtactgatacatcagaaaatggttgccctgcagagctactctactactcagacgataacagtgcccaattggaagatgctggcaattcagcggcgacaaggtaacagggaaacaaccagcacaatcttactactggcaataattacaactcaccaccctcctgccccttgttacaaaaccaaagacgaagagaaacatactaggctaccaaaaacaactagagcagcaacactggtggatacttggaaggttaacagcttaggatagcaattttagtagcagtagtagtaatctggaggtgcagtgaggtgtcgacatcatcttcactggatacatgcttgtaggccttactaggccacaggtncacggcgngcgagtcaccccggtgct

SEQ ID NO: 395177 - DNA, 557 bp, Oryza sativa
aattgatcctcaacgtgattcacctgctcagcttaaggcatatcttagtgagtttgacccaagaataataggactaacgggatccatcaatgcagtaagacagattgcacaggaataccgtgttttcttcaaaaaggttgatgacattggtcaggactatcttgtagaaagctctcataacatgtacttgctagatccatgcttggagacagcacgatgctttggagcagagtatgaggcatctgatcttgctgaggcgataactttggagatccagaaagcttctaaatcatcaacaaactagtgtagctgcccattgtcttgggggacctagttcggcacaatccaatgtttgctgtgaagcactttctccctctcccctgtatagccttgatcacaaaagggtgacatggtgaacctctcatttagctctgccaccaactgattccagctcctgttccccgctcctttgtgtgtaagaattgagcaaaactgtacagcgcctcctccgatgaaaattttccagctacgattcacttgcaaaaaaaaaaaaaaaa

SEQ ID NO: 395178 - DNA, 975 bp, Oryza sativa
ggaagttgtgactatgctacaacacttagacatccttctggttgtgcacaatccatgtctgcttctggaaatggatggggctggttagccacttcatttgtaacaattctgtgccttctcggagggtccatttggattggttcaatctatagatattattcccttggcattcattctgtagaggcccataccaaacctggaattttgggatcagcttgcccacaaactttaagggcatgttattacctgcagcacgaggtcgtaacagacagagtagagatacatatggcccctgtagaccattggggaaataggcatccaatggaactgtactgctcaccgtacagttgacaaacatatatggactgggaaggagaaatttttatatgccattatgtcaggaagatgacattgcaatcttcatcaacaatcattttgttcagaggaatttatacagatatgtagcagtacgttttttacagttgtgggcaactgcttgtgctgtacgcgtgggcaagagaaaagataagattgggacctccaatggcttgttataaatttgttctattataacgtgtggaagccacacacttttgccttggccacaactttttggcagataaattgtgaagtctagaaatcagtgcatagaggacggatgaatcactcttgtgaggacatagtgaagtagcatgatgtgactgtattctcagtagtggaccagattatcagagaaggatggtaattttcttccttccttgtcattcctttagcttggaaagtgatgcaattatttttcatgaactagcacaataaggaatcttttttaagtttttttatccttgttttattgtctatctttcaagcttggagcttgccttttcgtttagataaagatgcttgcttctactattgtgatatttgtgcattggttgttttcagaatatatgaacactcaaaaaaaaaaaaaaaaaa

SEQ ID NO: 395179 - DNA, 689 bp, Oryza sativa
  unsure (1)..(689): unsure at all n locations
cgagagcagnagagagatgagcccggcggcggagatgggagcaccttggccggtggagttcatgggcgcggcggaagggcgggttcgccggggaggcggtctactgcgcccgtcatcctgtggctgtccgtcgtggcgtggatcatcttcacctccgtcggcgacgccgccgcccgcagcagcccggtgttcgtcggcgccgccggcatctgcgacggcaccggccccgggtgcagcggcgggttcggcccctgcggcacctgcgtcgactagcgtcgcgatgtcgcgaggcgagtactagtagccttttagctctagctgatgctgctgcgagccatggggattttgattaggtgtgtgtgagatcatcagctcccctttgtgaaggcaataagagggagctcgcgtccaatcctttgctttagccgctgcagtaatcaagctctaagctttctccttttttttctcccaaatcgatcgatcctatgtaaatttcttgaaatcttgatctttgatgctcttgctttgaactcgcgatcatatgtaaattgatcgatcaagctgatgtgctcttggtggtcttgagtatttagcatgggaagctcatcagttcctcttcgatcaatcctatgtaaattccttgaaaccttaatcttaatgttctcttcttcaaaaaaaaaaaaaaaaaa

SEQ ID NO: 395180 - DNA, 626 bp, Oryza sativa
  unsure (1)..(626): unsure at all n locations
acggncatcccangngagaantantcccaataccaaactgtgacgttgaagctccataggtnttccactgcgtnccgggagaancccttatgncacatctaattctcgctatggcatctgcaagtttggtccgaatnnaaatttgaatcatccaatgggaactgtgaatgtatggtctcgcgaacatcaccaactggtgatgtgtctgcccgacgtatgctggcacctgtaccagcacattcagaagtatcgcctgacaatgtctcagggaggtctcggaggatcacccattcagattcccagcaaataccctctggtgaaagaggccaccgagagagaggcgtcctaaggccatcctcggtgcaaatgtttcatgctgcttcctgttcttgactctctgagtaaattacccgcaacaaaacttgaggagccgaagctgtacaggtctcgcccttttgcctcacatttgagctttacataccggagcttgcttcaagacttccaacatgtatcgcattcaggcaggaaaaagttcttgctttgttagggatgctctntttgccccgtgtaaacgggacaaccgaccttatttaaacatctatatatggaacaaactcacctctgga

SEQ ID NO: 395181 - DNA, 548 bp, Oryza sativa
  unsure (1)..(548): unsure at all n locations
cataatcaagtcgggctcgcctctcgacctcggtgttgcgctctcctccgctcggaccgctcctcgccggcgatccccccgcctccaccgccgccgccgccgccgccgtcgatctgcgctgccacggccgggggggaagcttgtgctgaggcgcagtcctgaacacaccccctcttgggaggcccgggggcgtcgaagctccaaacaaccaagcaccatcgtgacgaagcacgccacgggagatgactaagggcggcggaggagtgggagggcccgacgggcggcggacttgaaggcgcccccaggagggagccccggcggttgcgggtgaaggggtnggtcatccggtcccacaacggccccatcctcaactccgcctcgctccagctctttgaagataaacttcagacaacacatttacctgagatggtttttggggagagtttcttatctcttcagcatgctcaaacttgcattagattatatttcaatgcgcttgatgctctnaaggcatggaaacatgaagcactaccacctgtttaagttct

SEQ ID NO: 395182 - DNA, 553 bp, Oryza sativa
tgatgaaggatcagtttggcaattatgttgtacagagaatccttcagacatgtgatgacaaattcctagttgtgatcctctcaagcatcaagatgcatttgaacgaactgaagaactacactttcgggaagcatatagttgcgcgtgtggagaagttaatcattacaggagaaaaacccgagtgccggatggggtccaagactagccaatgtcagcagtccactaaagctgtacagatggttgacgctaatcctttttaagcattggcatcaataagcaaatctggtgaattgacaaatgtggagatttttgttttgagatacactgtaatagccaataggggtgtcctggtggagactggatgtgttctcttcttttttactgtggcctgtatagatctctccgggtacttaaaaggtaattagatgagtgttaggtatcgccgctgtaaatctgttttttggccatgtacaagtttactgatgggtatcagctgtacatttgtttgagctgtcagttggcaaagcgtgtcgtttaaaaaaaaaaaaaaaaa

SEQ ID NO: 395183 - DNA, 624 bp, Oryza sativa
  unsure (1)..(624): unsure at all n locations
ggcagtgcggtggattggtggacctttggcatattcttgtatgagctattgtttggcaagacccctttcaagggttcaggcaatcgagcgacgctcttcaatntcgttggccagcccttgcggttcccagaatccccaatagtgagcttctcggcaagggacatgataaggggattgctggtcaaggaccctcagcaccgacttggctacaagcgtggggctactgagataaaacagcatccattctttgagggtgtcaactgggcgctcataagatgcgcgagccctccagacattcctaagcccgttgagctcgattgtcgcccgaagcaggtgccgtcaacgaatggcaaggttgcaccagcttccaaccagaagggctcagacaattatctagagtttgaatttttctaggttttttcttttgtggtttctgaaatccgaaactgtgcatttgagctgatgcgcgaaacaaagagaaacatgtagagctcctccaggcatatatatgcctggttatgaggtactcttcagctgtagatttgtaagctcatttctggaaccccgagctattttccattgaactgcttaactcaagttcnnnnnnnnnnnnnnnnnnnnnnn

SEQ ID NO: 395184 - DNA, 499 bp, Oryza sativa
  unsure (1)..(499): unsure at all n locations
ggttgccattaaactactggagaagcctgagaatgatccagagagagcacaagcattggagcaacaatttgtgcaagaagttatgatgttgtctagactgaggcacccaaacattgtgaggtttataggtgcatgtaggaagtcaattgtgtggtgcatcattactgagtatgctaaaggtggttcagtccggcagttcctggcaagaaggcaaaacaagtcagtgcctttgagattggctgtaaaacaggcattggatatagccagggggatggcctatgtacatgctttgggatttatccacaggggatctgaagtcagataacctaattaattgccgcagataaatccattcaagattgctgactttgggagtgggctcgcatcgaagttaaaaactgagggtatgaacaccagagacaggaacctaccgctgggtgtcaatggccgggggggaggggtnngagggatcaatnttttngcccccanggnttnncca

SEQ ID NO: 395185 - DNA, 615 bp, Oryza sativa
  unsure (1)..(615): unsure at all n locations
cgccgccgcgaggtcgctgctccgctcgtccgcctctctcctccgcgcggcgccggcgaggtccgcgtccgcgtcctcctccgccgcgcgcccgtctctccgtcgcgcgctggccgcgccccctcgcatcctcaggtcgcctgttgagctgagtgtatgcgtggagtccctgctgcctctgcacagcgccaccgccgccgcgcggatgacgtccatgctcgccgttcccgggcaaggcctcgggtggctcacggaagctgaaactgatggattatgctgaattactattcttggacaacagctgatactgatggagtatgacggcagcctgcttctggaaccaggagattagtagtccgtcaagttcatttgtgagcctgcagaattagttagaaaaggaagcactcttttctttttatttatgtgaactatgaagatggcttaataaactactttggatattgctcagaaccctttctccctcttcattgaccagatccttttgtaatggaaaccattggaggaccaatgtatncgttgctagctactgtaaaatgttgcataatttttttttcttttgatcaagtgttttnnnnnnnnnnnnnnnnnnnnnnn

SEQ ID NO: 395186 - DNA, 732 bp, Oryza sativa
  unsure (1)..(732): unsure at all n locations
gcaacaccccaactctgaagctgcttgcttggagtctaggaccagcattcacaagcacaatgaagctcaacaccaccaccaccctggctctcctcctgctcctgctcttggcctcctcttccctccaagtttccatggctggatcagatttctgcgacggcaagtgcaaggtgaggtgctcgaaggcgagcaggcacgacgactgcctcaagtactgcggcgtgtgctgcgcctcctgcaactgcgtgccgtcggggacggccggcaacaaggacgagtgcccctgctaccgcgacatgaccaccggccatggcgctcgcaagaggcccaagtgcccatgatcatttttgcattatgcatgctacatgatgcttagccatcatccgtagttgctttgcatgcatgatgcatgctcatgatcgagatggagtagtagatatatgcatatgcttgccatgatcgatcgtatggaccatgcaaagtatgcttgtttgtgtgaggatcgactcgatcttgagtctttccatgttcttggttttctttttttactgctagttaattactatggagtacatgtgaatatgacatcggatatgtaatgtatacatgcatgcctggtgataataatggtgtgtgtgctgtaataaagtgttggcttaattggtgtagtaaaaaanaaaaannnnnnnnnnnnnnnnnnnnnnnnnnnnnnnnnnnnnnnnnnnnnnnnnn

SEQ ID NO: 395187 - DNA, 589 bp, Oryza sativa
  unsure (1)..(589): unsure at all n locations
cctgtcctctcctcatcgaccggcgccggaagggaaggagcaaagtgaagatgatctaccgcaagtggtcgctgctctcctccaccatcctcatctggggcggcgccgccaccgccggcctcgccggggtcttcctcttcaacgccaaggagaagttccagaagtatctttccggtgaaggccagaggctcaggcagcaggacagagcggcgatgggcaagaactagcgaaagacctcaggcaatttcgatggcgcaacaggtgtatttgacaaattttccccctccaatggctttggctctttgtactctctaaactaactccacaataaatcgtgaggctcgtggctgaaacatggaaatgagctttagctctagtttctggctgctgtgcagcccttgtataaaatgatttgacgatttcgctttagcctctgatagcccttggtttatcaaagcatttttacttcgttttgatcaacttgtgtgacatgtcgatgtccaacttgtgttttgggtgctctgaatgaataaaggttgtttcatttgacggganatcgtnnnnnnnnnnnnnnnnnnnnnnnnnnnnn

SEQ ID NO: 395188 - DNA, 481 bp, Oryza sativa
  unsure (1)..(481): unsure at all n locations
cacccaaacacaaacaagagcatcatctgagcgtgcagagctcacacaaacacacgtacagatcgttcgtacaagtgcaacaaacacatggcgagcggcggagggaaggcgaaggcgtcgtcgtgggcggcggcgatgagcgtgggcacggtggaggcgctcaaggaccaggccggactgtgccgctggaactacgcgttccggacgctccagcagcgcggccaggcagcaggccgtggccgggacgagcggcgccaagagcggcggcggcgcgcgtgccttgcagcctgcagcgccggcggcggcgaggaggaaagcccagcagcaactggggcccaaacaactaattgttactgagctgatcagtcagattaggatcgtgttaggtggttagattggttttggtgctttcaagatggaacttcttgtatattcagacgagtttttcacaagatgtattatnttacggtatatattatat

SEQ ID NO: 395189 - DNA, 706 bp, Oryza sativa
  unsure (1)..(706): unsure at all n locations
cggacgggctgngnacgcgtgggctggacgcgtgggcggcggcgaggaggagtagagtaggtgaggtgaatcgggggagggaggaatccaagaagaagcaggtaattaatcgatcgatcgggagggggagatggctcgcgcgggcgggcatgggatggggaacccggtgaacgtggggatcgcggtgcaggcggactgggagaaccgcgagttcatctccaacatctccctcaacgtccgtcgcctcttcgacttcctcctccgattcgaagctactacgaagagcaaacttgcgtccttgaatgagaagctggacatcctagagcggaaactggaggtgcttgaggttcaagtgagcagcgcaacaaccaatccatccgttttcaactagtaagtgcagttaagggctgcttgtctgcacataagtagtgctttcaatgtgttatgggttcaaaaggacagagctttggatgtctgtattgtgggtgcaagaggagaggttgttcctgtgtgtttctctgtctgtgtgtgtgtgtgtgtgtgtgtgtgtgttaatctgtatgcagtgccagtagcgtccaaggcagcttcttttctactcaattccatgtacaattgtaacgtgttccaagtttgtgtggagataactaaccgattgttgagtgcaaacctgcaatgttgcctgctaaaaaaaaaaaaaaaaaaa

SEQ ID NO: 395190 - DNA, 721 bp, Oryza sativa
cattcccaaggtccagtgacgaatgttctcttagtaacgcctaaacgagtaaatcttccaccactacaatcactacggaaagtttgctcagcaaatggaggatctgaatcacgggctgtaattgtgccccaacctgaaaatgatgtccaaatttttggaaacttcagttccgactttctggagcgctgcctggatgcacttcagcagcctggcagttcgtccagattgtttgaatctggggccagtgctctgtatggtgcaccaaaacaacagggtgtagaatggaggagtaaatacttggagttacaggacctctttgtgcgtgaggttcttgatcagatgccgtctccaaagaatacatgatatgcaactgattattatggtcattgctgtcaattaggagattgtcatcagttttagccagcacatgagttggtttctaaccgactagaaaaccttggaagctctaattcatcagcgagtgtaacatcaatttttgcaatttatgagtggaggggtgagcagggggctttgcatcccccatgagttcattgggactattgtaggctggagcaaattttatactaattaggacttccggcctcagctcctcaaaagtgtactttgtgcttctctggttccaccactgaatttatgtgtactttgtgtctttgtattgagccttatggtaggtaacatgttacagaaaaaaaaaaaaaaa

SEQ ID NO: 395191 - DNA, 396 bp, Oryza sativa
aaaaaaatcctctcgacgcagcgacgcaacgagagggggcgctgcggcggggacggctgcacggcgcggcgcgactccgacgcgacggcgacggcacgctctctcctccggcagttgactcctccggtggtcaccttctcccctgctttgggaggaagtctgagaggatggtggttcagatacagagtgaatgagcagacatgtacaagatgatggcttttgcaggagcaacaaatgttgatctctgaaccattgtatattgctgatgtaaccatttggtctaggagtgggggtggcagctcacatttatttttatagctcaaagtgaatcatgacatagtttcatcttattctttttttattttcaaatttcactactatgactgtatttagttt

SEQ ID NO: 395192 - DNA, 629 bp, Oryza sativa
  unsure (1)..(629): unsure at all n locations
aaatggacatgttgctgcggcttgctgtatcaatactggttccagcactagtaccggactttccggctggcagcttacagtagatgcactggaaactatccagtctcttgctcaagcccaaaatcaaattatgccgtctgactctgcggcatcactgtataaggatgaccatgtggcgcctagccgcaagctgttgaaaagggctagccacagcaaatgttaattgaagctcctcctatacagacatacatttggtgaacttaactaatccttggtcaccagcattttcacagttcaaatagttgactgatgcaaacctgagcagagttgatatactatttgcaaaattnaggttctggccactgacagtccagaagagctttgaagctatccatgatcaggtggtggaagatgaataatttaagcttcaacttagttattgtagagtgtaggatgagtctgcctgggccttttgccgagttgtgccccctttgggttgtatttttgttatttgggacctctttgtatctattcaagttacagacaggttatctaggttagtgagggctaggacctttgaaccaccttgtccctttttggtcnaagacctactgtgcaatntgcacatt

SEQ ID NO: 395193 - DNA, 300 bp, Oryza sativa
ttgggtaccgggccccccttcgaggtcgacccacgcgtccggcttattattttctcgccaacaaacttgttgctgcaaccaatttcaaacagaaacctctattcatatatgagatgaagacatggttaatcttgttcaggtgcttgtgtttgttgtacattcctgcagtttccacaagttctgcgaataacgtggattactggattagtgaaaaggttattgttattgacttaattattattactgtataattgcagccacagaaaggccatttttgccggttcaaaaaaaaaaaaaaaa

SEQ ID NO: 395194 - DNA, 751 bp, Oryza sativa
  unsure (1)..(751): unsure at all n locations
ctcttctctctgcctcctctcttctctttgctcctcccctctcttagctctctctcccgttccctctctctccactgcaccacccgacggcgacctagcggcgggaggggaggtggtagcggcgccctcccctacggtccatccagctgtccagctgcggcggcggcggcccagcagcgggaggggagatggtggcggtgccctaccctatgctccatccggccgtccagcagctgcggcggcaccctcacctctgctagatctggcgggaaagggaggtagcggggccctcccctacgctccatccggcgtccaactgctgcggcggcggccggcccggcagcgggaacggagatggtggcaagcgtcctcccctatgctccatcaggccgtccagcagttgcgggcagcacacctcatctccgccagatcttggagggaagggaggcggtggggccctcccctccgcctagatctggcgggaagggaggcggcggtggcctggtgatgacggcttcccacggcaacgacagcggtggtggtggggggggcagcggcaccctcctcctctccatccgacggcaacggcaataatggagaaggcgcgtggggcgaggagacagttatgtgttcttgagtaatgttcttgatgtgttcttgatgaatgtgattttgatgtgttcttgatgaatgtgatgttgatgtattcttgatgnnnnnnnnnnnnnnnnnnnnnnnnnnnnnnnnnnnn

SEQ ID NO: 395195 - DNA, 322 bp, Oryza sativa
  unsure (1)..(322): unsure at all n locations
cttctcactcccatccatgtaggcttagctccgctaaaaccctagcaggttacattcccagccagcggcagcacgcacgcgccatggaggctaggcgttgccggcgccgcaccgccagcgcagagcggcggcggcgaggaggcggctgtgcagcctcctcgccttcgccggcgactacctcaagtacctcctcacgaagcggggccggttcctcggcagggtggccaggaggtccctcgccgccctgctcctgtcatccggcggcggcggcaagcatgcctngccacggcgccgtggccgacgttcgcgctggcggaggcga

SEQ ID NO: 395196 - DNA, 794 bp, Oryza sativa
  unsure (1)..(794): unsure at all n locations
acactagagaatgacaagttgcgtggcgaatgttgcaatacgaggagtcagcaaaacaacttgctctgaaggaacaaaagctccgatctcaaattgctttggaaagaaagaaatatgaggaattattacaagagctcaggtcgttggatgtgaagacagagaaatagcaaactgtttctgcttttgtccgccatgatgcttctcagcttgcttcttgcctgactgttcatgtgaggattacaattaacttgctgttggagttctgcagtcgtgattatggaagaattggaccttggacaactgaggtcgtcagcttaactttcatttggtagagatgtacaattttggtttggagttgagcgtgtacaactgttgtaacattatctgtatgtacagcggtgatatcatgacattgacctgctggttcacatttttttacagttaatacacatctgttacttatgtccngtgtaaaacgaatgttagattttgatctgctagttgcatcttagtgtttcgagcaaactattacatttatattgttatgcngtagatcagttgcccgacctttgtngtgccaaagtttgtggagtggcacgtcattattctttccataaatcagngggtatcaatgtagatgcactgcattgtaatttcagatatagccgaaagtatccatcctttttatagcctttgtattctgtaattttgttggtgctgtgattaattggtaatctgcttttacangnttcnnnnnnnnnnnnnnnnnnnnnnnnnnnnnnnnnnnnnnnnnn

SEQ ID NO: 395197 - DNA, 526 bp, Oryza sativa
  unsure (1)..(526): unsure at all n locations
atcttatgttcaacagcgctgaatgaggccctgacaaccgaagtccaacgcctaaaactcgccaccgctgagctcggcgattctttggctcgtccagcagtctagctcagcagattccaactcaatgctcagaatcagatgtttcaactgcagcagcagcaggctacgcagataccattctatcaactgcagcagtcacaacagaacggtgcagcgaagaacaatgaatcaaaagaatgattccagaggcattttgggctggttcatggaaagagaatattggtttagatgagcgcaattcgcatattcctaactcatttgttttaatgttgttaataatcaccttgcatttttctagtaggtggtggttggtgaacctccttttacctttctatgttcattgattctttgggtgatacagttgtcatttttaaggtaccaaactgatggaagttgtaggtgatggttattctttggtactaatatctatgtcgagtattttgagtnnnnnnnnnnnnnnnnnnnn

SEQ ID NO: 395198 - DNA, 343 bp, Oryza sativa
  unsure (1)..(343): unsure at all n locations
tcactatagggcgaattgggtaccgggccccccntcgaggtcgacccacgcgtccgttctcgccgaaggatttggcttcgaatgccgctgccaacggtgcttgtctggagattaaaacaccatccctttttcgttgtattttccatccttttggcatgcacattgaagccaaccgaggttaattaccattgtaaacttttcaaagatcagttgaagccaggagtcaccaatgtaactgccaggtgctcctgtttggaagatttgtaacgtgttggtgtgtgtgtgtcgacaagagtacgaatactgaatgttgttgattnnnnnnnnnnnnnnnnnnnnnnnn

SEQ ID NO: 395199 - DNA, 787 bp, Oryza sativa
  unsure (1)..(787): unsure at all n locations
gggactacatcattgtgccccatatatggaggccttacattgcagccaagaggtcaggganaaggaatccgtggaccaccctacaagttcttgaaaggctgcaatgaggatgtgaagaaaatgaaggatgctgcagatgatctggttcttgatgttcatgaccacaattacctcccaagggttatgccatagtacctgaaatggagatctcaatatggagagccctttgtatactggtttggggcaaagctcgaatctgcatcttcaactatgagtgggccaggcagattctttcaagcaagtcaggacactttctgaagaatgacactaccccaacagtgtttggcgttgcttggcaaggggactagtactggtcgaaggaattgattgggagcgccatcgcagagtaatcaaccctgctttcaccatcggataagataaagatgatgacaaaaacaatggtagcttgtnctcaaaacatggtgaaggaattggaagatcaagcatccagcaacaagaatggagaaactcaagtggaattggacaaacaattccaagagttaacagcagatatcatatctcatacggccttcggaagcagctataagttaggaatagaagcgttccatgcacaganagagctccaggaaattgctgtaaaatctctcctcaacggtgcagataccagggttcagctaccttcctacaaangggaattggaggaatttacacttgaaaagagcttaggggcactctcatgcagttcatacaatcccgattntcatca

SEQ ID NO: 395200 - DNA, 480 bp, Oryza sativa
gataccgttatggtacgaggcgaaggtcctgttcgtggcgtggctggtgctgcctcagttcaggggggcgtcgttcatctacgacaagttcgtcagggagcagctcaagaagaacagggtgaagctgcacgaacaccacggccatggccatggccacgccgacgagcaccagtcgcacgtcgtcagaggctgaggatggcgtgcaccgaggaacggatcgaatgtatgtttgttaattaatctgacgaaggacagaaccaagccggtgagggctcatgtcgttcacgaaactagaacctacggcgcgcttcgggcgcccttgctgtgtaaatgaggaaaataaataaggaggccctgaagagcctattcagtggattggctgtagcaccactagctatagcattcaggttatgaggaaaaccagtgatggattaagtagacataaaatacatagattgaatgttaaaaaaaaaaaaaaaa

SEQ ID NO: 395201 - DNA, 436 bp, Oryza sativa
  unsure (1)..(436): unsure at all n locations
gagcaaagaaggcaggtgatcaacaagctgccactgtgccacaagttgacgagcatatctctaccctcttccccatttttccaattgcacaagtcgatgactatctctctcccatggcaccacaagttgatatctctgccttcgtgccacatgctgatgagaaccatgagatatttgacgggatactgaattctctgccagagataccagtagccaatgtgaggtattctgacttcttcgacccattcgatgatggtatggacatggcaaacactctgaacgccaacgccaaccagtctgctagtctgcatgtcactgatgataagtctgggcattccttgattcccaacccaaagtctgggcctcanatgtgagactgacagggaagtggtatttaataccatgggtcagtttgtatgaagctcagaaacccctt

SEQ ID NO: 395202 - DNA, 332 bp, Oryza sativa
  unsure (1)..(332): unsure at all n locations
cgggagagcaccacagcgccgcctccacttcccgcgcaattcgcaagagaagagccatggacggcgggtcctccacggcggcgaggtcgtcggcggcggagatggaggagcaccagaactggaagaagaacgcgccggtgctctacgacctcgtcatctcccagccgctcgagtggccgtcgctcaccgtccagtggctcccctcccactcccggtcgccgggctccgnccgctcccaccgcctcgtcctcggcacccacacctccgacgagacgcccaaccacctcctactcgccgacgccgccctcccgctcccgccccgcctggcggcg

SEQ ID NO: 395203 - DNA, 773 bp, Oryza sativa
  unsure (1)..(773): unsure at all n locations
cnggcactggcgagatgtgaaaacgtctcagtgtgatgcagcgaccaggaaatctagcgcggcaggttacgtccatctcacccgttcatcttccgatcggacggcccacgctccacggacgcgacggttggagccacttcaactgctctttcatctctccccgattttgtttcttcctcgacctgctctgcttctcctccgcacccaaaaatatcaaagaactcaaaagcggagagaggcgaagaacaggggggacgccatgaacgtggaggaggaggtggggaagctcaaggaggagatccagaggctcggccagaagcagcccgatggatcctacaaggtaactttcggtgttatcttcaacgatgaccgttgtgcaaacatatttgaagcactagtcggcaccttgcgggctgccaagaagagaaaaattgttaagtatgatggtgagctgcttctacagggggctcatgacaatgttgagataaccctgttgcctcctccagcggtcgctgctgcctgaagagggaagcatctgcgagcctctggtgttaaggcgttgatatgcatataatctattgtgtctagattctcatgaaccatttgatattcgaagcggatgcctatcgcgtgatgtatgaactatgggtatgcagtttcttggacatgcttgtattggaactgaaatgataagttcactgctgatatattgtgcagtggtagaatgagccataaaatggccatgaattttttacagactgcaaaaaaaaaaa

SEQ ID NO: 395204 - DNA, 406 bp, Oryza sativa
  unsure (1)..(406): unsure at all n locations
ggtaatgctcatgctgatcttactggtattaaggaagaaactaaggttctgtggcgcacaattacacgacagtcaatgtagtggtggaattgtggcctttagatacaatgatttatgtcatgctactaaaaatttctctgaaaagctgggaggaggtggttttggttctgtattcaagggagtgctaagtgactcgactattatagcagtgaaaaagcttgacggtgctcgtcagggagagaagcaattcagggctgaggtgagctcaattggattgatccaacatatcaaccttgtcaaattgattggttttctgttgcgaaggtgatgagagactacttgtgtatgaccacatggtaaatggttctcttgatgcccatctgtttcagttttnngggggggtttn

SEQ ID NO: 395205 - DNA, 723 bp, Oryza sativa
gcgcgtaatacgactcactatagggcgaattgggtaccgggccccccctcgaggtcgacccacgcgtccgctgcaaaattaaggaggcttatagcagcgaaaaagattgaaaagattgacaggtcctataggatcacagaatcttatgcagccaaagtttcgcaagcaaataagtctcccaagtccaaagaaggatccagccaagccactgaaggcatcgcagaatttaggttcatttgctggtacgagtcctgccctagaaagcagctgcagctgcagctattgaaagtggctgatgcggaggccaaatcacacctttgcggaatgagcacatgacggaggctgaaaggatcttcaagcttgctgaggagaccgagtctctgtacactcgcaacagagatctatgaacgatgttcaagaggagagatattaacaataatgcaagtggcgcaaagcaattttgaattccaatctgttagcggcaacggcagcggcactggttctactgtacttgcataggttggtttgccctgtcatctttggcatgttgttcctccgatgtgtaacttaaaacatgttgttaacttgttatgtacttgggtcgagccggctaagacgtttacctcaaaaacgtcaggtgttccgctcatccttaattataattatataaatgtgcatctcatcttgcgattgcaagtgtgatcatgtaaaaaaaaaaaaaaa

SEQ ID NO: 395206 - DNA, 640 bp, Oryza sativa
  unsure (1)..(640): unsure at all n locations
ggcttgtggggaggaggcgcgcggagatgggcgccccgaagcagaagtggacctcggaggaggaggaggcgctgcggcgcggcgtgctcaagcatggccccggcaagtggcgcaccatccagaaggatccggagttcagccccgtcctctcctcccgctcccgcatccgcctcgaggacaaatggaggaatttgagttttagtgcaagtggactgggttcaagggataaattaaaggttccaaggataaaagggccttcatcttccacatctccaagctctcagactccgcttctcgtcctacccccaaataaagttgctgaggcttcaccatccgcagatcctgagaaaagctctcaggatgtgaagattccaaattccatggtaatagaagctctttgtgaaattggggatccaaatggttcggatgttgatgcaatttgccactacatagagcaaaggcacgaggtgcaagcgaattttagaanattgcttactgcaaaattaaggaggcttatnncancgaaaaagattgaaaagattgacaggtcctataggatcacanaatcttatgcancccaagtttcgcaagcaaataantctccaagtccaaanaaagatccagcccagccnctnaangc

SEQ ID NO: 395207 - DNA, 412 bp, Oryza sativa
  unsure (1)..(412): unsure at all n locations
agcgacaccaccagcgcccacctccatcgccgccgctcccctcgcctcccgcggtttacgctcgcgcgcaggagttcttggttggctgactgcgagtaagcgaatcatccggcaatcatggcgtcccgcgtcaggtttgagaattccagcgagattggagtgttcgcgaggctcaccaacgcctactgcgtgctccccgacggcgganagagaacttcttcagcgtgttcgaatccgagctcgccgacgtcgtgccggtggtcaggacgtccatcggcggcacgaggatcatcgggaggatgtgcgtcggcaacaagaacggcctcctnctgccgcataccaccacagaccaagagcttcagcatcttgaaggaagaagcctgccctggattcaaggttgggttcgttccag

SEQ ID NO: 395208 - DNA, 455 bp, Oryza sativa
  unsure (1)..(455): unsure at all n locations
cggacgtggttggggggaaaaatcatacaaggagaactctgaaccagcatcttctatcttccaaagccgcataacttcatccatgaaacagaaaaacaggcgtgtgcagatgatggaaagagagtaaacagtagcaatgatcaagattgcatgtcccttcttttgccctgaattttgaaacatagaatggtttacatgtagtgaatgaatcagttctacaatatcaaagacttagctcctgaattttgctaagatagtgtgccttacggttggattcaagtgttcgtttctttctttttggccaaattgatcagctaaattgaatcttaatttgtaccataccgaaaggattcatcttaaactttcagtcaatatatacatgtaaaatatacatatttggcaagcagagtagcatgcagtcctttttatnnnnnnnnnnnnnnnnnnnnnnnnnn

SEQ ID NO: 395209 - DNA, 346 bp, Oryza sativa
  unsure (1)..(346): unsure at all n locations
ccctcacaagtcacaaccagttcaactgaagtgggcgactttcataatgcatctgattctgaacactggggttgcatttagttacaagatcagattccaatagcaaatcgagaggtgatcggtcccaatagattgtctgaaactggtcaggtcatctgaaccttgacaagatctgtagttgtcatttctgttagaatgtatgccgccttggtaaatattccttggcagatagtagctcttttattatgtgaaacagaacatctgaacgtgactttggtaatattccattctgcatatgttctctcgnnnnnnnnnnnnnnnnnnnnnnnnnnnnnnnnnnnnnnnn

SEQ ID NO: 395210 - DNA, 682 bp, Oryza sativa
  unsure (1)..(682): unsure at all n locations
ggtattagtgtaagagaattgttcagccataaaaacttgtagcctttttctgacatccttgcatttttttaattccttttgaataggttgtaaggatgaagaagggactgcatccctccagatgcagtggatttcatatgtgacacaaagcggcaggttgatcaatatcatgatgaccaaggtcaaccatactggcaaagtgtatcatatgagagcaaagcgtcaaatggctcaaagcctgggccagattgcaaagttcaaccgccgataccagcaggaatctgaggaaaacaaagaaaagtaggctgctgtcagcaaggagctacatatgctctaaggcagattagtgtggtgctatgtttatcgtccaggaacattgctcatggatctttgttttggatgtcatcctcttccatgtagccatctgatcattgtggtttatccctgtagtttcagttctaccattcacggatttttctggagctatttttgttgctcaattctgcccgatatctctagggattccagcatgctactttatgttttgttgattttggattgaagctccctgaattcctgtaagatggcatcgtttggcttgtcatgctacgtctcttttagcttatataaattatgtttattgttagtacnnnnnnnnnnnnnnnnnnnnnnnnnnnnnnnn

SEQ ID NO: 395211 - DNA, 368 bp, Oryza sativa
  unsure (1)..(368): unsure at all n locations
ttcggaatggagattgctcgagtgcttgggggtggggttgttcctgggtccttgattctagtaggtggggatccaggtgtaggaaaaagttcattgatattacagcttgcttctatcatgtccgagaatattggtgctggggagtcttctgctatcgtatatgtgtctggcgaggagagcattgagcaaattggaaacagggctgatcggaatgagtatcaagtctaggaaatttgctacttgtattctagtacagatatcgaggatatcttggacaaaatccaaccattatctcctaggggcactcattattgattcaattcagacagtttatctaagaggatttgctggaagtgctngggaatatg

SEQ ID NO: 395212 - DNA, 289 bp, Oryza sativa
  unsure (1)..(289): unsure at all n locations
ccgcttcttcttttctcggtgtaagcgtgcgcgcgtttcactgtttcggtttcatctcccgctcttccattttgccgctccggcgaagtgctggaagcggancgaggttaagccatgggaacggccgagctgaaggcctaggagatggggtgggcgtccaggtggctgcgcgggctgctcggcggcggcaagaagcccaactccggctccggcgacccgaagccggcgagggagaagaagcgctgggggttcgggaagtcgttccgtgagaagtccccggcccatccgc

SEQ ID NO: 395213 - DNA, 448 bp, Oryza sativa
caagctctctttctctctttctctcccatgtccggccattagtaccactggccgatctccctcaccggagcttcgcaagacaaaccctcgcgccaccaactccgcctcgtcgaggtgattccatttttttcctttcccctctccctccaccttaagataaaccgccaccaccaccttctcttatcggccggtctgagcttttgctaccgccgttccggccatctccctctctccctccgccttccaccactttccccgggtgcgcgttgctcgggaacaccatctcccaccggcgttcctacctcccggccaccggagagctggcacctcgctcgccctcccctctgtttcctctcgactgccagacagaagaaaagaagaagaggtagaagaaacacatgacaagcgggccccaacttttataaaaccgtacaacaagttctatcgg

SEQ ID NO: 395214 - DNA, 766 bp, Oryza sativa
  unsure (1)..(766): unsure at all n locations
tangncccaattgnctngttgtcaaggtgtaagaacttggtttactgggaaagatctcccgacccttccaggttgtcccggtctccttctctcgcccatccggtacatggaacccgccgacgaagtttcctccggcgggccagctttgagcctcgaatgctggatggggtatgtggcccaccaagcccaggctcccacgccacaccagtgttgaaagggggctctttgcctgctgggggatgttggcaaggaccaagaaagtactccgccaggctaattaactgcccgctggaatcagggtgcatggctgctttggacgcggagcactatctgcaggaggtcggtgcacaggagggcaaggccgattgactatctcaggaggaagcgaccaccagcgtttcaagaagtccaacgttgtcgctgctgaaagctacactctgaacgtttatgccatgggctgttctgacttctgaatgcttctaccggattttcctgccccttattagcgtcgtattatttgatgtgctggagatttatctgtatttacgctgaagacgacgtattgcttgcgggtatccgcattttctgcatttgcttatgattgagttattgtgacatttggcgtttttagtnccaaactngcaaggaattntgtattctnaagaccattccgatcaatgctactgatatggtggnnnnnnnnnnnnnnnnnnnnnnnnnnnnnnnnnnnnnnnnnnnnnnnnnnnnnnnnnnnnnnnnnnnnnnn

SEQ ID NO: 395215 - DNA, 314 bp, Oryza sativa
caaagaacaaacccacccccgccgctgagatcgattccaaccttaattttaacctgctcgctgatctcgccggccgtcgaccgccatggggatggtgctgggcaagatcacggtggagacgcccaagcacgaggtgctccacaccggcgccggctacgaggtccgcaagtacccgccgtgcgtcgtcgccgaggtcacctacgaccccgcggagatgaaaggcgaccgcaacggcgggttcaccgtcctcggcaactacatcggcgccctcggcaacccgcagaacaccaagccagagaagatcgacatgaccg

SEQ ID NO: 395216 - DNA, 659 bp, Oryza sativa
  unsure (1)..(659): unsure at all n locations
agcggagcatttgatgagagagagacaggaacatttccaaaagcagaggatagagaactccatgggttcctcagaacctacacctaagcagatatcgtacctccggaacctggggtgcaccatcacacccacgtctcgcctgcacgcgtcgcatcttatcgagaagtacaaatctctatgacttttcactgcttgaacctgcaggggacacatgatttcaagctcagtctcagaattgggaccatatatacagcaacgctggttgaaagttcctcatattaactgtacatgctgtacatatcgatgtacttttcccgtggacatggtgtggttagagcaaacgtcttgttacattaccaggctgttcttgggccacaagggccaaccaagaaacgaaccgggccttctctttggggaatctggctcggccacaaaataaccagctatgggagactcagtcacatccctcatgcaacgtacatcctccgtcttgtaaaaaaaatatcaacttctagctatgtactttatggggatgggattgagtacgggttatgtgatcattgcctcttgtttttgcgatgatccttgtacgctagtgcctagtggtataaaatgagctttgtatataatttggnccattttttttaaaaaaataaacc

SEQ ID NO: 395217 - DNA, 580 bp, Oryza sativa
  unsure (1)..(580): unsure at all n locations
gagaagttttccgtggtatctggaatggaacagacgtagctataaaattattcctggagcaagatttaacaacggagaatatggaagatttctgcaacgagatctccatacttagccgtcttcgacaccccaatgttatattattccttggtgcatgcatgaagcctcctcacttatccttagtcactgaatatatggaaatgggttcgttgtactatttaattcatgcaagtggccagaaaggtaagctcagttggcgaaggaggctaaaaatgcttcgtgacatatgtaggggtcttatgtgcatgcaccgtttgaagatagttcaccgtgatccttaaggagtgcaaattggccttgttaacaagcacttgggcagtcaaattatgggactttgggctctctcgagtgatgtcaaattctgcaatgaatgataattcatctgcaggaactccggagtngatggccctgagcttattcgtaatgaccatttacagagaggtgtgatatcttcagccttggggttatcatgtgggagctttgcactctgagtgggcttgggagggataccgcagttcag

SEQ ID NO: 395218 - DNA, 408 bp, Oryza sativa
  unsure (1)..(408): unsure at all n locations
aggaaagcgatgcacattctcgggttgcaacaaaggagctgaaggcagcactctcttttgcaagggccacggtggaggcaagcgatgcttatttcagggtggtggtgtgtgcccgaagagcgtgcatggcggaactcaatactgtgttgctcatggtggtgggaagaggtgtgctatttctggttgcaccaagagtgctagagggcgtacagagtactgcgtgcgccatggaggtggcaagaggtgcaagtttgagggctgcgcgaagagtgcgcagggggagcaccgatttctgcaaggctcatggtggaggtaagcgctgctcatggggccaggttgacttgaacttcggtgtcggcgcaccacagtgtnataagtttgctcggagcaagacttggctctgttcaa

SEQ ID NO: 395219 - DNA, 632 bp, Oryza sativa
gatagttgctcatcaaggaattgcagctggccaccaggttaatttctcctcatcctccctttgttgagctccaagctgaaagtagaaagacagcagatcaatcaatgccatccttagttcttgactaaggttggccggagtttggggacctctttcttgatgtttctatacagtggtacccatgctgggttcgtcgttcgggttgagggcagaccgtccgtgcaaccttgtttcgcaggattgcagtcagtgctcctcagattcaatgataaactccgtggaaatcaactgttaaagtccggtgaagctcacaccaaaatctacgactcaacaacaaaccttcaatttgtgccgttcccgtggaggcaaccaaaggggattatcggtttgtcaagcggtgtgcacgtcaatgaaggcccatggatgtagtcgtcgcggcaacgccgctactcctgtcgatctcatccattatcactgtatggctacatcaggaatttgtttcccttagttcagtctgtctcatctttagaaaggatggtttggtgtatgatcaatttgtactggggattctttccctaatctctgtcttttctatataataaaatgagtacttttcaaaaaaaaaaaaaaaa

SEQ ID NO: 395220 - DNA, 372 bp, Oryza sativa
  unsure (1)..(372): unsure at all n locations
gtctcctaaaccctacacaccctccccccctctcctctcgccggccgcgccacccgccgccgccgcgccatggccgncgccgggggtctcccagcctcggccaccctcctcctcctcgtcatcgccgccgtggccgtcgctcccctcgccttcccgcccgtccgccctggtttccgaccgcccacagatccgctgccggcccgagctcttcgccgcttccccccgacggatccttcggcgatttggagacgacgtatgaggcggtcaggacgttccagatactccgggggtggagaagggacaagcggcttgaatttggtaaggccggtgcaagcttcgcccgcccgagaagtttgctccttgtaatcgtgg

SEQ ID NO: 395221 - DNA, 647 bp, Oryza sativa
  unsure (1)..(647): unsure at all n locations
cgacttcactttaggncgaatttggtnacccgggccccccccctggagntcgccccacgcgtccgaaccccgtttgccattcaaccccaaaggcagcgagtgcaacgcgcagatggctaagaaaatgggggtcaacaccaggcgaccaacgttaaaacaaaggtgccttggtctttcatgccttccagtaactgcccacctgtaactatacccattattttgtatagcaacatcaaatgcatggctaaggtgaaaaaggtgaagttctatttttgtccacccgtccgaatacactgtaaattttccacaggcaaagaaatgccgagcttagaaaagcagccaacccatcaagcaaaagaaaaggtaaaggagggaaaagggaaaatttgtgcaaaactactgtacatttttttttcttccttgtcatttctttggttcccaaaggttgagtattaatgtgtaaggcccaatcaattgtattgttgttcaacataaaaggtcagtcatcttaatcagcaagcttgaagaagccctctggcagggcccctgtgtatatcacattctgacaaattcgtcggaactgacaattagattgcaggagaaaaacccctttttgtncctnnnnnnnnnnnnnnnnnnnnnnnnnn

SEQ ID NO: 395222 - DNA, 398 bp, Oryza sativa
  unsure (1)..(398): unsure at all n locations
tgcaagcaaccaaccaaccaccacccgctcgctcgccgaccgccaccgggacccaatcacccctcgccgccgccgccggagaaggaggaggagggagggagcagccggcagcggggagggggcgcgctgcgcgtttgatgagatgaaggaggtggtgctccacgtgtacgacgtgacgaacagcgactcggagaagacgaacaacaccatcctccagatcaaccgcatcttcaaggaccggatcggcctcggcggcatcttccacagcgccgtccaggtctatggcgaggaggagtggtcgttcggggttctgcgagaacggcagcggcgtcttcagcttgccccatcgggaagaacccatgtacaactaccgagggttgattgtncttnggggnaga

SEQ ID NO: 395223 - DNA, 351 bp, Oryza sativa
  unsure (1)..(351): unsure at all n locations
cgaagggaagggcgagaatctgatatggttgccaagagtactttccatgggaaggaggagagggattaccaaggacggtcatggatcacaccgcccaaggatgccaaggcgagcaacgagcgctgctatattcccaagaggtgtgtgcacgagtgggttgggcacaccaagggggtctcggcgattaggtttttccccaagtatggacaccttttgctgtctgcgagtatggattgtaagattaagatctgggatgtgctcgngtcgaggacatgtatncggacgtacatgggggcactctaaaggcggtnagagatatatcgttttncnaatngntggnactaagttctt

SEQ ID NO: 395224 - DNA, 449 bp, Oryza sativa
gtttgttgctcggttgcttctcttctttcctctctgtcttctgtcttctcttcttcttcctcaccaaagttgttgagttggtgtcctgttcttggacggacaagggtgtttatccaaaagaaatccatcccgagatttgcttctcttgcgcgcacactggcaccgtccggatcgctgaatcttgctggtggtggtggtggtggtggtggtggtggtgcacggccatgtcgacggcggtggcggacgtgccaccggcggcggcctacgggttccccggatcggccaagagagggaagcctgaggaggtggtggtgctgatggggaagaggaggaacgaagggttcttcatcgaggaggaggaggaggaggaaggagtgctgacggagactcctcgatcggcgcgccgtcgccggcgaagcttcgtcgatcggggagaactccggcgaaga

SEQ ID NO: 395225 - DNA, 658 bp, Oryza sativa
cccgatttcacgatttctcccgagaccaccgatagcaaccgctcggtcgcggggcggagaagtcgccagagaaaatgacggcgccggtgaccaccaccacctcctccctcctcctcctccaccaccctgccgccgccatccgttcccttccctcgccacctcgtcccagtgctgtggcccgtcccggccgcagccggcgtcgtgccctcctccggtgttccgcggtgtccgagctcgcgcccaccgcatcagccgcctacgggccctcctcctgggcggcggcgctttgcatatgtgaggtcggggagtaaaggctccatctttggaggactgtccggatccgcgcttatgggcattgcttattatctgatgcaatcaacttgaaacaaaggcgttaggtgacgcttgttggatttggatctgcctttctgtttgcaagtgtttttggtataaggctgtacaatacccggaaactggtgccctctggtcttcttctagttctttcgcttggtgccttgggtgtcttttattctgcttatatgcaagacaaggtgtgaacaaattcgatttggcagtcgaagaattttgtactagctgaaccttcattgaaggctgtctttattaaatgtaaaattttgaaccaaaaaaaaaaaaaaaa

SEQ ID NO: 395226 - DNA, 730 bp, Oryza sativa
  unsure (1)..(730): unsure at all n locations
cgcccccggcctcccggcgataccctgacctagggcggacgaactgacgaagaatcccgctcttccgggacgtcagggtgggatggccgagtttctcttcgaggacatcttcactgtcaccaggctcgaccctgatggcaagaagtttgacagagtttctcgtatcgaagctcgcagtgaccagttcgatatgtacatgcagttagatgttgccacagatgtctatcctatgcatccaggtgacagatttaccatggtcttggttcctactttgaacttagatggtaccccagatagcgccttctttacacaggctggcaggaaaactctggctgacaaatgatgagtatgtccatcgcatgggaagctttataagatctcagaagacaaagacacctctgatcaaaatgctaaaaaagtggagatgtatgcatcatttggtggcctcctagtggatgcttaagggtgatccctccagtgctgcgaattttgagctggaccagaggctgttcctacttatgcgcaaggtgtagaattgtcaaatttttaggagaaaatttgtcgacaaatggataggtagtcccttacttaaataaatgggtgaactacataatatcctaatgttgatgggcctttgtgtgggtctctctatgcttgaacacaccagcttccctccaaatcagcacttcatctctaaaaannnnnnnnnnnnnnnnnnnnnnnnnnnnnn

SEQ ID NO: 395227 - DNA, 738 bp, Oryza sativa
  unsure (1)..(738): unsure at all n locations
ggccaccaaccgtgccgatggcacccgccaccgccaccgccgtggcgtccccctccacctcctcccggctcctacaccgcagcctcctctcgccaacacccacggccgctcgctgcctccggccgccgctgtgccgcgggcgcctccgcaccgttcgccaggttgtcgccaacggcgacgcctcctcgccgtcctcggacgtggccgccgaggagtccgcggcggcccccaagatcggcaagcgcgtgcgcgtcaacggcgccggtacgcgtccaccacgtctccaaggcgccggacctggacatctgtggcatggagggtgtggtcaagcagtacgtcggcatctggaagggcaaacgcatcacggccaatctccccttcaaggtggagttcgagctcagggtggatgggcaggacaaaccggtccggttcttcgcccaccttcgagaggacgaattcgagctcgtcgaagacgaatagctgaataggtctcttttacagaataatgtgctctcgtcgtctgcagtctgcagatgcagtatctgtatattagaagagaagattgaagagggtgcgaggagatcgcaagtaagttgttgtttgtttacttgtcgcgtgctcttcctcactcttttgtagttctgttaaacaccaacattttgagatttgagaaactgagaacggttcggattatgacaattatgaatgaaagtggttnnnnnnnnnnnnnnnnnnnnn

SEQ ID NO: 395228 - DNA, 826 bp, Oryza sativa
  unsure (1)..(826): unsure at all n locations
tcccggcagcaagtgaagtgcatgcctgtatagcttgagcaagtatttggcagtttgctgccaactgctaccctatttcaaatctaggtaagatctagctgcaggttatacagagaaggcaatggccgactgcactacgatgcgtttggcttcatctgtgaccatcatcttgctgctgctcgtagctagccaagctctagtagtctctggcgagtcatcttcctccgcgatgcagtccaagacgttgaacatgaacaagcttctcaacatcagtgaagatcactctcctaatggcggacgcactggatgcagcggatgcagccggacagctgctcggagcagaacgtggtggtgtaccagaacaacgcggagaccttccccagcggcatcccgacctacagcgtggaaatcatcaacgtctgcacggcgtgaacgggtgtacgacgtccacatctcctgcggcgagtttgcctccgcggagctcgtcgaccccagccagttccagcgtatcggcttcaacgactgtctggtgaagggcggaggccggttgggtcctagcgaggccgtctccttccagtactccaactccttcgcctacccgctcgccgtagctaatgtcgcgtgtgagtaggttttttcagtggaaatgcgtgcgcatgtgttgtacgtagtcgactggcctattagctacgtactgtcttcgatgtttcagacattcagttgatcgagcttatttatctatgggtgacatgcttcgactttaactgcgcaaaaaaaaannnnnnnnnnnnnnnnnnnnnnnnnnnnnnnnnnnnnnnnnnnnnnn

SEQ ID NO: 395229 - DNA, 392 bp, Oryza sativa
  unsure (1)..(392): unsure at all n locations
cacatttggtctatctggcaacaatgtcggcttgctagtactcctggacaagtacccgcggattcagaaaactctcacaagaagaaagtaaaaaacgcggattccgaaaaatctcacaagaagaaagtaaaaaaccttactggaggagcaactgctgttcagtgtaaataaaaatagccatcggttggggagtttgcttgtaatggcattctttatttaaaggttgggtggagcaagtgtttccttgattcttttaccgatgtttttcgcttttgtcagtcaccagcacagggaattgcggaaggttattgctttaaatcctgtgattttgtttcgtgctgttttgggggccgcttttgcttaatttctcaccggcaaaagctaaatgcatn

SEQ ID NO: 395230 - DNA, 493 bp, Oryza sativa
  unsure (1)..(493): unsure at all n locations
cggacgtnctgngnacggtggggatagcggatttggaggcggtgctggtgttggtggaggtgccggtggaggtgttggtggtggaggaggatttggtggtggtggcggcggaggccttggtggtggtcacggcggcgggtttggagctggtgccggcgtaggtggaggtgctggtggaggtgttggtggtggtggcggctttggaggaggtggcggcgggggcttctaatcaccttcacctaattagtattaatacctttcaaaatgtgaaaaaacaaacattcgatcttaatttggtccaattgtctttttgttgtttatgttcgtggtgttcatgcagcaatagcacgtgggaataaatttgcagtgataacttgtaaaatgtaggttgtcggctcctagtgttatnctagtttggttgtccgcaatattgccactcctttatgtaatattggtgaattggtgacctgattgatgaatatatacgaaataa

SEQ ID NO: 395231 - DNA, 686 bp, Oryza sativa
  unsure (1)..(686): unsure at all n locations
gatatgtcaagcgaggtatcatagctcctgtgtcgaaccactgcctgcttctacacaagtgactcgtgaatggacctgtcctttttgctttcatttagaaagtggggacccattacagaatagactacaggagaagatatctaaagggaatcgtccagcacttcctgcattaatcgggctccgctcttttgccaagggtttctattcagggattgaggagttggatttattagaagaaattgctgagaaagctcataaatttaagtcctaccttatgcaaatattgcatgatgcagactcttaccatggagaagatcttagtgtcatgcacagatctcttttggattgctctaaaggcaacatcggctgcctggcttatatgatcaccagattcagttgcagaattgagtcaatgttgagcagatattcctggaaaaaacgaatacatattctcttgtgtggtggaaaaaagataccgatccaacaagtactgatgcttgataatgagggttcaagtttagagatatgtggtgaagatttcttcaagttggagattaataaaataaaggnaactagtctgcagtggctggccaaagcaggnaaaggctacacttgnttctggtagctcgcccttganccttgtgtatggccttattattgaagggcgnaagtctttnctgtgcatg

SEQ ID NO: 395232 - DNA, 652 bp, Oryza sativa
  unsure (1)..(652): unsure at all n locations
tttttttttttttttttatcaaaattaacaaatataataatggcgtccaacaaatacacaaccaaactgagatcaaggacggtctgtcaccacaatctcattaacatttttgagattggtgaacatatacataaatactgcggtactcatttgtttgctgtagggggactgtacaattttccggcaaaattggagatgaaaatctccagatcatacactcggcctgccagcaatgtgaaagatggatacctgaatctacctcctgcactcaattcaatcaacaagaggttttcacatagaacaggattcaagccatcaaagacagttgagttcttgttccaatgaagcaaagtcgaacccgtcccagttgagttctgcattgagggccgaacttcagatctgtgataggcagcggcaggtggctgatgtctgcaaggccaatgtaatcatcgcccaggggacctccgccatgccgttaaaatcactaagtgggaaacgcatctgcaagcctagtgnaaatcatccaggtgggaaattccatcaatatgggcccacacagttgctccacagggatctccatctaatcctgncaaggaacagcggcccatcggaaatctccttttgnctttaaggggtgggcnggcaagttcag

SEQ ID NO: 395233 - DNA, 445 bp, Oryza sativa
  unsure (1)..(445): unsure at all n locations
nnnnnnnnnnnnnnnnnnnnnnnnnnnnnnggagaataatcggntttnaacttcttttttcactccagaaatctggattgtnctatcgatttnaaacaagttttgttacagccgaatctgagaaagtctgtacaggcagacatcacacaagtacatgacaggaggaacatgggaatcctacaacgttgcagagcaagcaaaaagaaaaggtgtgaaaaaaaaaaaagaaaactacttattgttgttttcctctgtccttggtttcacttctggcacgaaaccaaaaatgtctactntcagntaaaagaaagntcgcggttcgcgacgccgtttntcacgttggcagttcgagccgcagccggttgcgactcgactccgcgttcaagcccgttaaggtcgcagcgcgcctccgncgacgagggcctnctcgaggcgcgnacgacga

SEQ ID NO: 395234 - DNA, 357 bp, Oryza sativa
  unsure (1)..(357): unsure at all n locations
cgatctagggtttctagggttttgggttgcggcggcggcggcggcgagagggcgagggcgaggtcgagatggcgtcggagagggtgaaggggacggtgaagtggttcgacgccaccaaggggttcggcttcatcacccccgacgacggcggcgaggatctcttcgtccaccaatcctcgctcaagtccgacggctaccgcagcctcaacgacggcgacgtcttcgacgttctccgtcggatccggcaacgacggccgcaccaaggccgtggacgtcaccgcgccggggggcgggggcgctcaccggcggatcccgtcccaacggcggccgggacccgngctacagcgggggcngaaa

SEQ ID NO: 395235 - DNA, 482 bp, Oryza sativa
  unsure (1)..(482): unsure at all n locations
aacctccatgagagcggagctagcgctctcgggtggtcgtgctcttcatccacgtaggagcacagtcagcatcctgggcttaaggaaaagaaactgagggttgaagatgcactggatgcaaccaaggcggctgttgaggaaggtattgttgttggaggtggctgtacgcttttgcggcttgcatcaaaagttgatgccattatagaaacacttgagaatgatgaacagaaggttggggctgaaatcgtaaggaagtccttgagttacccacttaaattaatagcaaaaaatgctggtgttaacggcagtgttgttactgagaaggtccttgccaatgataacttcaggtatggttacaatgncgtacaggaaaatatgaggatttntggctgctggtattattgatccaccaaggtggtgagatgttgcttggngatgtgcgtcggtggcgaaacattcatcacatagntgttgttgtggtg

SEQ ID NO: 395236 - DNA, 569 bp, Oryza sativa
gaacgcggaggggatcaacaacaagctgcagctggtgatgaagagcggcaagtacaccctcggctacaagaccgtcctcaagaccctccgcaactccaaagggaagctagttatcgttgcaaacaactgccctccacttaggaagtctgaaattgagtactatgctatgctgggaaaagttagtgtgtatcacttcaatggaaacaatgttgatcttggcactgcctgcggcaagtactaccgagtgtgctgtctcagtgtcgtcgatcctggtgactcggatattaccaagcaattacctgagagtcattgatgtgcatgcattggccttgtgaccgatcttatcttcactttttgctcacatgaaaaagatatatatcttcatacggtgttcttgtgaagttgcgatacattgatgaaccaaacctggcacacttcaatagcatcgcctagttttgctctgctaagcatctgtcaacggtaaaggtaggagtgaaatgtatgtaggatttggaggtaatgggaaataaatggtgcaatctgttttactttcaaaaaaaaaaaaaaaa

SEQ ID NO: 395237 - DNA, 522 bp, Oryza sativa
  unsure (1)..(522): unsure at all n locations
gaagattgctgaatttctagcttctcatccaagagtaaagaaagtgaactatgcaggacttnctgatcatcctggacgatctctacactattcccaggcaaagggagcgggttcagttctcagtttcctaactggttcattagctctctcaaaacatgttgttgagaccacaaagtacttcaatgtaacagttagctttggaagtgtgaaatcgctcattagcctgccatgcttcatgtcacacgccagcatcccttctgcggttcgcgaggagcgcggcctgacagacgatctagtcaggatatcggttggaattgaggatgccgacgacctcatagcggatcttgatcatgctctccggtctggtccagcttagagcctgtgaattctgtgcccttcctgttcgttagggatgtagatgtggtcatgtgggtgctatctgtgtgggtgattgattcattggtcaactcaataagctgctgtgtcctcgagggaataaagacaatctatcccaaatttttt

SEQ ID NO: 395238 - DNA, 390 bp, Oryza sativa
aaaggttcaaattccagcgtgaggaagaaaatatggatggttttgatccgtctggaatgatcattctgcagaaagagaggtcttggattgaacaaggatgtaaagtaggcgagcaggttatcccattggcaagaaatttcaataatgtcaacacagatgttgaatctggaaaggtgccattggttgaaaatacactggagatgaaatcaggagctacttcctctagagctgacggaagagtaggtcaatccaaatatgctaacaacagagaaactattgctaccaagtattcagctatcagaggacagagcagacaggcagtgaagccagcaaaaaagggaaatttcttcaacttctgtatctttgcttgagggaagggaggtctgtacc

SEQ ID NO: 395239 - DNA, 352 bp, Oryza sativa
ccaactcactcccttgaaaagctagacacacacacatggccaagcagctcgccctcgttctcctcgtcgccgtcgtggcggcggcggcgacgtcggtggccgccgcaccaaagctgacgctccacaacctgtgcccgtacccggtgtggccgctggtgacgcccaacaccggcttcccttccatctccggcaacaccgcgcggctcgacggcggcgggcgcgggctcgtgtcgtacgacttcccggcgagcttctgggcggggcgcgtcgtggcgcgcaccgggtgcggcggcggcgtcgggcctgtgtgcgggtgcgagaccggggaacgcgtcgcgcgacggttggtgaa

SEQ ID NO: 395240 - DNA, 422 bp, Oryza sativa
  unsure (1)..(422): unsure at all n locations
tgatctctcttctcttctcagtgtgctattcttcacatggatagttgaactacttttcccagttatgttgacatatctggtgtatgagaaggaacaaaagctaaaaattatgatgaagatgcatggtctgaaggatgggccttactggctaatttcttatgcttatttctttgctctatcggttatctatatgacattttttgtgatttttggctccttaattggtaattttcttccaatctattttcacgaagattgcacttgcatttttttgtggcatctttcttgttcatctgtcaagacagccactgtgattggatacatttatgtatttggctctggcttgctaggggcatttctttttcgtttctttgttgaggacaggacctttcctcnnnnnnnnnnnnnnnnnnnnnnnnnnn

SEQ ID NO: 395241 - DNA, 369 bp, Oryza sativa
  unsure (1)..(369): unsure at all n locations
gttatactggcagccagaaatctggcagcaggataaaaaaggatgtgaatagaaggaatgaggattcaccgagctccttgaagtctaatgcaaaaggcaatgaggacgattttgatgattttgatcctcgtggatcttcttcaaatggtgcagctaatacaaacaccagtggcgtggatctttttgccccaaacttattggatgatttcatcgatgtgcctgcagcagcaactcatgaaacaaaacggctctgcagacgctcaggttgatctgtttgctgatgcagatttccaatcagccaataccaagtacagaaacagctgcgggttcagatgtccagggcaatgtaggacctttttgcggaacagn

SEQ ID NO: 395242 - DNA, 397 bp, Oryza sativa
  unsure (1)..(397): unsure at all n locations
nnnnnnnnnnnnnnnnnnnnnnnnnnnnnaccccaacacaaatgaaacatctctctcacagtctcatggccgtttggtttttgcttacagtaaaagcgtgctatcaaaatagtgtgtttcagagtcagatacagctctctaaggtttctcccgtgctaacgaagctaacaacaatcggtggcaccaaacatactctggtgattattcactccggtgttcaaaaaacagtgacacgaaatggcatgttgtatatcacggaagtctcttctgccgcatcagtaagtgtagcccttctggaacattcccttcttggcctcatcgntctcgccctcgccggtgtagcgaccgagctgagccagcgagttcgccttggcacggaccagcagtgccttctgcg

SEQ ID NO: 395243 - DNA, 361 bp, Oryza sativa
  unsure (1)..(361): unsure at all n locations
agcggggagtaccatcagtactagtcgccgcactcaccaccttgtgactctgctgctcctcgttgccgccagcaccaactacgccgccggagccacgctgaacatcaccaaccgatgctccttcaccgtgtggccggccgccgtgccggtgggtggcggcatgcgggctcgacccaggcgagtcgtgggcgctcgacgtgcccgccaacagcggcgcagggcgtgtgtgggcgcgcacaggcttgctcattcgatgncaatggcaacggatcgtgncanacgggagactncggcggcgtgctcaagtgcaagnacancggcaaggcacctcagacggtcgctgagttcacggtggaccaga

SEQ ID NO: 395244 - DNA, 724 bp, Oryza sativa
  unsure (1)..(724): unsure at all n locations
nagctctcccgaaacaggcgtttcaggagaaaaaaaaaatccccttttctcccggccccttcccttccatctccggcgaccctccgatcgccggcgtgaggggagggggtgggattttcgtccctttagtaatctattagcttaggtgttggtcttctctcgtagtcgggtcttcctgtcgtcgggttcttcccgtttgttcaagtcgatggatcgccggagttcggcaccgtcgtcccggcgacggaaggagtcgcttttagtcgccgagggtttagtttggaaaaacagaggaggagttgcaatgaggggaaggcagatcggtcaaaggaacttcttcaacctgtcagatccagcacaagtttggtggcgctgccccctccctgcatctggccggcacgcaacgacagttcggccggtttggcttgccttgtccccggacaccatgacccaccctcttccgtcttccggcctctccccctccagatgttgggggcggcgacggtgttttgttcggggtggcgacagtcttcggattcaaggacagcaggtaacaaaatattttggcagcctgtgcttctcgagaatgctgcgttggtgctggtcgggattggtgctttgcatgatctntttggtagatgggcttggggatgataagtttcctcatcaaggaatttgcaagcttggccaccaggttaaatttcttcctcaatcctccttttgt

SEQ ID NO: 395245 - DNA, 334 bp, Oryza sativa
gttcctaaagagcacacctgaatttcaagaaagatatgctgagactgtcgtatataggatattttattgcttgagtcgaattggaggtggccatcttatacttagggagctaaagcgtggaaatctgattgatgcgctgcgacatgcggatgatgaagaggatattaataaagttttaaagtatttctcatatgagcatttttatgtgatatattgcaagttctgggagctggacacagaccatgatttcttcattgataaagaaaatcttattaagtatggaaatcatgcattgacatataggattgtaggatagaattttctcagaggttcc

SEQ ID NO: 395246 - DNA, 584 bp, Oryza sativa
  unsure (1)..(584): unsure at all n locations
cggacgtgtcagngaacgcttgggcgagctcgatcgctttgcaagcaaaacgccccaactctcccgcacgcacacgcgcccttccaccgactcgtcagcttagagcaccgcaagcgcgcacagcagcaaagatgtgtggcggcgcgatcatttccgacttcatcccgcagcgggaagcccaccgcgcggccaccggcagcaagcgtgccctctgcgcctccgacttctggccgtcggcgtcgcaggaagccgccgacttcgaccacctcaccgccccctgcaccttcacccccgaccaagcggcagaggagccgaccaagaagcgggagcggaagacgctgtaccgtggcatcaggcggcggccgtgggggaagtgggcggcggagatccgcgacccggcgaagggcgcgcgcttttggctcggcaccttcgccaccgccgagncggcggcccgcgnctacaaccgcnncgcccgcngcatccgcggggccaaggccaaggttaacttccccaacgaggacccgccactcgacgaccnggtcgccgacggccacaancacggcggcgcgccattccgtgcaggg

SEQ ID NO: 395247 - DNA, 251 bp, Oryza sativa
  unsure (1)..(251): unsure at all n locations
cgtcattcatctcctcctccttatattaggcgcgcaccgcacgcgtgctcatcccgatcgccatggccgtcgacgcgcaccacctgcaccgcctcccaccaccgatccagcctgctgaatccatgttctcgccgaggcagccttgtttcggcgctgccgccggcgaggttgtcgtcggcggcgccggtggcgggntgatggcggggctttgccaggaggagcanctggtgcaggggtaccgccaagtgttt

SEQ ID NO: 395248 - DNA, 732 bp, Oryza sativa
acggaattctatcagctccagaccaagccggttcgtgagaacctcccgtcgcaatcttcgtcgttcgcgtcttcgaacggcagcagtgttactttctcagaaggattcgagtcgttgctgagcccggctggtgtcttgcctgatgttagcctgaatgattttgttgtgcagaaccaacaggctttgcagttccgccgcgggtttcaagaggcaagcaagtttcttcctgatgagagcaagcttgtgattgatgtggataagctctacagtggagatgaggggagtaggttccttggtgaggttagacaagagaagaagcttgtgaaggtgaagacagaaacctctgatgttgaatcagcaggtcaccgaggaaagaagcatttctatggtgatgacctggatgcggaggaagggaggtgcagcaagcattccgcgcaagggattgacactgaccaccttgtgagggatttgatggacaaggtcttgctatgcaatggtgagacatgctcaaaaggtgttaaggagttgcgtgaggctctgcagcatgatgtggcgaaacattcaggcggaggccatggcaaaggggccagccatggcaagggtcgtggaaaagaaacaacccaagaaggaggtggttgacctggagacccttctcatccattgtgctcagtctgtggccactgatgacaggcgcagtgcaactgagctcctgaagcagatcaggcagcatgc

SEQ ID NO: 395249 - DNA, 479 bp, Oryza sativa
  unsure (1)..(479): unsure at all n locations
ggncggnatcagcgtganttaagactcttgctctagtctctgacttcctccccatctcttttcaccatatatatctgaagcaaatgggagacaagaaacttacgaagctcaaggttcggggtgcaaacgacgtagaggtcaagagcgtacttcgtcaagagttcaaagaatctgtcgaccaggataatttcaaagtaaaagtagatggcagcagtttgaaggtggacgtgccagggactgtcgacgtcgggaagctctatgagcgcctcaagaaaatgtcatccagtgtcaagattggaatcagttgtgccggatgatctaatggcgaaaatggatcgatacaaaaaggaccttcagaacatgaggaaacagaaggaagctgtcgagtcaaagcaaatcaaacaagaggagggatacaagcttctccagcaagacacgacgaatggaggagcaagaattcactcaagtcgaaaagcaag

SEQ ID NO: 395250 - DNA, 737 bp, Oryza sativa
  unsure (1)..(737): unsure at all n locations
ccttttctcgttcttctttgttcttgctagctagctcgctattgctaactcgtttgtgttaatattctgggtcctttgcttaatggttggtgttggttttttctgatgaattgctcgatcgtttatgtgtcaggtttagtagatgcgattagccaggcagcagcagcaggtggtggtggctgcgacgatggagcatgacgtgcaccaccaccggcagatgatgcagcagcagcagcagcaggagatggacctgccgccgggcttccggttccaccccaccgacgaggagctcatcacgcactacctcctccgcaaggccgccgaccccgccgggttcgccgcgcgcgccgtcggagaggccgacctcaacaagtgcgagccatgggacctgccatcgagggcgacgatgggggagaaggagtggtacttcttctgcgtgaaggaccggaagtacccgacggggctgaggacgaacagggcgacggagtccgggtacttgaaggcgacggggaaggaccgggagatcttcagggggaaggccctcgtcggcatgaagaagacgctcgtcttctacaccgggagggccccccncggcggcaagaccggatgggtcatgcacgagtaccgcatccacggcaagcacgccgccgccaattccaagcaggatcaggagttggtnctgttcagggtgttcaagaagagcctcgagctancgccgacgngncgaacggcggtcg

SEQ ID NO: 395251 - DNA, 493 bp, Oryza sativa
  unsure (1)..(493): unsure at all n locations
aaaagccaaccaagaaagagttcgacgagggaatcgaagctcgaagccatggtggtgcaatccggcgagggaagcgtccatgtcgtcctcgtgccatacccgtcccagggccacatcaacccggtgctccagttcggcaagcgcctcgccggccatgacggcgtccggtgcaccgtcgccgtgacgcggttcgtcgtcggctcgaccaccaagccctgcagcctcggctcgtcgccggtgcgcgtcggcgtgttctccgacggctgcgacgagggcggcccggcggagtcggcggccaccgcggcccgtacttccagcggctggaggaggccgggtcggtgtccctggacgagctgctccgcggggaggcggagcgggggacgccggcgacggtggtggtgtacgacacgttcatgccgtgggtgccccggctggggcggcgccanggcgcggcgtgcgcggacgtttcctgacgcagangtgcgccgttgac

SEQ ID NO: 395252 - DNA, 383 bp, Oryza sativa
  unsure (1)..(383): unsure at all n locations
cggacgtgggtgcagttgcagcagcagcagtgtcttcttgcagagaaagaaggaaggaacacgaaggaaggaaggcggcgacgtcgagatggtggtgctggtggtcgccacgacgtccgacgccgcgtcggccactccggccgccgcgttcctcgccatgcccggctggacccccggcccctccatcccggacggcgtggagagcttcgcgaacggcgcgggggtgcggctgctgcggcacggcgcgggatcgtggaggaggacgacctggacctgcggtgggaggccgccacgggggagcgcgtctccgaggtggtcctcctcagccgccacacngccgtctccaaccgacccgcgntcaccgtccaacccatcggcgtccc

SEQ ID NO: 395253 - DNA, 660 bp, Oryza sativa
  unsure (1)..(660): unsure at all n locations
gcatgacccaacaactccagttcacatactagagataatgatatgcatacttgcaagggacacaccatatgtttgcaaacggaaagcaattaaatgagatggtgtctagttatgttatctgccagcacgaggttaggcggccctctgcttataacagttttaactggtaacacaaatcacaggatgaatacaacaactcggaaaacatcctaatggtgtacaacagatttttcacacattcagcggcgtcagatgaatttttaccagcctatacccacatcttctttgtggcttccatccgctcgagcaagccctggatatcggtctgcatccgcattttcatcttgaggtagtcgtagtgcgaattctccagcatcttgagctcctccagcttcttcctcctcttctcctctgtttcttggaagcatacttttgccagcttcgcagcatactcctcctctagcttctgagtcctgggagcggacaatctggcggtagctatctacttccttcctggcatcatcggccaacttttggaagngttttgcttcagcttccttgcatttcacgatggtttcgaggctagngtcatcctccttagaagcggtgctgaaatggngttcaatagagngtggctttgggctgggcttaagtgcatcg

SEQ ID NO: 395254 - DNA, 356 bp, Oryza sativa
ggagttcgagtgacatacgagcagcagccaacacaagctcgatcgaaagttctctcacaagttcagagtagcatttggttagtgacagtaactggtcagcgtctctcaccatgtcgtccaattttgaggccaacaacaacaacaatggcgagaagcagctggtctgtgtgaccggagcaggtggcttcattgggtcgtgggtggtgaaggagctcctcatccgtggctaccacgtcaggggaacagccaggggatcctgctgacagcaaggaatgctcacctgctctgagctggagggagccgacgagaggctctccctcttgccgcgtcgacgttctcgagtgcgccagccttcg

SEQ ID NO: 395255 - DNA, 698 bp, Oryza sativa
  unsure (1)..(698): unsure at all n locations
caagaaatcgctagatctgtactttctgactgcaggacaaaagtggggattaatgatcagcgagtacttgatgtagttgcttgtgcactgtgtaatttaactgagatggacaaggatgtactggtgaaggagctcacagaaatgtttacacctgaagaggtgcccttgtttgggtcaaattcagcatttgactgggccaattttcatgttcaggcattttctgatgaatccctttcttttgatgaggagtgttcaagaacctcttcagtagatggtgggttgcatgagtcaccaattacaaacaccggtagctcgatatcaaagactacgatgccacaatctgttcctcgtgtcttaggtgttggccagttgcttgaatcggcgttacatgtagccggccaagttgcgggagatctgtttcgacctccccgctcccatacggcacaatgaccagtcaatgcgaagcttgggatcaggcactaggaagaagctctcaagctggcttgtcaatggccatgactctacgccagacaatcctgctccaagccttccatctgcgcagattttcatcattcctaaagtaaattcatgcggtttcgagagcagcatccggccggctttggagccttcntcggcagttaaggttccaacccgcaagcccttnggcaaatttcttaanggttcatattgtnccccta

SEQ ID NO: 395256 - DNA, 315 bp, Oryza sativa
gtcacgactcgcgacatctgaagttgacacacctccaaccattactttctgttccagtgttgcacacacctccggccatttgggcgtcatgaagcaaaccgtcgtcctgtaccccggcggcggcgtcggccacgtcgtccccatgctggagctcgccaaggtcttcgtcaagcacgggcacgacgtcaccatggtgctgctggagccgcccttcaagtcgtccgactccggcgccctcgccgtcgagcgcctcgtcgcctccaacccttccgtctccttccacgtcctcccgccactccccggccccgactttcg

SEQ ID NO: 395257 - DNA, 462 bp, Oryza sativa
  unsure (1)..(462): unsure at all n locations
cgcctccctcctcgacgagctccgagcggcggcgatggcgagcgacggcgcggcggccacgcgcgaaggcgagcccgaagaaggccaacctcctcgacccccactccatcaagcacctcctcgacgagaccatctccgacgtcgtgaagagcaagggctacgcggaggacacgcggctgggcaactggaagctggcgattggggcggccgtgatcgccatcgctctcctcgcgcagttctacccgaagaagttcccccagaaccgcgagttcctcctcggctgcatcgcattatatgtggtgttgaatgtgggtgctgttgatactttagctataccaaggaaaaggatgccatttatgttcacacaccctcctgcgggttctttcaatagcactggactagttatatttttnaaatttaccaagattctcggatatntacactattanaataggcaattca

SEQ ID NO: 395258 - DNA, 547 bp, Oryza sativa
  unsure (1)..(547): unsure at all n locations
nnnnnnnnnnnnnnnnnnnnnaatgcagacgaaagagaatttcccttatgcatctctgttccattgcatagaccattccatattattactacttacagattacaaagcatcatagtgaactagatagaagagcacaaaacaaatcctactctcttctttagagcaagatccagcagttcttaccctttatgcatcaaggttctccatctgaatattgctcttgagaggcacgtattcaccaaggtaccctccgagatgctcatacaatgcgcttcgatcaatctgctggttgtggaaggccttgcaagcgtagtaaaacacgctctgcacgagtagccccagcaaattgacgcagacaagaacagacaccagcacagcaccagcaagcacccgaccgggcaagctcaggccaaggctcccctcctcgccgcggcccttgactacggccgcgcggaacagcacagcggtaaaccgcaggcggcgaagtaggagacgacgagcacgccggccgtgcgggtgcgcccttgaagcagttgcttgctttttg

SEQ ID NO: 395259 - DNA, 596 bp, Oryza sativa
  unsure (1)..(596): unsure at all n locations
aaacaacaacaacaaaaaaaaaacaacgtggggtgtgagctctctgaacctcctagcttgcccgagacagagagaaaaagaaagcctcatctccggcccctcttcctccttgattccggtggctcgccgccggtgacgggagggagaggggtcaggctcaattgcgtctccttcgtatagtagtttagtcgggttagtctcgtagtcaagttagtctcgttctatgtccttcctgttctttgtctttggtcctctatgaagagtccagtattcccttcttcagatctgaaatattgtgggtggatcagccagggaggtcggtctttgctgtgccagacctcgatttcgtcggccctagcgacgcctgatttgtggaaaattcagctacagtgccggtggccgaaagtcttcaagcttttgaggtcgctggccatagtttgcggtggatctggatggcttcaaccgatttccgcgacctctttgtccatctaatccttggcgctgtgcccttcctcagcgatgcactcagncgngtcgtgtcccggtgagggttgggctcacacatgncagaatcgtcgtcatatttggtgggcttt

SEQ ID NO: 395260 - DNA, 462 bp, Oryza sativa
agagaaagcaaagcaagcagccccgggtgatcaacaacctcaaagatggagccggtgggcagcatcgtgggcgcggtgccgaagtggcttcggcgatcgccaaggcagttaagacggctcgccggaacaagaccaggtgccgggagctagcccagcgcgtgaaggaagtcgacgacatcctgagggagtacaagaaggtggccatgggagacgcggcggcgacgacgcggaaagattctgggccgtctcaaggacgccctcgacgacgcgctcaagctcgtcgagtcctgcggcaggagcagggacggtctgctcttcaggctccacaggttcgtggccagcgacgggctcgccgccaagctcgatgacgtcaacagtaggatcaacaactgcctcatcgccctccaggccgttcaacgttgcccacctacagaagaagatggaccgccaccttcgccgtcg

SEQ ID NO: 395261 - DNA, 497 bp, Oryza sativa
  unsure (1)..(497): unsure at all n locations
aacctagccagctagcaaccgacaagccaaggcgacggcaatggcgccgacgacgacggccacggnggcggcggagcaggcgccgcgctcaagacactacgaggaaggcggtggggctcgccgcgcacgacgactccggccacctcacacccatccgcntctcgcgcaggaaaactggagatgtcgacgtcgctataaaggtgctgtactgtgggatttttnactctnacctgcacaccatcaagaatgattggagaaacgctgtctacccagttgttgcagggcacgagatcaccggggtggtgaccgaggtcggggaagaacgtggcgaggttcaaggccgncgacgaggtcggcgtcgggtgcatggtgaacacctgcggcggctgcgagagctgccgggacgcttgcgangaactactgctccggcggggtcgtcttcacctacaactccgtcgaccgggacgncacgcgcacctacggcggctactccgacg

SEQ ID NO: 395262 - DNA, 254 bp, Oryza sativa
  unsure (1)..(254): unsure at all n locations
catttctcatccatcactttctttgtccatctcgacctgagaattgaatactcctatcagagatgggttctctgatggctggctggaactcaccagttcttggtgatgagaagaaagttcggctgatgaggaaccgctcgctgaccagggaggaggtggacgcgttctggaggcgccacaaacggaagcagccaccgtcgtcgtcgacgttcgtcggagcccaacgtcaccacctcgccgntcgnctctccccg

SEQ ID NO: 395263 - DNA, 485 bp, Oryza sativa
  unsure (1)..(485): unsure at all n locations
agagttcagatcaaacgccgaagcaattcttccgcaagatttcgagtgatcccatctcaatccaagctaaaccgagagattttgatttgttgctgtagattgattgtgtgaggagaggaggagcagccatgaatccggacaacttcacgcacaagaccaacgaggcgctcgtggcggcgcacgagatagcgtcggaggcggggcacgcgcagtgacgccgctgcacctggtggcggcgctggcggcggacaagggcgggatactccggcaggcgatctcgcaggcgtccggcggggacgccggcgcgccggactcgttcgagcgcgtggtgagcggggcgctcaagaagctgccctcgcagtcgccgccgccggacagcgtgccggcgtccacggcgctgatcaaggtcatccgccgcgcgcagtccgcgcagaagaagcgcggggactcccactcgccgtcgaccagctgctgctgggcctnct

SEQ ID NO: 395264 - DNA, 463 bp, Oryza sativa
  unsure (1)..(463): unsure at all n locations
atccgaacgctctagatcttatcaagtggcgtcgccggcgatgtgcgaggaggcgacgcgganagggtgctggtggtcggcgccaccgggcggctcgggggatgcctcgtgcgcgccacctcgccgccggccaccccaccttcgcgctcgtccgcccccaccacctcgctgtccccgactccgccccactcacgtcgctcgccggcgccacggtcgtgaagggatcgctcgaagattacccgagcctgctggaagcggtgcggcaggtggatgtcgtcatctgcgccgtgcccacgaagcaagcgctcgagcagaagctttctgattcgggctattaagggatgcttggggttgccgttgaaaaggaggattttantttccaagccgggaatattggactttgattcccacaaaaggttcaaaattttttggcaatngaccaatgggntttctattganggaa

SEQ ID NO: 395265 - DNA, 481 bp, Oryza sativa
  unsure (1)..(481): unsure at all n locations
gcaggagggtgacggtgatgaccngcggcgcgccannccgncanggtgcntgttncggatggaggagcaggggttcctggtnatccactcgtacgggctgacggagacgtacgggccggcgacggtgtgcacgtggaagccggagtgggacgcgctgacggcggaggagcgcgcccggntcaagtcgcggcaggggctccaccacgtcgggctggaggcggcggacgtnaaggacccggcgacgatgcggangtngccggcggacgggcggacgttcgnggaggtgatgctccgggggaacacggtgatgagcgggtactacaaggacggcggcgcgacggcggaggcgctcgccggtcgggtggctccggtngggcnacctggcggtgcgggaggaggacgggtacatcaagatcctggaccggtccaaggacatcatcatcttcggcggggagaacatcagcacggtcgaggttgaagt

SEQ ID NO: 395266 - DNA, 462 bp, Oryza sativa
  unsure (1)..(462): unsure at all n locations
gcttttagttcaaactgacagcggacgtnangaagcgtcggaggagatggaggttgcgacggcgacggaggcgtcggcgccggcgggaagcaggcggaccacccgttcccgtggctagacctggccatctccgagccctactacttcctccacctcgtcgccttcttctcctacttcgcggcccgcagcacggtgccctcggccgacgacggcctcctcctccgccgggagatccaggcggtgctcacgttcctcgtgctcttcgtcgtgaagatcgtgaaanaggaaaactgggaaacatgcattgctgattcactgctctatgctaagggattattgctggcagttactttggttatcgattattggctgactgtctcctacttactgggatttgttgttatatatgctgttgctaacagccaccttatgatggtcttggtaattcaaatcatttgactc

SEQ ID NO: 395267 - DNA, 298 bp, Oryza sativa
cttagaacagatcctttcatgcgctcagaatgaaaagctgctgccagaaatcagtatgaaagatgaagcagaagcaccgaccgcgcccaagaataaccagacaattgctgttcttacaacttctctgagctcctggtacagtgatcagatccagaagaaagtacagtgagcacccaacagtcgatggaaccagggtagaagtataccagccgagccatgaggagtaccagagatcaaagaacaagaagcacaacatgaaagcactggccgagatctacctactcagcatgacggacgt

SEQ ID NO: 395268 - DNA, 382 bp, Oryza sativa
  unsure (1)..(382): unsure at all n locations
cttccgatgaggaattagttagctctcgaacagtagtacgagatttgtgcaagttgtggtcctgtcgtcatcctgtggagttgtggtgagtgtttgacgaattttttttttttttggcggctcgattgcaacccgcggcccgcaacaaatccgacgccaaatcggacacggccggcgactccggcgacccaccaccacacaccaatcctcctcctcctcatcgccgcctgcgacggcgaaggcggcgagcgatggattccctgggcgtgctgctggtggcgccgttgaacgcctacctgggagcaggagctgggaccggcgggtgccgcctctttccgctctnggagttccccagccgaccgccgcgacgactaacttcggg

SEQ ID NO: 395269 - DNA, 760 bp, Oryza sativa
ggaaggtcattaaggagaataaagaccttgatctaccagctcataaagttatggtcgctactgtacgctgtgaggaaatcggtaatgagaaaattgccagttttacagctgatgaggagtggcaacaatttgaggaagctgttcaacatgattacgtgcctgggtttgggaagaagatcagcaaccttcttgacagatgcttatcagagtatgacatggaggctatttattttgatgaaggtgtcagaacttcgaaaaggcaccaacttgagtctaaacttttgcagcttgtcaaccctgcataccaaaatattttggatcatttacggactagaactttagaagtatttaagggagtcctttgacaagtccctaggaaaaggagggttttgctgttgctgctcgtgactgtactaaggttttcttggagaagtttgacaaaggatccgaagatgctgctatccaacaagtgaaatgggacccatcaaaaattaaggataagcttaagcgtgacattgaggcgcatgtggcatcagttcgtgccaaaaaactatctgaactttgttccaaatacgagggacaacttaccaaggcactggcagaaccagttgaagctcttctagattcagccagtgaaggaaacctggccagcaattaggaagcttcttcaacgcgagacaaaatctgctgtttcgggttttgaatctgccatggcatcttttgagcttgatgaggtgactcagaaagaattactttcaaa

SEQ ID NO: 395270 - DNA, 323 bp, Oryza sativa
  unsure (1)..(323): unsure at all n locations
cggacgtgtntangactaattaagtgggtgggttcgcttgcttgctttgcttttgcttggagacgggagcgacgctggcttcagcgattggcgtggagaagctagattgttggtgcgactttccgaccgcgaaaatagtagggctggcaaaccggtggccggccggcgatccggccgaaggggatggggagcatcgacggccactcgctgcagcagcatcaggggtactcccacggcggcggcgcgggagggagcaacgagggaggaggaggcgtcgccgccgcccggcgtggctcggctacggngtctgcggnccgccggcc

SEQ ID NO: 395271 - DNA, 460 bp, Oryza sativa
  unsure (1)..(460): unsure at all n locations
cggagagaaaaaaaaagggaaaaaaaaggagcgtagaaaaaaaaatttaccactcgcctcgcctgcacaaatctcgcgcacgggttggcggcggcggcggctcaggctcgatccgcggccgaaaccctaggtggtggtggtgggattaggagttgaggtggggatggcgtcgccgaggaacgaggggttcctgacgcaggaccagcgggagaagctgcggatcgcggtgcagaacgccgagacgctgtcgctcgcctccccgcgctcgccgaccgggggctccacctccgcgctcctgcagcagtacgagcagcagcgtgcngtcgccgcgggcttgcggccaggggcggcggcggcggtgggggtgggggtggggtgaggcacgtgcggcggtcgnattccgggaagaccattaaggtnaagaaagattgttcttgttgcaaagtaccttggggaaaat

SEQ ID NO: 395272 - DNA, 316 bp, Oryza sativa
  unsure (1)..(316): unsure at all n locations
ctgttatccttcgcttgtccatggacatggctgccccgactgttccctacaggaccacggctcctccccttccagagtccgacggccatgaagacggctcatcagggggcatggtcctcctcgacaggtggtgcctcatcgctgacctgcccaacgccagcaccggcgtgggcaccagaggcaccggcttgcgcatccaggcgaccttccaccccgcccgcccgccgcttctctcccgcttctgcgtccactgccccggcctcgacttccgccgcgtggtgcctaagatcatcgnctccgacggcgatctcgtcct

SEQ ID NO: 395273 - DNA, 297 bp, Oryza sativa
  unsure (1)..(297): unsure at all n locations
gntctccatcccgccagcagcggcgccggcatcctgcttccaccgcgtcctcgcagtagtagatagatctatttgcctggctctcagggaagagggtaggagtntggcatgtcagggatcctcgcgtgggcggccgacgtggtcgcggcggccggcgccgccaacgacgacgaagctgatgacgctcgggcggtggcgtccgcggccataaccccggagcagcgcctccttgccgctgacctggatgccaaggcagcatcgctcgggcgctcgatccacgacctccgnctccgggtg

SEQ ID NO: 395274 - DNA, 456 bp, Oryza sativa
tccattcagtttgcttagcgagttaggggggaaaaaagctacgaggttttcttggatcatccgacgaactcgagtgattgattgatttacccaagtctgttattgtagtgatttacccgaggttttttgttttcgttttcgttcttgcgaggggtgggtgagagattacaggggggattttctccgacttggaaggagcagagaaagatttgcgtttagaagatctgaggtcaggttactccactaatttctaccacgaaacagagtagagtaggatttgacatcggaaggggaaacaaaaatggcaattggacaggcgagacgaagagctctctctccacgagctttagcttctcttgcagcagcacgaggatcctggggaggaagagggtcgccgtcttgccgcgttccgcccccctccgggggcccgaacttgccggtcgggacctttttttt

SEQ ID NO: 395275 - DNA, 332 bp, Oryza sativa
  unsure (1)..(332): unsure at all n locations
agaactagtcaccaacatcccccccccccccggcattgatctcgccttcatcctcgcgcgattcttgcgaggaattcgattcccggcgatggccgccgccgtcgtctgcntcaccggcgccggcgggttcatcgggtcgtggatcgtcaagctcctcctcgcccgcggctacgcgtccgcggcacatcccgccgcgccgatgacccgaagaacgcgcacctgtgggcgctcgacggcgcggcagancggctgacgatggtgagcgtcgacctgctcgancgtgggcagcctccgcgccgcctttcgncggcttgccaacgggggtaatccaa

SEQ ID NO: 395276 - DNA, 342 bp, Oryza sativa
gtgaagcgggaggaagaagaagacgagaagaagagaaagaagagaaaagggaataggcactgacaggcggcaactgcgcatagatcgattgatcggtcaagaagatgatcatatcgcaatggtgagaaaggcggcagcgatgacgactggtggagttgtggtgttagtatcggtggaggtgacaagacaacgacactatgcggctatgacgacatgatggctaacatctcggcagagacgatggttgtgggttggtggtgttgatcaaccaactaaaagcagttgtgtgccatcatagccgcaacagcggtacccatttgacaccgaccatccccaaaggtc

SEQ ID NO: 395277 - DNA, 463 bp, Oryza sativa
tgcaggtatggagtaataactgaattgcgaagaaaattatccctacatcttgtaagtatgggtttttctgtactgcaatgtattcatgaagattatcatgactcatgaatgaaaaataatattaagagcagagatgtgcggtaaaaaatgtgatttcttgcataatacaagtggggatatagtaaaagcttttacattagtactagagctaaattctgaaattgacaagtacatcaacaatacacaaaaatttgccaactaaattaatcgtacactaagcttttacattagtactagagctaaattctgaaaatgacaagtacatcagcaatacaccaaatttgacaactaaacttatcatacactaggcactacagtgggaccattaacatgcttctcctttattcctcagctagttctttggatatttgggtccccatagcttcatgccttctcagcttct

SEQ ID NO: 395278 - DNA, 815 bp, Oryza sativa
  unsure (1)..(815): unsure at all n locations
ggnanggggccggagccaagcggacgtngganccggtgattcggatnccggnnnangtggtggaggaggaggtnnccaccgtnccgcgcggcagctagggcaccgangaggaggagaaggacngcgtcgggacnaggtnggcggtgctcgtcgcgggctcctccggctacggtaactacaggcaccaggctgatgtatgccatgcataccagatattacggaagggagggctaaaggaggagaacattgtcgtgtttatgtatgacgacattnccaataatatacttaacccgagaccaggggttattgtcaatcatccacagggtgaagatgtttatgcaggagttccgaagattacactggagacgaatcactgcaaaaaacttttacgcggttctcttgggcaataaaactgcagttactgggggtagtaggaaggtcatagatagcaaaccaaatgaccacatatttatcttctactctgatcatgggggtcctggagttcttggtatgcccaatctgccatatctttatgctgctgacttcatgaaggtgttacaagaaaaacatgcctccaatacttacgctaaaatggttatatatgtagaagcgtgtgaaagtggcagtattttcgaaggtttgatgccagaggaccttaatatttatgtcacaacagcgtctaatgcagaagagagtagttgggggacgtactgcccaggaatggaaccatcgcctccttccgagtacatcacctgcttaggtgacctatacagcgtttcttggatggaagacagttagactcacaatctgaaggn

SEQ ID NO: 395279 - DNA, 733 bp, Oryza sativa
ctctctcgcccgcttcctccccatttttctcgcgcggaacccaacccaaacccacgcggcggcgtctctcccctagggtttggtccgcgcggcctccgttcaccggcggcggcggcggcggctgcggcgatggcggggcaggagcggaggacgatcgatctggaggagggatgggcgttcatgcagaagggcatcaccaagctgaagaacatcctcgagggcaagcccgagccacagttcagctccgaggactacatgatgctctacacgacgatatacaacatgtgcacgcagaagccgccgcacgactactcgcagcagctctacgacaagtaccgggagtcattcgaggagtacatcacctccatggtcttaccttcattaagagataaacatgacgagtttatgctgagggaactagtaaagaggtggtcaaaccataaaatcatggttcggtggctgtcacgtttcttcttttatcttgatcgatacttcatctcacggaggtcgcttataccacttgaacaagttgggcttacttgcttccgagatttgatataccaagaaatcaaaggacaagttaaaggtgcagtgatagctctgattgacaaagagcgtgaaggcgaacagatagacagggccctgctgaagaatgtcctgggcatatttgttgaaattggactaggcagtatggaatgttatgggaatgactttgaagatttcttgcttaagg

SEQ ID NO: 395280 - DNA, 1257 bp, Oryza sativa
ttgagagttgagttgttgttgttgaggaggaagtgaagaagaggcagtagaaagaagtagcagtagcagaagagaagggaggaagggaattggatagatggcggggacgcggcgtgcggaggaggagtacgactacctgttcaaggtggttctcatcggcgactccggcgtcggcaagtccaacctcctctcccgtttcacccgcaacgagttctgcctcgagtccaagtccaccatcggcgtcgagttcgccacccgcaccctccatgtggagggcaagataatcaaggcgcagatctgggacaccgcagtcaagagcgatacagagctatcaccagcgcttactaccgtggagctctaggagcagtcctggtctacgacgtgagcaagcccacaacctttgacaacatcagccggtggctcaaggagctccgcgcccacgcttgatgcaaacatcagaatcatgctcgtcggcaacaagactgatctgaagcaccttcgggccgtcgcgacagacgatgcgcacaagtttgctgagagcagaaggcgctgtcctacattgagacttcagctcttgagggccacaaatgtggaggagggcattccagctgattctcggtgacatttacagggccatcagcaagaagcccgtggcatcagatgaaggcggggcaggtgcccgctggaggtgttcaaggaagggaagacgatcaatgtcgctgccggtgatgcccaatagtgaaaagaagcaatgctgctcaacttagaacgaatccttcagtttcagatgtccatttcgtgtaccttgtgtggtgcttgtgattgttctttctttttaagtttattaaagcttcgttgattcattttgtcagataaatatttaccttgctatacctgacagtcatatattacctaaagtcagttaattactacatatacagtagtatcatgtcaagatcattggttcctcctgcattactcttgtccattttttcagggttgcatcagtcaacatcctgctaataagcagaaactgacaagcctccaaacaccagcaaatgacaagagtgacaagcttgcatcaagcatcatgatgttcagttccaacatcatgcatcatatatattaaatttaggcttataaactgttttaacaaaccgatgatatcacaaactgtggcaagtaacgaacactttgtgcacgcatgatgatgttgtctaatgctaaagtatcatccaatccaaaaaaaaaaaaaaa

SEQ ID NO: 395281 - DNA, 471 bp, Oryza sativa
  unsure (1)..(471): unsure at all n locations
ctccacgcctccaatcggccaatcgccaattcgcaatccattccccccgaaaccctaaccggcgcctctcctccacgcgccgcgccgcctcccgctcctccctcccagcagcgccgccgtcgtcgtccctctcaccggcgggtggcggcgatgagccttcctcggcgtcgtgcatccaggcaccaggtcaccatcaccctcggccgcagcggtcaggttgtcaaaaggcgagctgtatctgacattgataatgatgatggtgtgcacttaggaagaaaacgatctgtgagggacagactaggaaataatatggttggttctgagtcgtatgatggccagcagcgtaacaaaagacgacagatagaaaccaatggtttgcagcatggagataatgattgccaggtcggtaggggttgatttgagattgaagcttatgaagaaagctttgtctagcaatggtggtgcaganca

SEQ ID NO: 395282 - DNA, 337 bp, Oryza sativa
  unsure (1)..(337): unsure at all n locations
gccgagacagcctcgcctttgccctactcgtctccttccttccttccgccgccgccggcgccgccgcgagggccatggggtacaccaaggagcagctcctcgcgcgactccaggagctcaacattgaattctcgtgctacgatcacccggttgtgttgaccggtggaggaacaggccaaacatgttgggcatttaggaggtgctttgagtaaaaatttgctactgaaggacaaaaagcataggctgtacgttgtttctgcccttgntggcaccaaagttgacatgaaaattttatcacagcgtcttggtttgggaaaaggtngtctgcggatgggtt

SEQ ID NO: 395283 - DNA, 470 bp, Oryza sativa
  unsure (1)..(470): unsure at all n locations
cagaggaaaaccccaagccgcaagcccccccgccgcgagtcgtcttctcatctctcctccgccgccgccgcctgctgctgcatctctcgtcgtcgccggtgagggaagggaggggaggggggagggcgtgatggcggcggtgagggaggtggggtcgaaggcggactggaggcggcggcgggaggggcgcgggccgccgcggtgcacttctgggcggcgtggtgcgaggcgtccaagcagatggacgaggtcttcgcgcacctcgccgtcgacttctcccacgccgtctttcctccgggttgaagcttgaggaacaacccgaaatttcagaggcatatggagttacagcagttccatattttgttttcttgaaggaaggtaaaactgttgatactctggagggtgcaaatccagccagcttngccaataaggttgcaaagttagctgggccttccanctttgctgagtct

SEQ ID NO: 395284 - DNA, 376 bp, Oryza sativa
gccatgcgtttggtggatctgaaaaaaaaaatcctgattcctccccaaatctcacgaattctcatcttcgcccacctctcctcttgatctcttctaccaagaattctctgcaggggaagaagaagcagcggcaaattgtcatggcgaccaaggttgtcgacaagctgacggtggcggcctcccctccggcggacggcggcgtgctcccgctgaccttcttcgacgtgccgtggatcttcaccggcccggtggagcgcgtcttcctctacacctacccgcacgccgtcgaacacctcgccgcccacctcctcccctccctcgcctcctcgctctccgccgcgctgcaccgttctacccgcttcttggccgcgtccgg

SEQ ID NO: 395285 - DNA, 695 bp, Oryza sativa
  unsure (1)..(695): unsure at all n locations
aatgaactatatgtggcagcaaaggaagctttgtnccagcattttgaggaggtcatttcagaggagataacaaactgtttgtgcattggatttgaagatgatattaatcaagnacgaattcgnacgcntgttcacgcaccagaaccatccagtcctcctggaatatctgtgcatgaaacgcccagtcctgctgaaatgcctcgagatgaaatttcggatatggctgaaatggctcgagatgaaatttcagatatggctgtagatacaataccctgncctgctgatatggcggcatctggaacatcaacttgttcctgaagtgacaacagacaaactgatccattccttacgtgggacatcaatcgccctctgcatctcatgcaagtatatttgaaaagttggatgcacatgaagaagctgaattggatgacagttttgatgaggtgcctcctggaacagaggctggcttagcttcattggtgattatggagaaaaacaaataccagccctcaaaatcagtagactcagtgcttgacatttatagatatactagttgggcattcttcaggcaaatactgcatgagagtttaatgaaagagtnggcatctctcttctcaggtgctctcagcaattgttttgactcatgggattccagggaaaatatttgtggctaaaaccatgggttgtacattggg

SEQ ID NO: 395286 - DNA, 392 bp, Oryza sativa
  unsure (1)..(392): unsure at all n locations
ctttctcttctcatcatctatatcacgatcgatcacaaagaggttaacagtaacacatggggttcggctcgagggagatggcctgcgcgctcgtggcgctggtgctcgggctctgctgcgtcggcggcgcacgggcgacggggaggatcgacgaggggctggaggtgatgtggggcgacggccgggggagcgtctcgccggacgggcaggtgatggcgctgtcgctcgaccacacctccggctccgggtggaggtccaagaacacgtacctgttcgcgcgcntcgacctgcagatcaagctcgtcgccaacaactccgccggcacggtcaccaccttgctacttcatgtcggaaggggagttggatatccacgatgaggtggacctggagtt

SEQ ID NO: 395287 - DNA, 668 bp, Oryza sativa
  unsure (1)..(668): unsure at all n locations
nggtcgcgngatcgntngacntccgtgctcggcgaggcccaatatttcggcggaggtgacgcgggcgggggcggattgtctcctcgccggcgttcagttcagtcgccggataccgtcgttatattcatgtgcatcctcgtgcactcctgtgtccatcttatatggtaccaacaagaagttgaagtgtttgggtgatcgctttggggaaatggaaggcagcaacccacctggtaatatgacacagggaccttcctatgggagtttagatttgcatggtatctccaagcaaatgcatcctccaaactcaggaaatcagggcttcaaccagcctcagataccagggaattttaccattcctatggatagggttacagagcctgataacatctctgatggagttcagttaggacaacatgggaagattgcccatcatcaccatcaccacagacaccactcaaagaaccatgggagtgatgaagaggagcacgatatgaatgaggatgctgctgatggcaaagacaagaagggctctccatggcatcggatgaagtggacagattcaatggtgaagcttttgattactgcagtatcctacacaggggaggatcctggagctgatttaggcggtgggaggaggaactattcaatgatgcaaaaaaaaaaaaaaa

SEQ ID NO: 395288 - DNA, 339 bp, Oryza sativa
  unsure (1)..(339): unsure at all n locations
cacgtacttttacctttttttaattcacttgaaatgacacgccaaccttagccattttgacacttagccagacatcatcatcatccctgacgaacggtgaattggattatctacgcaacatttgcaattcggtccaagaaagccttcaaattacgatccgacgagccgaccctcggcgaccggcctcccgccaccttcgccttccacgccaccgagctccggcgcacggcggcagcccttccgtgtccgccatgaccgtctcccacgcaccctcgctgagctcgcacagcacatcagaccaaccctgtcaggncagccggtggcggacggcaacgcgac

SEQ ID NO: 395289 - DNA, 917 bp, Oryza sativa
  unsure (1)..(917): unsure at all n locations
aattcggcacgaggnnaaaaaagagctcaagagtcttcctgcctattctgaaatgaccctcaaatgcaggggaagtgccacctatcttcatgaggacaaagaacatatggacttcaaaacttttgatcctttgtatccaaagaaaccacagacggcatgctatgagatggatgcaccttggcaagaaaacaggaagtctcggccatggtggcaggtagctgaagcggatggtttggcttccgtagttgcagaaagtgaaatgcacaacgtaggcaaaaatgagctgccaagacccacccaacgtgctcatggttcaaaattgaacaaccatgaaaacaaggatgattatggaccttatactggcaaagaatcacctccagtgcagtatgacactatgctgtgcagctatagcatttcaagcaccaatgagacaaattcatctgatggtggaggctggcaacatcaaagaaatgatgcacgtgggggtacacaggattcttgtagttctgatgatcgcacaccaggcagcaagccgacatatcggagtgccgctgagaggacccagttgctggatgcactccgccattcacaaacacgcgcgagggaggctgagatggctgccaagaaagcttatgatgagaaagaccatgtcatcaagctattattccgtcaggcctctcatctctttgcgtgcaagaaatagctgaaaatgctgcagctggagaacatatgcctccagctcaggttgaaggaacaccagatagcagccatgttccctgaacttccctgggatcatgctcaaaggaaaggttacggcagggcaagaaaggaaggatgggacaaggaggaaggaaggaagcaggacaaggacagcattttcgcaaggtttcgtgttttcggtcgtnngggatcgttgt

SEQ ID NO: 395290 - DNA, 405 bp, Oryza sativa
ctcgctctcgctctcgctcgcgcacatcacatgcgcctcctcccgttataaggagagccccgcgccattggccgccccactcaccctgccatggacgggtagaaaggtacagtggcggtgccgacacgcggtggaggaggaggcggcggcggcggcggcgatggggctgctgtcgaacagggtggagcggtcggagatcaggccgggggatcacatctacacatggagggcggtgtacgcctactcccaccacggcatttatgttggaggaagtaaagtggttcattttactcgaaagaaagaagcagaaggatcagattcatccaattccacctccagcctattattagagccttcatcagagtgcccaacgttcccagattgtggtttcagctgcctgatagt

SEQ ID NO: 395291 - DNA, 475 bp, Oryza sativa
  unsure (1)..(475): unsure at all n locations
cacaaaggttgctactaccaccatctagtcctccagtactctgtgcattgcaaggagagcagagtaaggcaggatccatggtgaacttggtggaagcgccgaagccgctggtgtacttcctcctgaggagggcagggctccggcagcacaccgtcgacgtcgacggcgccggcacggtgatcagcttctggatgcccgagggcaaggtccccaaggacaggggcaccgtgcgggacgtcgcgcccgaagcgaagcagcagctgacagcggcaagcagcagaaggtggcggcgaaccgcgggcaaacggcaaaggagaggcccgccgtcgtgctcgtgcaggctttcgcccccgagggcgtcgtcacgtggcagtttcaggctngtgttcttgcgagacttacgacgtgtacnttccggactgtttactttggcgggttgacgtcgccttgacggaccgtcgccgggttcaggcga

SEQ ID NO: 395292 - DNA, 465 bp, Oryza sativa
cccacgcgtccgctcagcgtacgatttcaggatctctcttgaagtatctatctaagctccaggttgatgaagaacctgcgatcaggacaaacactacaattcttcttggaaatattgcaaactacatgaatgatgggactaggaaaagggtattgatcaacgcatttactgtccgtgcattacgtgataccttcccccctgctcgagcagctggcatcatggcgctaagtgtcactagttcatactatgaaatgacagagattgcaactcgtattctgcctaacgttgttgtcctcacatttgatccagatagtgatgtgaggaccaaggctttccaggctactgatcaattcttgcaaatagcaaaacaacatcatgaaaagcttactatgggagacaacagcgcagccggaagctactggtatccagttaaagcctggaatgctggttacttggtggctatga

SEQ ID NO: 395293 - DNA, 436 bp, Oryza sativa
  unsure (1)..(436): unsure at all n locations
cggacggnnntncntgcaccctcttttacatccgctaccaccctcctacacgctagcccactagcgcganacaacaaaaggcggcaatgtgacatgggccatgtgcatggcagctcaaggaagctgcaggggaacggctgcacggcaagtgggagaaagcatgcatcaacaagattgtctggactcgtgtccagccgtccattgaaatggtgacatttgctgactttttttcctcttttggttcctgtgttgctgccaggggattcaaacaaggaattgccttggataatagcattcagttatgtatgcatacaaggtggtgaagactatatatgtgaagacctttaccagaaaatgnttctaaaagagaagatttaaggagatttttgaaaangcattggagagggcacaaaaggtcgtttttgccacctgctaa

SEQ ID NO: 395294 - DNA, 508 bp, Oryza sativa
  unsure (1)..(508): unsure at all n locations
ccaacacaccactgcaaacccatccgcctccgcaccgcatcgcacctacaaattgtgcacgctgcaccgctcaaaaaaaagaagaaactaaagtcgtacgtaggacgcggcgtgcgagcgttggtgcggtgcgcggcggcggcggggaagtagtgagagcatcgatcatgccgggggcggcggggtactccgggtcggtgaagctgaagtacgtgaagctggggtaccagtatctggtgaaccacttcctgacgctgctgctggtgccggtgatggcggcgacggcgctggagctggcgcggatggggcccggtgagctgctgtcgctgtggcggtcgctgcagctcgacctcgtccacatcctctgctcggtgttcctcgtcgtgttcgtcggcacggtgtacttcatgtcgcggccaaggccggtgtacctcgtcgactacttctgctacaagccgccgccaagttgccgggtgccgttcgcaaggtcatggaganaagggcttat

SEQ ID NO: 395295 - DNA, 473 bp, Oryza sativa
  unsure (1)..(473): unsure at all n locations
cggctggttcgtctcgcgccgcttatttatttttttttgttgtgtcccgcacataaaattcgaaacgcgataggaggaagagacggcggcggcggcggggggcgcgacacggcggctagggtttcctcgcagcgacgcgacccgcgcgaggtggaggcgccgctcgcatcgcacgcgcgcgcgccccggccgggggcaggtggctgggcgccgccgttgatgccaggaagtcgaaatctccggtgatctccctctgattccggcagccgcatcaccatgccgaccatcacgcactacgtcttggacccgttactggagaccgggtcagctacacagtcccagaaggctgcttccaagccgnctncagctcctccccttcctcaggagaaggccgncgagaagccgatacctgttcggtggttccttttaagagancgaaaattttttggcgaagttntacggcaaggcttaaa

SEQ ID NO: 395296 - DNA, 438 bp, Oryza sativa
ccacttctcatctgaagttcagacacacacacactgacacaaacatatatacttacatataaatacagatatatataggtggttagctacctgtatagtttatacattagctagcgtatgtgttgttgttgatcatcgatcgccggcgacgacagggagagatcgatccacgatgggttgcctgctgcggcggctgttcccgttcctggtcggcacggcggtgggcgtgtacgcggcgcagaattacaaggtccccaacctccggggcctcgccgaccgcggcgtcgacgcgccaagcactacgaggaggcctaccgcaagaagccctccgccggcggcggcggcggcgggagcaggaagaagctgaacaagaccgtcgagatcgacgacgacgaggagtaaattagttgatactgctagtgctagctcactagttat

SEQ ID NO: 395297 - DNA, 370 bp, Oryza sativa
  unsure (1)..(370): unsure at all n locations
gtggttcatcagcaatggactctgggaagcctccaagagccagcgaagtcggttctggacagagtcaatcagggttttgtttcgggcagaagagtgattgactctgggaagcctccaagagccagcgaagtcggttctggacagagtcaatcagggttttgtttcgggcagaagagtgatgctaaacaagcggcgaagacgganaggggnanacacggccagccggaggaggaacggccggaagcagaaggtgtcgtcgaagcacgacgtcttcgtctgaggacgagatgccaggttcgcagtggcacggcgtggcctgaccttttgttcgtgacttgtttggtcctttnatgttccggagcaccgagct

SEQ ID NO: 395298 - DNA, 428 bp, Oryza sativa
  unsure (1)..(428): unsure at all n locations
ctagaaatcaaggctgcggaaacctctcacgactcacgagcgctctctctcgaaacctcacttgctacagtaaatcccctctctcgacccctcttcctcctcgattccggcggcctcgtcgccggcggggggagggagaggggtcgtcccccctcccctagtatagctaagtagccgggctagtctcgttaggtcgggttcttcccgtttcctcctcgttggtgtggtatggaagttggagatggaggcggattcgacgcggatgcagctcgtgacggcgatggcgacgcagaatcgatccgagacgacggcagcaacgcggatctggcctgcggtggtggcggcggctcggatgcgacctncggcggcgacaagggctcggatgcagtctgtggcggcggcggcgacttcggtttcggtcaacttcg

SEQ ID NO: 395299 - DNA, 658 bp, Oryza sativa
  unsure (1)..(658): unsure at all n locations
acgcgctagtgtgaaaccgccaccgccaacccaaaccaaacaaagccgcgccgccgatctcgccatggcgcacagcagccgcggcgagttctccgcgtggcgccgccggggcgaggaggggcgcgcgcggaggcggagcggggggaggagggggaggcggtgttcgcgacggtgcaggcggcggtggacgcggtgccggtggggaacagggtgcggacggtgatccgcctcgcgccggggacgtacagggagcccgtctacgtcgccaaggccaagaacctcgtcaccctctccggcgaggccggctcgcccgaggccaccgtcatcacctgggacaacaccgccacccgcatcaagcactcccagtcgtccagggttattgggacaggaacgtttgggatgcggaacaattattgtggagggggaggatttcatcgcagagaatatcacatttgagaactcagctcctcaggggtctngggcangcagttgctctccgagtaacaagcagattaggtgtgccttctacaattgcaggttccttggttgggcaagacacattatatttacattatgganaacaatacttaagggactgttacatcgaaggtaactgtganttcatcttcggcaactctattgccctgttggaacattg

SEQ ID NO: 395300 - DNA, 520 bp, Oryza sativa
caatgtttggagtaatgatttccaatgccatcaaaactttctttgagccagcagacaaactaaaaaaggatgctagcttttggggtttgatgtgtgttgtcctgggtataatttcaataatatcaataccggtggagtactttatgtttggaatagctggaggtaaacttgtagagcgtgtccgtgccttgtcattccggagtattattcaccaagaagttgcttggtttgatgatcctaggaattccagtggagcgcttggtgcaagattatcagtaggatgcttttgaatgtccggcggtttaggttgggagacaatcttgcattggcaagttcagggcgtctcaacacttatcacaaggatttgtcatagcgatgatagcggactggaagctcactttgatcatccttttgtgtgattccacttgtgggtcttcaaggttatgctcaagttaagttcctgaaggggttcagtgaagatgccaagatgttgtatgaggatgcaagtcaagtggctact

SEQ ID NO: 395301 - DNA, 1019 bp, Oryza sativa
  unsure (1)..(1019): unsure at all n locations
aaaaaaaaaaaagaaaaaaacttcccgaattccccatcctcctccgcgccgcctcgccggaattcgcctcgaggtccggctaatcgaagcggcggttgatttctaggtcggatcgggggggcgtcgggagaatggacgagttcgagctggaggataacctagagttactcctccagagcatccaggagctcatcgaggaccagggggagaacaaccccttcggcgcggccaaccacgacgagctcatcgctagcctcctccacaacaaccaggagaatccgctgactgatgtgtccgtggaggacgttagggatgggaaggacatgcaggggatcccctgggagaagattgtgttccggagggatcagtatcgggagatgaagatgaagaattacaggaattatcagaacctgagttatgcccgggaggaagctctgaaggactgcaagaaagttgaaaagggatagtccttactacgatttccagtacaatacaaggcgtgctcgcccatcaattgtacattttcagttaaggaatctggtctgggcaacaaccaagcatgatgtttacacggtgcacaaccaatcagtgacacattggtcatcattggaccagacaagtactgagctaatcaatgcggatgactgcattataccaaaacagagagggcatggttcacagtccgttgcaatggtccaggtcacaactatggctgtagatgattagtttattggtaattggtggttttcagggggagcttatatgcaagcgcctggaagatgatggagttcttttcagcacaagagttacagatgatgagaatgctattaccaactctttggagatatatcagggatcccactgggatctagacggttggtggctgctaacaatgactgctctggtcagaatttttgacattgagtactttggatttgctgaaagcactatgtcttcccatgggtctgtgaatagcgtttcggtgagcccaaaanggggactgtttgctgtccttgggg

SEQ ID NO: 395302 - DNA, 443 bp, Oryza sativa
  unsure (1)..(443): unsure at all n locations
gaactgaggaagacgcctgggctgagaacccgaagaagcccgacgactccggaatcgggggctcgggcagtcgagctcaccgcgcgcgcggtacccgtctcgccgaggtagtaacaaaaggacactatgagctccgcaagcggtgtgaacaatggtgatggaaaagaagcggcactgtttgagcagcggctatccaagattggtgaagttagagctgccctaggacaactatcaggaaaagctgcgctatattgctcagatgctttcgattgcgaggtacctggtagcgaggaactgggaagtgaaggaggccacgaaaatgcttgaaggaaaccttgaaatggcgttcagagtattaagccagatgagatccgtttgggttaggtagcaaacgagttgcaactggaaaatntaccgactgtttcttttacaagagtgccggg

SEQ ID NO: 395303 - DNA, 312 bp, Oryza sativa
  unsure (1)..(312): unsure at all n locations
cggacggtngngncaacagtagtagtagtacctgattatccatccctaacaaatcccacttccccacacacgccaaaagcctctcctctcctttcctcctcctccagtcctcctcactgtccgtcccaagaaccactcggtgcagccgccgccgccgccgcagccagtgccattgcaagattcgcgagggggtattgaggttgggcggcgagatgagcatgtacgggagggacccgtggggngggccgctggagatatgccacgactcggcgacggacgacgaccngagccggnacctggacctttgacagg

SEQ ID NO: 395304 - DNA, 513 bp, Oryza sativa
  unsure (1)..(513): unsure at all n locations
gtcagtttacccaaagggacatatgcgaantganagccagaaggagtggggttctcagaccttcctaaccatagggctgtccttgaaacggcactccgcaatcatgcaacactatctganaatgattttgttgtggtgaattatgggcagctgcaatacaagttgaaggttcttgaattaaaacctgcatcaagtgtttctgtcctggagacagatgtggaagttgacattgaaggaccagattcagttttggacaacgtagaagaatccacatgtgcttgtgccactttgagactggaaaaggttgaatcctggaagtttgtggaagaagggaaagttttaggtactacaaatttcttgttgatgaaggtatgggtgagaaagtagcttctaggcatgcaaatattgaggttaagatagagacatatacaagtggtggtgacactgatatttatgtatcaaggcatcctttagttttcccaactcagcaccgtcacgaatggtcttctcana

SEQ ID NO: 395305 - DNA, 768 bp, Oryza sativa
  unsure (1)..(768): unsure at all n locations
ggcattttgcttggtgcggagactcatcgaggcccttatccagttgatgcagtnagtactgttgggagaatatgtgcagaacctgagtctgtgtataaccagttggttcacttccaagaaattagtgaagcatgtaggtgatccaatgccccatgaagaatctgtggcatcttcagcggttcgcactgcaatgaaggtaaaagctgctgcaatcgttgtgttcactttctcaggaagagctgccaggttagttgccaagtacaagccaccaatgccagtgttggccgttgtcttcccacgtgagggctctgatccaacaaagtggcgttcttacggcacaactcaggcaaggcaatgttttgctgcaagaggtgtctaccctttgatggcgagtactgaggaggctgaaactggtgggctcaccagggaagagtacgggataaaacttgcacagaactatggtcgctcggttggtatgctaaagccctatgacaggttgatcattttccagaagatcggcgattcatctgttgtcaagatcatcgagtgtgacagttcgtaaaagattagacacctaccacattccgtccaagagtttcaaccacacagaggcggattacctttttgctttctttcttgtttgacatgatattgagactagaatagggaaggccaattgtgctgtttggcaatttacccattttaggtccatacttgctttttcaataatttcattcaagagcctatttacacaaaaaaaaaaaaaaa

SEQ ID NO: 395306 - DNA, 499 bp, Oryza sativa
  unsure (1)..(499): unsure at all n locations
tnggccttgggggcggtggcggacttggtggaggcggtggtggaggtggtggaggatttggtggcggtggaggcagtnggattggcggtggttttgggaagggtggtggatttggtttcggtgttggcggcggaggtttcggcggcggtggaggtggcggcggtggtggcggagggatcggtggcaagcactaatacactggtacctacttcgtttcagttctcttgcactccatgggccatcatggtatttagcttgagcgagtagctgcaatattatgtaggcttttgttgtggagcttatagcagtactgttgcgtttgatggtttctccccttcggacgtttggataagtctgttggtaccctatatgttgttattaatttgtgacggtgataccatattatatatgtacttaagtacttcatgtgttaacatatcatatgtttcgaacgattggaggtatatatataaacttcagattaaaaaaaaaaaataaa

SEQ ID NO: 395307 - DNA, 533 bp, Oryza sativa
  unsure (1)..(533): unsure at all n locations
accncttgttccnccaaaattngccgccgggacccgaaaaagacaaggggcattcaccacangccaatcttttcccgtttaacgtcccgcgggccccaccagcggctaatccctgctcccgggaggtgtcctaatccggcccgtctcttgtggcgtgaccgagccagagataagattctccgaacagagcacggaggaaaggttggacagtgctacgacgactgaaaaccgatcgagaagggagaaaacaagagttgtatccacaccgatcgcagctttcttctcgattagtttatgtcataggcttagagattacagagtggtagttagtgatgtactgttggttttagtcttctcttttcctacgcttccttgagttgttgagcggaaacgaatagatgatgtatttactcgatcaccgtttgttcgtcgcgatcacggatgattgcggcggcgactttgatcagctgggaaaagaaagggcacggccatatttcgttcgttgcttccggttaaaaaaaaaaaaaaannnn

SEQ ID NO: 395308 - DNA, 437 bp, Oryza sativa
ccgaaagtttaacgctaccaactaattaccaactcgtcgtcgtcgccgccctcgttgccgccatgaatctaaggccgggccggtacaccgtacacgtacaaaggtggcaatcaccaccatgcctactcctctcgccgctgtacgtgccgcggggcccaccagcggctaatcctgctccggaggtgtcctaatccggcccgtctcttgtggcgtgaccgaggcagagataagattctccgaacagagcacgaggaaaggttggacagtgctacgacgactgaaaaccgatcgagaagggagaaaacaagagttgtatccacaccgatcgcagctttcttctcgattagtttatgtcataggcttagagattacagagtggtagttagtgatgtactgttggttttagtcttctcttttcctaaaaaaaaaaaaaaaaa

SEQ ID NO: 395309 - DNA, 532 bp, Oryza sativa
atctcatctcatctcaccctcgccgcgcgccgaggaagacgcgcatctcctctctccctctatataagcgcgcgcctcgccacctcacccgaagaaattccccaccattccatctctctctctctcgaatcttgatctctctctttcatcgcctcttgtgttcgcgcgcgcgagcagggtggttgttgttggtgggggtgcaatggcggggaggagcgagctggtggtgagcttcggggagatgctgatagacttcgtgccgacggtggcgggggtgtcgctggcggaggcgccggcgttcgtcaaggcgccagggggggcgccggcgaacgtggccatcgcggtggcgcggctcggcggcggggccgcgttcgtcggcaagctgggggacgacgattcgggcggatgctcgcggccatcctccgcgacaacggcgtcgacgacggcggggtcgtgttcgacgccggggcgcgcaccggttcgccttcgtcaccctccgcgccgacgggagcgcgagttcatgttctaccgc

SEQ ID NO: 395310 - DNA, 817 bp, Oryza sativa
aacgagagaaagaaaagagctcgaaaaaaaaaagaaagaagaaaaacaaagcgcgtaaagagaagcgagagaaatcggagaggaagatgggggaagaggcggcgaacaaatggcggaagcccgggcaagattgaatccatgaggaagtgggtcatcgaccacaagctccgcgccgtagttgcctatggcttactgggatcagcagctcgattgcgtacaactggtcgaggcccaatatgaagactagcgtcaagatcatccatgcaaggttgcatgctcaagccctaacactagcagcgttagtgggatctgcaatggtagagtactatgacgcgaagtacggcacatctggaccgaagtgggacaagtacacaagccaatacctggcgcattcacataaagattaagatcttcatattcgctgttggatggcgggttattttaggttcattttggggttcctatgagctccccatgatgattattttgtctccttaactacaaatgaaacttgccagggcattcctgagcaacgagggtgtaatacagggttgatctgcatagatcaatttcagattgcgatatgtaacctcacttgctgacaatcttattttattatttttcaacgaggaaaagtgttcctgtcttgcattgaatctgtcttagttttctgcagttgaatctgccgtaagatagaatggtccacggattttgttcttactgtttgtaatgcaggagcattccccacccgtattcgcattttcaaacattcttaatcgttacatagttgtagatggatggcaaaaaaaaaaaaaaa

SEQ ID NO: 395311 - DNA, 698 bp, Oryza sativa
  unsure (1)..(698): unsure at all n locations
cactggttggggttctaaggaggagagcaaagcaagatgggagcatgacagacaccatgagccaccgatgagccacaagaagttcccttcgagtgctggggaacaaaggttccctgacagagctaaagaggagaacaaatcaactggcagggaagggcagtcctcaagatcggaggcatacaaagaccgtgattccaggcttaggcatagtgatagaggttcaaaagatcatgacaggtataggcatgatagatccccctgagagatcaagaggtgataggcagagaaacaatgacagatatgcccaaggaagagatgaaaaatcagaaaggtacagatctgaagtgaaacatggatgaaggagaccagaagcgatcaagncgggacactgattctagtggacattatgaaaggaggggtaacgaagattcagaaaggtacaggaaatcacggagataaaatttggatttgttgttgcttcagacgttgttctgatctgttcgatgtttgttcttgtacgagatggataagatttttgtttgatccttgggtctgatattagtctaatagatgccatagattacatttgagatgattttgaacgcactggcccatagaccatagacgagtttgcaggatgttaactcaatacattaattaatcatttgtgatcaatgttaaaaaaaaaaaaaaaaaaa

SEQ ID NO: 395312 - DNA, 400 bp, Oryza sativa
gactgtgatgttactttcattgctgattttattgatcttttgatagtgaatcttgtccctggtcagcagctgatgaatgatgcagtaatgagtacttccagcgaatctaaaatgggtgaaagtgagcacgtaattacttcccagcagcatccatcggagttgacacatgattatgtactagttgaaggtatgatgcattcgaaagaagccaatgcatcaccaagtgattatattgattctctcttgaatgcaaccaatctaggaggaccaaatagctctgaagggtcagacatttctgttcagcttgatgggagttccaaaagtcttagtgagtatggcgttgacggatacaggacactggaatgtggtgcgtacaaaggaaccgataaactgggctgca

SEQ ID NO: 395313 - DNA, 834 bp, Oryza sativa
  unsure (1)..(834): unsure at all n locations
tacgtgaacccatcacccctaatcaatttttttggggtcgagttcccttaaaccactaaatccggaaccttaaaggnaccccccgattttagaacttgacgggnaaacccggcgaacttngcgaaaaaggaagggaaagaaaccgaaaggagcggccgctaggccgctggcaagtgtanccggtccacctgcgcgtaaccacccacaccccgccgcgcttaaatgcgcccgctacaggncgcntcccattcgccattccagntgcgcaactnttgggaagggctatcggtncgggcctcttcgctattacgccagctggcgaaagggggatgtgctncaaggcgattaagttgggtaacgccagggttttcccagtcacgacgttgtaaaacgacggccagtgagcgcgcgtaatacgactcactatagggcgaattgggtnccgggccccccctcgaggtcgacccacgcgtccgcccttggtgatctcgacatggtgcggtccggccatatttttgtcacaacaaagcgtaatattaggtggtagtcatttttggatgggcatctgttaccattttgttgctggtttttgccgtcgtttggtcagaacaaaacctcagctgcatcgacctggaaagatttcataatgttatcgctgaattggtgtccgttgagaacaccattgaaaagttctagtctcagtgatatgttttaggaattgtccttttgctgccatgtcttgtttcacaccggcagcggcaggagcgattcctgcttgcaaatagcttgataaaccttttacattagcttataaaatctcatgttatctctttt

SEQ ID NO: 395314 - DNA, 713 bp, Oryza sativa
  unsure (1)..(713): unsure at all n locations
ttaaccaccacacccgcccgcgcttaatgcgccgcnacagggcgcgtccccattccccattcagctgcgcaactgttgggaaggccatcggtgcggccctcttcgctattacgccagctggcgaaagggggatgtgctgcaaggcgattaagttgggtaacgccagggttttccccagtcacgacgttgtaaaacgacggccagtgagcgcgcgtaataccgactcactatagggcgaattgggtaccgggccccccctcgaggtcgacccacgcgtccgcaaatanccgatgggatcggttcaagcgccaaatgcaggacatacatcggcacagcgagtcgaagggtttcggagtcaggaaaccaaatggttccatttccatatacaccctcccaatgcctgactgcatgtgtcagcgagctgaaccatgatataatactccagctagctagagcacttaggcagcaaacggcctggcatttttgacacctctaagtagccagaccatattgtcagtttgaacagaaattaggcatcgaaaatttgcctcttctttttttcgtttttgttagcaagaagagattacagattgagatgcaaattaagtggttgttaatatgaatgcattccaccatatttacaacttttgccagggtaaaaacgtgccaattgtatatataaaaaggcacatctatataaaaaaaaaaaaaaa

SEQ ID NO: 395315 - DNA, 619 bp, Oryza sativa
  unsure (1)..(619): unsure at all n locations
caccattgcccatcagcacaacaaacacacacacacacacaacacacagagtaaaatcagtaaggaggagaaacgaggatgaagcttgtggggagcgagaggaggcagaggggaggaggcttcgggagggccatcaagcagcagagggcgaggctctacatcatccagcgctgcgtcgtcatgctcctccgctggcaagactgatccccaccaactcgatcctccaaatccatccctcgatcctcctcggtcggtcggttcgttgcctcgttggttgggtcgctccttcgcggaaagttttggttcttttttggttgtgtgctgtgccagaatggtgtcgggccgtttgtacatagaggccaacaaaaaaaaatggtacaagtagcagtagcagtagcagaagtagggtttttagttctagtgttcgcgagtntgttcattgtacaatcaacatgtnatactgtcgaatgnaatacgntgaccaagtgagacatatgnttcaaaaaaaaaaaaaggnggcgaacgggtggggtcagttttnttccttggggggtaattgggttggatatggangtgttcgntnatgttcgtaattcaaaaatggngggntaggtagtgg

SEQ ID NO: 395316 - DNA, 427 bp, Oryza sativa
  unsure (1)..(427): unsure at all n locations
gtaatctgctcaagagagccacgagctcaagtccagctctctatcaatcaatcagatgcatgtcatcctcaaagctttttgttggaggcctttcgtacggcacagatgagcagagcctcagagatacttttgccaattatggtcaagttattgaagctaagatcatcaatgaccgtgaaactgggaggtctagaggttttggcttcataacttacgcatcaagtgaagaggcttcagctgcaatcacagccttggatggaaaggatctcgatgggcgtaacatcagggttaacactgccaatgagagaactggtggcttccgtagtgggggtggtggctatggaggcggtggctatggcggcggcggtggcggctatggtggtggtggctacagtngtngtggtggtattgcggtggtggttcaggt

SEQ ID NO: 395317 - DNA, 383 bp, Oryza sativa
  unsure (1)..(383): unsure at all n locations
acgacaaccacctcgcttgccattctggactgcgggtgagatcgatggtgacggacggggagtgctcggcggcggcggtgaggaagggtgggtcgccggcggtgcggagccacagcgaggcggagggaagcgncggcagcgcatcaacgcccacctcgccacgctccgcaccctcgtcccctccgcctcccggatggacaaggcggcgctgctgggggaggtggtgcggcacgtgcgggagctgcggtgcagggcggacgacgccacggagggcgccgatgtcgtcgtccccggggaaggcgacgagggtcgtcgtcgaggacgaggacgacgacgagggcgagcgcgacgaggggtgttattgtcgtcggcggcggcgacaa

SEQ ID NO: 395318 - DNA, 714 bp, Oryza sativa
  unsure (1)..(714): unsure at all n locations
atatatnatacgtgtttccaaattagtgtattacttgagtncattttttggagtggattattccagtgataatgtactctaccatttttctttncttcttcttttatcacagattgagccattggattgtttttcaatcgttcactatcttactatggtagaaaacgaaactttaatctgttttcatatcatttgtccttactaactatccttttatgtagtccagaaaattaggtcgcaggtaccaaggtatcattagtatggtctccatttatatgcaagcactaggtttagtgtcggaatggtttgttttgggttcttggtcttttatggttgtgtgtttgtgtccgctgcaggtagaggggagttggaggggaatggcagctcgctgcaggtagaggagagttggagtggaatggcaagtgcgagtgaggcgaatggattgtgctgccattcaagattgactttagaagttctcttctttttttcatcttaccgataattcaagattgtgctaccatatgtttatcttttgagttaacaccaaatgtctggtggttgccgattgccgtgtggatttcgaagcttgacaattgcttatttctttagagtgaacctatttctaacatttcatattactaaaccatataagtttgattcatgaggtaaagtttgtaatatatatgaagttcctacgccaaaaaaaaaaaaaaa

SEQ ID NO: 395319 - DNA, 479 bp, Oryza sativa
  unsure (1)..(479): unsure at all n locations
ngacgngtctccgccgcagccgagacgggagacggcggcggtgctactctcgtcttcctcgtcgcccatccatcttcctcggcgagacgacgccgcagcagccatccccaacccccacgtgtgttcggtgcgagcctgctacgctacccgtgctgctgcctccaactctctacccatcactggctccatcggcctgggagactgggagcaggtaacttcgagctgccatggaagagggctgcagttccaattggccggccacaccttgtgccgcagcgacgacggccggtcaattgtttttcctccttcaagatttgtttgttctttcaagcagcaggggattttattttctttcaaggatttgtttgttacttcaaggagcaggggatttgtttgatgagaagtgatttctactcgtttggattattgataagaccttcagattaaataataagcatttngggtgaaaaaaaaaaaaa

SEQ ID NO: 395320 - DNA, 638 bp, Oryza sativa
  unsure (1)..(638): unsure at all n locations
gaaattgctcgcacaagtggacgcccaacagagtgagcaagatcgtcatagggccaaggttgcgcaggccgtgtccgctgcgaaggatattgttgccgctatagagaagagggggttgaagcttgggaaggcagcatatcaagagcttaccggtgtaaagaagccgaagttggatgagcagggtgtgcttcactggccagttcttctgctctacccggaggtcatgtcgagtgacttcatcgaggattttccggagacagagactttcgtgccccaccttgatgtcatgttctcagaaagttctccaccattaccatgggatgataaacacgcttacacacgggatgctgttgagttatattatcaggctggcgtttggcacagtttctgtccaaaagtgaaaatattgaaaattcttttggaaaggcactatggactcaaagtcacttcctgaaagcctgcttgatgaggaagatggngaaaatgatgatggtaagagcagcacaattacatcatcagataagggttctgtgaagtggatcaatgtaaaagagggnaaaactcttcaagaagtnctgcagcataaaggcttcatcatccctgcaattcctgtgttctttgttgtttcaagnaaatcc

SEQ ID NO: 395321 - DNA, 500 bp, Oryza sativa
  unsure (1)..(500): unsure at all n locations
gaaggatctgcagttaaggatcctgatccattggatatgtctgaggaagctaaggccgagagatggtttaggagggcagcacagataaaggacatctccgagctcgccaacatccctgacgaggacttcccggagataatgccgatgaggaagggcgtgaacaggttcgtcgtcagcaagaggaagacaccactggagaggagattaacatcacctcagtacagaagaaacctgcctatcgtaagttctgaaccgaacgaagacgctaactaaaaaaaaaaggtgtggttacgaaatttccagtgcaacagcgaggagttaaaacaccaagggcattctttacagcagttttgtgataataagccagcacaagacggttctctgtattgtaaaatttttgttctgaaccttccatttattttgtacttccaggggntccatgttgtatatgaaaccttcgntactgaaactctgcatgacactgttgaactattactttt

SEQ ID NO: 395322 - DNA, 380 bp, Oryza sativa
  unsure (1)..(380): unsure at all n locations
gccgccaagctgacgcgggaggtcgccgccgggaggggctctaggcggacatgggaggggcgccaccgtgccatgggaggtcaccgccgggaggggtgccataggcacancgggaggtccgcgcggaaggtcaggtcgccgctgggaggggcgccacgggaggtcgtcgccggcggctccaccctctagccgttntcgcctcgcctcctacccgtntgcgcganttcccctccggccggtcatcaacgtctccaaccgcgnctncctccagtcgcgncttccacctncggtcggcactgcctnctctgtgccgagccgccgagctcccttcggccggnaacgtnctncctgcgctgagcaagtaatttgaacaatgggta

SEQ ID NO: 395323 - DNA, 737 bp, Oryza sativa
  unsure (1)..(737): unsure at all n locations
ggaattcatagcagtttttgatgattttgctcacaaattagaacagaagataggaaaaagacctggatatttagttcaagggacactgtaccctgatgtgattgaatcatgcccacctcctggaagcggaaggacacattctcataccatcaaaagccatcacaatgttggtggtcttccaaaagatatgaagttaaagctaattgaaccactcaagctcttatttaaggatgaggtacggaagttggggagtattttaaatgtcccagagtcattcttgaagcgacacccatttcctgggcctggtcttgctgtacgtgtcctaggtgatgttacagaaggcaatgctttggaggttcttcgtcaggttgatgaaatatttgttcaagccattaaagatgcaggtctctatgatataatttggcaagcatttgctgtgtttttgcctgtacaaacaggtgggagttcaagggtgaccagggaactcacttccaatgcagttgctttgagggcaattactagtgaggatggcatgactgcagattggtattattttgagcgtgagttcctggtagatgtggtcaacaagatctgcaacaatgtgcgaggtgttaaccgtngttgtccagggcatcacgcaaaaagccacctgcgacagtggnatgggnataggaacttcgtgctctgaattctgatgccgttgngtnggcctacttaanangctgcantggagtngg

SEQ ID NO: 395324 - DNA, 465 bp, Oryza sativa
  unsure (1)..(465): unsure at all n locations
ggcacgaggaggaggcgagcagcagcagctgaagcgagccgagccgatccctcctgcccctgctcgcctcccagatctccccgccattgccagttccccgccaagattcgcgcgcccttctcccagatccagcttcgcctattccgaattccgcgcaaggctctgtcggtggtctgattcggcgggttttggttggggaattttggtgttcctgctcggttttgtgcttgctgctggttgtggtggttcttgggagcggtggagatgggggtgacaggggagaagttccagctggggacggtgggggcgctcagcctctcggtggtgtcctcggtctccattgtcatctgcaacaaggccctcatgagctccctcggcttcaacttcgccactactttgacaagctggcatctcctcgttacaattttgctctcttcacgtggnattatgtatgaagtctttgag

SEQ ID NO: 395325 - DNA, 462 bp, Oryza sativa
  unsure (1)..(462): unsure at all n locations
cccagccagcgaaccaaggcggcggcggcggcggcggcgacactgcagttcctccgaggaggcggcggcggttcggtaggcggcggantggagggatggcgtgggaggtgctgaagaggcacttctcgcggaagcgcgcggtggacgtgcggcggatcaaccccaaggtgcccaaggaggaggccgtcgccatctccggtcgcctcctccagatcttcaccgaccatggccccctcaccgtcggcaacacatggaaccacgccaaggatgctggtatcagtggcctgaatagcaagactcacatgaagatcctgctgaaatggatgacggggagaaggatcgtgaagctgaactgcgttggcacgggcaactcaaagaagttcctgtattcccgtattctgcagatgcnataaatccgagaagcagcacagaagagctnagtaaggttctcttcacaagggg

SEQ ID NO: 395326 - DNA, 396 bp, Oryza sativa
cccgcgggtgtgttttccattttttccacccacacagcggcggcgagggtttccgatggagaatggagacgagacgttcgcttcccccaccgccggcggggcggcggcgagttcgagcagccgctgaccaacggcggggggaggaggagggggcggaggggtgtaccccgccgccaaggcctacgacgcgggcgagttggacgcgctccggaggcgaaggcgacctggaggacaagctcgccgccgtggagcacgagaaccggttcctcggcgcggaggcgtaccgcctcgaggggatcgtgtcgcaggccagggaaggacatcgccaccgccgagcacggcattgccgccttccagggggaaggcccctttgttccgagacggaggttaaagcgc

SEQ ID NO: 395327 - DNA, 582 bp, Oryza sativa
  unsure (1)..(582): unsure at all n locations
taatacgactcactntagggcgaattgggtaccgggccccccctcgaggccgacccgcccggccccaccactgctccagctctctccactctcactccccgattcgccggcgagcaggcggcggcggcggagtcaaggcttcctctccgctccgcaggtaccaagatgaaggtcaagattcttcagtggcattcggtggcttcttggacatgggacgcccaggatgaaacctgtggtatatgcaggatggcattcgacggctgctgccctgattgtaagttccccggcgacgattgcccgctcatctggggctcctgcaaccacgctttccatctccactggcatactcaagtgggtcaattctcaaacatccacaccactttgcccaatgtgccgtagggagtggcaattcaagggctaatggcatctgaaattatatcactagtatctagtttgcatgtttccttgtagagaactgcnggaaaacttttctggaacttagaaatgttgtcttcaagtactatgtactnatattttctgcnnnnnnnnnnnnnnnnnnnnnnnnnnnnnnnnnnnnnnnnn

SEQ ID NO: 395328 - DNA, 606 bp, Oryza sativa
ctcgttcacagcaggcacaaacagatcgggcaccggagaggttgggaggagagcttgggttggcctgacgaaatggcggaggagaagagcacgatgcagtcgatgagggagtgggtcgtcgaccacaagctccgggccgtcgggacgctgtggctgactggggtggcgagctcgatcgcgtacaactggtcgaggcccggcatgaagaccagcgtcaagatcatccacgccaggttgcatgctcaggccctcacactggctgcattggctggctctgcactggtggagtactacgaccatcggtcaggttcaggatcaagagttcatcagtatgcgaaggagttcatcacacctgagagcaacccacaaaaagaatagaggacgttgtgtacttaatcaacgccagatgtatcgatatgatttcctacgcacaaattctgtggcgtcttgaatctcctacgtactgtctgttttcccttctctgcctgctttctgtataagctaagctgctgaactaacattcagggtttcagacgctgcgatatcgatgatgaatgataatgaactggcatcagctgtgtaatgtaataaaaaaaaaaaaaaaaa

SEQ ID NO: 395329 - DNA, 453 bp, Oryza sativa
  unsure (1)..(453): unsure at all n locations
cgcttcggttccttcctcgagtcgaaacctcgcgaagcgccgccgccgccgccgactctcgctagggctagggttttcctcccgccgccgggagcccctccccctgcaaccgcgcaagggatggctatgcaagttggggaatcagttgctcctttaagtccacaaatgattggaaatgcgtttgttcaacaatactacaatgttctccatagttcaccgggtcaagtttgtaagttctatcatgattcaagcacccttggtcgaccagattctaatggaaccatgacatctgtaaccacattgactgctatcaacgatgaatttctctctacggacttcagtagctgttttgattaagttagagaatgtgggtgcacagttatccctcaatggtggtgtgcacattttggtaactgggnctattgggcacatggacatgtggataggtttagc

SEQ ID NO: 395330 - DNA, 330 bp, Oryza sativa
  unsure (1)..(330): unsure at all n locations
aatttggaccggcaattctgttcccaaaaaaaaaaaatcgtacaattccgcagcctaaccctagtcgacgcgaacctccagccgccggaagatgctgcgaccagcggcggcggcggctgggcagggccatccggcgagccggctaccactccgacggcgcccctcctccccgcaagctccggggcccccgattcagccctctcaacaggcacaaccacgaggttgatgcgttgctcgaggaaatcaagaatacgccggttagcatgattttccgatgatttnattatcagnactgtnnggaaattctatnttgggctnggntagcagatn

SEQ ID NO: 395331 - DNA, 385 bp, Oryza sativa
  unsure (1)..(385): unsure at all n locations
ctcgtnaattcgggccncnaaagctagctagcttcgatcagtagctggaggatgatgaggaagttggcggtgttggtgttggcggtggcgatggtggcggcgtgcggcggcggcgtcgtgggtgtagcgggggccggttgcaacgctgggcagctgacggtgtgcacgggggcgatcgcgggcggggcgcggccgacggcggcgtgctgctccagcctgcgggcgcacagggctgcttctgccagttcgccaaggaccccgcgctacgggcgctacgtcaacagcccccaacgcccgcaaaggccgtctcctcctgcggcatcgcctccccacctgccactgatccatccatccatcgtctcctactcttttattttgtgatgtg

SEQ ID NO: 395332 - DNA, 348 bp, Oryza sativa
gtagtaataaaacctcctcctgtcggcttcctccttcctcctcccgccgccgcacagcgcaaaccccgcccaaaaccctagctaagcctagccgccatggacgccgccgcgcaggaatccctcatcctggagctccacgccatcgaggccatcaagttcggcaccttcgtgctcaagtccggcatcacctccccgatctacctcgacctccgcgcgctcgtctcccacccgggcctcctctcctccatcgccaccctcctccacaccctcccggcgacccgcccctacgacctcctctgcggcgtcccctacagcgcgctccccatcggcttcgtcctcttcgtccaa

SEQ ID NO: 395333 - DNA, 383 bp, Oryza sativa
  unsure (1)..(383): unsure at all n locations
caccccgtcactcccctcttctcctcacctcgcctcgccgcgccgcgccgcgcgcttgaagaggaggcatgaagcggacgagagcgcagcagccgaagctccaggaggggcaggacggcggcggcgcggccgggaacgccaacccgaagccgcagcggagggcgaagctgccgaggcagcccaaggcggcgtcggcggcagccaagaaggcggcggcggcggcggcggcgcgcgagtcgtcgtcgtcgtctgtgggggcgggggcggcagtgacatccgcggcgtcctcctccttgctcctccggagcggacaattgccgcccaccgtgcccgacgtgtgtggcggcggcggcggcggcgcgggatacgaggccggggcggng

SEQ ID NO: 395334 - DNA, 525 bp, Oryza sativa
agattgaccttaactccctagaatctattgcggacaagaacactactgcgatagtcatcataaatcccaataatccatgcgggaatgtgtacacttacgagcatttatccaaggtggcagaggtagcaaggaagcttgggatattggtaattactgatgaggtgtatggtaatttggtttttgggagttccccatttgtcccaatgggttgctttgggcacatcgtaccaatattaaccataggatcgctatcaaagaggtggatagtgccgggatggcgacttggttgggtagcaatatgtgaccccaagaagactctacaagaaaccaagattgcaacattaattactaatttccttaatgtttcaactgatccagcaactttcattcagggagctctaccgaatattcttaagaataccaaggaagaattctttaaggggataattgatttgcttacgggaaacatcagatatttgctatagagggataaagggtattaaatgcatcacttgtcctcacaag

SEQ ID NO: 395335 - DNA, 468 bp, Oryza sativa
cgagcgaatctgacctaaaccctagctcgcctcctcctcctcctcctcgccgccgccgccgccgccgtcgccgtcgagcaccacccgagcagccatggcgaatccggcagcagcagcagggccgtcggggggagcgaggtcgttcctgcaggccgtgtcgaccgtcaccgaggaggcgccgtcgccgctccgcgtcgtgcagatggagggcctggctgtcctgaagatcattaagcactgtgaggagtttgcacctgctctagttacaggccaactgcttggtttggatgttggcagtgttctggaagtaacgaactgttttcctttcccaatgagagaagatgatgaagaggcagatgcagatggtgcaaattatcagcttgagatgatgaggtgcttgagggaaggttaatgtttgaacaataaacactgtttggatgggtatcaatcttgcttgcttgggatctt

SEQ ID NO: 395336 - DNA, 656 bp, Oryza sativa
  unsure (1)..(656): unsure at all n locations
ggaccgggctccgcggaacacgagacacagagagagtagagatcgagatcgagtgctaagctagctagagtcgacgatggcgaagtggtgcagcttcggcgtcgcgtcgtccctcctgctctgcctcgccatggcgcacgcgcggcggcggccagggccgtgcccggcggcgacggctcgacgacggcggcgtcgcttcccggcggcggcggcggcgggcaccggcgcgggcgtggagggacaagaagaacctctttcgtgggcgtcggcggcatgggggacctcccgggcttcccggccgtcggcggcggctacggcgggggcttcggcaacaacggcggcgccgtcttcagcggcgtcaccggcccgctcggcggcgtcgggggcggcatgggcagcgtcggcccggtcggcgggttcggcggcgccggcggcggcaccccgtttcggcgggttcggcggtggcggcgccggcggcgtcacgccatgaaccgtagtattactgagagctacgtacgatctcatgcatctacgtgcgccgcgtgcgtatatacgcacgcgtggtgcacgtgtagtagctagtgtcatcttttgctttttgagtgtcgatctcaggtgagttgcatgcatggttgggcaangaaggttggaagttt

SEQ ID NO: 395337 - DNA, 947 bp, Oryza sativa
  unsure (1)..(947): unsure at all n locations
cccgagaagcacaactttttgatatttgaagaccgcaagtttngctgacattggaaacacagtgactatgccatatgaaggaggaatatttcgcatattagactgggctgatatccgtcaatgcccatataattcctggacctggaaattgtggatggtctgaagcttaaagggtttgccaaaaggaagagggctgcttttgcttgctgaaatgagctcggctggcaaccttgctcatggagagtacactgctgcagctgtaaagattgctgagcaacattctgattttgtaattggatttatatccgttaatccagcatcttggtcagttgcgccatcaagtccagcatttatccatgccactcctggagtgcagatggtttctggaggagatgctcttggtcaacagtacaatacccctcattctgttataaacgacagaggcagtgacataattatagtcggacgagggattataaaggcgagtaatccagccgagaccgcgagggagtaccgcatccaagggtggggagcataccaatccagcttgccatgagaaattgagaatgtgtttaggccatgtttgtttcagcttatgattattataatctagattattaagccagattgctataagctggattataataagctgacatagaataagctgtgagttgtttgtttgtctggattattggaggcatggattattgggtttgaaaggctaaagtctataataccctcagctatctgttcggttgatggcaaaatggttaatttttctcaagcatgtaggggtagtgggtctttagccactcaataatctgaaaaaagctcctttagagcagcttattagattataataatctggcttatagattataataatctgctacaataatctacttgtttgtttcagtttactcctaataaggtagattataata

SEQ ID NO: 395338 - DNA, 633 bp, Oryza sativa
  unsure (1)..(633): unsure at all n locations
aaaagggaagngccancagaggctagatgatggaaggtgctgccaattagctgaagcagtggctcttcatgttctcatagacgaagactccgaggaaccctgccatttgatgttgaacaaccttagaatatgcaaccactgggaggattttgtgggctttggatttgctccagattcacaaggagtagatgcttatccttctggcaaaccaacaagtgtctctcatgcttatgttccccaattgagatggaccaattggggccatgtcccagacattttcatccatgggagcaattgacggattgtgaagccaccactctatcaagaagccacttgctcagtcagatatccaccctggccctatagccattgtctcaccattgcagaagaggagggaggatcccatttaccatccaaggaggagcagtagcggcagcatcttcagccactgagtctgaaagtggtcagtggaaccaacaataggctgaacagaaatacagagaggattataaacataccaaatgcataatctgtatgtagtcacataagatgcatctttttatcagagtgatacttagtttttttttcttttctttagaaaccaaagtttggtataggaaaaaaaaaaaaaaa

SEQ ID NO: 395339 - DNA, 518 bp, Oryza sativa
ccctaaccctagcggcgggcgggagcggcggaggaggagggcgcggcggcggtggggtggtagtggtggtgggtggaatggacggaggcggggcgcaccgcacgccggaggacgtgttccgggacttccgcgcgcggcgggccgggatgatcaaggcgctgaccacagatgtggagaagttctaccagcagtgcgacccagagaaagagaatttgtgtttatatggtcttcccaatgagacatgggaagtgaacttgcctgctgaggaggttcctccagagcttccagaaccagctctgggaattaattttgctcgggatgggatggatgagaaagattggctgtcacttgttgcggttcatagtgatacctggctgctagcagtagccttttactttggagcaagattcgggtttgacaaagaatccaggaaacggctttttagcatgattaacaccttccaaccatatatgaggttgtcactgggactgcaaagagcagagcaaagaaaaaccccc

SEQ ID NO: 395340 - DNA, 512 bp, Oryza sativa
  unsure (1)..(512): unsure at all n locations
cacttgctagctagctcgatcggtcactggccacttcacatcttcttgctcgctcgctcgatcgattgcttacaaggtttcatggccactaacaatccggtcagtctcaaagcagaggagcagaaatgctatggcggcggcggcggccgggtccattcaggcaatcacgatgctcgtggcgacggcggtcacggcgcaggcggcgtaccgggctcgccgggagccatgggacctcgccttcgtgctcttcgcctacgccgacctgggcctcctcttcctgtgcctctcgatgtacgagcgcctgccgcctccgctggaagaaatacagaagggggacagcggcgacgacggtgcggccgtgagnggcggctcaagatggccgtgtgggcgctgtcgacggcgctgagcgtcgccttcgcgtggcgcgtggcggcggtcatgccggcgccggcgatgagggccgccgtcttggggcatgacgtcgacggtggcggtcgcggtttntaactact

SEQ ID NO: 395341 - DNA, 570 bp, Oryza sativa
  unsure (1)..(570): unsure at all n locations
ctcgcattcctcctccttaccttgccctaggtcgagtcgacgcgacgagatttgcggcggcgatggctctcccggcgtcgagctccggcctcttccgcttcatctctccacggcgccgcccccagtccaccgacatcgccgccgccgccacctggggcgtcttcgccggcaccgccgccatctacctcgtccagccatttgactggattaagaaaactttctttgagaaacccgaaccagaggcataagtctgccaggcatatggaaggctgcaacttttgatacatttacgtttccgggatgatttctgagtgaagagaacttggatgaccctgcaaataatataaaagacagtcatgttcccttgtttgattttaatgtaggtttctcttgcatgtaaaccccaggaggggaatgatgattatattgagttatttctcatctcagcgaaacctttttcttggttttttctcatctcagcgaaacctttttcttggtttagcagtgatataaattcgtggtcctgatgattgtttgtcgtaannnnnnnnnnnnnnnnnnnnnnnnnnn

SEQ ID NO: 395342 - DNA, 489 bp, Oryza sativa
agggagggagggaaaagggagggggagggggagagaagaggaagaagaagagcggaggaggagagaggaagaggaggagcaagaggatggaagaggagatgagccaaaaccgaggagggaagaggaggaaggagactggggagagcggcagattcgtttgcccaggagcttgaaaaaacgcttcatcggaatcaagggcaggctctccagtggctaagcaagtgagcagagagggacatttggaggtgaacgcgtccagctacagtagtttctgcgtaaataatgctggtcttgctcgtgtagaggccggcctgcatactacgtgcgtactttcgtttcttccactgtgtcgtgatgtagctgagttaaataagctgttgatgtgtataatcgtagcctcctcccttccaagaacccgcctgtaaacggttaagtaagctgttaatgtgtataaacgtagctttcctctcaaaaaaaaaaaaaaaaaaa

SEQ ID NO: 395343 - DNA, 675 bp, Oryza sativa
  unsure (1)..(675): unsure at all n locations
gatgagtgtccgngaaatgagaagctgcactctccagtcagtggtgctgagcatgaatcaaataacaagtgtcttaatacaaatggctgcaaaatctttggtatatcattgactgaaaaggcccaagcaggcgatgaagtggattgtggcaatgccngttatcattctcggctccagtctttaaaaccacagatgccaaaatcattgggcagcngttgtgccacggtccatgaacaaaggcctgttgttggcagggtcgttgatatttcagcagtgaatacgatgatctgatacatttactgtatccagggagtatgcttgcagaaatagggaccaacattagtatcatactcactggtgctgaggacacaacttccattctggctatctcgtccctctacgtgcttgttgcctcaacttcagcatttccacaggctgtgctaccgcatccaggatgatgacaggggaaatgcagatgatacacgaaggatgcttgtcaagtttgttgtaatgcacttctaagttctaagctttgaacctcttaacgttgctcctattttaagctcccgttgtaatcggcatttatgttgcctgacctacttgcatatttttcaatttgtccgttaagacagcccttttagagggcttgcttatgttngcaaaaaaaaaaaaaaa

SEQ ID NO: 395344 - DNA, 346 bp, Oryza sativa
  unsure (1)..(346): unsure at all n locations
ggaggcggcggtctcggaggtggtgctggtggcggcgccggtgttggtggtggagcgggaggaggtgccggtggaggcggtggtctcggaggcggacaggaggtggtgcaggtggaggcggtggtctcggaggtggtgctggtggcggccatggcggaggcggcggtctcggaggtggtgcaggtggaggcgccggtntgggtggtggagcgggaggaggtgccggtgcagngggtggccttggcgctggcggtggtgcaggtggagngggcggaatcggtggcggtgctagtngtggcgcttggagcagncggtttcggcggaggcaaggaaggtggtttcggtg

SEQ ID NO: 395345 - DNA, 533 bp, Oryza sativa
  unsure (1)..(533): unsure at all n locations
gatcgcgagcggccgcccttttttttttttttttgtaactgtgaataagattgattgataggatatttgctgccccaatttatacccctagaacccaaaattcatttgtagagaatgacatatcaaattgttcaaactcatcgccatcaccatagcagattaataaatttgggatttggtcctagcctgtggaattggacactccgattttggagtaaaaactcattcaacaacggctaacagatcagactcacggcagaagcagtgcttctcatcggtacccaggtccacctcataagcatttatgtcagagaagagaaccttctttccagcttcaacttcattaacatcagcaccaacagacaaaatntcacccatcaaatacctctcaaacttaacagcagattttggcagcaggactcctccaacagatttctcaggaatctgttcgaggcggacgagcacccggtcggactgcggcgccaccttggaagggtcgtacttgagggcggcgctcgcgatctagaactagt

SEQ ID NO: 395346 - DNA, 569 bp, Oryza sativa
  unsure (1)..(569): unsure at all n locations
ctcatcaatcactcaaggcccctcctcctctctccatcaagagaagctctacctcggcccgtcctcgcccgccggccggccgccgtcgccatggctcccggcaagctcgcggtgttcgccctcctggcgtctctcctcctcctcaacaccatcaaggccgcagactaccctccggctcctccccttgggccgcctccccacaagatcgtagaccccggcaaagactgcgtgggggcgtgcgacgcgcggtgcagcgagcactcgcacaagaagcggtgcagccgttcctgcctcacgtgctgcagcgcgtgccgctgcgtcccggcgggcacggccggcaaccgggagacctgcggcaggtgctacaccgactggggtctcgcacaacaacatggaccaagtgcccgtgagctaagcgcgcacgaatacgatccgtctgcctgcctagatctagnttaatttagctttgcattgctcctagttgagtagttggtgttgtccgttgggtttctgtctttccagagttatccttttttctttttctttttttttcttcctgagagaagaga

SEQ ID NO: 395347 - DNA, 463 bp, Oryza sativa
  unsure (1)..(463): unsure at all n locations
agcgacgggaggtcggagcgagcagagaagaacgcatttgattcagaaatctccatttgaatctctctcgtctcccctcgatccctagcttcctccctgacaccatgctgccgtcgcacctcaacggccactcccccctcgcgcgccgctgccctcgcctctccgccgcctcgccgccagccaccggggattccgatgcggcggcggcggcggcggacgctccgctggcggagaccgaccgcatctacttccagtcatactcccacatcggaatccacgaggccatgatcaaggatcgcgttaggacggatgcttaccgctctgccatcatgcaccaccagaagttcatcgaggggaaggttgtgatggatgtggggtgtggaactggaatactctcggtgttctgtgctcgcgntggtgnaaaatgtgtgtatgaagtggaagtagtgaaatggcaatcagg

SEQ ID NO: 395348 - DNA, 418 bp, Oryza sativa
ctctgggcagtttcttactttgagggtatccgatatggccattttaatcttgggataactgagatattatataactgggccatggagtgtcatgagtttcctatagtgcaaactgtggagcatatcaaacaccaactgacctgctggtttgttgaacggcaaaacttggcgctatcatacaactcaattcttgttccatcagccgagaaacttatttctgaagctatcgctgattcaggatgctatcaagtccttcgagcaaacaaggtggagtttgaaatagtctcatctgagcgaacaaacattgtggatacgcaagccaggtgctgctcttgtcgtcggtggcaaatatatgggcattccatgtgcacatgctgttgctgcactactttcctgtggtgaagatcctcgcttgtat

SEQ ID NO: 395349 - DNA, 417 bp, Oryza sativa
  unsure (1)..(417): unsure at all n locations
ggacnggtgttagtgaagaggaggaggaagccatcgatggccatgagcgccctcaagttctgcggcgaatgcagcaacatgctctacccgcgggaggacaaggagacgcacaccctgctctacgcctgcaattcctgcgagcaccaggagcctgccactgacacttgtgtgtacaaaagggttctccgtaaacctgctggggaacccaaagatatcctaaaagatgcagcaactgatcccaccctgcctcgcaccagaagtattaaatgttacaactgtggccatccagaggctgcttttttttcaggctccaactaagggggagaaaggcctgacacttgtacttcatctgctgcaacccaagctgtggtcacaggtggagggatttacggcaaggttcatggtgctgaatcttgg

SEQ ID NO: 395350 - DNA, 445 bp, Oryza sativa
  unsure (1)..(445): unsure at all n locations
gcgcgacaacaaatcggcagatacgaagggaacattccaacctcctcccacacggctccaccaagaggcgcggcccgctcgatccgctgattcaccagcgtcggtctggtcgccgagtggcaacgtaggccaacccctacgcgatgccgtcgtcgagcaggacggagacggtgaagaacgcgctgtcgcggtgggcgcggagagtcggcgagacgaccaggaaggccgaggacctgtcgcgcaacacatggcagcacctgaggacggcgccgagcatcggggaggcggccgtggggaggatcgcgcaggggaccaaggtcctggncgagggcgnccacgacaagatattccggnangcgttcaggcgncgnccgacgagcagttcgaaatcctacgngtgttaactttttcacttcgccggccggtgatggcatctntactttca

SEQ ID NO: 395351 - DNA, 592 bp, Oryza sativa
gtcaaaactgttagcctgagtttcaaaatctaaagaacataatatcaacatctcatgatgcccaaaggcgtgtcttgaaaaaaaataaaacaagctatggacttttgcgcatagaggctgacagctaaattattcatcgaacttcaagtcaggtctcatggagtcatggagatctccaccaaggctagttgcgtagaagccgcggggtttcatttttcaccttagagcggcaactggaacttctcgaaaacaagtatggcgacaattggtcccgcgaaatctcccaatgtacaaccaagccactgtccatgtactggatgcacaaggaccccaatgccagctcctattgagggcaaaaaccaaagagaacccgcatttgacggttatgccgtatatctttttcccgaacagtttgactttgtccatctcatcaaacattgcctgatcattggaaggcttaccggaaaaacatctgtaaacctcaactatggattgcacaacccaagcagcagcaactcccaatgcatgcgctcggaaagtcgttctagcaacacaatatgagtactcttggaagggcatcccccttacagat

SEQ ID NO: 395352 - DNA, 402 bp, Oryza sativa
  unsure (1)..(402): unsure at all n locations
ctccagtctccccctcccctcccctctcccgacgacccgaccggcgacgccgctcctcctccgccgcccctctccgccgctccccctccccctcccccggcggggcgcggccgttcaagtccaacctcggccacatgctccgcctccgcctcgccttcgagaccttcctcatgagtaggctcctccacttcaccaccgtccacagtctcgttcccgctccacgtgcgcgccgtcgagtaggcttatgaactaaatgacgaggtgaatgcacggataagccctgcagatcaccatgtttgtacaatttatagttggactaagagagtattctggtaattaacttctggggcaagtaatctgccctgnagatcatcgtattgttggaattttttttttgggggg

SEQ ID NO: 395353 - DNA, 386 bp, Oryza sativa
  unsure (1)..(386): unsure at all n locations
ggagcgatttgtctcatccactcttccgtcagcattggcacgcttgcctcctcctctcgctgtcgcttgcacggcgctcctcctcctcctcttcgtctcggtctcgccgtgccgcgcggcggcagccggcgtcccgtccgccgtgctgctgccggtgagcaaggacgacgcgacgcagcagtacgtgacgatgttccggcagcggacgccgcagctccccgtgaaggccgtgctggacctcgccggcgccacgctctgggtggactgcgacgccgggtacgtgtcctcgtcgtacgcccgcgtgccgtgccggttcccgcgccctgccgcctcctgaagaacgccggcttcgcattcaacttgnctcgacgcggtattccaggctt

SEQ ID NO: 395354 - DNA, 620 bp, Oryza sativa
  unsure (1)..(620): unsure at all n locations
ctgttccccgcttgtnagaccaggacggccggcagaggtggcgccantcatctccaagaacctagaggacattctcatgagctcagggatgctaaatttgaaggagctctgtttgatcagtgggaaggcatcttggttagcatacctggatgtctattgtttgaatgctgatgggtctctattcgacgctgcactaatctcagctgttgctgcatttacacatttggaaattcctttggtatctntcggtgatgatggtagagtatttactgttgggggcaatgaaggcaaagcaaatatgaattggtaaacagagaaaagaggaagcttacgattactaatgttccattttcccttacatgtgcacttcacaaggataatgttctagcggatccaactgctgaagaggaatcaataatagagacttctgtgactattgttctcgattcttcagaccagatagtgtcaatacaaaaacctggaggtgcagtgacatctatgacaactattaaggaatgcattagcttggctaaggacaggagaagaaagttaagagaaattctcatggacaatgttgaagcaatggaagtcgaccaaactgattaagtttgtcacagttc

SEQ ID NO: 395355 - DNA, 377 bp, Oryza sativa
atgcaagcaatgtgattatgagattgaatatgctgatcgaagctcctccatgggtgtccttgctagggatgatatgcatattatcactactaatggtggaagggaaaaactagattttgtgtttgggtgtgcatatgatcagcaaggccagcttttggcctcaccagctaagaccgatgggatccttggtcttagtagtgcaggaataagccttcccagtcagctggccaaccaaggcattatttccaatgtttttggtcattgtatcactagagatccaaatggtggaggatatatgtttctaggggatgactatgtacccagatggggaatgacatcaacacctatccggagtgctccagataacttgttccaca

SEQ ID NO: 395356 - DNA, 463 bp, Oryza sativa
  unsure (1)..(463): unsure at all n locations
ccttggaaagttgttcaaaaattttcccataggcacttgtggaatgtgcccgaagaagaaaatgatgacctgccggcccaggcagagcatgaattgtcataccaagatgatgagcaagaaaatactagttttcaggttgcagatcttgagagagcttcaatcaacgagcagcctagcaattatgaagatggtatttgtgttcaggcttccctagttgatcagatccagagggaaagggaattggaagttgaagaaaatggctttgaagatgatgctgacgaaactgtgagacaatatgacagtnaaaatgaagggccaatccatgatgatggtgaatatagtgattttgagtaaaatatctgtgtatggctaagtcccaccataacctgctgttaggccatggctgtcagtttaaattgtgtctgagggtttgattnttgtgtattatgttgtttgaatattt

SEQ ID NO: 395357 - DNA, 487 bp, Oryza sativa
  unsure (1)..(487): unsure at all n locations
ccagttccgtctgaacaaagggncggtggaattagttgcagatcacatagtatgtgaagaagggaagcccatttcaccagaagcagcacaaactctgcggttgcttgggatgcagatggcaacattccgactgtaccttgtctgccggtggtcctctgatgactttgaagtttacaaggaaggcttggcgcaactgcgagctgaagctgatgattcttcttaagcttgtttggcttgcacacccagtttgcagtgacgcacttgctgtcttgttgtgctgaggcagtttttggtattgtgcgtgcgcatggcgtttgtgctcttggtacgttggaaatctgaaaaatgtaatatgttaacagggtgttcgttgtcctagtattttctataaagctattcgtgtcttattaacagggtggcacatctacgcagctaacatgcttcatttgttggtatttaaactcttctgaacaaaaaaaaaaaaaaa

SEQ ID NO: 395358 - DNA, 251 bp, Oryza sativa
  unsure (1)..(251): unsure at all n locations
tntgagtataggatggcagattttagtactggggatcgaaggagatagccaaagggtgacaggcgatcaacagaaatttcacttnttatccggcaaacaatggaggcaagcattttaacacatttagtgccacgttcacagattgttatatttgtccaagttcttcaagctgatggtggtacaagggctgcatgcatcaatgctgctacattagcacttgcagatgctgggattcccatgcgagacattgt

SEQ ID NO: 395359 - DNA, 487 bp, Oryza sativa
  unsure (1)..(487): unsure at all n locations
agcaggggttggatggtcaactttccccacctcctctcctcccaactttcccctttgctacagtagctccttcttcttctccagcccctcttccccccaaattccggtggttcgccgccgatgatggttggaggaggggtccggccacctcccctattagtatagtgtagctaggttgtagtttctttgtcaggtttttcctgtttctgtggctatgtcccgtttggttacgttcaagcgaagagctctgattgctggtggtgatgattaccggagttggagctgcgacttgaaggacagaatcttcttcttatgctggtgccgaactcattggtctgcgccgtgtgcagacggcggttgccttggatctccaggtggcgctgcttcgtacagcggcggcggcggccctggatctctgggtgccggtgctctgtgtggtggcaacggcctttaaatttctggcgatgttgctccgagcnacaacctt

SEQ ID NO: 395360 - DNA, 343 bp, Oryza sativa
ggctgggaaaggaggtccggaaaattcaaattgtgcttaccgcggtgtcaggcaacggacatggggtaagtgggtggctgagatccgtgaaccaaaccgtggaaggcgcctatggctaggatcatttcctactgcgctggaggctgcgcatgcatacgatgaggcggcaagggcaatgtatggtcccacagcacgtgtcaattttgcagataattccacagatgccaactctggctgcacatcagcaccttcattgatgatgtctaatgcggccggccactataccttctgatgagaaggatgagctggaatctcctcctttcatcgtggctaatgggccagc

SEQ ID NO: 395361 - DNA, 674 bp, Oryza sativa
  unsure (1)..(674): unsure at all n locations
cgccgctatcctccgcggcggcggggcgttctcctccggggcgcgacgcgtcatgctgctcctctcccccttcgtcccccgcctcttcttcggctgctggatccgatcgggctccgcccattctccgccgccgccgccaccgcgtcgcaggcgccgtccatgggggccggnctcttcagcgggctcatggacacccggttcccgaagcggcggcccgggttcaagtcccggcggaagagggccagcctccgncccaaaggtccgtactactgggtgaagtgcaagcctggggagcctatcccggcgaaccagccgaatgaaggcagtgtgcagggaaggaaggaaaagaagaggatcaagcagcgcaaggcctttatcatggctganaaaaagaagcgcaaagcacaatattctgctgctgttaagagaaaggaagcagaaaggacaganaggaagatggctgcagtggccagagagcgggcatggactganaggttggctgatcttaaacggattgaagaagagatgaaacctgcgacggcttaagtaactccctcgaaatggcaaganatctaacccgcttcttctgctgcgttttgnccncgtaattttggatgacatatatgttctgtgcaatcatggatgtaaatcccttgatggggcattagttgtcc

SEQ ID NO: 395362 - DNA, 399 bp, Oryza sativa
tattcatttacatcatctgcatcttcccatccaatgaaaactcacatacaaatatattcgtgcaggtaaccgcgggcgtacatttagggagctgtgcttttgcgaaaaaaaatgtccagcccacaactgatctaaaaaagtacatcgaagctattaagcggttcctacaccattcaagcagcttctatgctgtaaccatcaacagcacattcatcaagcaagatagagtttactttacaaaggaattttcacagaactacataaaaccgctaatggaaggtaaaaaaccgtcgacactgaagtacaagtagcaggaggtatttcaaccagcatgatcctccacgtttcaacagatgaccgttgcaactttgaagaagggttggacaaagttcgagcaca

SEQ ID NO: 395363 - DNA, 775 bp, Oryza sativa
  unsure (1)..(775): unsure at all n locations
ccttattggaactttggatggtgctaatgtggaaatcagagaggaggttggagaggaaaactttttcctttttggtgctgaggcacatgaaattgctggtttaaggaaagagagagcccaggggaaagtttgtgcctgacccaagattcgaagaggttaagagatttgtccgcagtggggtctttggaacttacaactacgatgacttgatgggttctctggaaggaaatgaaggttatgggcgtgcagactattttcttgttggtaaagatttccccagctacattgaatgccaggagaaggttgataaagcataccgcgatcagaaactatggacaaggatgtcaatcctcaacacagccagttcctccaagttcaacagcgaccggacgattcacgagtacgccaaggacatctgggacatcaagcctgtcatcctgccctagacaggcaaggcaagcactagccactccctgccagcgaccttcagagctaaggtgccgcgcaaccggtgatgcgatgacagcatctgcctcccagctctccttggcaggaaggtttcgctttgctcccagttttgagtagacagaagcccagttcagttccaggcttcgataaaacgctggaactatgccaattgttgccgtgttgcctagcctggaacacccttgttttacctgttatgtgtagcagcctctgctgancagctcatgtgctatatgggnattctnaagtgaancntagttaaaagggntcggttagtggnatnctttac

SEQ ID NO: 395364 - DNA, 450 bp, Oryza sativa
  unsure (1)..(450): unsure at all n locations
gtttccgagagcgagcgagagagagagagagagagagagttagggtttcgcaagtgatggcgacggggaacggagaggccgcggtggtggagaaggagggagagggcacgatggtcggagcctgggagaagaaggtggtgttggatgcggcggagaaggaggaggaggagaaggatagcgaggcggaggcggaggcggaggcgagggatctccaagctcgtcggcgacatgatcgacaacgtctgcnccgatcacgggatcccgctccccaaggtcgacataaagaccgtcagaaagatngccgagtacatgaacaagcactttcgncatcaccaacaaggaggaactnaaagatcttgggacgagggctttcatcaacgagntttacggccacgagnacaagtacttcctttttcaagatcattccgggcttccgagcgcgttcgcttt

SEQ ID NO: 395365 - DNA, 361 bp, Oryza sativa
caacatactcctgagctcacagctatggttcctgcatcagttcgagttaagagagaatcggctctcctcaaaccaaaaccaaaggtgcaacagtcagcaacaacatcatcttctgccctgaaaccgtcagtggctccaattagatctgagccccggccttcgtcctcagtatccaagccacaaagcattgatgattcctacatggcattcttggaagatatgaaggaattgggtgctcttgatgagtagctcaattagtctgacttgcaaattgcagttgttgacatgaactaagcatgagccctctttgcgttagggctcacgagtagggttttcatgtactcagaaaccatgtccattt

SEQ ID NO: 395366 - DNA, 603 bp, Oryza sativa
  unsure (1)..(603): unsure at all n locations
gtttgctgctccccctccccgccgccgccgcctccgcctccgccgctcagatgggaggcaagtgcccgcaccgcaaggtcaagaagcgccgcctctcgcacaagacggcccgccgaggcaagttcctcgtcaaggccgacgacgccgtctacgacgagctggtcaagctcgccgacgccggcaaggacgccgacgctaccccagctccccgtccgacgaggacctccccggtatgggacagttctactgcctccactgcgatcgctactttgcaagtgagagtntcaaggaggagcactacccgctcaaagcggccacaagaaaaggatcaagcaaaatgtcagggccagcccccacatactcaacttgatgcagagcttgctgctggaatgggggatgcctgacaatggcctgaagctcatgtccatgtgaacctcttcttgttcctggtttttactcatatgtttttgtcactgccgtacgtatgtacttgctctgcttagtagttaatggagttgacttgatggtgtctgttggtccaagaatttacttttaagaagccaagggttactctgttttgcctgcctcaaaaaaaaaaaaaaa

SEQ ID NO: 395367 - DNA, 609 bp, Oryza sativa
  unsure (1)..(609): unsure at all n locations
agaaaagaaaaaaaatactagtagtactctctctctactccactctgctactgtgtctgcgtcgtcgtctctctcctctccgattcgcggcggcggcggcgtctccggtctccagctaattacaaggaaggatggagtggtgggtgtggtgatattttgtagtgtttcccaatgtgaaagaagcttttgcaatggccccaggaagcagcattgtgaccgatatccctgagtcggattgtgtatctgatgggctctctgaggcactcactggcattaggcttgatggagattctacatgcaagccctggtctacatcacttgtcacagttgagctatcatcgctgacgggcttgaatgatttgctcgagtgtccagtctgcacaaactcaatgcgcccacctatactgcagttcccaaatggtcacacaatatgctctaactgcaagcatagggtggagaatcattgccctacttgtcgccaagaactgggtaatatcagatgtttggctcttgagaaggtggctgagtcacttcagctttccatgcaaatatcaaagcctaggctgtgctgagattcatccttaccaaacaaacttaagcatgagggnt

SEQ ID NO: 395368 - DNA, 426 bp, Oryza sativa
cgcggttgccgccgtccagcgacattctcacgccccccatctccttctccgcccgcttcttttcggcgacaagaacctctctactcgccgccgcttgcgtcgcgctcggcttcgcgcccttcgttctccgcctcctttgtgtgtgggggggaccggccggatagctggttgtggccgctgtccgtacggttcgaagctgtcactagttcttctcgtcgtcctcgggcgggcagaggttctcgcccaccaaaccggcacgccataactctcgggggggaaggaggtcaggattgttgtggtggggaattggagggaaatggcgacggagtggtccgacggtggcgaggagttcttgctgccggatgagttcctcgacgaagaattcttctccgagaagagaaggccgccgtggccgcaagagcgata

SEQ ID NO: 395369 - DNA, 459 bp, Oryza sativa
  unsure (1)..(459): unsure at all n locations
gactagtactagaacaaagacacaaacatctctgatacaaccacattttgtagcactcatctgctacacaccaaaaacatctctgagaccgccacattttgtagagccggcaacatgagtgtagaaatccttgacggcaagaccatcaggagcttcgtcgaggacgagggcgccttcaactcctccgtcgatggccggttcgccgccctcgacaccaaccgtgacggcctcctctcctactcggagatggcaaaggagctcatgagcctcagggtccttgagaagcatttcggtgttgatgaggccgccatgagctccgatgaactcgtggagatgtaccgtggcttgtatgcgcggttcgaccacgacggcaatggcacggtggacttggaggagttccgggccgagatgaaggaggtgatgttcgccgttggccaattggggttcngggttcctgcc

SEQ ID NO: 395370 - DNA, 410 bp, Oryza sativa
  unsure (1)..(410): unsure at all n locations
ttgatcacttggaaagtgtattagcaaatgaaccagtctcagtcaagagtggccaattcattgttgaagtcaaacctcagggtgttaccaaagggctcatagctgagaaagtactcacatcaatgaaggagaaggggcaactggcagattttgtattatgcattggtgatgacaggtcagatgaggatatgtttgaaaatattgccgatgtcatgaaaaggagcattgttgcaccaaaaactccactgtttgcatgtactgtgggccagaagccaagcaaagctagggttttacctgggatgatacatttnaagtcgtcaccatgttgagttcactggcggatccttcagaaccagaccttatggcagacttggaagatgactttggccacatcagtctcatcaatagga

SEQ ID NO: 395371 - DNA, 460 bp, Oryza sativa
  unsure (1)..(460): unsure at all n locations
gcccgaattatccgataattttttgcggattttgagctctccctgtcattttctgtcatttagtgcgtggaatttttgatcgctttcgaggcttttcttgttgcgtctgtgttggagcggagaaatttttgacccctttttgttactctcttgaagttttgatttgatccgctcggaaatttgatcttcttttgtgttcggaactcggatttttgagggggttttggtcttggcggctgcttggggtgtgagatccctcaagctggcgaaggaaatcagccgtgtccatggagatgcacgcaagctctgtctcttcccatggcgaggcccggctcggcggcgagcgggggctcgtggaccgggaggagctggtgcgcgtcatcggagtcgctctactcgctcggttaccggaaggcggccgcaacgggtggagctccacttttgttcctttaagtnaggg

SEQ ID NO: 395372 - DNA, 419 bp, Oryza sativa
ggtccatctttatcagatctccaccttacccacctgcagtcgagcctcatgtacccggggctccgccgccccgatcatgtcggtccaacatccatcccgccaccaagaatcagcactgacctgacaatgggcagctcgccgccgggcgcgctctgtccatgggcgccaagaagcccgacgacgccaagccgccggggctaatgctgttcgggcagaggatactgaccgagcgccagatgagccttagcggcaccacctcgccggcggccaccgggaacagctctctcaactggaacaccgagaaaggtgcctcggagggctcgggctccggcgtcatccagaacagccccaccgacaacacgtcgttcggagaggctccagtggttcagggagaacagcaccgtctccgagctcgggct

SEQ ID NO: 395373 - DNA, 440 bp, Oryza sativa
  unsure (1)..(440): unsure at all n locations
caaattactccaaacggcaggaaaccctagccatctccgtctataaatnagctcatatctggaagggctctcacactcgatcagtactgctcattttttcagttccactcgagctaagtgcggtacactgatcaacgatggtgtcctccaagatccactgcgccatggccgcgctgctccttgcaattctcctcccggtttctcatgcgtcggggaggtatgtagctccggctccggctcctgttcctgttcctccgccgccgcgcacctcgccgccgagccgtatccagccggtcgtcgtcgtccaggggcacaatctactgcaagtcctgcaacctcagcggctacaaccgctacatggacgcgtcttcccctaccaaatgcgacggcgnagttgggtgtgctacgggggacaaggtgctgaacatgacgagcacggc

SEQ ID NO: 395374 - DNA, 660 bp, Oryza sativa
  unsure (1)..(660): unsure at all n locations
cccangcttcccgcgagggcgcaggaagtattgcgagcgcgccatcgtcgccaaaccccggcgacgggcgacgccctcgcgctctacgcgggccttcgtctgggagaccacccgcgacgccgaccgcgccgacgcctacttcacccgcgccgtccacgccgcccccgacgactgctacgtcctcggctcctacgccggcttcctctgggacgccgaggaagacgatgacgaccacggcggcgagcagccgccgccgccgttcatgggggcagctcagcctccttccatcacagcggcgtcttgagtgaacagatgctcttgatctctcgccgcctgtaaagaagacgaagcaacgaacacccgaggaggaatcacggcggcctctctccggcgaggcaccggccgtcgtcgacgtcgccggctcggccggccccgcgaccctcggccgtggctctgcagctgaatccggccacctgtaaaaatgaatctggagaagagcaccacgcagctaaggtgtagtcgatcttgtaaaatgagcctgcaaagcctacatgatgatcttgtttacttcttgtacatgtgtatcactgtatcagcaacgcttgtgaaataaataagccacagccaagtatgttctagctaaaaaaaaaaaaaaaaaaa

SEQ ID NO: 395375 - DNA, 694 bp, Oryza sativa
  unsure (1)..(694): unsure at all n locations
caacacctgaaccagctgagagctagccaagaattcgatcgggcgagatgagcgtggagattttggatgggaggacggtggagagcttcgtggaggacgagggggccttcaactcgacggtggacgaccggttcgcggcgctggacggcgaccgggacggcaggctgtcctacgccgacatggccggtgagctgatgagcctccgcgtgctggagacccacttcggcgtcgacggcgccgccgccacggacgccgagctcgtcgacctgtaccgcggcctgttcgcccggttcgaccgcgacggcgacggcgccgtcgaccgtgaggagttccgcgccgagatgaaggaggtgatgctcgccgtcgccagcggcctcggcttcctccccgttcagatggtcgtcgaggaaggcagcttcctcaagagggccgtcgagagggagctcgccaaagctgcctgatcatcgccatcgccatcgccaggcgtcagagattctgcctacagatttgcaggtgtatcgagagatttttgtagtatttacagagtgtatactaatcaagtgcgtactgtcctcttgctgaaatggcatttcagcctttcagctatgtaatccggnntggaaaattttgtttgatctgaattatttggtgtcagcaataaaatcaangtttngntgaaaaaaaaaaaaaaaaa

SEQ ID NO: 395376 - DNA, 409 bp, Oryza sativa
ccactctcgcctcctcgcgactcggagttcaccgccgccaccgcctccgccgccgatctccccgtcccgccgcgccgccgccaccgtcctccctcctccggccgcatccccggaattcagaaccagtaggaggaaatggctgacggcgaggacatccagccccttgtgtgtgacaatggaactggcatggtcaaggctgggtttgctggggacgatgcgcccagggctgttttccctagtatcgtggggcgcccccgtcacaccggtgtgatggttggtatggggcagaaggatgcctattgtttggtgatgaggcgcagtccaagagaggtatcctcaccttgaagtacccgatcgagcatggtattgttacgcaactgggatgacatggaggagatctggcattaca

SEQ ID NO: 395377 - DNA, 961 bp, Oryza sativa
gaacacgggatgttttcaatgttgcggtttcagtgcacaagaacattcagcagagagacctagaagttggtcggaaccttggtaacatgatccttcgctggcttgaccgcatgaagccctcagcacagattcgtccccatcctccaggcccaccaaatggcagctcagagcaattcaggcatctttcgagtacaagcaagagcacaggagctcagaagcctacatccaaaactttaccgtgcgatggtggaaaggtgttgttttcacctctgaacattcgacccaagtccttccctgttctaccgacaatgatgcagcccaccagaattagtgctagcagccagtgtaggcggatttcctactcatcattcccatcggccaccgctaagaggaatgatttcatgcagggtgtgttccgcaaggacattgcacagctcatggtgtgatgatctgtactgtcctggaatttcaaatgttcaattgacttagtttcgcgtagaacacgaagtctcatgactcatgggtggatggatcctgcaataataaatgggctgaacaagttttttgttgctcaaccagtttagcaaatagattttctaaccaatgatcataagacagtatgtggtattccataatggatatgtttactccattcgtccttgaaatgcgcaaaaggaactatgtaggattgaaacattatctcagattctcactacttcctcttcacttctctttttttaattgtcagatttccatttcagaaatggcactactttagagatatctcctttctccaaactgggagatttctttttcctaggaggaattcacctttaattttactgttgtatgacccacatatggaaatggttgaatctgttgctgttgcagaccacaattcctggaattttttttgggaagataaaatatttacttgtttctccacaaaaaaaaaaaaaaa

SEQ ID NO: 395378 - DNA, 492 bp, Oryza sativa
  unsure (1)..(492): unsure at all n locations
ctcgtctccgcatccggtccacccctcgctgctcgggaatcatcagaaaggaggaggaggatatgccgctgggactgatactgagctcgctcggaaggtcgatgcggccgtaanggcctgtcctcgctcggcatcctctcctccaagagggcgcctcgggattactacaaggggaagaactgcaagcccaccgggttccacacccgcaaaggtggatatgttatggtggatgagaagttgccaagatttgtggtccctgacttgactgatttcaagttgaagncgtacgtgtcacaatgtgccagggacatcacagcgtcatcggcatcctccacttcagcagagactagtgaaaacaagaagtgatcttatggatgctctaggcattgtttgtgttttgaagaacgagagcatctttgcagttatgnttttcttatggtgaaacaagactgtctagtgatgaggttatcgntgtgatgtncttattagtaa

SEQ ID NO: 395379 - DNA, 368 bp, Oryza sativa
  unsure (1)..(368): unsure at all n locations
catcagtctgctgcggccatagcgaactgtagggtagcttcgccttagatggcgctcgctagggtttctccccccgcgttctcctcccccttcctgatccattccttactgcgccccttctcttcgccctcctccgtcttgcgccctcgcgtgactcgcgtcccccaccaccgaggcttcgccatcgccgccgccttatctcaggcctatccgcttccctctgcggacggggatggggcggtgatggaggcgtcgccgnggncgagctccaggcgcccatggaagnccacgtgactntactacacccaggggaaatgcaccatgttgaatgctactttgcatcttgagaaaattnaatnacaaatctg

SEQ ID NO: 395380 - DNA, 458 bp, Oryza sativa
  unsure (1)..(458): unsure at all n locations
nggacgggncntngggcaaatcggcnggnatagagctttagattcattgggttctgtcaaccaaatatgtgatgacatatgttcttttgttctaggaggtcctgatgctgatgatcttagtcatcgtgaggttggagtattctacgatgtgcaccgtcttggtgaatatgctgaatctttatgtggacgaagggttggctaatcttaccagtgttgctgctagatatatctaagcctaaggagacctgcatggattgtttttgggaactaagctgagcgaaaacaacagatgttgtgactgatattatgtccagtattttatcagtagggatcctgcagttgattgtaataagcgtctgttatatagcagcagttgtgtatagctgggtgtgtatncatggaacagcatgtaggcatgatatatggnggttatgtatttgtctatagtatatagtcag

SEQ ID NO: 395381 - DNA, 510 bp, Oryza sativa
  unsure (1)..(510): unsure at all n locations
cggacggtggncngngacgcgtgggcggacgcgtgggggggagcggcggcttcctccggggtcgccgtcaccatcaccaccgcgcccatgacggagacggaggacgacatggccgtcgccgaggaggaggaggtggcggcggcgtcggcggagacggaggagcacgtgcagcgcatcctcctcgccatcgacgccttcactcgccaggtgtcggagatgctggaggcggggcgtgcgctgttcaagaacctcgccgccgacttcgaggaccgcctcttgctcgatccacaaggagagggtggagaggtgggaggaggagatccgggagctgcgcgcccgcgacgccgccaacgagcaggcacgctccctcctccacaacgcccagctccacctcctcgccaccgtccgccacgaccacaacttgaccttgctttgcttccttcagcttcaaccaagtcaatagcagcagcagtttnatcttagttagtagtntagtaaccaatttcacat

SEQ ID NO: 395382 - DNA, 1105 bp, Oryza sativa
  unsure (1)..(1105): unsure at all n locations
ttcgcttgctctcccttgcttccgagggctccgcgcacggggtcgtcgcggctagagggtgggctcgccgtcgaggaaggcgggggtgtctggctcatcgagaacagtgccgaggggaatccgggttgcgggggcgatggccatggccgcggcggaggcgcgggtgcggcaggagaaggtgaagaagttcgaggacttcgtcgaccggagactgaagccggaccttgtgaacaccatcgcgcagggagcaaggtgttccagcagcagaagaccttcttggacttgaaaaggaacatcgaaaatttggagaagaatggagtcaccagtatgcgatccatggtcaatcttggctctgaggtgtacgcccaggcagaagtgccagatacaagacacatttttgtggatattggtctaggtttccatgtggaaatttacttggcaggaagctttgcagtttatatctgtaagagaatcaaggttggcaagacagatagatgagtacactcatctcatcgcaagcataaaagcgcagatcaagttggtatgtgaaggtatccgcgaactactcgagctaccagcagagtaaaggtgaaagttggcaatgcaatcgtnatgggggtgcttggtagacatgacttgtgcttttgcttttctcacgaaggcatggtcgcccatcttcgaacatgaaagattttacatgtactgttgtgcaaaagatggtttcatacactcatccctgtaataacattcatctaatcagattaactacagtagaatttcgctatgtgaaatcaacgcaaacactgtgaaaacttgttggttgatgcaacttctgatcttccctagattcccaagtcatagtgtacatggcatgccttggaagctcatggcatgttccattttgtcattagattagaacaatgaaaggaagttaggaacatgccattttgcatatagatgtgtcagtcaagacagcagagcaaggaaagtatatattgggctattggcacttcatctggtaaggcataaagcttttgcctttgccgcgaagctgccttattgtcttttccactttccnnnnnnnnnnnnnnnnnnnnnnnnnnnn

SEQ ID NO: 395383 - DNA, 709 bp, Oryza sativa
  unsure (1)..(709): unsure at all n locations
caacgaggtttgccncttagcccatcttgnactgaagacgaagatccgctggtacccttggtactcagctggacaggttggaggatggtctgaggtgtatgaagggctcacatttgcgtcagtgagaggtgctgggcatgaggtgccactgtttcagccaaggagagcattcaggatgtttcagtcgttcttggcaggggagccattgccaaaatcctgatggtttcctgccaacaactgatgtctagctacaaagtctagaaatctgtaaaagatgcttggtagaggtgcagtgtagttgataggtgaggagtgtgattgattggtgttgggaaaaggataataagagaataaggatggttgtgccatggaaaccatgggcatcgcaacaaggagctaataaacttgaagccttccgctctgtttaccactaaggttccatttggattggaggaatttcgctggaattttagaggaactgaactatttcctgtgaaaatcctataaaattcctgtgctctgaaggaaccctgagcaattatctcatcgaaaaagaatatatcatgtacgcaattcaacgcaaaagggagccatgaagtaatttgctgaatatagccatgtatagtgtcaccagtaacggaagtacctttatttatcatgaaaataagttccctgacatacagggataacatgcaaaaaaaaaaaaaaa

SEQ ID NO: 395384 - DNA, 693 bp, Oryza sativa
  unsure (1)..(693): unsure at all n locations
caaaagaggagaggagaagcaaacaaattcggcttcttcttcttcttcatttttttttcgatttttgaactcgcggaaggagcgcgccgccgccgagtccactcgctttctccccccgctccgccgccgattcgatccgaagggaggcagcgagcgagagagagaggtttgtcctgtgaaggcggcgatgccgttggcggaatcgctcagtggcgccagaaggccacgaatttcttctcttcatccagcttcaagctgaagcaggcagggcaatcagcaggggacaatatagctgatgttgctggcaaggttggttcagtggttaagagtcggtgggctgtcttccaggaggctaggcagaggcagccgccaccaggggagactgtgcaagagcgtttcatctctgctgctgccaccactggggtgcttctgaggaagggcatttcagagacaaaggagaaagttgcagttggaaaggtcaaagtttgaagaggctgctaaaaaaactgcttgacaaaagcaagactattttttgaacaacatttgaacgcttggcagaagggagtcgccagcacttgatgtcttttggtgttccccattngaagccaccgtacaacgggagcaaatcttggtaaagctgttccctctgggtacttgtnaaatgtgcagattatcctggttantttcaggttt

SEQ ID NO: 395385 - DNA, 702 bp, Oryza sativa
atcaagtctcgtaattttgagtcctttgccaggttaacttgtgcagatagcaaccaatttcatgctgtatgtttggacacgagccctcccatcttctatatgaacgatacatcacacaggataattagccttgtggagaagtggaaccagtcagaaggaaccccacaggttgcttacaccttcgatgctgggcccaatgctgtcctaatcgcaccaaaccgcaaaaatgcaaccattctccttcagaagctcttgtattatttccctcctcaagataatgatctcagcagctatatggttggcgacaagtcgattctaagcgatgctggactgaaatcgatagaagatgtggaggccctcccagctcctgccgagacgaagatgccgagccaaaaattcaagggagatgtgagctacttcatctgtagcaggcttggagctggcccaaaagttgtcactgacgaaagcctagcattgatcgattcggtcacggggctccccaagggagtgtagctgaaactatgtcattcggagagtttgtactgagagcgcaaagcgaattcaacttttgtagggtcataaactcggctttgatgatgtaatatttttctccccgttgacactggctgttattgctgctccaaggacaatactggtaataaaaaaatgatgaaataaattgatcaaaaaaaaaaaaaaaaa

SEQ ID NO: 395386 - DNA, 425 bp, Oryza sativa
  unsure (1)..(425): unsure at all n locations
ccgccacttcctcaccttggcttctcccacacgcagcagcagcagccgccgccgcctcgtttgctcgccgcgtccacgaccggtggttgccgcggtgaccggtagctcggtgtcgcccccaccgtccggcctgcgttgcaaaggcgtgacgcgagctttttatgctcgaggcagcttgcttcttggacgctagtagcagcagcatcggcgggagtggtacccgcgtccacggaacttctgcaaaagaaagattctcggatggaggtcgagacgtcgtccgggacggccgagcgcggggcgggcgcgggcgcgcanagcaagcctccgccgcagccgcagccgcagccgccggccaagaagaagcnttcanttcccggcatgccagatcctgatgcggaggtgatcgcggttttgccaaaaaggtt

SEQ ID NO: 395387 - DNA, 660 bp, Oryza sativa
cacaaaccccgccgctggatcaacaccacctcaagctcgaagtgagccactgtcccaagcaaccttccttcttctccccacctcgttttctccaaatcgccattcacaacccatacacactctgtgcgcgtgtgtgtctctatgatgtcggcgtcgcggagttctacaagccggcgccggtgttctcgccgtgcagctcgccgctgcggctgctgcagcagcagcaccggggaggatcatcaggaggagtacggctacggcagcagcggcggctgctgcagggacgccgacgggaggggagagcaacctgaaggcgccagggacgtgcccgccggcgccgaggaagccgcgcgcgcccgccgcgccgtgccggaagcggctgttcgaggtcgaggtgttaagcctccgcctcgaggagctcgagcgcctcttctggcgccctccgccgccgccgccgacgacgcagccgcagccgcagccgcagcagccgccgcagaagcgccggagggtggccaagctcggcagctagctagctcgccggagtagcacacgtgtgcgtggatggccataagtggtgttggttgggttagttactagagctaaagctagagtagttcggagttggtaggatttaggcgtactggcgtttttactgctgta

SEQ ID NO: 395388 - DNA, 341 bp, Oryza sativa
gatactggttgatttcctaaaggggcttctgaaatttgatcccaatgagcgatggtcgccattgcaggcttcatgtcatccatttataacaggcgaacctttcactggtccatatgaacccatacctgagactcccaaaattccaattggtcgtgctgccgcagttgaacacaatcctggcggaggacactggctagccgcagctgaatctcctcaggttggaaagtgttaataggtctctaccacccaataatccctatcctccaaaaataccttattcttatgggagtagttatggaagctttggtagccatggtagctatgttggtaatgctgggtca

SEQ ID NO: 395389 - DNA, 749 bp, Oryza sativa
  unsure (1)..(749): unsure at all n locations
ggctcaacttctgtcacgagatgatgaacagggctcttctgatgatggtgataattctgatggtaaatcctcagttaccatgagcagtgaagatgcatatgttactgatgaagagacaacaaaaatgttatctgatctgcttattgacaatgcacaactgaggttgcgcttgaattctctcatccgtaatgctgtaaatactgctgtgaagacggagaaagaaggtagtgatggaaccgtgccaaaaaagacggtgcttaattggttattggacagatagaaaaaccagtatatattcttgtgaattagctcttctagttatgcggccttctcaaagttatatgatgagtattgttataatgtgggagtaacaggaggtggaggaaaaaaaatccaaaatcttccttacatgcaggtccaagcatgtggtggtgttgtatcccttatttacaaaggttgtccaaggataatatatttaggaggcttctgagcctggcctcctagcgggagaacggtagggctcatatggttttggggaggcttgcaactggagtngtagagaacatgggtcccctttttttgcaccatacttcaatttgtaattgccgagctgatggatagctgcatngttgtatctttgtacagatgtttcagatggtgagttnccagcaggaagcatttgtacactatagttaaactctggattatctnctcaccctagagtctcactgtaaaaaaaaaaaaaaaaa

SEQ ID NO: 395390 - DNA, 609 bp, Oryza sativa
gtttctgaggaatgggtagggagtccttcaatcacaaggatggctcttacggaaaatgagattcatgccatcttccttgtcttcgaaatcacatcgtttattaactgctcttgttgattctcagaataagaaaacggttaagatgcaaaaatggatcgaatctaaggttccagagagagtgaagcaggacaaagaaagggccttgggccaaaatattcgagcccattcaattcttcaacgcaaaagagaaaaggttagcccgcaagtacacacagccccgccaggcaaagaaggcagctttctcccggatttttggaagatgcattagatgaggatgaggaacctgaccatcaatatggttctcgccgaattccagcacgtagtcgttttggggatgaactggaggctgaagcactagctgagaggcgcatagttagtgcaaagaagtcaagtatgggcagaaacattcctcgcaaaccatcctttcctgctcgtccgcctagacgacaggaaaatgaatattctgagagttaaagggaggagtcagagtatgaaactgaaggagaggatattgagcactcaccaacccaggggagggaagatgagctt

SEQ ID NO: 395391 - DNA, 479 bp, Oryza sativa
ccatttccaacccgtcgtctcgccttcgcctcgcctcgtctgctccaccatccaccaccaccccgctacgctttcctcctccccctccactccagattttgctcccctcgagaccaccaccaaaagcagcagcaccaccgaaagaggaagcaaagcaaagcaaagcaggcgaggtttcagtctcccaggaatccccttccaagaactcccacccgattcgaagcgctcgaggaggttctttgctcaatcagagtggatcttctgctgggaggattgggaagagcgggggagagatggggtccggatctttgctcaaggttcttgccaagaacttcgatgttcttgctgggcctttggttgcactagcttatccgttgtacgcttcagttaaggcaatagaaaccaaatcccctgtggatgatcaacaatggctcacatactgggtgatgtactcattaataacactgtttgagctcaca

SEQ ID NO: 395392 - DNA, 714 bp, Oryza sativa
  unsure (1)..(714): unsure at all n locations
accatgttgccacagtgnctgcttgctgtgcataacacacagatactcttagcggttctttttgnctataattgcattgctccttggtgggttttgtgcttaccacacacatctttgcttaacaaatacaacaacgaatgagacattcaaatggcaagactatattatgtggaggaaaaaggtgaacgaggaaaaggctgctgcaaatggtgaagtgcgcaaatcgccaccaagcaaatggaaggcgtttttctctagatcacatactgaggccgatgaaacaattgtgaaaaataacatatatgacagaggcatgattagaaacatgtgcgaggtgtttgtccctttgtcagaacggcagtcattttcccgcaaggaatctgattgatctgaatgctgttgcagctttgcacctgttgtatcacttctatgctgtaaatccttgtagaatattagaatcattttttccatactagagaagaaacagtctgaggatggtgatcaggagtgagcatcacacaaggagaccccccaccaaaaaaattcagatctgcccaagttgcttttggttttgctctcctggaatagtaggtttgaacaacagtatactaccaagagttgataacttacttgatagaatctgttgacagcatatgggaatgagaattgtacattgtcttggttatttctttnnnnnnnnnnnnnnnnnnnnnn

SEQ ID NO: 395393 - DNA, 492 bp, Oryza sativa
  unsure (1)..(492): unsure at all n locations
accagtcgctcagtgagccctggnaatcaggtggaaggaaacaacaaagctgcggaggtttctaagaatcctgatccttcatcgccaccccatcatggtaagaccagggaggacgaagaggaaggtatgatagatgaagatggagagatagctgatgatcctcgggcaaatgcaaccgtgcagacatggcggtgataattgactctttggtcccaaaagaatttaacaaactgctgagcagccactacagatgatctgcgtgacaaagctcaaaatgttaaaaattgtctgaagctgtcttttcgtagtcaaaacttaagttatgaaactatccgtgtcgtagagagctggagattgttttgtgcctgagttgtcttataacattatatactttgtagaccctgtcgaagtagatcatgtgaagtgaagttggtagctctgttatttgtgaaccaataccggaggtgcaaatcatgcaaaaaaaaaaaaaaa

SEQ ID NO: 395394 - DNA, 507 bp, Oryza sativa
  unsure (1)..(507): unsure at all n locations
cgttcgggttgagcaccgactatctgttagactttggtcggcagggatattgttagtgttcctcagatttaacgatgacttccatggcaatcattggttgagtccggtgaagccaccaacatatctacgactcaactccaaagctcaattagtgccaaatccgtggaggcagccggagggatcgctggcaggtcaaatgggaagcacgtttgaagaggcccttgggtgcaatcgtcgcggcaatgccgcggatctccgacgattgtattcactactactgctgtatcagatgatctggaagtttgcttccatcattcaatcattactttcaggaagatggtccttaacgtttgttgttatcaatttcttgcaaggtgatgtttcagggaatgttgttcccttccaatgtactatgtttaatatgcaataaaactttatgngtttcnnnnnnnnnnnnnnnnnnnnnnnnnnnnnnnnnnnnnnnnnnnnnnnnnnnnnnnnnnnnnn

SEQ ID NO: 395395 - DNA, 377 bp, Oryza sativa
ggttcttgatgagattggtgttgatgtggcttctcagctgtcttcagctcctaaaggtcgtattgcggcgagcaacaggaaagctgagagcaaccaagcacgaaatgccgctccccccagaaataacgtggagcctgaatcctctgctgaagttgacgacctggagaggagactggcttcccttcgccgcatctgagcagctgataaatatatagtgcatctataattctatatgtaaatttgtttcactcaacatagcttgtctgaatatgtgcgagtagagtattgtaggcaaacaacaagatttaaataacataattgaaccttcggattttctatggagggatgagcatttgtccaattttggaggaaaaaaa

SEQ ID NO: 395396 - DNA, 462 bp, Oryza sativa
gggtttgatggtattgaccgacatgatcgatatgctaaccggaacgttgtctttttcgatatcaacatgaaaggtctggatggaattcaaggccccatctatgttggtactggatgtgtcttcagacggcaagctctctatggttatgatgcgccaaaaacaaagaagcccccatccagaacttgcaattgctggcctaaatggtgctgctgctgctgttgtggtaacaggcatactaagaagaagacaacaaaacctaagccggagaaaaagaaaagactgtttttcaagaaagcagaaaatcagtctcctgcatatgctcttggtgaaattgaggaaggtgctccaggagctgagacagacaaagctgggattgtgaatcaacagaagctagaaaagaaatttgggcagtcttctgtttttgttgcatcaactttgcttgaaatggtggacctgagagtc

SEQ ID NO: 395397 - DNA, 265 bp, Oryza sativa
gagaggctcctgcaagagccttgcaggaggaaggaaagacatgaatgtacagctcttggcttgaatccaacattctcttttaagagtctagtttagaactttagatttgcatcatgtatatgtatgtctgttggaaaaagtactttggaaatgtggtgctcttcttctgccatgattcattggcgaggaaaaggatgttttcttgcatcggtgacgaagtgagggtcaccgaattgttagcttttgatccaaaaaaaaaaaaaaa

SEQ ID NO: 395398 - DNA, 874 bp, Oryza sativa
cttgcaacgatcactgggaagggtggtcatgctgcaggcccacacaacgccgtcgaccccatcctcactgcatcctctgccatcgtcagcctccagcagatcgtagcccgggaaactgatcctcttgaggctgcggtgatctccgtgacattcatgaaaggaggcgatgcctacaatgtcatcccagagtcggtatctttcggtggcaccttcaggagcttgacatcagaaggcctctcatatctcaagaagaggatcaaagagatcgtcgaagcgcacgcgaccgtgcaccggtgcaccgccaccgtcgacttcatggaggaggaacgcatcccgtacccggccaccgtgaacgacgaagggatgtaccgccacgccagggccgtggccgtggacgtgctcggggaagacggcgtcaaggtgggcaccccgttcatgggcagcgaggacttcgccttctacgcgcagaggttcccggcggcgttcttcatgatcggcgtcggcaacgagacgaccatgcggaaggtgtaccccgctgcactccccacacttcgtcgtcgacgaggatgtgcttccggtaggagccgccttgcacgcggccgtcgccatggagtacttgaacaagcacgcatttacggctacgttctaaggcctccttttcatgtaaacatggggatttcatatgaatttcacagaaaatggtgtaagttcttgtaaaaaaaaacatgggaattttgtgtgttccaaaggaggcctaagtctttcagtggcttttgaaatactcgtgttttctaagttgtagatttagtacaagattttgcataaaggtaaataataatagagtgaattacagtgcaaaaaaaaaaaaaaaaaa

SEQ ID NO: 395399 - DNA, 607 bp, Oryza sativa
  unsure (1)..(607): unsure at all n locations
ggaggaggaggaggngccgccgccgcaggcggccttgcagatgcagcagcccggcggcggcgccgatgctggtggcatggntggcgcgttcccgccggacccgtctgccgccggcctcccgttcttcaacctgccgctcaacaacatgcccggtggcggcggctcacagctccctcccggcgccgacggccatggctgggccggcgcacggcaccgttctgacatgcgcatacatgggtgtagctccggcgaaaggagaggagatgagaggagagatcacaagaagcaaaggaaaggacatcgcaaggnttcatggccgcagcttgcaaaaggttagcgaacgcacgcatgaaccacgtatttcagggttaccaccgatcgatctatatctactgctctatttctatctctatgttacaattatttcgtagtgtttgctcgatctctgattatgtgttttcgttattgttctttttttcccctttttcttttattgtttcttttgaaccttaatttgtggtgtaacctttcttaattgtcaatctggctttaataattaagtagcctttaaattgttcgaggnnnnnnnnnnnnnnnnnnnnnnnnn

SEQ ID NO: 395400 - DNA, 636 bp, Oryza sativa
  unsure (1)..(636): unsure at all n locations
atnggaggttctttgacgatcttcgcccatatncagtaattcagtttgtnccatgcattgcaatacctgtnatggctattgtaattccaccaatgtatacacattcgagctattggctgtgggcagcaggattttacctccttgctaaggtagaagaggccgcagataaacctatatataaaatgggacccatcaaattgttaagcggtcatactcttaaagcatcctagctgctgcaatggtgcctgtgttcttggcactcatgctggccaaaaggactgttgaaccagaaagggtaagtttattcccagcggtggaaggtccaagttggttgcagtgagagagactcgattcaacaaggacaggaatacagtcgactacaactatattgcagtttccactacacctgaaccatagatgtattgttattatttttcatgactttaatttctgtacacatgtaagagaaatggcaccggccagcatagaaactagatcgatcagtgtacattacaatacgagacgcgtcatcgctgctaatcagaacgtgatggtgtcatggtgatgttgtatgataacccttcataaataaatcttgtgcatattattcttgctcnnnnnnnnnnnnnnnnnnnn

SEQ ID NO: 395401 - DNA, 396 bp, Oryza sativa
  unsure (1)..(396): unsure at all n locations
caagaattcagaacataccaggaggtcagctgctcaactatgccgatcagaagacagcaagttctgcctctagctctcattttcatgctgatcttcagcaccacaatcaccatcagtcatgcatccagattgctgggagcgagatcgcagccacgacagggaagcacggtgttcttaacttcagcaaagccaggtgcatctggatgcaccaatgatcctaacaatcctggaagaagatgccaaacaccatgagagctttgcaacatgtacatgtacaatattcattttttttttctttcttttctgttcttttcctgttcttctagaggttattcttaaggagcccttttaaccctncacagccaattcatttgttctttttgtacagaagttttg

SEQ ID NO: 395402 - DNA, 442 bp, Oryza sativa
  unsure (1)..(442): unsure at all n locations
cccacgcgtccgtcccagatatagtcaatcagtcttgtcttcctgtgctccaatctcctgtaggtagtgctccgcatccaacgccgccatgcaacctgatcccgcggcagtaatggcctggcgatacttcttgtcctgaacatcaccggcggcgaagactcccttgacgctggtgtgagtngagccgggcttggtcacgacatagccatcggagtccagctcgagctgcccgccgagaaactttgtcgccggctcgtgtccaatggcgaagaagagcccggcgacctggaggtcggagactcgcccgctcaaccacgttcttgacccttgacgccggccaacggaccgccgtcgggccgcgtacggctcgacgacctcggagttccagacgacctggatcttggggtttgagaaggccgggctncatgatcttggacgcgcg

SEQ ID NO: 395403 - DNA, 618 bp, Oryza sativa
  unsure (1)..(618): unsure at all n locations
gttacccgtgaacgtaccggtacggacgcctccggcaggcggctgtacaacccctaccaggacctgaatatcccctacaagcagctctacgacctccccacctccccggagttcctcttccaggaggagtcgctcgcccagcgccgctcctggggcgagnacctcacctactacaccggcataggctacctctcgggcgccgtcgccggcgcgccgtcggcctccgcgacgccgcgcgcaacgccgagcccggggacaccgccaagatccgggcgaaccgcgtcctcaactcgtgcggcagaacgggccgccgcatggggaacacgctcggggtcatcggcctgctctacgccgggatcgagagcggcatggtcgccgtccgcnaccgcnacgactggntcaacagcgtcaccgcggggctcggcaccggcgcgctcttccgcgccgccaacgggccgcgctccgncgncgtcgcgggcgccatcggtggggtcctcgccggcggcgcatggcaggcaagcaggcggcgaagagatgtncctgccctctgatttgtccgnacggtattctctctgctgtgataagaaatggtcgaatcaatttgttgccaaaaggaat

SEQ ID NO: 395404 - DNA, 461 bp, Oryza sativa
  unsure (1)..(461): unsure at all n locations
ggcaaaaccagagcccgctcacctgctgagaaacaccgcgcagtggcagagacaaacaacgtacggccgtgtagaactgtagatcgtatcgtccgagtcccccaagagtttcaggccatcaacccgtagtttggcgctcccttggttttacctgcaagacaaaagagctagcgaccgaatcgttcgacggcagaggcgtcatgggggcgccgagcagggaggatgaggaggcgaagaagatggaggccggcggcgacaccgtcggccagaagctcgacgccggggctctcttcgtccttcagtccaaagggtcatggctgcactgcgggtaccacctgacgacgtccatcgtngcgccancgttgcttgagcctgccgttcgcgttcgngtcgtttgggtnggcggcggggcttaatcttcctcgtcatcggcgccgcgtgaccttttacttgtacaacct

SEQ ID NO: 395405 - DNA, 827 bp, Oryza sativa
  unsure (1)..(827): unsure at all n locations
gacatatagtgatcaatcatgcatcttctggttgttggaagctagcaaaactgaaggttcttgttgctgttgctgttcatcattatcatagccaataagaaagcaagaatccaagaggagacaggatcggaggaggaggaagaaagcgagaaaccaatcgatcgatcgatcatgctgatcttggaggtgggcatctggttgctgccgttcacgctgctggtggcgccggtgaggaggatggtgaggctggtgcaggagctgcagcggatcatgctcgtcgtcgcctgcgaccggagccgccgcggcggccggccgccgacgttcggcgaggtcttgagccgcctcgaccgcctcgactccgcaccgtcatcgtctgaacgatgatcgattgatcagcatcctgtaagctgtaattaagttgcttcaattcctctgccatcttcttcttcagttcttcttgatgtaaatttctgaatccgaattaagtgcgttttagttcttcaagaaaggatgctctcttctgaatcttttgctctgtgatcttcagtttttggtacatgcaagcacttgcatgtatctgtaattatgtatgtacggtttttgtatatatggggctgaaattaagttttatccagctccctgcataagattattgatgaacaccagtctaaaaaaaagagtattgatgaacaagtattcataggatgaatgaagaagtgttctctgttgtatagagagaaaaggttcctttgttcttcagtttatgctgatgattcataattaatttggagctcatttctttctctgnnnnnnnnnnnnnnnnnnnn

SEQ ID NO: 395406 - DNA, 352 bp, Oryza sativa
  unsure (1)..(352): unsure at all n locations
gcccccgctgctccttccgagagcgaggtggtggatccgcagcccgcggaatgagcggctctcagttcgttacaatctcattgcctgagaagatgacttgcatctaagagttcgtttggagaaatgtggctttggtctgggaaccgatgtaggtttcttgctctgattatccgtgcagtttgttctttgatgagtagctcctggctctctttgttcttagtattttacctgtttgcttcccagttgtactatctcgtagcaagattatgttccgtttattatgataatgatcaagatttgaagcnnnnnnnnnnnnnnnnnnnnnnnnnnnnnnnnnnnnnnnnnnnnnnnn

SEQ ID NO: 395407 - DNA, 692 bp, Oryza sativa
  unsure (1)..(692): unsure at all n locations
gatgaaaggagtgtgtaccattgccccttttgcaatttgtgtcgtcttgggcaaggattgggtattgattttttccattgcatgaagtgcaactgttgccctggggcatgaaattgatggagcataaatgtcgagaaaagatgcctagagatgaattccccaatctgctgcgacttccctatttacatcgagtgcagcagttaaaggtctaccttgtggccatttcatgcattcagcttgctttcaggcgtacccctgtagtcactacaccctgcccaatctgctctaaatccttggggagatatggacagtatactttggcatgctttgatggcttgctgggccgcagaagagcttccctgagggatcccgggaccggtgccaggatatactttgtaacgattgtgaaagaaaaggaaggtctcggttccattggctgtatcacaaatgcggcttctgcggttcatataacactagagttatcaagattgatagagctgattgttcaacatcagattaaccaggcgagattttccctctcatattcgaaattccttttgaatatatatattgttgtaaatatacatcaacttaaagaaatccatgcgtcatgcgtgctcttgtgtgttgctgcgattaacaagtcataggagatgctaatggtgggcgcttnnnnnnnnnnnnnnnnnnnn

SEQ ID NO: 395408 - DNA, 609 bp, Oryza sativa
ggacagagcaagatgtgagattaacggctgcctggctgcaggaccttcttgcagtgggttaccggcagcctcggctcatgtcattggaaattgacaggcagcgggcaaccattggagagggtgacatgaaggaatttgtacccaagaagctgccatctgtgcacttgggagttgatgagattggtacagtgaactatgagattggaaacctgattaagtggagaaagaactttggaaatgttgtgttgatcatgcatgttagtgggcctgtggatcgcacggcactcgagtggaggctgctatatggaaggattttcaagacggttatcatactagctgaacagagcaacacagagcttgctgttgagcgctgcgcgttgtcacatgcatacaagtttctgcccaaggtgtttgcgagatacggtggtgctgatggatttctcttcctgcaagatcacatgattcttaactactggaacctgttgcaggctgacaaggaaaaactttggataaccaacaaggtttgtaggcttcatgtatttgatattaatcaattcacatgatacggtattatccataacatactttctcatactgcagattgcacat

SEQ ID NO: 395409 - DNA, 542 bp, Oryza sativa
  unsure (1)..(542): unsure at all n locations
tgagcgcccgtaatacgactcactatagggcgaattggntaccgggccccccctcgaggtcgacccacgcgtccgcaatatttgatgaaccaggacaagtggaagaccctggtgcacacggcgagcatagcgccgcagcaaagaaggggagctccagttccacaggaactcctggaccgtgtgctcgccgcacaggcctactggtcggagcagcaggcaaagctccatggcgatccccctgttcctgaaatctgccctacctgatcctgatgatgattgatggagaaggcaagaatggccctcgtgtacaaatcggtgtaaaaattgttcagaagggattggttggttgacgtttgattgaaatttgtcgacagttgaaaactcacaacttggtccttcctactgttggttcgttaacaggaggaggaagaagaagaagaagaagaagaagaagcttatttgtaaatttcagcagagtttactgtctttgcaaaaatgcaagtcgttttggacaaaaaaaaaaaaaaaaaaannnnnnnnnn

SEQ ID NO: 395410 - DNA, 530 bp, Oryza sativa
cttcatctagattaccagacacacataataccgacagaagtaggaactctgaagacacgtcgaatggcttttcagcaacaaacggtgccagtgggcccaagatcaatgggacaagccaaaccaaaagcaagatgggttccattcgtcggcggcaaaaagttgaagctgatcaagtgtctaacaccacagatacccaggacgatgtttttacagacccaattaagatgaccaagagtttgttgccaaggccaatttctagtatccgacaaaacatggacacaagcaacccagagtccagcctgaagagcaatggttcatttctgagcggatttagatcagtgcggaagtcgcctagcacaccaaactttgcagatgcagagaatgggatctctatgtggtcaagctcggcatggactttcaaccatgagtcgttcacgcgaccattgcttgatggccttccgaaacccacagcacctaggaggaccaaagctgctttggattgagctgcctgtggctgtagtaggtttgtc

SEQ ID NO: 395411 - DNA, 570 bp, Oryza sativa
  unsure (1)..(570): unsure at all n locations
agcactcctcaggccgatcttgctcatctattagcatcgcgtgatcaagaacttagagcactctccgctgagatgaatcaagtgcattcagagcttcaacttgcacgtagtctgattgatgaaaaggactcagagatccagcgcattcgtgtgagcaataatcagtatattgaagaaaatgatagactcagagccattcttggagaatggagcgctcgagcagcaaagcttgaaagagcactggaggcagagcaaatatcgagcattgaattacggaagaacattgcaaaactccgagggcagactttacaaaggatccaaaacacctgatctcccttgttttcaggatatattcacctattggcgatgtttgagcaggtttatcaactctttcagctgcttaaaaggtgccacctgtgaatatccttgaattccaaacctctagtgataagaagagtgccaacacagtccagtttcgctaacaacaaagcaaggtacaaggtcatcactcaatctgatatgcatcaaggacaggcaaaatgnctttgctaacacctctctcgtgaatgt

SEQ ID NO: 395412 - DNA, 457 bp, Oryza sativa
gttcccttctccacctatcacctctcctcggatcgtcagcaacagcggcggcgatgtcggcggcgcggtagtggacgcggagtacatggcggaggtcgagagggcgcgccgcgacctgcgcgccctcatcgccagcaagagctgcgctcccatcatgctccgcctggcgtggcacgacgccggcacgtacgacaaggcgacgaagacgggagggcccaacggctccatcaggttcccgcaggagtacagccacgccgcgaatggggcatcaagattgctattgatctgctagaaccgatgaaacagaagcatcccaagattacctatgctgacctgtatcagcttgccggagttgttgccgttgaagtcaccggtgggccaactatagattatgttcctggcaggagggattcttcagattcccagaggaaggccgtttccagatgctaagaaaggt

SEQ ID NO: 395413 - DNA, 795 bp, Oryza sativa
acacaacatgtctttgaactggtcacaacaacctggagctgctgtccgcattgcctcgaacgagcatgaggattggtgcgtcaacgcgaaccaagaaatctactaccgccgcaatggaggtgggttgggaacgcaaggagggagctgccgtctacgtcgacgtggctcgcgatggtacctgctgggtgatcaactctgccgaccagatctaccgctggaatggacatggctgggaccacatgcctggagccgcgcgcactgttggtgttggttcccgcaacgacgtctgggtcaccaacgccaaccacgagatctaccactgcaacggagatggcaactgggcccgcatcgatggcgctgccacccagatctcccgccggtgacgatggcactgtgatgtgcgtcaacgcccagcaacagatctactaccgccaggggtgtgcatggcgcgtggcagcagctcgatggcgcccgccgtcccaggtcgactgcttcgatcacaacacctacttggccgtcaacgccgccgacgagatctacctccgccagcacggcgcctgggtccgtcagcctggagcctgcaagcacgcctcgatcggtggcaacgactaccgccgcgtctgctgcaccaacggcgcccacggaatctacactcatggtcattaataagctcaccccgagctcgccgccccgcacaactgatcagttgtggtcttgtggaggagaatagtattcatgcctgtgtattcattgaataaaagtgtctgtacttgtaccccaaaaaaaaaaaaaaaa

SEQ ID NO: 395414 - DNA, 700 bp, Oryza sativa
  unsure (1)..(700): unsure at all n locations
cttcttcgttggccgggactcttccttccccccatgaactctaggagggacttccgcagccacagagctgctttatttgatggtattgaggagggtgcgatcagaagttcagcttactcttctcaaattcatgagcatgagaatgaccaagctatggacagtctgcatgacagggtcagcgttctcaaaagattgacaggagatatacatgaagaagtggagaatcataaccgaatgctggacagaatggtactaatatcctgcaagatgctatctttcttgtcactactctctaatgcatttctttgctatttagggtaatgataatggatgcttccagaggatttctatctggaacggtggacaagtttaagatggtttttgagaccaaagcaagtcgcagaatggctaccatggtggcttctttcatttctgtcttcttccttatatactacctaaccaagtagaagaattgtctgactctgcctttcattttcctcttgcttgcacgtaaagtacatggctgacggtgtttatcaagttttgtgcacttgatgaccgaacatttgagaattttatctcaaactgtgtggattgattgtaaggcgagctgaacgttttctgaatgtggtgagaactgttntaaaactttgtgacggcaaaagatgagttacgagttgatgataaaaaaaaaaaaaaa

SEQ ID NO: 395415 - DNA, 519 bp, Oryza sativa
  unsure (1)..(519): unsure at all n locations
gnnagctgagccaattatnccccaccnccnccnccnccntctactcgctctcnccnccncccgcgactcccccctcctcggccgctcgcaccctcgccgcgtcgacgctcgatcgctgttcgcgcttcgcctcctcccaatcctctccgccatgcatctaaccctcgaattcgggggagggctggagctgctcctggagaagtccaccaaggtgcacaaggtggacctccagcccaacgacggcgatgggaaggtcgtgatgaaagggttgctcgcttgggtgaagtccaatctgatcaaggagaggccggagatgttcctcaagggtgattcagtaaggcctggtgttctcgtacttataaatgattgtgactgggagctatgcggtggccttgacgcggagttggaggagaaggatgttggttgtttttatctccacattacacggtgggttaagtacaactaattaggactaccgaaatcaccactggatatcatgttgctaaatgcatcttgtac

SEQ ID NO: 395416 - DNA, 684 bp, Oryza sativa
  unsure (1)..(684): unsure at all n locations
atcaaaaggaacagaagttaccaaaaattgagtttctgattgttgacctatctcctgtaaatgatattgacacaagtggaatccatgccttcaaagagttgttgaggacacttgaaaagcgccagattcagctgattttcgccaatcctggggcggctgtgatccaaaagctccggtcagcaaaattcacagagctcattggtgaagaaaagatatgcctgacagttggtgacgccgtaaagaaatttgctccccagttgactgagaatgtctgaactctgaagaaggtgcaacaagttatattcaagaggtgtcattcttttagaaactcagtgttagcaagtgcactttcatagtgcaaagcggcactggagtaaataacgtagttggggagggagatggtaaataaagtagtgtgctggncctgaagcccaccagatttgccaggtgtagttggggaaaagaacatatgcagagaagcatagttgggtatgtaaatgggtatatcagtgcatgcaacaggggtcggcaaggcaagcacatggatgaatatttcttgtataaaaagtgtgatgcttgatgattttaatgtatcatcgtctagatcaaataaatttcattgtttgtttgtgttgatcgatcnnnnnnnnnnnnnnnnnnnnnnnnnnnnnnnnnnnnnnnnnn

SEQ ID NO: 395417 - DNA, 571 bp, Oryza sativa
  unsure (1)..(571): unsure at all n locations
gtccagactccattgcttaacccctggacgagctcggttgtgtggnatagtccctcaatgccccnataatattcgtttgttatagttgaatggatggtacaattttttttcatacatcgaattcgggccctatgtgagtcagcgaacttctttaactaaatcaaccatatcgaagtgaagtacctggcatgcaccgcgcgagacaggatggatgggtacttcaactttggagcgatgtgcaacatcattggggtatgctgactcatggaaagacggggaaggaaggagaaactaaccaaaaaaaatactggactaacaagcttcttgtatatctatctcactatctgtatttagtactctgtataatgagacgggtatccgccatatagtcgtcggtgtatgtattgaccgacctagtttttgtttcgactctactttcattgtttcggctaacttcgcgaatctgttggtgtttgtaaatgccagtttttccataaagaagagctctgtttgtttccaactcagttcttgaattgttgcctnctttatttgagtcaaaaaaaaaaaaaaa

SEQ ID NO: 395418 - DNA, 252 bp, Oryza sativa
  unsure (1)..(252): unsure at all n locations
ccgaaagctgcccctcgaaaccgagggaaactttcagaaattcagatcgagttcgttcgtttgttgtaaatttagagaacccaaaaaaacaaaagacataaatcaaagtgtataatactagtacatctcttctgttcttctgttcttgttcatcccaactgttcttgtaaactgcaaatcgcattccttctttactctgaattaagaagtgaaatgttggtgttgttatgccaaaaannnnnnnnnnnnnnn

SEQ ID NO: 395419 - DNA, 516 bp, Oryza sativa
  unsure (1)..(516): unsure at all n locations
gtcgntggggagccaggtggcgttncaggcgatggtgtcggtcaccacgctggggctgtacatcgcgtacggctgccggtgtttttccgcgtgacgacggctcggaagtcgtttgttccggggcagtttcacctcgggcgatatgggctcatggtcggctggatggccgtggtctgggtggccaccgtcacggtgctcttctcgctgccggtggcgtacccggtggccaaggagacgttcaactacacgccggtggccgtcggtggcgtgctgctgctcagcctcgtcgcgtgggtgttccatgcccgcttctggttccaagggcctgtcaccaacgttgacgcgtaaaacgtnccctgaatttttgtaaatttgaacgcgcgtaccctgatttgataaatttcaatttgaagcgtatttgggtttgaccacgaattggatccgtaccgatccgttaaactcnnnnnnnnnnnnnnnnnnnnnnnnnnnnnnnnnnnnnnnnnnnnnnnnnnnnnn

SEQ ID NO: 395420 - DNA, 384 bp, Oryza sativa
  unsure (1)..(384): unsure at all n locations
agcagcggctgaggagaggagaggcgagacgaggggggaatcgaggcgcgagggagagggagagggagagggagatgtcgatcctgtgggagaagagcgcggggtggcggtggctggtgcggcggacgcgcgactccaagcccttcttcttcaccttcgcggcgctgtgcggcgttgtcccgggcgtcgtcggctacggcgtgatgcagctcaccagctcccgcaacgaccagctcgaggcccanctccgatccaccgnccgccccgagaccnngatgatggggcaagtnaaccgggagagactggcagagtttcttngaganctgcaaaggaaagaggncacaaattgncagatatgttgctngccctcaaaggggagacact

SEQ ID NO: 395421 - DNA, 647 bp, Oryza sativa
  unsure (1)..(647): unsure at all n locations
cctagatattggaccagaaagaaaggaagcatggattagttgggtacaaacttacattgaagagttggtttcaagtggcgttcctgacgaagaaaggaaagctgccatgaactctgttaatccaaagtatgttcttcggaactatctctgccagactgcaattgacgcagctgagcaaggtgattatgatgaagttcggcggttattgaaagttatggaacatccatatgatgagcagccaggaatggagaaatatgcccggttgccaccagcctgggcatacaggccaggagtgtgcatgctgtcctgctcatcatgaaaccaacattccatcacgtcaaatatgcaaacttgttttttttatattatttttttctgtataggaggtttaattttgagctactgctatagtgtctaaagcatcacatgctattttactgccgatgcatatcagaaactggtgttgttaatcttcgagttatcatattgttgacggtagctaagcgttcatagcagttgggaaatagagccaccaaactcatccgattttcttagatatagtgctttgttgttgtggaacagattatattttcgcagatgaaccatggatgtgcatttagttttaaaaaaaaaaaanaaaaaaaagg

SEQ ID NO: 395422 - DNA, 665 bp, Oryza sativa
ctttcagcaatcattaatggcacggttctttgtgttcatggtggactttctcctgatgtgcgcactgttgatcagattcggacgattgatcgcaattgtgaaattcctcatgaaggtcctttctgtgatctaatgtggagtgaccctgaagaaatagagacatgggctgttagccctcgtggagctggttggctttttggatcacgagtgacagctgagttcaaccatattaacaatctcgatctagtttgccgagctcaccagctggttcaggaaggcttaaagtacatgtttcaggacaaaggccttgtaactgtgtggtccgctcctaattattgctacagatgtggaaatgttgcttctatactaagcttcagtgagacaatggaaagagaggtcaaattcttcacagagacagaggagaataaccagatgcgaggaccgaggactgctgtcccatatttcctctgacttcatcaattgtacaattttagaagtcatgtttttatctgtaagggttaaagatgaagcagacctatttattgttgtaggtccaggtcatagtgcaatctaatgcgtatgatttttctgttcttttaaccacatgtacaatagaccatttggagtgtcatcactcctgtattccttcaaaaaaaaaaaaaaaa

SEQ ID NO: 395423 - DNA, 329 bp, Oryza sativa
  unsure (1)..(329): unsure at all n locations
gtgcagctctactcggcaatggcgctggagaagctgtcgctgcagtcgagccacctgacggccatcccggcgccgccgtcgccaccggcggtggttcgggtgcgcgtgcttggggaggagacccgcggcggcggcggtgcccgcgggggtgtgccgcgtgcacggcgggttctgctcgctgcgggagacgttctgcctggcgcaggcggacggcgggaaggcggtggagcggctggtggcgtgcctggaccacctggacgggagggtggtggaggcggcgctggcggngctgtcgacgctggtgtncaacggcgtngacgcaaggaaag

SEQ ID NO: 395424 - DNA, 322 bp, Oryza sativa
gtaaattgcaaaatcaatacctagactcttacacatggatctggacctagagactacaagactacacacgcagatcgtcatcgcagcaactgtgacggcttggagttcttagtcactgggaagggctgtggcgaaatttgtagcaatgacactgccctcactgtaatttattgtgctctctgtaatttttccattgatggttcttagtccattgactccattcctgttgaagaacagataattttccattttgtcataccattattatatgatccattttttatatagtcagataacaagagaagtacctcaaaaaaaaaaa

SEQ ID NO: 395425 - DNA, 400 bp, Oryza sativa
  unsure (1)..(400): unsure at all n locations
nnnnnnnnnnnnnnttttttttttttttttagacttataatgatttcttcataactcaaaatcccagacagagccacatcgtagatatagatcaacatcaaggatccaaaactctcatggagacattttcaacgataaagcagcaagcagtgttcaggtagcatgaactcctagcagaagcagttgatagcgaaacaaaagctagataaggagggggggaacagtaggagcaccagcagatccgacccacgagcctaatcgatctcctggagcgaggcgccggtggcggcggcacccccggcggcggcggcgccgtcgtaggcggtgaacttgcccttggccttgtcggcggcgcggccccaacccgcggttggagctccagctttttgttccctttagt

SEQ ID NO: 395426 - DNA, 402 bp, Oryza sativa
ctccggctttcccctcgcgacctctcacgccgccgccgccgccgaggaaaatggttgagcacctattcgaggatatcttcactgtgaccaggctcgatcctgatgggaagaagttcgacagagttagtcgcatcgaagctcgtagcgagcagttcgccatgtacatgcagttagatgttgctactgaggtctatccgatgcgtgctggtgacagattcaccatggttttagctcctactctgaatctggatggaactccggacactggcttctacacgcaggctggcagaaaaacacttgctgacaagtttgactatgtcatgcatggacaagctctacaagatctcagcagacagttccagtcggtcaagccaccaaagtggagatctatgcatcgtttgg

SEQ ID NO: 395427 - DNA, 388 bp, Oryza sativa
  unsure (1)..(388): unsure at all n locations
ggggnggcgtggtactgggacgagcggtacaggaaggaggccggcccgttcgactggtaccagaagtaccccgccctcgcgccgctgctcgccgtctacgtccgccgccaccaccgcctcctcctcgccggctgcggcaactccgtttttggtgaaaacatggttgatgatggttatcaagacatcgtcaacatagatatatcatcagtggtgattgatcaaatgaagaagaaatatcgtgacaagcctcaccttaaatacatgaagatggatgtaaggaacatggctgaattcgagtcaggttcattcgatgctgttattgacaaaggaacgctagcttctataatgtgtggccaaaattcacacgcgaatgcgtctcagatgctag

SEQ ID NO: 395428 - DNA, 511 bp, Oryza sativa
  unsure (1)..(511): unsure at all n locations
ccttcaaccaaaatcaaattgaaacggaagaaattggaatccctcttctgtaccctactctctcgctcccttccgatttcctcgagcgctaatctggcagcgaatagcagcgaatgctgggncccgtagcgagatctgtagcaaccagtgcgccttcgccgtcggggcggctgcgggcatggcggtccagaacggcggcggcgatggcagcggcaggncgcggcgtcggtggtcgtcaacgtgtacgacctgacgcccatgaacaattacctctactggttcggcctcggcatattccactccggaatcgaagtccatggcgtggagtatggatttggagcacatgagttcccaacgagtgggggtgtttgaggtggaaccaaagaactgccctggcttcgtctataagaaggtcttgttcggatgggcaaaacttggatgtccagggcagagttccgttcgttcattgaaaaactcactgggagtacaatggtaatcatatcacttgatt

SEQ ID NO: 395429 - DNA, 620 bp, Oryza sativa
tgaatatcctatgctgtttgagttgcataatgatgcaactcagcggatttcacactgtggtgtgctggaatttgtggcagaagaaggcatgatcatcatgccctactggatgatgcaaaacatgcttcttcaagagggtgacactgtccgtgtaaaaaatacaacccttcccaagggtacatatgtcaagttgcagcctcacacaactgactttttggacatctcaaatccgaagccatcctggagaaaacactaagaaacttctcttgtttaaccaccggcgatagtatcatggtagcttacaacaacaaacaatactacattgacattgttgaaacaaaacctgcttccgcagttagtattattgagacggactgtgaagtggactttgcacctcctcttgattacaaagaacctgaaaatccgcagcaaccatcagttcctgcaagtgaggcaactgctgaagatgaaaatgctaaagttgaagatgaactgaaattcaagccgtttactggttctggaaagcggctggatggtaaagcctcaaagctacaagcaacagaggtcccttctgcctcacgttcttccccttcaggctaaaaccaaaagggtgatcaggg

SEQ ID NO: 395430 - DNA, 408 bp, Oryza sativa
  unsure (1)..(408): unsure at all n locations
gggagaaagtcttaatcagttaagtgagcagggcatctcctacctgaacaaagttgctcagaatcatatcggggagcgggtgattgttgtcggccatggtgctgccatactagaactctgccggcacactgatccacccaacagctcgattcgtaggaaaattcccaatacttcactgaacattttccgcatttccggcgtcaccggccggtggatccttgagaggtgtggagacgtcggccatctcagtgaaaatggctttctggagaacgcatttggcggtgatggagcctctgcctaacacattcagcggctcatctttgtcagtgtattcagtgattcaatcaccccatggacttgaagtctgaaacatttttcggttttnctgattgctattttcttcggtgt

SEQ ID NO: 395431 - DNA, 391 bp, Oryza sativa
aaaaccacaggccgcacagccacagcagcgtccacttcacgttccatcatctcctctacctccaaccacatcgttgcttagcctcgccaccgccgccgccgccgccgatcagtggtagatcgatcgatctagccggccatggattactggaagaccaaggttctgccgaagattaaggtcgtcttcgccaagggcggcaacgcaagaaggctgccgccgccgaactcatcaagtcgtttgatgaatctaaggaggggatcaacggcgagttcgaggagaagaaggctgacctccagcccaaggtcgtcgagatctacgaggctgctcctgcgccgctcaaaggttctgatcaaggacagggccaaggtgtccgggatcaagaagaacttcg

SEQ ID NO: 395432 - DNA, 710 bp, Oryza sativa
  unsure (1)..(710): unsure at all n locations
ggaaaagaataccactttttgaaactcttggttaatcctgaaaggactgttccctgactacgttgaacatctcattaaaattggcactgatctcgtgtgcaggcctggtatcccaaggtttagtgatgtaatcccactactattggcattcgttcgaagtcgccaagctcctggcaagccagttctgtgggttgctcataacgcaaaacaatttgatgctcgtttccttgctcaggagtttgatcgttgttcagcaccacttcctgcagattggctgttttttgacacccttctcttggcaaaaaagatggtgaaagcagaggggaaaaaacgtcgtacaagcttggaggcactgagagaacactatggcatcgtctcgcatgacgatgcgcatagagcaatgcgagatgttatgatattgtctcaggttttccagaaaatgacttttgatctaaaactgacaaatgaagaactaataaacgaggccatgaaggcaagtgaattcagcaagatttcttaatttttaaaactccagctttttttagtgcttaaacttatttaaccttctgtgcacatgctggatatttttctagctggtgtcatctcggcattaaagaactatgccttttttactattgaaatagtacctgtatttttcaataaaaacctgcaatttggaccgnnnnnnnnnnnnnnnnnnnnnnnnnnnn

SEQ ID NO: 395433 - DNA, 529 bp, Oryza sativa
  unsure (1)..(529): unsure at all n locations
aagggcgatctacctgattnagtggatgagttctttttcgcagaagtacgttgggacattgattcttatgtgccagtttgcatggtctccttagaagggaaggaaaaatctggtggttaccgtgacattgaagtcgactatccaagaggaggttttgtgggtgttcccgtcgataagaatcattgctatgcttgtggcgatggactcaagcatccagaggatggaacgttatatgagagtggtcatatcgcttccggcagttattatgactagcagttttattgaaattgcatttttagaactttatttagctagactagaagtgtgcaatcctttatatctatgctaaactaaattagtacggagtatactcaccattctactttgtatacatcttgtttgatttgggttgaactccgagttgtatgtgatacacccgaagacgttattatcgttgcaaatattgaaaaagtcatagaaggtggcaatccnnnnnnnnnnnnnnnnnnnnnnnnnnnnnnnnnnnnnn

SEQ ID NO: 395434 - DNA, 395 bp, Oryza sativa
gccacatatatatacaggaaatatatcagttggtaaccacatcaatctcgaaacaagttgtgcccaaattactacgcaccgcgtactgcaaaagaatgagctcggtggtgaagattggaccatggggcatgggccggggctcccagttgaccgagaactgtgacatcgcggtagctcctctgcgcctggaaagcatcaccgtgaaacatggcgaggttgtcgactgccttagcttctcctacagggaccgcgagaagctaccccacaccgccggaccctggggcggcagaggcggccaggaaatcacgataaatcttcggcccgtcggagttcgtcacggaagttcacggggagtacggatcctactacggaccacaaacagcataagccaacct

SEQ ID NO: 395435 - DNA, 510 bp, Oryza sativa
  unsure (1)..(510): unsure at all n locations
agctgctgttcttcatggccaagaaaggcaagaccaactctaccagaagagcctctgcttcttcttcttcttcctctgccgcagccgatggcgatggatcgccatggctgcggctgacggccttcgccgtgctcaccctccactcggctttctctgcatatctggctagagatgacgcgaggctggtcgccctcgtcgtcgtcggctacctcctgatgctggtgctgctgttctatggcctggccgtgcctgtccaacagaagagagactaaggtgaggcttcagcaatcagtcctcaagcatgaacctgccttgtttttttntcctttttgctggtttggttttcttgcatggtttgatcttggtattgaactatggatgttatgtacaaccctgtacatgctgatcaaatgtgtatctgtatgtttaattattgatgttaccaaagaatcacatgtataatataagtaattcgaaagagccacaaaaacaaaaaaacaaacaaaacaa

SEQ ID NO: 395436 - DNA, 361 bp, Oryza sativa
  unsure (1)..(361): unsure at all n locations
gaaggttatttccacaccgtcatctgcaactcggacgagtttcggggcactgcggttggccatgacctgcactacattgcttgggactaccctccaaagcaacatccaaatatgctctccatgaaggacttcaacaagatggtcaagagcggcgcgccgtttgcacggaagtttcccaaggatgacaaggtcctggacaaaatcgaccgtgagctgctgcaccgctccgaaggccagttcacccccggagcatggtgcgacgngagctctgaaggaggagctgatccatgttcctcaaggggtgaagattcggtattcgagcctagtcccggtgccgagaggttncgaggcctcatgaaga

SEQ ID NO: 395437 - DNA, 427 bp, Oryza sativa
  unsure (1)..(427): unsure at all n locations
agaagaagaagaagaagaatccatggcggccacgagctcggagaagaagacggcggcggaggtcgtcgccatgctggatctgcagcgccaccccgatggcggcttcatcctggagaccttccgcgacccctccatctccctccccaagtccgccctccctccccgctataaggtagaccgtgctgtgagcaatgccatatatttcctgctacctgctggagagatcgttaagttgcatcgcatcccttgtgctgagacctggcactactacatgggggaacctctcacggtatttgaagtgcatgacgatggacaattcaagatgacagttgttggacctgatctacggcattggccaaaagccacaatacacagttcctccaaatgtttggttttgggctttcttgacctncgacatcgagtcctt

SEQ ID NO: 395438 - DNA, 346 bp, Oryza sativa
gtttgctcctcggggatgaaggctgtcatgcttgcggcgcagactattcagcttgggatgcatgatgttgttgtcgctggtgggatggagagcatgtccaatgcccccaaatatgtcgcggcagcaagacgggggtcacggtttgggcacgacgtcctcatcgatgggatgctcaaggatgggctgtgggatgtgtataatgatttcccaatgggaatgtgtgccgagttgtgtgcggatcaacactccatttcaagggaggagcaggatctttatgctatccagagcaatgaacgtgcaatagcagctcgtgatagcggcacattttcttgggaaattgctccgg

SEQ ID NO: 395439 - DNA, 481 bp, Oryza sativa
  unsure (1)..(481): unsure at all n locations
nnnnnnnnnnnnnnnnnnnnnnttttttttttgtatgattttttttcttcgttttccttgcaactcagcattatattctcaagtcacaaccgttacatgaatacaataaacgcataacacgtagactaactcggtggaggcagccctggatccatacatagtagtactagctaatcgttactgtgttctcggcgctatatcttgttccatcaagtgatgcgactcaagataagcaagaatgtggtttctctccatgggctcttcaagttttgtacctttctggtcctgtaacttcagcaagagccgtggatacagcattggctagtaatggagggaactaatcagccatgcgcctacttatttgacatagatgagtccataacgntgcatgactttgccatggactttttcatggaatgnaggtccngccaaatggcttcagggacttcatctctatatcaagggccaaaccttagggcca

SEQ ID NO: 395440 - DNA, 592 bp, Oryza sativa
gaaaaacattcttcttgaatctccgtcgcatcacatcctgccacagatgttgaattcacctttactgcagcaaactgctgatcttgttaaggactatctaaaatttatggatgatcatttgaaagaatctgctgatcttacctgtcttgcatatagacaccgacttactcaaaggtaattgaatttgttcagttcaaagaacgcctgcaacactccatgcagtatctttctgtaagatctgattccataatattgagtctgaagcagaaggctgagtctcttgatgaagtggagtctattcttgaaaatgtgaaccatggggcaaggttggttgaactatcaaacgaagacaacgtgaaacgctttacttttaacgaagatcttcaggcacgcccttggtggacaccaacaacaagtgttaattttctgtcagaaccatttgatgaaggttctacacctgcatgctttagagccaaagcgtgtgaacacaaatctactgagaaggatgactcaaagataaaatatgctgagagaaaagctcttcttcctcgtcttgtttatctttcgatgcatggttgtgcatcttccctca

SEQ ID NO: 395441 - DNA, 476 bp, Oryza sativa
cttgaaacctagcttgaagctagcttaatttgctagccattatagcctctcatcgatatatataccccaatgcatatgtaattaagcttgaatcctatttttcttccttgtttgtgttttgtgtttgtgacttgggtcgaattagtttgagagaatttggagggtttttggttttggttttgattttgattttgattttgatttagtttttgagttacatgaacaggttcagaaatgtgttgctacgaaagtgcaagagcctgtcacgctctctctcgaggtcgagctcctacaggaacctccgatccatgtccacccgggagcacgtcgtcgccggccgggatgggcggcattgtcggcggcggcgacaacaaaggcggtgtcggccggcggcgacggggcggtggtgttcgtcgggagctcgcggcggcgctacgtgatcagcaacaagcacctcagccaaccgctgatcgccg

SEQ ID NO: 395442 - DNA, 437 bp, Oryza sativa
  unsure (1)..(437): unsure at all n locations
atttatcctcattctgtggaaggttactggaggaaactgaggatgagctttctgagtggataaaaacgagctccgcagaatcaggaaatgtcagcagagcactttgtgaagatattagcaaacactgtcagtctacaagtgctaccatcgagatcgacgacgaactataacaccaaagcattctggtgccatctttatctcacaaagcaaagcaggcgaagacctggaaagcgtagaggaacaaactcaaatagtttctgatttcatatgttgtatcactgcaattcatgtccttaaaatgggagaattgcaattcgttccatatagtgtctgtctatctggactaatctgttgagaacattcgaacatgagacaaattttgcatactaaaattacggttgaaagcnnnnnnnnnnnnnnnnnnnnnnnnnnnnnnn

SEQ ID NO: 395443 - DNA, 833 bp, Oryza sativa
  unsure (1)..(833): unsure at all n locations
gacacgacctactttgggaaacattgactggaaaagagcatctattgttttatgggagattaaagaatcttaaaggcgctgaattagagaaggcagttgatgactccctgaagaatgttaacctgtttcacggtggtgttggaaataagcaagtggggaagtacagtggtggcatgaaacgaaggcttagtgtcgcaatctcattgattggggaccccaaggttgttttcatggatgagcctagcactggactagatccagcatcaagaaataacttgtggaatgttgtgaaggaggcaaagaaaaatcgtgctatcattcttacaacacattcaatggaagaggcagaggtgctatggtgatagactcggtatttttgtagatggtggttttcaatgccttgggaatccaaaggagctgaaagctagatatggtggcacatatgtgttcactatgacaacatcttcagaacatgaacaggaggtcaaacagctggttcagcatttgtcaccaagtgcaaacaggatatatcacatatcagggacgcagaaatttgagctgccaaaacaggaggtgaagatagcagacgttttccatgcagttgagaaggcaaaaagacagttcagcatacacgcttggggcctcgtcgacaccaccttggaggatgtcttcatcaaggttgccaaaggagcacaaggagtcaatgtgatcgcgtaaataatattatggatcgataggtggttattttttttccttcataggatcatgtgttgtatatagtttgtttgaactatatgctaacctttacttggcnnnnnnnnnnnnnnnnnnnn

SEQ ID NO: 395444 - DNA, 373 bp, Oryza sativa
  unsure (1)..(373): unsure at all n locations
cggacggtgnnntncttcttcttcctcttctacttgagctgaagctgaagctgccattgtcttgctgagctcgtttggntctctttggtctagcttgcaatggctagcgtcgtgcagtaccaggcggcggcggcggcgacggcgatggcgtgcgaggaggagttcattccgcagggctgatctcctgcttcgggcggtcgctgtcgagggcgtcgtcggggcgacacctggagtactgcagcagggacgtgagcggcggcggcgaggatagccggcgcatggcgcaggagcgatcggcgagggcgaantgcggtggaaggccgtggcgcaggagatcatggcgaggaggagcggcggcggcggcggcggatca

SEQ ID NO: 395445 - DNA, 713 bp, Oryza sativa
  unsure (1)..(713): unsure at all n locations
aagcatcatttctagtcccccagcccaagcaacagtagccagcaagaacagagtagggaggaggaggaggaaggaggacgcacctgggagcagagccagagccagagccagagccatggagcagtacgaggtggtggagcagatcggccggggcgcctacggctccgcatacctcgtcgtccacaagggcgagcgcaagaggtacgtgatgaagaagatccggctgtccaagcagaacgacaagttccagcgcacggcgtaccaggagatgtccctgatggcgagcctcagcaacccgtacatcgtcgagtacaaggacggttgggttgatgaagggacctcggcatgcattgtgacaagttactgtgaagnaggtgacatggcagagaggatcaagaaggcaaggggtgtccttttctctgaagagagggtgtgccgatggttcacacaattgctcttggcccttgactatctgcactgcaaccgtgtgctccaccgtgacctcaagtgttccaacattttgttaacaaaggataataacatccgtcttgctgattttgggctagcaaaattgctcatggaggaccttgcatcgacgattgtgggaaccccaaactacatgtgcccagaaatactagcagacataccttatggttacaaatctgatatatggtcacttggatgctgtatgtttgagatcttagcacaccgcc

SEQ ID NO: 395446 - DNA, 340 bp, Oryza sativa
  unsure (1)..(340): unsure at all n locations
nnnnnnnnnnnnnnnnnnnnnnnnnnnnnnaaaccaatgcctggggcagcacacctttttaatcaaggcacaaacaacatcggctactttagaattacgggatcccacagattcgctaattaaagaacaattggaattacgttacaacattgatcgattgatgtctttttatagctacacttcgaatgtggagtgggcctgcctgccaaggtgcatgcatgcgggcaggcctgtggaggtggcagtggcggcatgatagagaccatcgctcggcaaatgccccccactcttgcagtagtccaccagggtgtctccaagccctgcaaaactccagtctccg

SEQ ID NO: 395447 - DNA, 458 bp, Oryza sativa
  unsure (1)..(458): unsure at all n locations
tttgttttcccctccgactccgactccgatcgatctccaccccgaatccctcctcctcaccgccggcgagcttccggctgcggcggagatggccacacgttattggatcgtgtctcttcccgtgcagactcctggctccaccgccaattctctctgggcgcgcctccaggactccatctcgcgccactccttcgacacgccgctctaccggttcaacgtccccgatctccgcgtcggcacgctcgactccctcctcgccctcagcgacgatctcgtcaagtccaacgtcttcatcgagggggtctcgcacaagatccggaggcagatcgaggagctagagcgcgccgggggtgtcgagagtggggctctcaccgttgacggcgtccccgtcgnaactacctaaccagggttttgttggatgagggaaatacccaacgatgtaaccgtnaaagagattt

SEQ ID NO: 395448 - DNA, 393 bp, Oryza sativa
gcccaatggatattttgtatactctgctccaccagcttatagaaaagataaggactttcctgttatctgggagaagttaatgaatataacaacatcaatgtgctggaagcttattgctaaacatgttcagaccgccatatggatcaagcctgaagatcaatcctgccgacagaaaaatgctgatacgaaactactgaatatctgtgactcgtatgataattctccaccttcatgggaaaattccattgatgaactgtgtgagattgaacaaagaccagtcaaatatgcagaaactgccttccagacctgaccgcctatcattttattccagggggtttggagatgataggagttacttccagagaagttcgcaaaggattaccaagttcttgg

SEQ ID NO: 395449 - DNA, 375 bp, Oryza sativa
  unsure (1)..(375): unsure at all n locations
gaatctgattgcatctgatcaggatcctaatattgttcgaatgtatggttttgagcaggacaatgattttgtttatatctcccttgagaggtgtcgctgcagcttggctgatctaatccaactgcactcggtaccaccattttcaaatactaagggaacagacattgaactttggaggcaggatggacttccttcggcacaacttctaaagctgatgagagatgttgttgctggtattgtgcatttgcatagtttgggaattatacatcgtgatttgaagcctcagaatgttttgataagcaaggaaggncctctcagagcaaaactttcagatatgggtatcagtaagcgtttgcaggaggatatgacttctgt

SEQ ID NO: 395450 - DNA, 415 bp, Oryza sativa
  unsure (1)..(415): unsure at all n locations
cttccattagcgactaatccagccttcgttaagggtgattagaatttgattaatttcaaggcctcagatcggagattgaatggagtgcggtggtgcgctgcagctgccgccggggttcaggttccacccgacggacgacgagctggtgatgtactacctgtgccgcaagtncggcggcctccccctcgccgccccggtgatcgccgaggtggacctctacaagttcaacccatgggatctccccgagagggcgatgggaggggagaaggagtggtacttcttctcgncgcgggaccggaagtacccgaacgggcagcggccgaacagggcggcggggacggggtactngaaggcgacgggggcggacaagccggttgggtcgccgcgggcggttggcgatcaagaaggcgctcgt

SEQ ID NO: 395451 - DNA, 328 bp, Oryza sativa
  unsure (1)..(328): unsure at all n locations
ccttgtatacaaaattctnattggagctaatgaaatccagttcggttcgtccttatttaatatgagcgattggagaaattacacataataattgacatttaaacataatagatgggctaggaggaccaaggaacggggtaattgggaaaggagaacgaacaagccgtcggtctggtcggagtccagtcgtcgatctcttcacgccggcgagaaccgtaagcccgatcggtcgctgcaattgagcgttcgttgacgtcaagcttcaattgtgccgccggtgagccggggagagagagagggggggggggggggntcgcgccgtgatcgg

SEQ ID NO: 395452 - DNA, 435 bp, Oryza sativa
  unsure (1)..(435): unsure at all n locations
gccatctactgccccaccagcgtcctcttctacggccccgccaacgccggccagtgcccctccggctaaccagctggctctagctactccggcagctcatggccggccgttacgccggcgaccgggcatgcggcacggcgccgaggtgcgtgactgcgcgggatcgatcgatcgatcaaggaaggaataattaaagtaggcaactagacatacgtattgtcaacgtgtgtcatggtgttccacttgcagtagcgactaggtagcgagactgtgtgtgtacgttcagttctagtttgagaggtagcgcggctgtgatgtttcgatcgcttgttgtcagtttagcattggtggtttctccattggttctctgttcaaacttgtatgatttgtccgtttgcaaatttttgaaaattttttaaagacggttgaaatnnt

SEQ ID NO: 395453 - DNA, 288 bp, Oryza sativa
ccgcgacaatgtctccgcccaatctttcctcctcctcctagagccggagaatccacccgccatcaccatcgtgctcgcaatcgcatcgcctgtgggggcatcgacggcggggcggcggagatgattcggctgcagacgtacgcggcgttcagcctgatggcgacggcgacggcggtgtactacgcgttcagcagcagggagcagttctacccggcgatggtgtacctctccacctccaagatcttgcttcgtgctgctcctcaacacgggcctcgtcgccatgtgcgt

SEQ ID NO: 395454 - DNA, 607 bp, Oryza sativa
tttcctccagcagcgccattgctactgaatctgaaacaccaccactccatctccattgctgcaaactacaagccgccactaattaattagcaaaatggagaagccgggtgatgatgagaagctgacggttcctctgttggagcctaagccggctacctacaagcatcaggaagatgatgatgcagaggaggatgaggttggatcggtgaggcggcgagtggtggaggagaacaagaagctgtgggtggtggcgggtccttccatctgcgcccgcttctcctccttcggcgtcaccgtcatcagccaggcgttcatcggacacatcggcgccaccgagctcgccgcctacgccctcgtctccaccgtcctcatgcgcttcagcaatggcatcctgcttggcatggcgagcgcattagaaacgttgtgtggacaatcatatggcgccaagcaatatcacatgttgggcatctatctacaacgctcatggctagttctcttctgttgtgcagtcatccttctcccggtctatatcttcacaactccactcctgattgctctcggtcaagatcctgagatctctgccgtcgctggcaccatctctctatgg

SEQ ID NO: 395455 - DNA, 345 bp, Oryza sativa
ccgatggtgcggttgccggtcaaggccgacgagctcacgcagagaagattggcaaaagcagagcgtcaccccggaactgatacaaatgaggactttgaaagtgtcaagtcaaccctgttatctctggcatcactgcaagtggcaacggataacttccacgaaagcaataagattggtgaggggggattcggtgccgtttataagggaattcttcatggacaagaagtggctgtgaagaggatggccaagggctccaaccaggggctggaagagctgaaaaacgagctagttcttgtcgccaaacttcatcacagaaatcttgttcgtcttgttggtttttgcctt

SEQ ID NO: 395456 - DNA, 461 bp, Oryza sativa
  unsure (1)..(461): unsure at all n locations
cggacctgcncgaggcggccgctcgaacctcccgtccctttctctctcctcttcttcatgctcggatttccctctctcgcgcatcgatccgtcgcctcggcgcacaattcgggctcggaatcgggtccctgatccgcgacaccgcccggctcgatcgtttcccgggctgattcggtggccattgcggcgagatcggagcagggagagatcagggcagagaatcagcatgatgatggagactgagctatgctcctcccgggttctgtctccgcctcggtacgagagtggcgatgagganctctcggtgcttcctcggcacacgaaggtcatcgtcactgggaacaaccgaacaaagtccgtcttggttggcctacaaagtgttgtcaagaaagctgttggtcttggaggttggcactggctggttctaaagaatggtgtagacgtgaagcttgcaaaggaat

SEQ ID NO: 395457 - DNA, 407 bp, Oryza sativa
ccttcgtctccctgctcgtttcttctctagtgtttgttcccttgtttcttttccagtcttgctttgctttgttttgtttgtttgcttcctcctatcagatgagtctatggaagcatccggccgcggccgaagacggcgaggtggtggagacggtggtcgagctgctcgcgcgcgtccgggggatggtgcctccggcgctgggcgcggccggcgcggcggagggcttcccggggcggtggaaggcgatcgccgcgaagtggaggggctcccggcgtgcctgtccgacctatccagccacccttgcttcgccaagaacgcgctgtgccgcgagctgctgcagtcggtggccgccacgctcgcggaggcggcggagttcgcggcgcggtgccgggagccgccggttgccg

SEQ ID NO: 395458 - DNA, 353 bp, Oryza sativa
atctggcccagcagttagaagggattatggtgcacgtgacaggtttcaacatgctgatggtcctgttagacaatctccaaggagtggaggaacatcgttgaattcatcaggatttgcagcatcgacagttaatcatggtcaatcttctgttgttagaactcaaggaggaaatgggattccttcaaacaatcagtccacttcgtctcttcaccaaaatcctagggctcctacacaccagcaaagtcacacatcagtcgtgcaccagaagtcagggcaagtgcaaactcaatctgcaatgagaataccaacttcagcagttgaaccatcgcactggcaacccgtcaaccactcag

SEQ ID NO: 395459 - DNA, 521 bp, Oryza sativa
  unsure (1)..(521): unsure at all n locations
gtcaccttcaaggccgtgccgctccagtngccgctgccgcccgtcgaggaaataatgtccttcattaggtcatatgttgtacctgaaggctttccggatagtgtcactccttcatatgtgccatacatgacatggagagcattgaagcatttctttggtggagcaatgggtgtattcacgacaagaaccttgctaaactctgttggagttgcccaaagtagggcaacatctggagctgtggctatcaactggatactcaaggatggagctggccgagttggaaaaatgctttttgcccgccaagggaagaaatttgactacgacctaaagcagcttcgcttttctggcgatctcttgatggagttaggagctgggatagagttagctacggcagctttccctcaacttttcctacctatggcttgcatcgcaaatgttgttaagaatgttgctgctgttacatcaacctcgacccgtacaccaatctacaaggcatatgcaaaaggagaaaatattggaga

SEQ ID NO: 395460 - DNA, 427 bp, Oryza sativa
  unsure (1)..(427): unsure at all n locations
accaactaactcgccatccaaccacctccaactctagctccatccgcggcttggagctcccttcttacaagtcgatcgatcgagtagtcgacaagcgcaatggcggcggcggcgggtggcatgagttcgaggtcgtcgtcattgctggccatggtgttcgtcgccgtcgcggtgctcgcgcgggcgcaggatgagcgcgcggcgacgttcaccatcaccaacaactgcgcctacacggtgtggccggggctgctgtccagcgcggggtcggcgccgctgtccacgacggggttcgcgctcggccgggggcgtcgcaggcggtcccggcgccgtcggggtggtcgggccgcatgtgggggcgcacgntctncgccgccgacggcccggggcgaagttctcctgcgcaacgggacttcggctccggcga

SEQ ID NO: 395461 - DNA, 394 bp, Oryza sativa
  unsure (1)..(394): unsure at all n locations
ctaaacctcacgacttcacgagcagcagcgagaggaggagggagcaatcaatccatcggcggcaatggagaacggcggcggcgacgtcccggagaacgccaacgaccattgcccggggacgcagtcggatggcggcggggaaggcggacgcgtgcgccgggtgccccaaccagcagatctgcgccaccgcgcccaagggccccgatcccgatctgcttgccatcattgagcgaatgaataccgtgaaacacaagattctggtactgtctgggaagggtggtgtcgggaagagtacattttcagcccagctctcttttgcccttgctgagatggaccatcaagttggccttctcgacatagacatttgtggtnctagcatcccaaaaatgttagg

SEQ ID NO: 395462 - DNA, 516 bp, Oryza sativa
  unsure (1)..(516): unsure at all n locations
ccacggcgctcgatctcgccttcttccagaagaacaacatcaccagcgtgcccccgttcaacacctcactgagcgtgcaggtcgagtggttccaaaagctcaagcctaccttgtgctcgacaacccaagggtgcaaagactacttcgagagatcgctcttcttcatgggcgagataggcggtaacgactacgtcttcctctatgccgccggcaagaccgtcgacgaggccatgtcatacgtgccaaaggtcgtccaagccatctctgccggcgtcgaggcggtgatcaaggagggagccaggtacgtggtggtgccgggccagctgccgacgggctgcctcccgatcatcctcacgctgtacgcgagcccggccgcggcggactacgacgcggcancggctgcctgtggcggttcaacgcgctcgcacgntaccacaacgcggtgctgttcgcggcggtgtcgctgctccgggccaagcacccgtcggtcgncatcgtcttcgcggactactancg

SEQ ID NO: 395463 - DNA, 362 bp, Oryza sativa
ctggtgatttggtgaaagtcttggaaggtgctaatcagcatgtccctccagagttgcaagagatggctgcaagaggtgcagctggagctccaagaaatcaagctggtgggatgagccgttgggatggacctggtggtggtggtaaccgttttgaatctgctgttggtattcctggtagttatggtggaattagggatggcccaggcggctttggtggccgtgatggcccaggcggttttggtggacgggatggcccaggcggctttggtggtcgggatggccctgggggttttattggtcgagaaggtcctggtggctttggcggtcgagagggtcctgttggctttggtggtcaggagagt

SEQ ID NO: 395464 - DNA, 338 bp, Oryza sativa
gtagatgaccttgcatatggttctgctgcgaggtacctccagctcgacaggagaaagtgctgcttccctgccaacctcgcggcgcatgtgtgcgcgaggtcctacgagcactcggaggccgggacggcgactctcgtgggacgacgcgctgcagtccggcgcgaggcggttcgagcacaagtgctacaacctcttcacctgcaacagccactccttcgtggcgagctgcctgaaccgcctcgcctacggcggctccgtcggctggaacgtcctcaaacctggccgccctcgtgtggctgcgcggccggtggctgggcaagatggccgtcgtccggtcg

SEQ ID NO: 395465 - DNA, 439 bp, Oryza sativa
  unsure (1)..(439): unsure at all n locations
ccaaaagcccaagggcccgaattggcagcccaacgacggcgacggcggcggcgacgacgacggcgactggcggcggcggcggtaacggtcaagctcggagggtggagtagttactgttactgccctaccaccacgaggaggagcaaaccggcggcggtgaagatgatgatggcgctttgccctaccagcttccggatcgaattgcctcgacgaaccattcgggctgccatactgaacaagagacacaccgttccttgctaccagaggcaagaaggagcttcatctccagctccgcagatcgaagccaagtcaatggaggaggtatatgatgctttggcttgagcaccttttttctgttttnaaggancatttgaaacatcttgactcaaaatacattgttggtattagctggaccacctggcgcggggaaagtcttcag

SEQ ID NO: 395466 - DNA, 362 bp, Oryza sativa
  unsure (1)..(362): unsure at all n locations
gaaatttggtggcaaacaactttgaacttggtaccataggccacagcactttaccttcaggactaaactgcctccagcaagacaccccttgtttccgtggatctgcagaatactattcctttgcggttgactgcggcaataatagaacgactagaggcttagatggaactatttacgaaccagatgctgcaaaccttggggctgcatcatattatgttactagtgacacaagatggggtgtaagcaatgtcgggaactactttctggctacagatggagtgaacataataaatagtccacagaaaattcagaatgtccttgattcaagattatttgaaactgcaaggntgtcggcgtcgtcg

SEQ ID NO: 395467 - DNA, 391 bp, Oryza sativa
cccacgcgtccggtagctagctaggtgagatcgaggggcaatggagttggtggtggcggtagcaggtgcagtagtcgtggcactgagcttgtgcattggaggtgtgcaaggtcagctccaggtagggttctacgaccaatcgtgcccccaggccgaagtgattgtgagagacgaggtcggcaaggccgtagcgccaacgttggcctcgccgccggccttgtccggatgcacttccatgactgcttcgtcaagggatgtgacgcgtcggttttgctgtattcgacggcgaacagcacggcggagaaggacgcgataccgaacaagagcctgagggggttcgaggtggtggacagcgccaagcggcggctggagagcgcgtgcaagggggttg

SEQ ID NO: 395468 - DNA, 490 bp, Oryza sativa
  unsure (1)..(490): unsure at all n locations
nnnnnnnnnnnnnnnnnnntttttnttaattaacatcgcagttaattatatttttattatatccagatttgtatgattaacttatgtaacagattaacatggctgagaaattacagagaacaaattacaacaaatggaaatcaaaagaatggatgtgtgaaagccaaatcaatctactacaagcatagtcgtcgttgatcatcgtctctgtgtggtcgtcttgtgtccatgcatgcaatgatttagtacaagtggttgatggcgctgcacttcttcctgatctcccccttgctcccctccggcatgggcagctggctgagcttgagcagcgagtcggagaagtcggagtcccaaagggtggcattgtcggcgtactcgtggaccttggagagcgacgtggcgtccgtgagcagctgccagtcggagtggaaggtgacgatcttggcgaggttgttgtggtaggaggtgttgtcgaggaagccgttatctt

SEQ ID NO: 395469 - DNA, 644 bp, Oryza sativa
  unsure (1)..(644): unsure at all n locations
agttcacgacttttgtaaaanccgacggcccattgaccccccgtaatacgactccacctattaggnccgaattggntaccggccccccctcgagntcgaccccacgcttccgccccaaagaggccaaagagcaagctttcaagggcccggtttagacagaagaaatttgaaggatcagagtgaccccgagatagaacatgaaggatgaagttggctattatccccaaaagatttttttagtgatttagactagaaagtgaatgaaattgaaagtgtacccctaataataactataacctgaggacgggagccgtccggaggtgttccagtgcgaaatcagccctaggtacaagcgcttctgtttcattggtcacgttccgtttgcaggtttcaagcccgatctggaggtttaattggtgtggctagtgctcaacaatacgctgctgaaggccgttaaggtatgcgcaaagaggggagtccagaacttctggagtaactgggcggtccttgttacggtcacaaaatatgtttggagaatagctgctatatatgtctctgtttttttttttttttttggatcgatctgctgttttcgcaagcggatggtgtaaaaatctgctgcttttgcaaaaaaaaaaaaaaaa

SEQ ID NO: 395470 - DNA, 390 bp, Oryza sativa
gattgatctctcacactcggatcttcttcttgattggttgcacacatcatcatcatcatcatcatcggagatggtgaagcttgtgtgctttgttgtggtggtgttcatggcggcggcggcggcgatggccggagccgatcgcgagctgaaggttgggtactacgagaagacgtgcaaggacgtggagaagatcgtgaactccatcgtcgtcaactccatcaaggacaaccgcggcaagggcgctggcctcgtccgcctcctcttccacgactgcttcgtcagggggtgtgacgcctccgtgcttctggagaagagcgagatgaacaggcagccggagaaggaatctccggcgaacaatcggggatccggggggactggacgtaatcgacg

SEQ ID NO: 395471 - DNA, 359 bp, Oryza sativa
  unsure (1)..(359): unsure at all n locations
tgaagggcggggaggacgtcgctgcggcggattgcccggggtcgccggtgtcaccgtcaccggcagctgctcagcggtcggcggctggggcggcggcgtcgctagcgggaggtcgaggcggtcggcgcagaagcgggtggtgaccgtgccgctggccgacgtgaccgggccgcggccgaagggcgtcggggagggcaacacgccgaccgactcgtgggcgtngcggaagtacggccagaagcccatcaaaggctcaccctttccaagggcttactaccggtgcagcagctcgaagggntgcccggcgaggaagcaggtggagaggagccggaacgacccngacacggtgatcgtnaact

SEQ ID NO: 395472 - DNA, 390 bp, Oryza sativa
  unsure (1)..(390): unsure at all n locations
ccccccctccttttttttttttttttttttttttttttttacgccgaattaacacttactctgatactattacgccaacgatacacatgatgacataaaaccaataacaatgatactaggacaggaacatctctcttgtatgaacaacgtataaaatactcagagcacaagatcgatcgatgtacgcgtgttacgtgggcctgcctcatccaacaaaatagaggcgtgggcgatcgagtcatgagacactcggacatcaaccaacgttacgttacgtgcctccctctctacgtggcgctcttctagttctccctcgcacgntgcctgcctgactgccgatcgatcgatgctgcgacgtgatctccatgcatcgnctgcctctccatctcg

SEQ ID NO: 395473 - DNA, 359 bp, Oryza sativa
  unsure (1)..(359): unsure at all n locations
gactggtgcaatgatacagatatgcagacttcctgtgtcgcttaaatgacgacagaaatgtgcgtnctttgtttgagcgagctctgagcttacttcctcctgaagaatctatagaggtgtggaaacgatttgctcaatttgagcaaacatacggggatttgtcaagcatgttaaaggtggaacaaagaaggaaggaggctttatctaggacatccgaagacgccttatctgccttggaaaacacactttaatgacggttgtttctcgatacagctatatggatctttgggccatgctcaacccaaaggattggatttatctttcaaagggcatgagttgctttcaaaaanccattgcta

SEQ ID NO: 395474 - DNA, 358 bp, Oryza sativa
  unsure (1)..(358): unsure at all n locations
aatcaaagcatccaagaagaagcttagctactcacctagcaaagcttgccatccatccatggcgctcctcccttgcattgccattgccgtgctgctctcctcctcgctggcggcggcggtgaccggaccgccgggaacgatcgagcgcgtcgtcaagcagcagatcctcgccagcatcccgccgggtggccacggcgccggcgacgtccacccgcccgtgctgttcctcacctcgccgtccggcaagtacgcggcgtacttcgtgcgctcgcacaccgtccccggcgccggcgggctcggcgncgacttctgctacgtcgaggtggtcgtgaacaagggcggcgagggcgacgcggcg

SEQ ID NO: 395475 - DNA, 355 bp, Oryza sativa
  unsure (1)..(355): unsure at all n locations
cccacgcgtccgctctcttctccgctccccccgaaatcctcgcgcgaccgccgccagccacgccatggccggcacgtgcgcgcacgccgagttcttccgcgcgctccgcctcgcgctctggctctacgccgcgttcctccgcccggggaagcccctgcgccgccgctacgggcctgggcggtcgtcacgggcgccaccgacggcatcggccgcgccatggcgttccgcctcgccgcctcggggctcggcctcgtcctcgtcggccggagccccgacaagctggcctcggtctacgagnagatcagngccnngtacaaaagnctngnggttttacgttcgggttttagtaaaccct

SEQ ID NO: 395476 - DNA, 595 bp, Oryza sativa
  unsure (1)..(595): unsure at all n locations
tttctagccaccctctcatcatcaccatcaagctcaaaccaacaagaagagagctagcttttggtactattagccactagtagatagccaagaagaaaccaagaaattctttgagctatctaattagctaggtccattgattcatcatcatctccattgatccacttagctttgaagaagaagaagaagaagacatttagttagctagctatattgaggtgaggtggcggcggcaatggcggcggacctggccttcgaggcgaccgagctccggctcggcctgcccggcggcggcggtgatggagacgccgcggcggcggggcgaagagagctcctccgggaagaggggcttcgccgagaccatcgacctcaagctgaagctggagccggccgccgccgcccccctgcaactgaagcgctcgcccagccagagcagcgtngtcaccgccgcccctcgaccccnanaagccaacggactccccaaggcacagcttcgttnnctttgcccncacctccccgtcaatacnncgaacgaaccatccctngccntcnannncnaccaaaggccaaagnangnntncnncattgggcncta

SEQ ID NO: 395477 - DNA, 360 bp, Oryza sativa
  unsure (1)..(360): unsure at all n locations
gttgtaaagatgaggaggtaaggcaatacaaagagcacatagctgagttggtcctgcattcagaagcacagtctttgctgtttcaggagaagtatcaggaaatggagcacatgatttctaaacagaagtttggtctacatgaatctaattctgatactggccataccaaattcgaaaagccttcaggacggactagaggatctggttcacctttccgatgcatatctagcattgttcaacagatgaactctgaaaaggatcaagaaatctcagtggcacgccaganaattgaagaactagaaggattggtttgtaataaacagaaagnggtctgcatgctaacatcaagnctggccgccg

SEQ ID NO: 395478 - DNA, 640 bp, Oryza sativa
  unsure (1)..(640): unsure at all n locations
agctagattaactacaaagtatctgcagagtgcacaagtcagataaaaaacttgtttgtctaaacaaaatgctcccaagtcccaccaagctagattaactacaaagtatctgcagagtgcacaagtcaggtaagtgatgattatatcatcctggtacaagctttattgcggtgaaagataagcagttagtctgaaatctgtacagatctgtcagctgttaccgaagcaaaaggttcaatgtgaacttaaagatgcagtactgatccttttaagaggatttaacacagatttaacagggtgttctgtatgcgagctgtgatgggatggttctcttcagaagcattttattttaactaaattcagaagcatttcgatggcatgaggactgttcgattgacaatttgtatgtacatttccaccgtttacgcagcttaggaattggaccataattagttgtgtacctgcaagttttgtatacgaattatcctgaagggtgttcggtggattgaatattgcccttttggttgttttgcgcatcgtggatgcggctgctctacatttttcttataggaaatcagcttctgataaaagggnttattatctgtgtgatctactgatcgatattttanccctctngctg

SEQ ID NO: 395479 - DNA, 371 bp, Oryza sativa
  unsure (1)..(371): unsure at all n locations
caggaagttttcattctttgaggaaggagagcctaagattgatggtgaacctggagatttgaagtttaggatccgaacagcaccacatgagcgattcagaagagaaggcaatgacctgcacacaactgttacaatctccctgctccaagctctggtcggcttcgagaagaccattaagcatctggacaatcatatggtggaaattggcaccaaggggatcaccaaacccaaggaggttaggaagttcaaaggggaaggaatgccattgtaccagagcaacaagaaaggcgacctatatgtaactttcgaggttttattcccgaaaaccctaaccgacgaccngaagtccaagctgaagngcnttctcacat

SEQ ID NO: 395480 - DNA, 363 bp, Oryza sativa
  unsure (1)..(363): unsure at all n locations
ctcgaaattgcaactcccacctcaactataaacttcggttcgacagttcggcactcgacaatctcgcagaagagtgaagctgagattgcaatttgcaaatatcccctcgagaaatcataatttgtttttcactccctaatccccctccagtccaccgcccgcgatgagcgccgccgcggaggggaggccgccggcgggcgcgccggcgggtgagatggtgcgggaggccaccgcgtggtgcgcgctgcacgggctcgtcgtcggcgaccgcgccgganctcgatctngaacagtccccggcgttggtttggtcatgttcttttctctcttnttccaacgaattttccagaatctcatttgagg

SEQ ID NO: 395481 - DNA, 336 bp, Oryza sativa
  unsure (1)..(336): unsure at all n locations
agattcacgaattccacccgtttcgattcgattcgattcgattcgatgcttgtgccctccgccccgggagagactcgccggaattcgattgcttcttgctggtagggggagccatgggagagctggcttcctcgccgccgcccgcggcgtgctgcccgtcgtcttcgtcgacggcgaccagaccgtcgacctcggcaccgtcaccgtccagccctccctcggcgtccgcaagctgcaggccgtcgtcgccgacagggtggggctcgcgccgcagcagatcctggnctcgctcgcgcgcccccgccgcgcgcgccggtgcccctcgaggaggggacc

SEQ ID NO: 395482 - DNA, 686 bp, Oryza sativa
atttcatcgcaagcaaggaaggaggagaccaaatccaatccaatcccccatggccggcgcgtcgaccttcagtggcgacgagacggcgcccttcttcggcttcctgggcgccgcggcggcgctcgtcttctcctgcatgggcgccgcctacggcacggccaagagcggcgtcggggtggcgtccatgggcgtcatgcgcccggagctcgtcatgaaatccatcgtgcccgtcgtcatggccggggtgctcgggatctacggcctcatcatcgccgtcatcatcagcaccgggatcaaccccaaggccaagccctacttcctcttcgacggctacgcgcacctctcctccggcctcgcgtgcggcctcgccggcctcgccgccgggatggccatcggcatcgtcggcgacgccggcgtcagggcaaatgctcaacagccaaaactgtttgtgggtatgatcctcatccttatctttgcggaagcgcttgcactctatggtctcattgttggtatcatcttgtcatctcgtgctggtcaatcccgagcggactaatttatcaggctataatgcctgtaacacttgtctgtcatgaatataatggcatgtcaatattcttttgctgtatctttgtggttacgtactgttgttcagactacgttttcttttgcttaaaaaaaaaaaaaaa

SEQ ID NO: 395483 - DNA, 452 bp, Oryza sativa
gtcagatgtcaaagctcaagtatacagaaagagacttgctaaatcatttaatagtgagttggctgcggcccctagcaaagcagcattcctccaaaatatctgtgaagagttacagtttgatccggaacttgctagtaagatgcatgaagacatttacaggcagaagcttcagcagtttgtagcggatggagagctgaacaaggacgaagtggaagctttgatggcattccaagtgcgtctctgcattccacaagaaactgttgatgctgtccattcagaaatctgtggcaagttgtttgaaaaggttgtcgtggaagcaatttcatctgttgatggagatgacactaatagacgacaggctgttaagaaggcagcacaaggtcttgaatttgaaaacgagtctgtcatggccattttcagcaagtggtacggagtattcctgactacattca

SEQ ID NO: 395484 - DNA, 402 bp, Oryza sativa
  unsure (1)..(402): unsure at all n locations
attatcaaccattctggcagccaaggaaggatcaccctgatgtacctgtctatccgcagcctgagaggtctatgtaccgtggtggggagtttggatacacaaaacttgtagctacaaaggagaagttgacactaacgtacatcggcaaccatgatgggcaagtccatgatatggtggagatattctctgggcaagtatctaataacaatggtgttcctgaggtgatcgatgatacaaagctcagcacaggggtcagcaccaaactgaaaatccctctgttctccttggaaattgtaggcagcgtgatgtttgcactggttctgggtttctctcttggatttctgatcagaaggaagaaagaagctgcacagtggaccccagtnaagaacgaggagacctaaa

SEQ ID NO: 395485 - DNA, 455 bp, Oryza sativa
caacaaatggcttcagatcactagaccagagtgaagagagaagcgcgtgtgtgttgattgtcgtaatgtcgatggttgtggcctcttacgctccggcgagccggtcgccggtgacgcgggcgtcctccggcgcacggcgggttagccatacacagtcatggaggccgccgccgccgccgttcttcccggcttccgccgccgtcaagtgcaggcggcctactcttccggtggcacgttctgttggcccgccggagaaacatcgccctgtgctcaacattcctcccaccgctctactgtaccaagtcccgccaccggagggggaaagaacggtgggaaatcaaggatgacgagggcaacgtccagctgtggtttcaaggtgccccggcctgacggaggacgacctggagatcaccaccaccgacgaatttctcgagattaagcgttaaggcgggttg

SEQ ID NO: 395486 - DNA, 748 bp, Oryza sativa
  unsure (1)..(748): unsure at all n locations
ggtgtgatgatcacactctcctgcaaaggcacttcacctggaggtgtagtgtgaggagagctttttctttgcaccttttggttttttggagcttcagcaatgggggaggtcaagcatctttgcctggtgaagttcaaggaagaggtcttggtggatgacatcctgcaaggcatgaccaagcttgtctcggagatggacatggtgaaatccttcgagtgggggaaggatgtgttgaaccaggagatgctgacacagggcttcactcatgtcttctcgctgaccttcgcgagctctgaagatctgacgacctacatgagccacgagagacaccaggagttcgccggcacgttcatggcggcgatcgacaaggtcgtcgtcgtcgactttccccgtcgtcgcctccaagcctgcaccaccggcggcaccggcggcggcggcgtgatgatgacgacatcaactgtccatcaagcatccatccgccatggcatcaaccattgcatcattgttccaagtactttcaggtatccatccatccatctacacacgcagatagctgtgatagatgtaccttaggttccattattgcatgtttctgctgcttcagtgttgagctggtgtagcttagctaaagctgtaatgcagctctatcccgtgcattccgttcaaagcttgttcggttattcttggaataaatttcggtgatcttttggttgctgtgacttnnnnnnnnnnnnnnnnnnnnnnnnnn

SEQ ID NO: 395487 - DNA, 417 bp, Oryza sativa
  unsure (1)..(417): unsure at all n locations
ccgacggccatggcctcttccttcccatccgcaataatgattcctcttctgcctcttcttcttcttcttcttctcgtgtgtactcgcggagcgtcgctaatgctaacaaccagccgccgccgggcgcgggtacggacggcctactgctacacgcgaatgttcagcttcggcgactccatcaccgacaccggcaaccaggtgagcttcttccccaccgcacccgccgccaggcaccctacggcgagaccttcttcggccaccccaccggccgctacagcgacggcaggctcgtcgtcgacttcctagctgaggcgctggggttgccgtacttgacggcgtacctccgggggaagacggcggaggactttcggngggggggccaacttngcggtgtccgncgnacggggnttgaagctt

SEQ ID NO: 395488 - DNA, 487 bp, Oryza sativa
  unsure (1)..(487): unsure at all n locations
tggccacgccgaggccgcaagggcgcaaccgcatttcaaaacttgaaacgagggagacgaagtgagagagagatggagagggcggtgccggtgcggaagacgcacgcctcgacggccggcctgctcagctggtcggagtcgccgggccccgacaatgccgcggcggcgcggtgcgcccgcacgcactttcctcgcggcccagcctcaagccggccggtgggatcacgccggcgatgttcggagcgccggtgaccgacctggaggccgaggatctgaccaagaggaaaatgtgctcgggctcaaagatgaaggaaatgacccggagtggaatattttctncacaaggtcaaatggagattctgaaacttggctccggtgactctaatccttcccagaaagcatcattaaggatgtatcagaaactgtaacttgcataagtcagtatcatttagttcttaggggagcgtgtttccgaagaagccttcct

SEQ ID NO: 395489 - DNA, 653 bp, Oryza sativa
  unsure (1)..(653): unsure at all n locations
cttctcctctcaacccacccaccaccacattctccctccctccccatcggcagcggcggcgggtctagcaacagcggcttcggcggcggcgcacggtggggaggacagcggctccagcggcggcggcagggaggtcagcggctgcgaagatggctcacggcgtcggctcatggagggggcggtggtgtggtggagggagcaatagatccagcggctgtgacggcggctctcggcgtcggctcagggagatggttctggtggaggttccggcgggctcagcggcgtgtctcagtgacgacgacgacgtgagcgatgggtccggcggcgggctctcctccctctccctcctccactgccgccagttgccgtcgccaccaccgccgtaggctgccgccagctcggggcctgccggatccagccgatgcggcaccaggaaggccggatccgccgtcgcgacgacaggggtggctggatccgtcgccacgacgacctaggaggccggatccgccgccgacaccgacgggggcagcgccacgatgatgacttcaaatttttgttaatgtattgttttttgtgatgcttgaatgcttgggtgaatggaaattttttactgtaaattgtnnnnnnnnnnnnnnnnnnnnnnnnnnnnnnnn

SEQ ID NO: 395490 - DNA, 339 bp, Oryza sativa
gtggcctgcgacaagtatggaaggaatgacaccaagtaccagcactggagatggcagcctcacggttgcaaccttccaagattcaatgccacaaagtttcttgaaaagcttaggaacaagagactggtttttgtgggcgattcagtaaacagaaatcaatgggtgtcgatggtgtgcatggtggagcacttcatccctgatggccgcaagatgcgcgtttacaacggctcccttatctccttcaaagcatttgagtacaatgcgacgatagatttctactggtcaccactgctattggaatcaaacagcgacaaccccataattcacagagtggagtac

SEQ ID NO: 395491 - DNA, 646 bp, Oryza sativa
  unsure (1)..(646): unsure at all n locations
cttgtttgatgccttcctgaaaccgtacttccttgaagcataccgtcctttgaggaaaggagaccttttccttgttaggggtgggatgagaagtgttgaattcaaagttatagagactgaccctgcagagtactgcattgttgcacctgatacggagatattctgtgatggtgagcctattaagagggaggatgaggaaagacttgatgaagttggttacgatgatgttggtggagttaggaagcagatggcccaaatcagagaacttgttgagctcccattgcgccatccccaacttttcaagtctattggtgtgaagcctccaaagggcatactgctttatggaccccctggctctggaaagaccctcattgctagagctgttgctaatgaaacaggtgctttcttctttctgattaatggcccggagattatgtcaaagctagcaggagaaagtgagagtaatctcaggaaggcatttgaagaagctgagaagaatgcaccatcaatcattttcatcgatgagatagactccatagcaccaaagagagagaaggcccatggagaagttgagaggggcatcggtttcacagctgttgacccttaatggatgggccaaagctcgtncccatgtcattgccatggg

SEQ ID NO: 395492 - DNA, 446 bp, Oryza sativa
  unsure (1)..(446): unsure at all n locations
agagtttaggatgacacatatggaaatgattaaaggaattaaaggccatggttaccgtgacgaattggtggttcctataattgagaacactccttatgagtatgagctcactgactcactggctgaggcgattgcagcataccctaaggcaactgcagtccttgtacggaaccatggaatttatgtatggggtgattcctggatcaatgccaagacacaggctgaatgctatcattacctttttgatgctgccatcaagctctatcaattgggtattgattggacaactcctgagcatggtccaataaacagtgccaaaagaccacgaggtttctaagctctagtattccaaatggatgcctgattccaaatcatcaaagcattgtgttgttcttgacattgngggacaactactccaatatcatttgtgactgatgngatggttc

SEQ ID NO: 395493 - DNA, 346 bp, Oryza sativa
ccaaaagttggcggacatgagcactctgggtatggactggcctgaagcaactaatagattaatcgaggtggaagatgaagctgacattcaagaagatgctctcatattatatttaccacgtaaaaggctaattatgacctctcggttgattcagcaacttctcccttctataccagcggctattcttagggcacaagctatatcaatgtaccaaagtgtaacatatactattgctaagttgacagttggggatgcatgcagcatgccttcaaattcatctttggacactggcactctcataagtagtggggataagtcatatgaacaaattgagaatgacaaaatg

SEQ ID NO: 395494 - DNA, 456 bp, Oryza sativa
gagcacaaagcttcaagcctccttcagactacaagccattaaacagagacgaccaacgacttaaccacacttcttctttgtgctgtccaacctccattgttgggtgtgaaagctttggctcatctgccatgtgtggaggatccattctcggcgaccttcacttgccggtgcggcggacagtgaacgccggtgacctgtggggagacgccggcaagggtagagatggtggcgacggcttgaagaagaggaaggggagttcttgggatttcgatgttgattgcgatgatgatgatgatgatgactttgaggctgattttgaggagtttgaggatgactatggcgatgatgatgatgtgggtttcggggacgacgaccaagaatccgacatgaacggtctcaagctcgccgggttcagcaccacgaagctcggcctcgccgcaaaggaagaggaagacg

SEQ ID NO: 395495 - DNA, 474 bp, Oryza sativa
  unsure (1)..(474): unsure at all n locations
attttattatcatgtaaacatgacaatcatatttgcgganaatagctgctatctgcaagctgcttggattatgacatttagctacttttgctctggcgttgcaccaaattttattgtggaccaaatggattctccatgggcccaaatctagcctgttccttagcaaaagagtaaagatgatttatgctgtcatgtgggaaaccccctatcagtgccaacatggggccatgaacactacagccatcgcacaagccaggccagtgctgcctgagggctggttgtcttccctgtgcattgccattcagttaggactttgtgagttggacatacattaaattataagagattggttgagtgtaaagtgtacttcagtttaaaaggtgttggattcttaatcttcctcgatctgttaagagagaccagggggtatctctatcttccctctctcgggattgctgagctcacagtctactg

SEQ ID NO: 395496 - DNA, 448 bp, Oryza sativa
  unsure (1)..(448): unsure at all n locations
gctccgcctccattcacgcattcacactagcatagcatataagatagcacttgtagagaggagatactagtacacatagagaagaggagaggagattgatcggtgagggaggatgatggcgtcttgtcggagaggagggggaggggatgtggataggataaaggggccgtggagtccggaggaggacgaggcgctgcagcggctggtggggcggcacggggcgcgcaactggtcgctgataagcaagtccatcccggggaggtcggggaagtcgtgccggctgcggtggtgcaaccagctgtcgccgcagtggagcaccggcccttcactcccgaggaggacgacaccatcctccgcgcccacgccgcttcggcaacaagtgggccaccatcgccaagctcctcgccggccgcaccgacaacgccattaagaaccacttggacttcan

SEQ ID NO: 395497 - DNA, 355 bp, Oryza sativa
  unsure (1)..(355): unsure at all n locations
cacaactgtcaaatctcacctgcagattaatcagttaagcaacacttcgattcctcgccgccgttgccgccgccgccgaccggaaagatgccgggagccgtgaaggtgttcgggtcgccgtcgtcggccgaggtggcccgcgtgctggcttgcctgttcgagaaggacgtcgagttccagctcatccgcgtcgactcctttcgcgggtccaaacgcatgccccagtatctcaaactccagcctcacggcgaggctctcaccttcgaggacggcaatntnacgctcgtcgagtcgaggaagatcataaggcacattgcggacaagtacaagaaccaggggaaccggacctgatcgg

SEQ ID NO: 395498 - DNA, 460 bp, Oryza sativa
  unsure (1)..(460): unsure at all n locations
agcaagcaagcaaagctaatatacataaattgatccagggatcgatcgaaattaatggcgggcaggagcaggaggaggtcgttttggtccgtgggcgttgcggctgctctgctttgtctgctggccgcccatggctgcagcgccaagcatcacaagcccaagcctactcccggtggcatcagtggcaatgcttcttcttcctcctccaattccagcacccccagtattcctcctcctgttgcccctactcctactgctcctactcctcctattcccagccccggaactggaagcagcaacggcagcagtggcggtggcgggcggcgggtggctgaacgcccgtgcgacctggtacggcggttccaacggcgtttggccggacgacaacggcggcgcgttttgggttnaagaatgttaacctgccgcctttttgggcaatgaattcctncgggaaatgagg

SEQ ID NO: 395499 - DNA, 327 bp, Oryza sativa
agctcactcctcttcttgctgctgagggcttagctagccagtccacctcgtcggtgtgtgtcggcgtagtctagcagctgcggcgggaggaggagttgccggccggagatggcagcggcggcgcacggcttgtcgccgctgtcgtcgtcttggtggcctgcctggcgttgccggcggcgcgggggctgaacatcacggcgatgctgaacgggtacccggactacaagatgttcaacaagtacctgtcggagacgaaggtgtgcgacgagatcaacgcgagggagtcgttcaacgctgctcgttctcggggaagggccatttttaagc

SEQ ID NO: 395500 - DNA, 412 bp, Oryza sativa
  unsure (1)..(412): unsure at all n locations
gtttattccacaacctcaattcttctgaaagtctagaaatcaactccctcaaattcttaacaccatcactttacccgcagtagtttgggtaactgaaaatatgtgatcaatttgttgttataatgggaattttgatagctctaattattgcttaaaataacggtaatcatgtgtcatattttctgttcattagcgaatcaaaccctgtacaggactacaagaaaattccttcctttcagctgtgttaaaaaatggtacctcccaatcatgcaatagtttttttttttaaagtccgtcaaccatgcantagtaactcagaaatattgtgatacatcacatgtgcataggnncacacactattacaattcaaaatactagcacatgcatacttttctgggnaatcacttaattg

SEQ ID NO: 395501 - DNA, 395 bp, Oryza sativa
ctagctatcattcctccaagtgtcaagtacttacgaaacgaatatgccggcattggtgaagatcgggcagtggggtggatatggagggtcagctcaggacatcactgtgacacccatcaaactcaccggcatgacaattcgtagcggaaatgcgatcgattccataagcttctcctacagtggcattgacggacaggagcatgtcgtgggcccatggggtggtaacggtggacacgctaccacgatcatgttaggccctacggagcatgtgatagaagtttctggaacccatggcaagtttggacctgtagctgatgttgtgacgtaccttaagattgtcaccgacattacaacatatgagttcggtgtgcgtagtggaacagacttcagtgtcc

SEQ ID NO: 395502 - DNA, 301 bp, Oryza sativa
  unsure (1)..(301): unsure at all n locations
cgatcatctggccagctgctgccatggcaacattgccacaaatggccgcgaccaaggagcgtcaagaggcggctaacccgaccacgacgaccaggacgctggtcgagtccgtcaccaactggatccgcgtctactccgacggctccgtcgaccgcctcggcccgccggaagccgccgcgttcatggtcctcgtcccgccgtacgacgacccacgggacggggtcaccgtccacgacgtcgccacggaccatggcgtcgacgtccgcctgtacctgacgacgacgacgccggccgngcgccg

SEQ ID NO: 395503 - DNA, 324 bp, Oryza sativa
  unsure (1)..(324): unsure at all n locations
cgtccccgtctggtccgtctgggccaggtggcaggctgcccncgccgccgcgctcctacggcggcggcggcggatctggcgacgacgcggattccgggggcagcagcggcggcatcctcggcatcttcctcgccgggtgggcggcacggtcgccgcggatccgcagttcccgttcaaggtgctcatggaggagctcgtcggcgtcacgcctgcgtgctcggcgacatngcgtncngccgaacttcgggctcaacgagctcgactttcgtcttctccaacctggtgggtcggatccatcctcaacttcgtcntaatgtaactact

SEQ ID NO: 395504 - DNA, 491 bp, Oryza sativa
cggacgtgagaggggtttattccacgcctcccgtcgccgccgccgccgccgtcgttgtcctcgcccgcgcgcgaggagaacgctaaactccggtcaagatggcgaggggtttgaagaagcatctgaagaggctcaatgcccccagccattggatgcttgacaagcttggtggagcatttgcacccaagccttcttctggtccccacaaagctcgggagtgcttgcctttgatccttatcctcaggaacaggttgaagtatgctctgacctaccgtgaggtttatttccatcttgatgcagcggcatgttatggttgatgggaaaggtcaggactgacaagacttatccggctggattcatggacgttgtgtcaattgcaaagactggggagaatttccgccttctgtatgacaccaagggtcgcttccgtctccacagcatcaaggatgaggacgctaagttcaagctctgcaaggtccggtctgtacagt

SEQ ID NO: 395505 - DNA, 356 bp, Oryza sativa
gtcgcaatcagacattctctcttgttggttaactaaatagcttaattaatttgaggagtttagtctctgaaacatggcgatggcgacagcagcatgcagaaggcctgcagtgatgctcatggcgttcgccatggcggctgcggtgacgatgagctccgtgccgccggcgtcggggacgacgacgctgcagtacgacttctactcgtcgtcgtgcccgaaagccgaggagacggtgaggaacgtcgtcgagccgatgatcttcaacgaccccaccatgggcgccgccttcatccgcctcttcttccacgactgctttcgtcaggggttgtgacgcgtccatcctgctggacccgacg

SEQ ID NO: 395506 - DNA, 436 bp, Oryza sativa
  unsure (1)..(436): unsure at all n locations
acgccacatccatccgtcgcttccgtcccccgagtttactactgctccacgacgccccgctcccatccacacccgcaaccacctcgctcgctaaaaatccccacgatttgtcctcacatggccacgcccagaacggccggaactagccctcgctctcgtcgtcctactccagattgccgctgctcgacggagccagatcgtcggtagggaggaggaggaggaggaggtggtggtggtggtggtggtgtgggggtgatggatcggcagaggcagcagagctccaggggcaatgctactgcaacgaggggtggtgggtcgtcggggaagggtggtggtngttgtgtcgggaaggcggcggggaagaagccatcaaggtggtgtacatntccaaccccatgcgggtnaagaccagcgccgccgggttccgggcctttgt

SEQ ID NO: 395507 - DNA, 432 bp, Oryza sativa
  unsure (1)..(432): unsure at all n locations
ctacacctgactcatcgatccactactgccgccgccgcccatggcctccgccgccgtcgccgtcgcccccgtcgtctccgacctcgtcgacttcctcaacgcctcccccaccgccttccacgccgtcgatgaggcgaagggcggctgaaggcggcggggttctcgcagctgtcggagcgggaggagtgggcggggctccagcccggccgcaagtacttcttcacgcgcaaccactccaccatcgtcgccttcgccatcgggccaagtatgctgccggcaatgggtttcacataatcggtgcgcatactgacagtccatccctgaagctcaagctgttgtncaaggtaacaaagggagggttatcttgagntttgggtccaaacttattgnagggtggctttgtggtaaaatgggttcgaccgtgatcttact

SEQ ID NO: 395508 - DNA, 323 bp, Oryza sativa
  unsure (1)..(323): unsure at all n locations
gccggcggcgtaggaaggtatcgaagtcgaagccaccgtcgtcgacagccatgtctagcgggcaccacatgctgtggccggctcgccgcccaccgccgccgccgccaccgccactatcgccggcatcaagggaggcgaacccttgttctggtgggccggcccaccaagccagcccatcagcggaggcaactggtgggccagcctgacatcctgggcccaccgttcatgtgtcccgccttgtcagtgacagcctccncccctactcttcaaattctcctgggcttcgcgctctcggtctcgggtggtaacgaccataaccaact

SEQ ID NO: 395509 - DNA, 361 bp, Oryza sativa
tgatgtcattccccccagctgcattcaaatgcgcaatgttattcttagtgcttttccacgcaatatgagacttccagatccctctactccaaatttaaagattgatcttcttgctgagatttcaattcctccaagaatcatgtctgatgttgatggtgccttaaagtcaaagcaaatgaagacacaggttgatgagtacctcaagaggccagatggatcctttttaactgatttaaagcagaagttacttctgccgcaaaacgaagcaaatattgctgggactcgttacaatgtacctcttgttaattcacttgtgctctatgtgggcatgcaggctgtgcaacagttgcagcttaataaa

SEQ ID NO: 395510 - DNA, 390 bp, Oryza sativa
aggcgctgcgtctaatcggcaggctaaagataaggcaacccatcgtgcccttgccaagcacttgaagaatggcctcactaagtcgtcaggacaacagtcacagacagctgttgtggagccacaaccgcttccaaacagagatgagaagttcgtgtggccctggatgggtgttctagttaatgtgcctaccgaatggaaggatgggcgccaaattggacgaagtggaaatcatttgaaggagcaactgtcacgcttttgcccacttaagatcattccattatggaattttagaggtcattcagggaatgctattgttgagtttggaaaagattggcatggcttcagaaatgcgcttgcctttgaagattactttgggaaagaaggatatgg

SEQ ID NO: 395511 - DNA, 371 bp, Oryza sativa
gatctctctctctctctatctctctctctctctctctctctccctcccttccacaacgctcgcctctgttcgtcctcctcaatccgtaaccacgcccgaaggcccaaccaagatccacagatggattgttccaatggtgaggttcagcatcagtggatggaggatgtcaagtcaggaggagcagtcccatttcttgaccctgacaactgccccaatggctgggctactcccccaggggacacattcatggtcagagggcctgattatcttgcaaccaaggtgaagataccaggtggggagtatcttctaaagcctctcgggtttgattcggatgaaaagccccggaggatatgcgaattctgaataacaag

SEQ ID NO: 395512 - DNA, 666 bp, Oryza sativa
  unsure (1)..(666): unsure at all n locations
cgagatacatttactgggacatataactacatggcgccagaaagaatcagtgggcaaaaacatggttatatgagtgatatctggagcttgggcctcgttatgctagaattggccactggtgaatttccatatcctcctcgtgaaagcttttatgaactccttgaagctgttgtcgaccacccaccaccttctgctccatcagaccagttttcagaggaattctgttcattcgtctctgcatgtatccaaaagaatgcttcggataggtcatctgcacaaatcttattaaatcatccattcctgagcatgtatgacgacctgaatatagatcttgcttcgtacttcacaaccgatggatctccgcttgccaccttcaatacaagcaaccgatatgatgacagatagtctgatgcaacactgcgtcatcatctagctcgaaggatgatcctttggctgtccatctgtagaatctaccatctacctaactggccccaaatgtttcgtgtattttttgggagaaaactttgccctgtgtactgagctgggattgatgtctttgatatgtaaatttcgcgtaatttcatatgtagaacaattctaggatcattgggcattgaagttttgtttggccgtgcaccnnnnnnnnnnnnnnnnnnnnnnnnnnnn

SEQ ID NO: 395513 - DNA, 632 bp, Oryza sativa
  unsure (1)..(632): unsure at all n locations
gcttaaggaagtacgggaatgcaaatgtgtggaaaacttttacagatctcttcgattacttccccttgacagcattggttgagtcagaaatattttgcctgcatggtggattatcgccatccattgagccacttgattaacatacgtaacttcgatcgtgtccaagaagttccccatgaagggcccatgtgtgatcttctgtggtctgatccagacgatcgatgtggttggggtatttctcctcgaggtgctggatacaccttcgggcaggatatatcagagcagttcaaccataccaataatttaagacttattgctagagctcaccagttggtcatggagggattcaattgggctcatgagcaaaaagttgttaccatatttagtgcacctaattattgctatcgctgtgggaacatggcatcaatcttgggaggttgatgattgcagggggcatacattcatccagtttgagccagccccaagaaggggagagccagatgtaactcgtagaacacctgactatttcctgtgatgtaaaagtggtggactgtctctgcagcaaatgtttgatagctaggtgaagttccctggttgcnnnnnnnnnnnnnnnnnnnnnnnnnnnnnnnnnn

SEQ ID NO: 395514 - DNA, 255 bp, Oryza sativa
  unsure (1)..(255): unsure at all n locations
gaggagggaggaagatggcgatggatgagccgcccaagggttggaatcccaactatggcgtcgtcggcagcggcgaccggcgactggccttctcccgccagctctcctcctccatgcctcgcctcgcccgctccgactcttccatctccatgccccccccgtccctcgcccccaccggagccatcaccttccgctggctcgccacccgccccatgcgccgcctcgtcctcctcatcgntctcaacgtngcctact

SEQ ID NO: 395515 - DNA, 434 bp, Oryza sativa
  unsure (1)..(434): unsure at all n locations
catccatccatccatccatttgattcaagaaccccaatccaaacccccctcaactcgccccaaaatccctaactcccgaagaaatcgccgagaaatatctctcatcttgccgccggatcgagcccgattccctgcaccgagagagaggtgaggcgatccggatctatctgatctcctcgttcgtcgccattgttgcaagtgaagtgaagtgggagcagggatcatccatggcgggggtgggggtggaggaggaggaggcgttcgagcacacgctgctggtggtgcgggaggtgtcggtgtacaagatcccgccgcggacgacgagcggcgggtacaagtgccggtgagttggcttgcagtccgacaagatcttggtcggggcggttcccgttgtgtcgtgcggcgaccgttgcgagatcccgctngaggacccg

SEQ ID NO: 395516 - DNA, 556 bp, Oryza sativa
  unsure (1)..(556): unsure at all n locations
aattcctgaagtcctaagctatagctagcactagcagctagttgctccaaagcccaaaccatgcagcactcaccttcaaacgaaatgaccctccttctccttctcttcctccttggatgcacacactacggtcacgccggctcagaccgtcccaagatcgactccatcttcagcttcggcaactcgtacgccgacaccggcaacttcgtcaagctggcggcgccggtgttccccggcatccctttcaacaacctcccctacggcgagaccttcttcggccaccccaccggccgcgcctccaatggccgcctcaacgtcgacttcatcgctgagggccttggagtccccttgctcgccccgtaccatggcgagtcgcaggactttcagccatggcgccaacttcgccgtcgtcggggccacggcgttcgatctcgccttctttccagaagaacaacatcaacagcgtgcccccgttcaacaacttactgagcgtgcaaggtcgagtggttccaaaagttaaggcttaccttgttgttganaacccaagggtgcaaag

SEQ ID NO: 395517 - DNA, 299 bp, Oryza sativa
  unsure (1)..(299): unsure at all n locations
cttctccgtccaaactacccgcctccgctcccaatccggcgagatcaccaaacccctctcgccgcctccgccgccgccgccgcagcagcagcagtcactccgccggagcaccatgatgcacatgaccttctactgggggaaggacgtgacgatcctgtttgacggctggcggacggccacgtggaccgggtacctnctctccctcgtcgcgctcctnctcgcctccgncttctaccagtacctcgaggcgttccggatccgcgtcaagttcctcgcgggcgccaagccgggcctgcatn

SEQ ID NO: 395518 - DNA, 725 bp, Oryza sativa
  unsure (1)..(725): unsure at all n locations
cccacgngtccgccagcccatccccctgctgctgctgctgctgcttcgctgagacgacgagaggaagaagacgagcccccaagccaagcagacgcctcctccttcttaagcttcccaattctttctctttccctcctcctccgcctccgcctacgccttccccgctagtcccacacatccggcgaagattccggaagtttcgtcgatcctccgatcgatcaagcggcgagcggcgggaggcatggagaggtacgagctgctcaaggacatcggcgccgggaacttcggggtggcgcggctgatgcggaataaggagaccaaggagctggtcgccatgaagtacatccctcggggcctcaagattgacgagaatgtggcgagggagatcatcaaccaccggtcgctgcggcaccccaacatcatccgcttcaaggaggtggtggtcacgccgacgcacctggcgatcgtgatggagtacgctgccggcggcgagttgttcgaccggatctgcaacgccgggaggttcagcgaggacgaggccaggtatttcttccagcagctcatctgcggcgtgagctactgccacttcatgcaaatttgccaccgggatttgaagctggagaacacgctgctggacggnaagcccggcgccccggctcaagatctgcgacttcggttactccaagtcgtcgctgnttgcacttcgaagcccaagtcgacggtcg

SEQ ID NO: 395519 - DNA, 687 bp, Oryza sativa
  unsure (1)..(687): unsure at all n locations
ctctcctctcctctccaagaccaagaaccagcaggagcaagcaaggaaggcgccgaattcgatcggagcaggcaggacgggtccgggatcccgcgccgccatggagaagtacgagctgctcaaggacatcgggtcgggcaacttcggtgtggcgcggctgatgcggaacagggagaccaaggagctcgtcgccatgaagtacataccgcgtggcctcaagattgacgagaatgtggcgagggagatcataaaccaccgctcgctgcggcacccaaacatcatccggttcaaggaggtcgtgctcacgcctacccacctcgcgatcgtcatggagtacgccgccggcggcgagctgttcgaccggatctgcagcgccgggagattcagcgagggacgagttcgaggtatttcttccagcaacttaatttgcggcgtcagctaactgccacttcatgcaaatttgccaccggggatttgaagctggagaacacgctgctggaatngcagccctgcgccgcgcctcaagatctgcgaatttggctactccaaagtcatcactgctgcactcaaagccgaagtcgacggtcgggactcccgcgtacatcgctccggaggtgctcttctcgcngggagtatgacggcaagatngcagatgtaatggtctttgttnggggtgacctttattgt

SEQ ID NO: 395520 - DNA, 361 bp, Oryza sativa
  unsure (1)..(361): unsure at all n locations
gtttttatcctgatttgagaccttgcaatggattctcagaagctctaagccggtacagggaacttgttccacacttgcgcttagctggaccaacatcctttgcaccaatcattgagatggcaatgaccatcgtggaacaaagtcggcgggcagtaccatgttctgttgataattgctgatgggcaggttacaaggagtgtagacactgcatctgggcagctgagttcacaagagcaaaagactgttgatgctattgtgagagctagtgaattgccgttgtctattgtgctagtaggagttggtgatggcccttgggncatgntgaaagagtttgacggcaacattccttctcgtgcttttg

SEQ ID NO: 395521 - DNA, 524 bp, Oryza sativa
  unsure (1)..(524): unsure at all n locations
tgccttacatttacatacatacccctcctctcaggctctcactcgcgctgcatgccacactgcttcttcttcttctctctctctagctagctagctagcttctctgtaggctgtagctgcggtggcaatggcggcggcgaggttgtgggtggttgcggtggcggtggcggtggcggtggcagtgatggcggcggcggtggaggggaagagctacaacatcacgaagatcctggcggcgcacccggagttctccaagttcaacgagatgctgagcaagacgaggctggcgtacgacataaaccggcggcagacgatcacggtgctggcggtggacaactcggcgatggcgtcgctggaccacttcaccctccccaccatccgccacatcctctccctccacatcctcgtcgactactacggctccaagaagctccacgccctctcccatggcgccaccgcctcctcctcctcctcctcctcctcgncgccaacgccgangtctttcgcggcgtnaaagagaccgt

SEQ ID NO: 395522 - DNA, 261 bp, Oryza sativa
tgccttacatttacatacatacccctcctctcaggctctcactcgcgctgcatgccacactgcttcttcttcttctctctctctagctagctagctagcttctctgtaggctgtagctgcggcgcacccggagttctccaagttcaacgagatgctgagcaagacgaggctggcgtacgccataaaccggcggcagacgttcacggtgctggcggtggacaactcggcgatggcgtcgctggaccacttcaccctccccac

SEQ ID NO: 395523 - DNA, 398 bp, Oryza sativa
  unsure (1)..(398): unsure at all n locations
gttaggcaaggtagagtacactagtcacaaggctcgctctcttgcttaagcttgtgagcttggaaaagagtagtatattgagctgttgcttcgcttgctttagtttgcttgcttaccaggagaaagatatgaggaaggaaattgtcatcaggctgcagagctctgagaagggccacaagaaagctatcaaggttgctgctgcagtctccggtgtggaatccgtgacgctcgccggcgaggacaagaacctgctgctggtgatcggcttcggggtggactccaacgacctcaccgagaagctgccggaggaaggtcggccacgccgaggtggtggagctgcgcaccgtcgacggcgacgagctcatgcgcgtcgccgccggcaaccagtaccctanccg

SEQ ID NO: 395524 - DNA, 536 bp, Oryza sativa
  unsure (1)..(536): unsure at all n locations
cagcagccgcgccgagctcccagatccctcgtgcattccaccttctcccgaggacgatgggcgcttctgcagctaccggtatgcagatggtggctgcacgcccctgcatctcagcctcccagggaatgcttacttccagggcggcggtctcccggattggccgcgcactcagcaccaccactggctttgcaacctgtcccagaatctgctactccagccctcttggttcttccaagcgcaggtngtcgccatcagagcaatgtcaagcgaaagtggcccccaaggcctaccaattgatcttagaggtaaaagggcgttcattgctggagttgctgatgacaatggctatggctgggcaattgcaaaggctcttgctgctgctggtgctgaaattcttgttggtacatgggtgcctgcactaaacatatttgagacaagcctaaggcgtggaaagtttgatgaatcacggaagctgcctcatggatctcttatggaaattgttaaaggctatccacttgatgctggctatgattccc

SEQ ID NO: 395525 - DNA, 680 bp, Oryza sativa
  unsure (1)..(680): unsure at all n locations
aactttgtctacatcaagcacnttgtcatgaccattggcctgaacacatggggccttgtgctttacaacaatctggaagctttcatgctcttccctcttgagatgcttctaacgggggagcttaatcagatgaagggcgacaatgctaaagtgacaaactggctttcatctgatgtcattcttcctgttgctctntcgtgcttgttcgggctatctatatccttcttcgggttctcctgcagacgggctatctcggcaactggatttaccgtgctcggtatagtgaacaagctcctgactgttgtgattaatctccttatctgggacaagcatgcctcctttgtgggaacaattgggctcttgatctgcatgtccggtggtgttctctaccagcagtccaccacaaaaccaaaggcccccaaggctgagccaaaagaggagaatgatgaggagcagcagaagttgctggagatgcagcaagggcatgaaagcagctcaactcagaagcaaacatcatcttaagcctggtagaaaatttggcattgatatcttaagacagcttccctgaaccatttgggatgcttgggaaggatcatttggccaaaggatattcattcgttatatgagaaccttgaaatgccgttggcatgaaaaatcgcagagaaaaaaaaaaaaaaaaa

SEQ ID NO: 395526 - DNA, 455 bp, Oryza sativa
  unsure (1)..(455): unsure at all n locations
aattatgattagatgaacgatgggtgtcagtggcggaaatacgggcagaaaatctcaaaggggaacccttgcccgcgcgcctattaccgttgcaccgttgcacccaactgccctgtacgcaagcaggtacgtatatacgcgtataaatacgtatttacgtttacaaatacgtatatgattcgaatgatgcgtacttaaattgaagcgaaaatttaaatttgtgttggttttgtgttaatcgatggatcaggtgcagagatgcgcggacgacatgtcgatcctgatcacgacgtacgagggcacgcacagccacccgctgccgccggcgggggggcggaatggcgtncacaacgtcggccgcggcggcgatgctgacgtcttggctcgaccaactccacgatgcaccggcagcggcggcgttcaccacaactgccgttcgcctcggccgttggggg

SEQ ID NO: 395527 - DNA, 268 bp, Oryza sativa
  unsure (1)..(268): unsure at all n locations
gagggacccgtgaagccccgcgtcgcccacgcgcaggcgacacggggggcgaaacctagctccgccgcccccttcttccccctttccccacctngccgccgccggagctcaccgccggaaagttggccggcgagttaggagggcggcggcggggccttctcctgtggtggcgtcccctcttggcgcggggaaggcggcgaaaaccggcggcggggagtggcggcggcgagctctccgggcaagacgatgacggatctncggttgctgt

SEQ ID NO: 395528 - DNA, 337 bp, Oryza sativa
ttttagatgaaagacacctttatattattgctaataagtgatacatcttgttccctcttgcgagaacaatagggtataaccttacatcactgcattctaccttataaatattctcctttagactatggctgaaataaattgtaatcagattacatcaaggacgtcgagaccttttttcacgtcctgttgaattttaaacctccaacaaatgagctttgtcgtttataattggcctggagtccttcccatagctcccatagctcgttcctcaaccatgacatatacataacaggcccaagcgttgatggtaccaggtacagtaaagcaggctggggag

SEQ ID NO: 395529 - DNA, 467 bp, Oryza sativa
  unsure (1)..(467): unsure at all n locations
attggttgaagtatcattttgaagaatctgaagattttttcctactccgctcggtcgctccgccccaggggcgacgcgagcggcgaaacccgccgccgccccacccttcccctcctccccccgcctcgccgccgctcgagcagccgccggcaaagccgggcagctgcaaagacggcggcggcggggctccccatctccctcactccatggtcaacgcagttgggggcaccgacgagatcggaggcaggagcacggcaccggcgacgacgttcggatccggcgccggtgagctcggatccggccctcgcttggcggcagcgagcctacgaggggctggcgggatggtggcgtngtcggcgcgagctacgcnacgacgaggccgggcggcggcgacggcnacgagcccaggccagcncttggtgagctnggntccggccctccattggccggatctggtacttccaccg

SEQ ID NO: 395530 - DNA, 201 bp, Oryza sativa
  unsure (1)..(201): unsure at all n locations
caccgtttcctgatgatccactgaatgtaaacggatatgaatgcatccactctgaaaatgccacgcagtcccgcacaacagtacaaacacattctaattgtcacgagctgctgctgtgtcttacacaattaactcgcttatttttttatagaatgtaattatgccttgatggcgtgatnnnnnnnnnnnnnnnnnnnnnnn

SEQ ID NO: 395531 - DNA, 362 bp, Oryza sativa
gagtgtgtgagtagctgaggaggtcgaccatggcggcggctagggttgcgatgtgggtggcgtgcgtgttggcaatggcggcggcgtgccaggggcggcttagggttgggtactacaagcggaagtgcgcgccggcggagtacgtcgtcagggccgtcgtcggcaacgcgtccgccagaaccccggcgtcggcgccggcatcgtccgcatgttcttccacgactgcttcgtccaggggtgtgacgcgtcggtgctgctcgacccgacggcggcgaacccgcagccggagaagctcggcccaccgaacttccccagcctgcgggggttcgaggtgatcgacgcggcgaaggcggcggtggaga

SEQ ID NO: 395532 - DNA, 472 bp, Oryza sativa
  unsure (1)..(472): unsure at all n locations
ctcttctcgtctttcccatctcgcggcggctgcgtctctctctcgatctctcggcggcggccatggcggactaccacttcgtgtacaaggacgtggagggggcgagcacggagtgggacgacatccagcgacgcctggggaacctgccgccgaagccggagccgttcaagccgccggcgtaacgcgcccaaggtcgacgccgacgagcagcccaagtccaaggaatggctcgacgagcgggagcccgacgagctggaggatctcgaggacgacctcgacgacgaccgctttcctcgagcagtataggaggatgaggcttgcagactcagggaggcagcaaaggccgcgaaattcggctctattgtgcctatcactggctctgattttttccganaggtcttccaaggcccatccgatgtctnggttgtggtcttcctctanaaggatggataccagaatgtgggttgtttaa

SEQ ID NO: 395533 - DNA, 560 bp, Oryza sativa
  unsure (1)..(560): unsure at all n locations
ggatacacaggtgctcttgcaaatccactagtagcccctgaggagagtctcacacgaatcaatggcagtattattcaaaagttctatcacgagaacttcactgctgatcgcttggttgtagcagcatcaggtgttgatcatcaataccttttagatgttgcagagcctttattgtctgattggcacaagggctccccagtggaaaggccagagtctaagtatatcggtggggattttagacatagagcagactcagagatgacccatgttgctttggctttcgaagtgcccgggggctggcttgaagagagagatgccacaattatgactgtagtacagactttaatgggcggtggtggttcattctcttctggtggtcctggaaaagggatgcattcacggctttatctgcgtgtcttaactaaataccacacggtcgaatcattttcggtatttagcaatgcatttgatagaagtngcctctttggtatttacttgaccacnccttcagattttgttgcaaaggctgttgatatngcgacaaaagaactgattgctat

SEQ ID NO: 395534 - DNA, 467 bp, Oryza sativa
  unsure (1)..(467): unsure at all n locations
gcaacacaagtcaggggaggagagagaggccgcgccgccgcagatctgtggccgcgttagggtttcttcgccggaatcgagcgaggaagtaggagggagaggaggaggaggaggagggcgacgagtaggaggcggcggcggcggagatggacgtggtgaaggcggcgcantctcggggcggacgctggagaaggtggtggtgcacccgctggtgctgctcagcatcgtcgaccactacaaccgcgtcgcccgcgacacccgcaagcgcgtcgtcggcgtgctcctcggcacctcctcccgcggttccgtcgatgtcaccaactcctacgncgtgccgtttgaagaggatgacaaggatccgaggatcttggttcctcgatcataattaccacggatcgatgttttncatgttcaagaggatcaacgncaaggagcatgttgtttgttggtacaaaaccggtccaaaa

SEQ ID NO: 395535 - DNA, 332 bp, Oryza sativa
  unsure (1)..(332): unsure at all n locations
cgccctttttttttttttttcctccgttttttgagatgcagaaactgacactgattttctcacacgagcgctgctgcttcagagctcgtcgacgtcgacgttcctnaagctcccgccgagcaacgacaggaggccgccaccgtgcaccctcccctcggggacgacgaaccctcctccctctntgcccctgcccatcgacggcggcggcgccgacgacgcacgacganttcatggagttcgggaccagcacctgaggaggtatcagctcttgcctactcgccgtgcngtcgnaggngtcggagtactacgangctgttncttgacgacgtaag

SEQ ID NO: 395536 - DNA, 354 bp, Oryza sativa
gctgccacgagcacatcccacggcccctgtaaatcagcagcagcggcagctcccagttaggctagagagcacatgttcaaggacacagttgactcctgtgagcaccccagtaaacgcaaggcagttgagttcacaatcagtttccccggtgagcaattcatcatcatcgtcaagctcacatccaggtccagcactctcaaatccagccttggcagcaaattcaagttcaaatccagttttgagtgcaggcacagtggcattgccgccaagtccacacccacccgagtcgatagcagcaccaaggggacaggcaaaagggggcaccgtcaggctttgaatacagttcctgttgta

SEQ ID NO: 395537 - DNA, 672 bp, Oryza sativa
  unsure (1)..(672): unsure at all n locations
gatcgaaggatggatggnnggacggatggagcaagctaagctaagctttcgttttgtcgatccatccgtccatcggtgtcgacctagctagaaaggtcgacctgtcgcgtcgtccatccaagatcgatccaaccagcaaccaggcatcagacaggctctttcttgtccagctgctgctgctgctagtacacatactacactgtctctgctgcatgcatgcatgctggctcacctcatctgattgagagttcagaattgttgagagcaagcaggaaattgagaaacggccaggacagattggattgatcttaattggcatatatgctgctcgatcgatactgtctgtcagttctcagttcgtcgatcgatcaagtctatatttggatatctgaatctctgcaaatgccaactcgaccactaagcaattcatcaatggacatgatcatagtaatgtcgatcgacgtgcagtgtcactcattgttgggagcacggtcaaaacctccagttcatatcatatcatatgaaatcgatctcaagctcaagcagtttcgatagatgcaaaattgaagatggaagtataaataactgctactgtatatacatatggagggcaggaaggcaggcaggagattgatgaaagtgacgcgagcctggccttgaattgtgcnaagt

SEQ ID NO: 395538 - DNA, 428 bp, Oryza sativa
  unsure (1)..(428): unsure at all n locations
ccccccccctttttttttttttttttttttttttttttttactcccaaaaatcttaaaagaaaattcaaaaacaattgttcttaaattcgagtataatctccacctcagttcttacaaattttacccccaaaacanttttatcccactcacaaaaacttgtacatgaacaagtcaaaatactccatacaacaagaatcatccatccggtcatccctcttgcaaaatgcagagacacagagaagtagcagcagcagctcagcacgagaccccgcatggcttgaggacggggcccttgggcttggggatgaaggggtcgatcctgacccagacgagggagaagatggaggcgaggaggttggaccagagcacgncaattgtgggcgtccggttctgcctcccatgagccccttgaggaaggggtagaggt

SEQ ID NO: 395539 - DNA, 344 bp, Oryza sativa
  unsure (1)..(344): unsure at all n locations
aagaaaccagagtgggagagctccttcttgctctcctcgccatcatcttcttgccggccgccgggatgatgccatcacgccgcccaacggccgatctctgggaacgccgacctcgccacgggagctctggagcgcggccacaccgtcgtcaacgcgcagcgcgggttcgcgcagtagttcccgtcgcctcgaggcgaatccggctgagctactgngccaccagcttcgcctcaccatgctctccaaaacggcccaagaatccctcagaaccgtgcagcgaggagggagatcgaccaacgtcttcttcaacttcgatcttagcgncttcgtcgtcgatttccatt

SEQ ID NO: 395540 - DNA, 348 bp, Oryza sativa
tggaaagatgcatgcgtgtgggcacgatgttcatgtcgcaatgctgctgggagctgctaagctgctgcaatcacgcagggatcatttcaatgggaaggtgaagctcgtgttccagccggcggaggaggggtacgccggcgggtactatgtcctcgaggaaggcgctgtggacgatgtgcagggcatcttcggcatgcacgtcgatgcgggtttgccggcgggcgtagtcgcgtccaggccggggccgttcctcgccggctcggctcgcttcacggcgaccatcaacggtaaaggcggccacggggcggcgccccaccacgacgtcgatccgatcgtggctgtctcttt

SEQ ID NO: 395541 - DNA, 334 bp, Oryza sativa
ggatgctctaattgatctggagagtggaaataacattgttgtcggcgagcataacaacggggcggatgccaattttgctgttgcccaagaaagaacagcaccgaatggttcatggaatggtgccatgggcacaactggatgcctgaaagatgatgtaaatcatcagcacatgtgttgctgtctgtcctctccagatgctgctgccaaaaatggagatgaccggaagtctgatggggaggagaagctgggccttctggatacttccggaggcgagaaaacaaagaagaagcggtccaagaagccaccgcgaccaccacggccaccaacacccacg

SEQ ID NO: 395542 - DNA, 450 bp, Oryza sativa
ggcaggaaacgaatggagattatcctcggcaaccagttatcacggaactccagggacgtgtttcaaaagctgaggctgcattgcgagataaggaggaagaaaacgaaatgctaaagcaacaattggatcaatatgagaagaaatggtcagaatatgaggccaaaatgaaatctatggaagaggcatggaagaagcagctctcctctctgcagttgagccttgtggctgccaagaagagcctaactgcagaagatgtggccagccgagcagctcgaaccgacgctgctccaatgcatgctcattatgattctgaagatacgtcgaccgggacccatacccctgaagggacagagttcaaatatcaaaaccacaactctgaggctagagtggcaagcaccgaatttcaagataggcggataaacgcggtgaaccacctagccaaggagtttt

SEQ ID NO: 395543 - DNA, 327 bp, Oryza sativa
tggagtaccacttacctatgttacggatgctggagatccttacagagatcagatggaggactgcattgctttgatcatgggagagttaaaatccagaggaatcttaaacagccatactctggcttaccagagtcgagtggggccagttcagtggctgaaaccatatactgatgaagttctagttgaactaggtcaacagggtgtaaagagcctcctggctgttccagtaagctttgtgagcgagcacatcgagaccttggaagaaatcgacatggagtacaaggagctggctctagaatcgggcatcgagaactggggaagggttcc

SEQ ID NO: 395544 - DNA, 423 bp, Oryza sativa
  unsure (1)..(423): unsure at all n locations
ggttggtgtattagaatgcttgatgggattgctaaggctcggttggcttattcgatttattagccattctgtcatatctggcttcactactgcttcagctattgtaattggtctgtcacagatcaagtatttcttgggctacagcgttacgagaagcagcaaaattataccacttattgagagtataattggaggaatagatcagttctcctggccaccatttgtaatgggatcaagtttttttgttattcttctcataatgagaaatctagggaaatcgaataaaagactgcggtttcctaaggagcttctggtccccttacagcagttgtgtttnggaccaatttttgtggaaaattttccatccatcttccatatcagtnggtaggggaaatacccgaaggtctttcccaaattctccat

SEQ ID NO: 395545 - DNA, 321 bp, Oryza sativa
  unsure (1)..(321): unsure at all n locations
actcctctccttctccttctccttcttcttcctccattggcatctccaagaaacccaagcctttctacgtgcttcgagctcggccaccggcggccggacgcgcgcgcgccagccaccatgtccggcggcgccgtcgccttcctcctgctcgtcgccgccgccgccgtggccaatgccgccgtcacctacgaccacaggtgcttcaccatcaatggccagcgccgcatcctcatctccggctccatccactaacctcgcagcacccccgagatgtggccggacttgatcaagaaggcaaggaagggggctcgangtgatcaa

SEQ ID NO: 395546 - DNA, 317 bp, Oryza sativa
  unsure (1)..(317): unsure at all n locations
cacgccaccatccccaccgcctccattccaccgccgccacaagcctcgcctcgccgcgccgcgtatctcggccacggcggcgccaatggccgaccgcgtctacccggccgcgaagccaacccaccgccggcaatggcgaacgcgggcggcggcggcgcgacggcgtcgtttcccggcgcccaagtcgcagatgtaccagcggccaatctaccggacgcangncgggcggcgaaggncggcgcgggcgttcctgccgatgcagcttctgctgtgcttctgctgggcgctgntggtcgtcatcctcctggcgctcgtag

SEQ ID NO: 395547 - DNA, 393 bp, Oryza sativa
cacatcatcctccgcaagggcctcatcgctggcgtcgagtacccgctgctcgccgagcacatggcggattacatggccaagacgctcttcttcacctcccttctctacaactccaccactgatcacaagaaaggagttgctcagtactgcgataatgtggagatgtgtaggctcacagagcaagtcgtgttctcagacccatacatgctcgccaaatacaatcgttgcacatcacccttcctagataatgatgctgcagcggttcgagaggatgcttgagcttaaattggagattgcttgaatttgaaatcaatgtttattgaggggagcacaggctctttcttcatggaggatctccacactgggttccatcatggtgacaaccagattcta

SEQ ID NO: 395548 - DNA, 470 bp, Oryza sativa
  unsure (1)..(470): unsure at all n locations
tgtagctcagctcacacttgtcttgttcatagcatgagcatcgcacgcctatttaaagatgctatagcttcgattccctcctgagctctaacactatcgaagcttcacaaattcagttgacgaattgtagctgttctctctcgtctccaagtgttggaggcaaaggaatccttcgatccataggacgcaggacagagaatgggtttcgaagaaacatatttttctgccttctgttacttgcttcttttctctgtcagctggaaatgccaagctgcagaactggacatggctcagacagcagtactcgaagttgatgcttcatgggaacctttctcgaaagatccctgacacgctatttgggattgtttttcgaggaaattaaccatgccggagctggtgggatatnggcggngtttgtcagtaaccagagggnttnaagctngagggncccacaacccttcaaatatttg

SEQ ID NO: 395549 - DNA, 420 bp, Oryza sativa
aaacaacttcgtaatgtgaacttgatgttatttcctggaacatccttgctaactaaaagattggatggaattacagctgccaaatcagaagaggacaaggatgcatacaatgtttctggattacctaatggtaagtgtttgcctagcaggaaaggaaacgggcatcttgaactccatgatcttgacttgttagaggccgagttgaatactgaggatgcaaccaatgcttctttcagagcactgaaacatgaatgtggtccttgcaacatggtttaatcatgccaagctagctgttgggggaagtgtgattttattttaaatcgaatttctgggctgtctctggctgttactctgtgttgggcaactgttcaggctactcatccttccagttccagtccagtactatgcaatgaattctcc

SEQ ID NO: 395550 - DNA, 681 bp, Oryza sativa
  unsure (1)..(681): unsure at all n locations
tgaaataccaccattgcccataattggcttcccagacacaaacttctttggtataaagatcgatcatccacaggaaggagagagcaagcttacagctcacagcaatcagctaagccagtagccaatcctcactcactactcatcttctcttcccatctttgttgcttgcattcagagatcatccaatcggccatggctgatgaaatccagcatctgaccagggccttctcagggctcggtggcctcggcgtggacgagccggcgatggtgtcggcgctggccaagtggcgcaggcagccggagaagctgtccgggttcaggaagagcttcaatggcttcttcaaggatcatggcggcgtcatcgagaagtgcgaggaggagtacatgctccacctcgccgccgagttctcgcggttcaagaacctgatggtgatgtgggcgatgcacccgtgggagcgcggccggcctcgggcagttcggcggggaggctggaggacgccgtcgccgggaaggggcacggctactacagagangcgctcctctcgctcgtcgccggcggaagtgacccggccgatcagccattgcncctccgatctgtcgcctcgccttgtcantgcgtggcatcgtgtacgttgttgcngctgctgttgttgttgtggtgtttttgttgcatgcgtggat

SEQ ID NO: 395551 - DNA, 329 bp, Oryza sativa
  unsure (1)..(329): unsure at all n locations
aggcagcccggtccagcccaccaagcaggtgaggggcggagatggaggaganggtggnggcggcggcggagaaggcgacgtcgtacagttactgggtgcgggaggccacgggcgacgccgcgccgcttcctgcgccacgcaagatcgacgccgccgacctcgccgccaagcccgcgcccaccaccctcggctccgtctggaacaaggctggaacctgggaggaaaagaacctcaattcatgggccaacggtaggataaaggatttgctgggctcattagaccctttngaattttctactgggaaggcatctgtttacgaagatccaagt

SEQ ID NO: 395552 - DNA, 876 bp, Oryza sativa
attcagctgcgcaacttttgggaaggcgatccgttccggccctcttcgctattacgccagctggcgaaagggggatgtgctgcaaggcgattaagttgggtaacgccagggttttcccagtcacgacgttgtaaaacgacggccagtgagcgcgcgtaatacgactcactatagggcgaattgggtaccgggccccccctcgaggtcgacccacgcgtccggggaaccggcggagtcgacgagatcggagccgatccccctacacctccacacgtcggtctccttctccaagatgggagagaagccagtccccaactcctaggaggcgtagaagccctccatcaccaagacgacaacgaagacggagaagtcgaagcaatacaagttccactgtaaataactcctgcagcccaagtcatgtatcagagcaaaacaatttaattgagaagcaaaaagaagaaggagataagaaaaggcgccaaaaggaagctgaactgaagttacttgaagaggagctcgctcgaagagttgaagaatctataagaaaaaatgttgaggaccgtttgaactccgaggacatcaaaaatgaaataaaacggcgagttgaggaaggcatcaagcagttatttgatgaggttgatgctcagctacaaaaagagaaggaaacggctctgcgtgaagccaggcataaagctgaacaagaaagaagagagagggaggagttggataggatgcttgaggagaatcggcgaaaagtagaggaagctcaaagaaaagaagcactggaacaacagcagaaagagctagagcgatttttagagttggaaagaattcaaaagcaaagggaagaccgatgcgtagaaaaaaaaaaaaaaa

SEQ ID NO: 395553 - DNA, 714 bp, Oryza sativa
  unsure (1)..(714): unsure at all n locations
tggctcagtttcctcctgttcttgagagaactgaatctgctgtccagctgctgctccggctggtctctgagttgaaggtacttgaataacttgaaggttcctaggaaccttcatttgttggaagatgtatagggctaagagggctgcattatctccaaaggtgaagcgccgtgtagggaagtatgagctcgggcgcaccattggagaaggaacctttgcaaaggtccggtttgcgaagaacactgaaaatgacgaaccagttgctatcaaaatccttgacaaggagaaggttcagaagcacagattggttgaacagattaggcgtgaaatttgtactatgaagttagtaaagcatcctaatgttgttcggctgttcgaggtcatgggaagtaaagcaagaattttcattgttctggaatatgttactggaggagagctctttgaaatcattgcaactaatggaaggttgaaggaggaggaagcacgaaaatactttcaacaacttatcaatgcagtttgactactgccacagtaggggtggtgtaccacagagacttgaagttagaaaatttgctgcttgatgcttctggaacctgaaagtatctgactttggttttgagtgctttaaccgagcnagtgaaggctgacggttgctgcacaccgacatgtggaactcctaattatgttgcnccagaggtgantgaggacagaggc

SEQ ID NO: 395554 - DNA, 1292 bp, Oryza sativa
  unsure (1)..(1292): unsure at all n locations
ataagcagtacgtgatcagaagcaaagctagcgtgcgtttgcaatggcggcagtggtgaccaacaggagggtgatcctgaagaggtacgtgacagggctcccatcggaggacgacatggaggtggtgacggcgaagagaccgctggccgtgccggctgggtcggaggcggtgatggtgaagaacctgtacgtctcgtgtgacccttacatgcgtggccggatgacccgtcacgaggtgcccagctacgttcccgactacgtaccaggagaggttatcactaattgtggcgtgatgaaggtggtatcatctgggcacccggatttcaaggatggagaccttgtttggggagtaaccggatgggaagaatacaccctggttaacaatcccaagccttatttgcataagatcaattaccctgaatttcctctatcttactacaccggtgttctaggaatagctgggcttactgcctatggtgggttctttgaggtctccaagcctaagaaaggcgactatgttttcgtctccgcggcatccggtgccgtagtcaagctgctcaaaactaagtttggctttcatgacgcgttcaactacaagaaggagctggacctggagggagcccttaaaaggtgcttcccggacggcatcgacatctactttgataacgtgggtggtgcaatgttggacgccgtgctgccgaacatgcgtatcggcggcaagataacgatatgtgggatgatctcgcaatataacctggagcggccagacggggtgcggaacctcttctacttattcgccaagagcctacggatggaggggttcctggtgagcaactacattgcaatataccaccggtatgagaaggagatggcaggatacctgagggaaggaaaggtggtgtatgtggaggacatcgttgaggggctcgaggcggcaccggcagctctcattgggctattcactggccgcaatgtcggcaagcagctggtcaccattgcacgggagtgatgtcgttggttgcattggtatgtactacctctgtcccgaaatattacaatttttagctacgaatctggacatataggtgaccagattcatagctaaaaattgctatattttgggacggaggtagtacgtactaaccatacttatttatgaaatctgaaatggatgtcttgtttgttttgtcgggttcagaaatatgagataaaatattgtgccgggctnnnnnnnnnnnnnnnnnnnnnnnnnnnnnnnnnnnnnnnnnnnnnnnnnnnnnnnnnnnnnnnnn

SEQ ID NO: 395555 - DNA, 365 bp, Oryza sativa
aaagctccaaatcgcgccccgccccccaaatccacgagcaccagcgagtcgccgtcatcctccgccatgatccggttcatcctgctgcagaatcggcaggggaagacgcggctggccaagtactacgtcccgctcgaggactcggagaagcacaaggtcgagtacgaggtgcatcggctggtggtcaaccgggatcccaagttcaccaacttcgttgagttccggacgcataaagttatatacaggcgatatgcaggactgtttttctcaatgtgtgtggatatcacttgacaatgagttggcatacttgggaatgcatccactttgtttgtcgagatattagatcatttctttcagcaatgtgt

SEQ ID NO: 395556 - DNA, 369 bp, Oryza sativa
caacatgattgaagtgttctatttccgggacccgaatgcaatggagaggaagactagggagtatgtgtttatctacattggaactgggttatatgcggttgtcgcgtacctcgttcaacattacttcttcagcatcatgggcgaaaatctgaccaccagggtgcggaggatgatgcttgctgctatcttgaggaatgatgtggggtggtttgatcaagaggagaacaattcaagcctcgtggcggcacgcttgtccacagacgcagccgatgtgaagtcggccatagcggaacggatatcagtcatcctgcagaacatgacctcacttctcgtgtccttcgttgtgggcttcatcatcgaatggcgggt

SEQ ID NO: 395557 - DNA, 227 bp, Oryza sativa
  unsure (1)..(227): unsure at all n locations
ggtctacaccctccgtcagaaaagaaaatccaatgtttaaatatacactggattttctttttgacagagggagaaacttttaaatttagctttaaaagtttggtgtggactgaagctgtgaagtaacttgtaaaagcgttctacccatatccgtttctatcttcggtggagataaaactgtttgactnnnnnnnnnnnnnnnnnnnnnnnnnnnnnnnnnnnnnnnn

SEQ ID NO: 395558 - DNA, 712 bp, Oryza sativa
  unsure (1)..(712): unsure at all n locations
ccgccaaccagtccatcgtcgcatcctccgtgcaagcagcagccggctcgccgcctctgcccctaccttctccactcctctttctctcatcttccgccccaagcttgcactctcatcctgcccgtcgtggtgcgcccgcggtgcattttgcctcatgtgcactccgagacactgcaacgacggtgaagaggaggagaaggcggctacagtgaccatggagatggtagatctggcggtgggcggctagcaaggtgaaggctagctatgggtcgagggcagcagccagcaagcaaggcggaggtccgatttgtcggagccagcaaggtggagtctcaaactcttaggtccgatttgtcgattacttcctcttgcaatgctaattttgtttttattgggatgggtttgatttcttccatggatccctctgctttgactataattgaattggtgtggattagagtccaatttgtgtggattagagtctaatttgacaattcagtgttctcttttcttttcagtttcgtgtatgaactgggaattggaaatttagagacgatctagttgtgtaggaaattttggggtccaaattgacaaacttaatgttctcgcttcaatttcgtgtacgagttgggaattgagaatttggaaacgatctagctacgtgggaatttttgatttnnnnnnnnnnnnnnnnnnnnnnnnnnnnnnnnnn

SEQ ID NO: 395559 - DNA, 405 bp, Oryza sativa
  unsure (1)..(405): unsure at all n locations
ggagcatcttgagatcgcccttattgccctcgtgccaatataccaaaacatcaagaagttattgccagagttaatccgtatcaaccagtatttatgtaagcgagaaaaggcagcaagataaatccattagagttaatgcaagcataaattagaactagagttaatgcaagcataaattagaactatctatttattttcttcttcccttacctacacgtaatagtgttttcttccaagtttttttttttttgatgaagttggatttgcagaacacatccttttcaggatttttgttgttatccttggactctcaatagctgataagaaaaaaaaatgcactgctgttttgaaggctgccaaaaaaaanaaaanaaanaanaaangggggggccccnccggggnggt

SEQ ID NO: 395560 - DNA, 983 bp, Oryza sativa
  unsure (1)..(983): unsure at all n locations
ctggaatatccaaaattctatgacaaactctatgcattactgactcctgctgttttcatggcgaaacatcgggcagttttcttgcaacttctggatgcatgtctgaaatcttcatatcttcctgcatatcttgctgccgcgtttgcaaaaagattgagtagactaaccctttcagttccacctgctggcgctcttaattattattggctttaattcacaatctactcgcggagacacccgtcaataaattttttcggtccattggggaattggatgcaaattgattctgaaatctttaacgaagctagtcaacgtaagaaggttggcgctgatcctttcaacaatgaagagactgaccctgcaaagtctggtgcaatgcgaagttctctatgggaaatagacacactgcgccatcattactctcctgctgtttcaagattcgttgcttcacttgaaaatgatctcactgttcgggccaaaactactgagatgaaaataacggactttagttcaggctcctacgcaacagttttcagagatgaggtacgacggcggataaaacaagttccccttgctttctacagaactacnccaacttgtttatttcaagagtcagattttcctggatggacttttngggatcaattcaaaaacatggcagaaactagtgtagaaggcaatgggatcagtacggtagatattagcaacagctcgcccgccaaaaggttgcggatggagacctgagtagggacccagacagggtgtaccatcttgatccaagttttggaccgtttaagagggggaccaatggacctgttgtatggcctaccattttagtttcattttgtttttttaacatattggaaacaattatgaaattaagttgtttttaacagtccaccagtgttgcaagttttgaactgaaaggagtgaagtatgaattacgcgggtnnnnnnnnnnnnnnnnnnnnnnnnnnnnnnnn

SEQ ID NO: 395561 - DNA, 631 bp, Oryza sativa
  unsure (1)..(631): unsure at all n locations
taaaacgacggccantgagcccgcntaatccgactcactntagggcgaattgggtaccgggccccccctcgaggtcgacccacgcntccgggccaggaccccttcagtttatcaaacattgctccagtgcttaatgccacggagaagcttgagtcaagacatatgaccttgcccgagaaatttgtggagacgctgaagctgatggagcaccgatacggcgcaaaagatttcgagacgtgcaaagacacgagcttgttgcctcctgggacgttctacctcaccagggttgactccatgtaccgaagattctatgagaggaaggccgacgaggagatcgctgcagccaaagccaagtacagtaatggacatgccaccaatggctatgccaatggccactagtggcacgcatggcatgatggctgctgctgatattgatttctggtttgataagttcatgattaggtgtttccagcctagtgtagtagtttctcaaataagtgttctccacacctgttatccatatctcctctaatttttttgtattgaatcagacagactagtgagacatttctgtagtatcaatcattcttgtttcttctagctnnnnnnnnnnnnnnnnnnnnnnnnnnnn

SEQ ID NO: 395562 - DNA, 554 bp, Oryza sativa
  unsure (1)..(554): unsure at all n locations
actgcacttactcgtcccgccaaaagaaaaaaatataagaaaaagaggaaaagaaaagggaaatattctcttcaacttcaagctacagattggttgagagtagtgtgtaggggtttcctcaactggaaaagacaaaaagaaagtgctaacaatgtggcttgcgtttgctgttatatttggtgcttcacgcaaccttctgcttgatgctatatttcctttcaagagatactgtggatattttgatgttgcacttcctcatatttcagtcatggaagtgcttcaagttgttaggtcatcataggaaatttctgaggatacactaattgtatttcacttgtgtagaagatcaccccagctgtgttttacacttttactccaggtcacacatgaagaaagctgaatacagttcgtgtaacatgtagctgaagtagcaggcacagaatgcttgtagtctaattgtgtgaaacagatgcttttattgaagaagttatcagatactagtgattgttggtcnnnnnnnnnnnnnnnnnnnnnnnnnnnnnnnnnnnnnnnnn

SEQ ID NO: 395563 - DNA, 274 bp, Oryza sativa
  unsure (1)..(274): unsure at all n locations
ccccccctcggagntcgccccacggcntccggaagaacgacccctgaaactcatcggctcactcaatcttgttgttcgagtatttaccagtgaagaggcttaatttcacttttacttgtatgaactgtcttcggagcaatggtttttctttcttcagttttccactctgcatttgttgctgtggacgtctgaactcttaaatttttctgtaacatattagataacaaaagggtaaaagacttcctacttatcttnnnnnnnnnnnnnnnnnnnn

SEQ ID NO: 395564 - DNA, 332 bp, Oryza sativa
  unsure (1)..(332): unsure at all n locations
ggaagtttgataaagctaggagttggttgaacagagctgttactcttgctccagacattggagatttttgggccttgtactacaaattcgaactacaacatggaaacgctgatacacataaggatgttgtacaacgatgtgttgcatcagaaccaaagcatggagagagatggcaagcaatagcgaaggctgttgagaactcacacctgtcgattgaggcccttctgaagaaagctgtggtggctcttggccaggatgaaaatccaaatgctgtagatccctagtctgtatcacttttaactttaaattaaggtcgataaagnaatatgtag

SEQ ID NO: 395565 - DNA, 456 bp, Oryza sativa
cgtatggtaaaccctctttgcttgctataaattcccgtcatcgcgtccctgaatcctcgcattcaacgaacaacgactactcttgactccactcaggagcagagcatggcagtcaatcacaaactcagcgccctcctcgtggccacggcgttgccgctgctccttctctccactgcagatgcgggcgagattggggtgtgctacgggagggatgcgagcaatctgatcgatccgccggaagtggtgaagcttctgaacgcgaacagcatcacgatggtgaggatctatgacactgacccgacggtgctcaacgctctcgctaacacaggcatcaaggtgatggtgatgctacctaacaaggatcttgcttccgctggtggcggatgtgggggagcgcaaccaactgggtgaagaacaacgtggtgccgtacctcaaccaggggcacgctgatcaat

SEQ ID NO: 395566 - DNA, 713 bp, Oryza sativa
  unsure (1)..(713): unsure at all n locations
agcgagtccgcccgccgcccgagcttatctccatcctacgagcagcggcgccggctccggcgtcggcgtccccctgctccttccgccgcctcctcgctctcgccggcccgtccctggggaatgcccagctgaattcaatggctcaagttactgcgaccgcgaatgctcgggtgctcggttttcctgccgccagccgccatggtggccctgtaggatcgcgtgctgggccggcgtttctgaatctgcgtgctcccgcacttcgtcatgacagtaaaaagcatcctttgagagttggtgctgcctcttcattattcacaaagtatgatcctatcaaaggcatcaaaccattgctgtcaattgacaagttacgtcctagaactcaagttgggctgtcgagcatctttaatcatcaattcagcttccctgaagttggagaccaaaccttagatggtggtggaggaccttagcgtgtgtcccctatcttctgccgctgcacaacatgtgggtcctttgcagatgctgtgtaccagcttcatccatacttgcagcagtttgggttgttctatgcattcatcgacacaatggngttagtcccaggatggctctttctgatgatcttcatnaccgtctacttctttgtggtcaggcggaagtggttgcaaacttcttgcgggatcaagtcaatattggggtaattctccttgatactgggn

SEQ ID NO: 395567 - DNA, 492 bp, Oryza sativa
  unsure (1)..(492): unsure at all n locations
cccacgcgtccgcttctcgccttctccgcttctcccttcccatctgctgctcgcgaatctcctcgtcgtcgtcgtcgtcgtcgtcgtctcctcgccgccgggagaagcgcagggcggacgcggaggcggaggcgatgggggaccacgaggcccgcggggatgacttcgagaagaaggcggagaagaagctctccgggtgggggatcttcggctccaagtacgaggacgccgccgacctcttcgacaagggggccaactccttcaagctcgccaagaactggagcagagctgcacaagtgtacatcaagattgctaactgccatttgaagggtgacagtaagcatgaagctgcctcagcttatgtcgaggcggcaaattgctataaaaagttctctcctcaagaggctgcacaagcgctaaaccaggctgttgatcttttcttggaaattggtagatttaacatggctcaaatattgaangcattggtgagtt

SEQ ID NO: 395568 - DNA, 618 bp, Oryza sativa
aaatctgagtttgatcctggctcagaaggaacgctagctatatgcttaacacatgcaagtcgaacgttgttttcggggagctgggcagaaggaaaagaggctcctagctaaagtagtctcgccctgcttcaaaactacagggcgcgcgctacggctttgacctaacggcctccgtttgctggaatcggaatagttgagaacaaagtggcgaacgggtgcgtaacgcgtgggaatctgccgaacagttcgggccaaatcctgaagaaagctcaaaagcgctgtttgatgagcctgcgtagtattaggtagttggtcgggtaaaggctgaccaagccaatgatgcttagctggtcttttcggatgatcagccacactgggactgagacacggcccggactcccacggggggcagcagtggggaatcttggacaatgggcgaaagccgattccagcaatatcgcgtgagtgaagaagggcattgccgcttgtaaagctctttcgtcgagtgcgcgatcatgacaggactcgaggaagaagccccggctaactccgtgccagcagccgcggtaagacggggggggcaagtgttcttcggaatgactaggcgtaaagggcacg

SEQ ID NO: 395569 - DNA, 408 bp, Oryza sativa
  unsure (1)..(408): unsure at all n locations
ctcccctaccgccgccctccctcgccgccgcgacgtcaccgtctgccatggcgtcggagaagaagcagtccaacccaatgagggagatcaaggtgcagaagctggtgctcaacatctccgtcggggagagcggagatcgcctcacccgtgcctccaaggtcttggagcaactgagtgggcagtcaccagtgttctctaaggctagatacaccgttcgctcatttggcatcaggcgtaatgagaagattgcgtgctatgtaactgttaggggtgagaaggcaatgcagctttcttgagagtggacttgaaggttgaaggaatatgaacttcttgngaaggaaactttcagttaaacttgggtgtttttggttttggaatccanggggcacattgatcttgggaatcaag

SEQ ID NO: 395570 - DNA, 536 bp, Oryza sativa
  unsure (1)..(536): unsure at all n locations
cacccacgagcggcaacccaccgcgagagacaaaaatatctccatcgcgatctccatggatgtagagttcttcgccgacctcgacctcgacgcgctcctcgcctccttctcctcctccgccgccgccgccggctccggcgtctcgggcctcttcgccccgtcaccgccgcacgatgcggaggcggggtcgccggagtcggtgagctcccggcggcccagcccttcccgggaggcggcgctgtcggagatcgagaggttcctgatggaggagggccccgcggcggaggagggggtcggcgcggaggatttcttcgacgcgcttgctcgtcgacggcggggaggaggaggaggaagaagaggggaaggggagtgaggcggggggaagcacggatggggattccgggaaggagaatgaggtggctacccggacgcggagaagaaggatntgnagcgaggtggattgcgattatcccattacaagaagaagaagagcaaattagaatagggattttccatgaatcaaggagagaagaagt

SEQ ID NO: 395571 - DNA, 522 bp, Oryza sativa
  unsure (1)..(522): unsure at all n locations
ggttgaccggcaggtggaacttcgacgagtgcctcatnctcgccagcnacggcctctgggncgtcgtcagcaacgaggccgcgtgcgaggtggcgcagtcgtgcctncgccgcggcaggcagcggtggtgcgccgaggcggcggcggtgctgaccaagctggccctcgctcgccgcagctccgacaacatctctgtcgtcgtcgtcgatctccggcgaggcaacgcttgtagagagagtgtcacccagctgatgctgtagcatcagtactagtattgcagatattagctaagctaatggttctactaatctttttttttcatttcccttgtgttaaaaatcattttttttctcttctaaatttctccctgaattaaccaagttcagtggagcacatagancaggtgatggggttgtgcaactgctagttggtgtaaccagaatttcatctggataccaactgaaatgaaatgaatattaagcaagattatttgnnnnnnnnnnnnnnnnnnnnnnnnnnnnn

SEQ ID NO: 395572 - DNA, 467 bp, Oryza sativa
  unsure (1)..(467): unsure at all n locations
aaaactactactcctctcgaggcgacgacgaagaggagaggagaaatctagcggcggaagcagcagctgcgagaggcggatttttcgattcggttcgaggcgaggcgganggaggaggaggattcgaggcgatggatcggtaccagagggtggagaagccgcgggaggaggcggccatcggcgccaacgagatccgcatcaccgcgcagggccgcacccgcaactacatcacctacgccctcgccctgctccaggacaacgcgacagatgaaatcgttatcaaagctatgggaagggcgatcaacaagaccgtcgcaattgtggagcttctcaagagaaggattgttggtctccatcagaatacctctattgaatcaatcgacataactgacactttgggaaccattggaagagggctttacacccttgagactacccgccatgtttccttgntaccattacatttc

SEQ ID NO: 395573 - DNA, 275 bp, Oryza sativa
  unsure (1)..(275): unsure at all n locations
ccggtcctccaccgtcacgttcggctccggcgccgtggggccctcggcgccgcgtccttcaccccgatggtgaagaaccccaggatggagacgttctactacgtgcagctcatgggcatcagcgtcggcggcgcgcgcgtcccgggcgtggccgtgtccgacctccggctggacccgtccacaggccgcggcggcgtcatcgtggactccggcacgtccgtcacccgnctggcccggccggcgtacgnccnctnngcgacggttccggcggcggn

SEQ ID NO: 395574 - DNA, 735 bp, Oryza sativa
  unsure (1)..(735): unsure at all n locations
aaaagatattcgcatagaaagaattgatgaatttggtcgagtgatgacaccgaaggaggcatttcgggatctttcacacaaattccatggccaaggccacctggtaaaatgaagcaggaacggcgccaaaaaaagtatcgggatgagttgaaacccaagcgaatgatatcttctgacacaccattaatgtctgcggagaagatgagagaggctcaagctctcagcaaaacaccataccttgttttaagtggcaatgcaaaatcaggtcaaacgagcgatgccagtggctttgctacagtggagaaagagcaccctgggagtctgacgcccatgcttggggccaaaaaggtcgagcactttctgggcatcaaacgaagcgcccagggtggaggattgcctccaccacctccaaagaagccaaagaactgaacctgcagtggacttggctgagtagaaatcaggtgttttttagtgcatttgctactgtaggtttggagcagatttcgagggacctacaccagcagataccaacgacccatgaagcagccccaaatgagttaacatgtaagaacctgtgaatttttattccaagttgattatgttaacattctgacatgggcgatgtaacttttgtaaccagctgtacttacaaggctgcaccacaaatgcagtcagaactacagaggtggatttaaaatgttgtcgtgtctccacaaatctaaaaaaanaannaaa

SEQ ID NO: 395575 - DNA, 690 bp, Oryza sativa
  unsure (1)..(690): unsure at all n locations
ctctctcgtggtctcccgtgcctcttagctgccgcgccgcgtcgccctagccgccgccgtcgccggtcgtcggcccagccgctccggcgccgccgtttgcgccgtcgccgccgcttgccgccgtcgcctttaggtgcgctagggtgaagggaaccttggccgcccgtcccccttcgccgccgaccaccggagctcgccgccgacgtccaacccgagctgccgccatcgtccttctcgtcgccggccgtcatccgtcgtcgttcgtcgcgttggagagtaccgttgggttcgcctcgtcatcctctacgccttgtcgtttccgtcgttgcaaaggttcgtgagtgcgtcggaagtgatcaagaagattaattgaagaccgattattgcaagttgaagaaaaagaatccaggaggagaagacgtttggcttacaccccagttgagctgcctgtgggagtggagccggagcttcgctagattttattttccgctgcagttttcttcttggtgaggactaagtgcctcttaagtaagtatttatcgttttagttaatttgatgaatctgtatattaaattgtcagtttgtgtacctcggctgattcctggacgaggattttatgcacaaataagttcggaaattaatagtgaatttccgggcgtgacnnnnnnnnnnnnnnnnnnnnnnnnnnn

SEQ ID NO: 395576 - DNA, 539 bp, Oryza sativa
  unsure (1)..(539): unsure at all n locations
tgccgtccgtcgcctccgtcgggtgcgcacgaaggagaggaaccccgtccaccccttcgcagccgctgaagaccatcggagcgccgtcgccgtcggggacccgagccgagccgcagtcgaacctcgtcgccggccatcgttngtcgtcgtccgtcgttgttctttgcaccgtttccgacgttccgnaggagagcgttttcgttgagaaaaggttcaggagtgtttgaagaagctcaagttgaagagaaaggatccagaaggagaagacgtttggcttataccccagttgagctgcctgtgggagtggagctgaagccatcgctagaccgttaattccgctgctgtttttcttttcttttgtaagtatgtaacgttattattatgatggatttgtatattaaattgtcagtttgtgtacctcggctgattcctggacgaggattttatgcacaaattagttcggaaattactagtgaatttccgggcgtgacattcttgtccaccacgcgtcagtttaacaatctgcatgttcgcccttc

SEQ ID NO: 395577 - DNA, 612 bp, Oryza sativa
  unsure (1)..(612): unsure at all n locations
aagagaccgaacatgatgggtgctccaagaacgaacttgcaagtggtggccatcctggngagggctaatnctattcgccaggctgttgctgatgacgatgatgaggatagctggagtgactagctgattcctcagagcatgcaatttggcgcctgatgtttcttcacattcacatttcacaaggtctntggtgatcatgccatcatggacttgcgtttcctgttcttgcataagtagagctagcaaactgtgaaatgaacctacagggtatcatctgataacgaagcttaatgtctcatatgaagttcatgccatgaagatgcaacatgtaaacggtatatcaattttttcccgcttttccggcacgtgatgtgtttacgccccgtttggancaggaatttcatagggatttcacgtcgaacaattcaaattccgttgaaatccagagaaattccctccttccaaacatggcctttgttgtctttgtcgatgggcctcctgtaacttgatgcacggtgaggattgtatatgcctgataggactagttagtgtgttttctttttgatgaaaaaatgaatcttgagggtatataataataaaaaaaaaaaaaaa

SEQ ID NO: 395578 - DNA, 389 bp, Oryza sativa
  unsure (1)..(389): unsure at all n locations
ctaggtatcctcaatggaagctgcttcctagatccagccccaatccacccttccttccaagtccccatatccacaaatcaacacaccatgtcttcttgttcttcctcctctccccagaaagccatagatgctagttatcaactatcaactccatggatcttgttcttcccagcttcaaagcccctccaacaccaaagttcagatctgtcctccttcccttcacctagctctatattagaagcttgtgagggctaagatggccatggaggacaatgaatcaggggcaagatgaactctaagatggctggccatggatgaagattgaagctgctattggtctatgaatcaaggggatgatgaactggatcagacgtatcatctnctgtatc

SEQ ID NO: 395579 - DNA, 365 bp, Oryza sativa
  unsure (1)..(365): unsure at all n locations
aggtcgacccacgngtccggttttatccttttttccccctcgtaaataaagggaactgatgctttagctgatttttctttcaccgtggaaactatcatgcctcttttcctaacatatactaacaacgctagcacatcctcacatgaccttttttctggaagcacctgattcagtgttatggatattctttattaaaggataaatgagtccttttttttgccgggttggccaaaagaagcgaccaaccaattgcattaagattaaaaggaggtgtctacaaagataaaaggagtctgcgaaattcattaatacattatggtgaaaaatacaattaataaaaaaaagggcggccgccaccgggtggg

SEQ ID NO: 395580 - DNA, 376 bp, Oryza sativa
cccacgcgtccggttttaacaatggtggagcagttggctacattttgctttccattagtagctggtttatggcagtttcttggctttttgctccatacatattcaatccatctggatttgaatggcagaaggtcgttgaggatttcagagactggacgaattggctgttttaccgaggtggtattggggttaagggagaagaaagttgggaagcctggtgggatgaagaactggcacatattcacaatgttggtgggaggatactggaaactgtactgagtttaagatttttcatcttcccagtatgggagttggttacccatttgggatgcaagccgaatcaaggtaaagcactatttgatatatttggatatca

SEQ ID NO: 395581 - DNA, 332 bp, Oryza sativa
  unsure (1)..(332): unsure at all n locations
gcttgctcctcctccaacgtctgcatctaccaggccagctacggcgacagtccttctccgtcggctacctcagcaaggacaccgtctcgttcggctcgacgtcgctgccaaacttctactacggctgtggccaggacaacgaggggttgttcggccgatccgccgggctcatcggcctcgcccgcaacaagctctcgctcctgtaccagctcgcgccaagccttggctactccttcacctactgcctcccgtcgtcgtcgtcatcggggtacctgtcgctcgggtcgtacaacccggggcaatactcgtacacgccgatggtgtncagctcg

SEQ ID NO: 395582 - DNA, 349 bp, Oryza sativa
  unsure (1)..(349): unsure at all n locations
tctgatcatctactgtcggctcgatcagtagctgggaccataattaatttaagttaagttcaatcaagaagtcgagaggcgatgtcctggtggaagaaatccagcggcaaaagcagcagcagcagcagccagtactacgctggctctgacagctacgtcgttcgccggaggaggaggagacgaccggtacggacgagccggcagcggcaacggccgttcgccgtggacgacgtccgaggagtacccgaggtacaccagcgacgacgacaaccgcagcggcacggcagcaacgacgacgacgaccacggcgaccggaacaggcgcaggggaaagangagcaacaagaaga

SEQ ID NO: 395583 - DNA, 401 bp, Oryza sativa
  unsure (1)..(401): unsure at all n locations
caaatcccgccgcctcccagatcgccgccggatcgatggccgccgcctcgccgctcgccgccgcggcggcntncgccctcctcctcctcctcctcctcgccgccccggggggcggnagatccggtgagacggtgatccggagcgacccgcggagcatcatcccgctcgacgagttcgggttctcccactcgggcgtcctcgagctcaacgtctccggcatcgccttcgacccgccggcctcctccgagctcgacntctcccagctgggattcttcctctccacgctcgacgcctgggtgcacgtcctccgccagctgcaggatctcgangtcacctgcgcgctccaggccgacctcgtcaagctcgcctactccttcgaccgcctcaggcggccatccaac

SEQ ID NO: 395584 - DNA, 398 bp, Oryza sativa
acattgggcacctcgagcgcgacttacccaaacccgccaccattaatctccagtgaaaaagagggtaacttcatatcattaaaagctcggatatcgcaggaattggcgatcttttagttgaagtccttcagatttgcttgggacacctgtaatggcagcttaccaaactggccccgtgtctgagccaccgatgctgaacactgagattatcactcaaaaagtcaccgggtttaatactgagaccacgaccaaagaaaagcccataggctaccttgatgtttttgtacaccaagcacgcgatattcacaacatatgcatctaccacaagcaggatgtttatgcaaagctgtgcctcacgagtgaccccgatgtgtcatgctcaaccaaggtgatcaacg

SEQ ID NO: 395585 - DNA, 374 bp, Oryza sativa
ggtacctggtgcatactatctttccgtgtattacagtttttggatttctggctttcctttatggctgttgttggtacgttcatatatatggctacaattgatgaaacttcaaagcgagccatgcataccgctgtctttattctcacagctcttttagctgcaacaggtgctaccagatctgcaaatattggtattgtcattgctattggttctcttggcctgcttattggatggctattggagttctctacagcaagaagattcgtatgctggccgtggcgaattaatcttaatgtacctcaaagctggccaaacctcaggagtttattttcgaacagtctggatttgctgaacaaacgattccgttggttcta

SEQ ID NO: 395586 - DNA, 383 bp, Oryza sativa
  unsure (1)..(383): unsure at all n locations
ggcccatgaggactacggggcctaagaagcagcgagcccaacaagcaagcaaccgcctttttagcctttattccttgcctccccacgacgcgtttcttcgtgagctgtagtaactagcaacagcaaagccaaagcccctctcgtcaacgacctcgtcgcgcccgaggcacccaattcgcgccggccatggcggtggcgacgctgtcgtcgaggtcgaggcgcgcgtncnggaaggcggcgtccgtgctcctcgtcctnctcgtcatcgnnccgtcggtggcagccgggggcgacaccaacggcgtgtacgagccgtgcgcggacggggcggtncagcgcggggacgggttcaacttcggcgtggccttcgcggcgcgcggcga

SEQ ID NO: 395587 - DNA, 412 bp, Oryza sativa
agagttcccacttcccccaccaaactccgctcggatcacccaccggcggcgaggctgcggagatggccggcggcgaggacgaagggtggaggaggagcggcatcgaggtgagcgcactgcagttcgactacaacgggcagccgccgctcttcgcgcggttcaatctccgcatcgcccccggctcacgatgcctcctcatcggcgcgaacggatcaggcaagaccactctcttgaagattcttgcggggaaacatatggttggaggaagagatgttgtccgtgttcttaatggttctgcttttcatgacacacagcttgtgttcaacgggtgacctttcctacttaaggtggttcatggagtcgggctatccggttcaacctggtgacgttcctcttgaaaggggacttttct

SEQ ID NO: 395588 - DNA, 706 bp, Oryza sativa
  unsure (1)..(706): unsure at all n locations
gctagctagtacagtacatatccatctatccgtctgttagagtaaaaattccccatttaattaggatcgatcgattggattgaagctggcgatggcgagcggcgtgtgccctcctgcggagctggggttcggggcggagtactactcggtggtgaacggggtgtgcagccgcgccggcagctacttcggcggaaggccggtgctcacgcaggccgtcgggtacgccgtcgtgctcggcttcggcgccttcttcgcgctcttcacctccttcctggtgtggcttgagaagcgttacgtcgggtcgcagcacacgtcggagtggttcaacacggcggggcgcacgtgaagacgggtctgatcgccagcgtgatcgtgtcgcagtggacctgggccgccaccatcctgcagagctcgaacgtggcatggcagtacggggtgagcgggccattctggtacgccagcggcgccaccatccaggtgctcctcttcggcgtgatggccatcgagatcaagcgcaaggcccccaacgcccacaccgtctgcgagatcgtccgcgcccgatggggcacccccgcccacntcgtcttcctcaccttctgcctcctcaccaacgtcatcgtcaccgccatgctcctccttggcggctccgccgttcgttcaacggccctcaccggagtcaacgtcttacgccgccagcttccttcat

SEQ ID NO: 395589 - DNA, 860 bp, Oryza sativa
  unsure (1)..(860): unsure at all n locations
gtaaaatttctcgagtggggaggggtagatccaattcagacccaattcggtggcttcagtagtgaagccaatataaggggggcagtctcccctctgaacacacacaacttgtaggcagcttctctctgcatacaagaggaggtctctccttcttcagcgactccctcaagatcttgcccaaacttgctgagatctgtaagagcagtaggcgaagatggtgaagatctgctgcatcggagctgggtacgtgggcgggccgaccatggcggtgatcgccctcaagtgcccggcgatcgaggtggtggtcgtcgacatctccaagccgcgcatcgacgcctggaacagcgagcagctgccgatctacgagccggggctcgacgaggtggtcaaggagtgcaggggcaggaacctcttctttcagcacggacgtcgagaagcacgtcgcggaggcggacatcatcttcgtgtccgtgaacacgccgaccaagacgcgcggcctcggcgccggcaaggcggccgacctcacctactgggagagcgcggcgaggatgatcgccgacgtgtccaagtccgacaagatcgtcgtcgagaagtccaccgtgccggtcaagacggccgaggcgatcgagaagatcctgacgcacaacagcaagggcatcaactaccagatcctctccaacccggagttcctcgccgagggcaccgctatttgacgacctgttcaagcccgaccgcgtcctcatcggcggccgcaccgcggtggagttcannttttgtttcctttagtgaggttaattncgcgtttggtaatcatggtcatagttgtttcctgtgtgaattgttatccgttaaaaattcaa

SEQ ID NO: 395590 - DNA, 415 bp, Oryza sativa
  unsure (1)..(415): unsure at all n locations
caaccggggtacgacatcatcgcgcagttcatgatcgggtacgcgctgccggggaagccgatcgcnaacctgctgttcaagatctacgggaggatcagcacggtgcacgcgctgtcgttcctcgcggacctcaagctggggcactacatgaagatcccgccgcggtgcatgtacacggcgcantggtgggcacggtggtcgccggcgtggtgaacctggcggtggcgtggtggatgctgggcagcatcgacaacatctgcaacgtggaggcgctgcacccggacagcccgtggacgtnccccaagtaccgggtcacgttcgacgcgtcggtgatctngggggctcatcggccccgcccggctgttcggccgcanggctgtaccgaaactggtgtggctgttctngcgggcgttct

SEQ ID NO: 395591 - DNA, 399 bp, Oryza sativa
  unsure (1)..(399): unsure at all n locations
cccacgcgtccgtcgaggtagccatggcgatgcaggccgccttcgccgcctcgatgttcccgcagctgccgccatgagctggtggtgggcgggcgccatagggangtgaagaagcggcaggaagagaacgcggcggccaccgagccgtccttccagagcgtcgccctcgtcgtcggctccacgggcatcgtcggcacctccctcctcgacatcctcccgctccaggacaccccgggcggcggcgctggcgcaccgggtgaggctggggcgggtggagacggagtggctgcacgtgctgagcgaagggtgggcgagcccgttgcgagggttcatgcgcgaaggccantttcttcaagaatttaattnaaacgcatccgggggaganggggccattgtcaa

SEQ ID NO: 395592 - DNA, 405 bp, Oryza sativa
gaccaacgagaggctgacgcggcagatcgagcagctgcacgccgaccactgcgcccacgtcgaggagctcgtctacctcaagtgggtcaacgcctgcctccgctacgagctgcgcacccacgacggcgacgacggcgccggccggatttcggcgagggacctgagcaagagcatgagcttccggtccagcgagaaggccaaggagctcatgctcaagtacggcacccatggcctcgacggcttcgacccctccatcttctccccgctccacgagtccgtctacggtgacggcgacggcgacgactttcgagcagcgaagaccgaacgggcgacgtcgtcgtcgacgaaggcgccgcggagcccgagcacggcggtggcgatggccgccgaagcttcgggggccga

SEQ ID NO: 395593 - DNA, 418 bp, Oryza sativa
aattcggcacgaggtcgggttcaggcagttcgccggatacgtcgacgtcgacgagaaggccgggaggagcctcttctactacttcgccgaggcggcggagggcgccgcgccaagccgctcaccctctggctcaacggaggtcctggatgttcttcggttggaggtggcgcgttcacagagctcggcccattttatccgagaggagatggcagaggcctgggattgaacaagaagtcttggaacaaagtatccaatcttctgtttgttgaatcaccggctggagttggatggtcctactccaacacttcatcagattacaatactggcgatgcacagaccggctaatgacatgtacaaatttctgttggggatggtacaagaaggttccctgaaatacaggtcaagagggctacttctg

SEQ ID NO: 395594 - DNA, 352 bp, Oryza sativa
atagcttacttattccgtgtgtataaaactttttcaggccaattgacatcaaacattgcaaagtgtgaaactttctctaatcgacagaaattgttctagatcaattaagattctaattgtatactagtttgaccccacattattcaaccaacataacgacctcttctttgtgggagagcttataactgataattgtatgatctagtagccagcaacaacatgaaaactattgactgtaataccaacttaaaaggcgccagaagatattgagaacaacatgccatcatcatcacggcgctacttcttcgcagagatgacattctcgacataccacttgtatgtctcgacgagc

SEQ ID NO: 395595 - DNA, 596 bp, Oryza sativa
  unsure (1)..(596): unsure at all n locations
cnaggaagaggaggaggtggggtggccatggcggcggcggagaagacgaagcccgttctttacagcgagtggatgagctcgtgctcctacagggtccggatcgccctcaacctcaaaggtattgattatgagtacagggcagtgacacggggtgatccagattatgggaagatcaatccaattaagtatgtgccagcattagtagatggggatttcactatttctgattctctagcaatcatattgtatcttgaagacaaatatccccagcatcctcttttacctcaagatctaaaaaagaaagctcttaacatgcagattgcaaatatcgtgtgttcaagcatccaacctcttcaatgctatgctgtaattggtttagctgatggcaaaatgagcgccaacgagagccttcagatagttcagcattacactgacaagggatttagagcaattgaaaacttctggaggatgtcgcagtaaatatgctactggaggtgaagcccaattggcggatgtgtttctagcgccccagattcacgaggggaataacacgcgttccaaattgatatgccaaaatccatttgcggttttcaggc

SEQ ID NO: 395596 - DNA, 532 bp, Oryza sativa
  unsure (1)..(532): unsure at all n locations
atcttgtagatcgagcgccaagatggctgcgcatacaagaaatatttcctcattgggattggagggtcagacaatttaccagagaagaggtgcaaaattttcttcaaaacacagtgatatccgtatacgaagcaatatatcttgtccagtttctccatgtggaagtcctttgctaaaatcaaggtccccacaacattccaatggcagaatgtcaccttctcctatttcaagccccagaactacttcaggcacctccacgcctctgtctggtggtaatggtgctattccttttaaccatctgaagcaatcaacctacagcaacgagggatttgcaatcccatcaagaagcccggatgatctctttgccagccggcctacagatcctgatcnttgggcaatttattcgagtgcatcaaatctctcaggggcntcaagagagaggttgtatctgtnagntgacacatctcnagncctcantgtttgganaagagaganttgagaatgtgttttgagattgcgcgagaaanctctg

SEQ ID NO: 395597 - DNA, 531 bp, Oryza sativa
  unsure (1)..(531): unsure at all n locations
gatgggcctccgcgctctacccaagattcagccccagccggcggccacggttatcccgccaaggttgcttagccatggcggccttctccgccggaaacacctgacgccgccgccgccgccgccgctcaccccgtatcgtttcttctcttccagtgtttccgagtcacgtggcacgagtccctcgcctaagcaagaatcttcaagagcaccaaggcaaactgaggagggagaggagctgtttagaatgcaagatgaagagaagcttaagctactctcgttgataaagaatcttaaagaatcggaagctatcaagcgagaggacccattgtttgatataactatgaagctcgtgatttcctcgatggccatgttacttgtctggactgtctcagacatactattgatggagtaagatttttttttccgatgcactgatgtaataagatccgtatgggcactaagtgtaataattaggtgttctatatattccgttntttgnnnnnnnnnnnnnnnnnnnnnnnnnnnnnnnnn

SEQ ID NO: 395598 - DNA, 344 bp, Oryza sativa
  unsure (1)..(344): unsure at all n locations
ggaggaggcctcgagctcgaagcttctcggaaatctaaccctaaccctaaccctaaaggctagccatggccaagggggccgcgtcggcgtcgggaggcggcggcgccggccggaggacagcaggcagctctccggcggcggggacacgccgcggcggcgggccccacgcggtccaggtccgacccgctcctcatcgtgtgccgctgctttaatgtcgtcaccgccgccaccgccgcgctctgntncgccgtcaacgtcctctccgccgtgcagtccttccncaccggcctcgacatattcgggggcatattccggtgctacgcggtggtcatctcgctgttcgt

SEQ ID NO: 395599 - DNA, 398 bp, Oryza sativa
agaacatgctggccaacgacgacgatgccgcccggttcttcaaccacctcggcgactgtggcgcgtcaaccacgacagccacgccttcgtcgggctctacaaggacgtggaccgctactgcgggacatggtggcggaggaagacggcggcgctccggcgcgactacttcgccagcccgtggtcggccatctccttcgtcgccgccgcagtcgccgtcgtgctcgcagttatgcagacctacttcaccatgtttccattgaaaaaagggtgaatttggtaattaagcacaatcacacagttgagagttgtaaaatctctactcccattgtttcagggtataagacattttgactatggttaaagtcaaactgctttaattttgaaaaaaaaaaaaaaaa

SEQ ID NO: 395600 - DNA, 476 bp, Oryza sativa
tatatatgcatgcacaaattagctgatgatctctatcgttgtaggtgctagctacaagagctcataatcggtacgtacaaagcgcatcgcagctaggcaggcatcaaattaatcgatctgaatccatggcgcggtggtgcatgagcatgatgcacatcgttcttcttctacttgtagtggtgctcatgctacttaatgtatcatgtgaggccgctagaggcatgcccgcgccgcaggggccacaaaccatggcgagggccatggagggccggcggcggcgggggtctcaatgaccacaagacctttcttgccgccagtgcccaggcatgggcgccggcggtgtttgaggcttcgctggtatgggaggtcctctcggcggggtcatcggagggcatcggtggtgttcttcggagggaagcccttctgggtcttgggaggaggcctcggcggtggatcctccggtggcctttgcggcg

SEQ ID NO: 395601 - DNA, 475 bp, Oryza sativa
  unsure (1)..(475): unsure at all n locations
gnccacgcntccccccacgcgtccgcggacgggggtcgcctagctctcgcagcagcaaccagcaaggtaattaaccaacaccgagcatcaagcgcagtagccaagtcagctgagctcagctagctagcatcctctggatcgatcgagatggcccgtgcacagttggtgttggtcgccgtggtggcagctctgctcctcgccgccccgcacgccgccgtggccatcacctgcggccaggtgaactcagccgttggcccctgcctcacctacgcccgcggggcggcgccggcccttccgcggcctgctgcaacggcgtgaggagcctcaagtccgctgccagaaccaccgctgaccggcgcaccgcctgcaacttgcctcaagaacgccgcccgtggaatcaaggggttaacgccggaaacgcgtcagcattcccttcaagtgcggcgtaaggtcccctacaacatnagggtttcat

SEQ ID NO: 395602 - DNA, 419 bp, Oryza sativa
ggtgagctcatcaggctcagttcatccctctcgtgagatacagatagcctcgcaaatcagggatcagcgtgtgatgggcaggcagccgtgctgcgagaaggttggcctgaagaaggggccatggacggccgacgaggaccagaagctggtcaccttcctcctctccaatggccactgctgctggaggctcgtccccaagctcgcagcgctgctcaggtgtgggaagagctgccggctgaggtggacgaactacctgcggcccgacctcaagaggggcctcctttccgaagaggaggagaagctggtcattgacctccacgagcagctcggcaacagatggtccaagattgcggcacggcttccccgggaagacggacaacgagatcaagaaccactggaacaccccacatcaagaagaa

SEQ ID NO: 395603 - DNA, 464 bp, Oryza sativa
aaaaaaaaaggaaggaaaaaaaaaaagagaaggcgacgcgaaaagcagaaaggaaaaaaaaaaaactccgttctctcctggaagaacaggttggggaaggagaggagaggagaggagaggagaggagaatccgcgtaggctgccccccgcagatccgatcgatcgggcctctccggcgaacccctcgtcctcctcgcggtgcagttggtgttccttacaatggcacaagagagctggaaaaaggaggcagaggagactggagtccacacacctgaggcccctatattgtgcgttaacaactgtggcttctttggcagccggatgacagaaaacatgtgctcaaagtgttatagggacaccgttaaggccaagacagtggccactgttgttggagaagaaacctcttgcttcattgtctttcacacctttggtgacagaagtcacagattggagggcttggttaa

SEQ ID NO: 395604 - DNA, 368 bp, Oryza sativa
  unsure (1)..(368): unsure at all n locations
agctcgctcgntcgctctctcgctgggtgctgatccaaagccctcgatcccctcgactcaggctctagcttagccatggatgaagaggcgcgcgccgccggaatgctccccagcgccgccccgcgcgccggctgcttcctgtggcgctgccgccgagctctgcctctgctcccctacaggtgtggagggtatcgagcaggtgcctggatgtccgtgttttgaggacgccggcgctgtcgtggtgagtggagaagcgccggaaggaccgggggttttgtgctctgangatggcgctgagctcaaattggcttaacagggtgccctggatgtganaataggttctccggcaagttggaatccatgaacaa

SEQ ID NO: 395605 - DNA, 502 bp, Oryza sativa
  unsure (1)..(502): unsure at all n locations
caacaatgtaccactgtcaagcataaaaggtactggccccgatgggcgaattttgaaggcagatatttgagggattacttggcttcttgtggccaagggtgccaagaaggaaacagcagcagcttcctgggactaggctatgtgggatcttcctaaatacgcaaataaggaaggttactgcaaaccgcctgctgcactccaagcaaaccattcctcactactatctgacagttgatactcgtgttgacaaacttattaagttgcgaagtgagttgaatcctctgcaggatacctctggtggcaagaagatatccataaatgatcttgttatcaaggccgcagcattggctcttcgtaatgttcctgagtgtaatagctcttggatgaatgattttattcgccaataccacaatgtgaacatcaatgttgctgtacaactgaggatggcttgtttgtnccgtaataagggatgctgncagaagggcnagccactatcgctgat

SEQ ID NO: 395606 - DNA, 224 bp, Oryza sativa
  unsure (1)..(224): unsure at all n locations
actagttctagatcgcgagcggccgcccntttttntttttttttagagaaaattaaatattttttnatggatgctagccgcgcaattgcgggggccaccctactagttcatataataagcacatccatttaccacaaattaatacactccctttacacatcaacaacaaatttagttccccacatgtttaatttctggggaaacatattgaacacacacacacc

SEQ ID NO: 395607 - DNA, 503 bp, Oryza sativa
caactactaccaccacctcacctgccttcgtctacctctagctctctgtgagttgccattaggattttttttcttctgtctcgccatgaagcctcctcactttaccggggaaggttcaggttcttgggctcacgaggtcaaacaggccctccgtgacaagctccggcgggcctatggcaccgcggcgcggcgaggccggccgcctccgccgtcagccgcggcccgagccacggcggcgacgactgccggggctcggccgcggaggaccccataaggagagtcatgttcttggctccctggggtcacacataaaaaagaaaaggtagatctgaactaaagaaacatgcatgggcatgctgcatggccatgtcttgattggtcagatcttcaagaaactgaaccgaaaacggggggaaattgagtaagtcttgtaaaattattgaatgatgggagtattgaggccatgaacaatgaactcatgcatgaaggacttactagggtag

SEQ ID NO: 395608 - DNA, 671 bp, Oryza sativa
  unsure (1)..(671): unsure at all n locations
atcgagaaaaaccctcgctgctctcctccccctccccctccccctccgccgccacctcagatctccatctccccgccaccaaatccccccgaaaccgcgagctcctcgccatggcgtccatgatgcaaccgcagatcatcctgctgaaggaggggacggacacgtcgcaggggcgcgcgcaggtggtgagcaacatcaacgcgtgcacggtggtggcggacacggtgcgcaccacgctggggccacgcggcatggacaagctcatccacgacgacaagggcggcaccaccatctccaacgacggcgccaccatcatgcgcctcctcgacatcatccaccccgccgccaagatcctcgtcgacatcgccaagtcccaggactccgaggttggtgatggaacttaccacagtggtgcttcttgctggctgagttcctgaaagaagcaaaaccttacattgaggacggagtacatccgcataggctaattcgcagttatagggctgctggccatttggcaatttgaaaaggtcaaagacttggccacttagcattgaagggaaaagcctttgaggaaaagaaggaattgcctagccaagtgtgctgcaacaacactctcatcaaaagttgaaacggtggcgagaaagaattttttgcntctatggtgtgggatg

SEQ ID NO: 395609 - DNA, 349 bp, Oryza sativa
aagagttaaagagtggaatcgcaaaatttggttcccatcttgcagaatctgaagtgcaaatgcttattgaagctgtggatacaaatggtaggggagcactagcattatggtgaatttttggccgtttcacttcacttacaaaggatggcaaatggcgagcacctccggcgggccttcctattttccgacaaggatggcaatggctatattgagcccgaggagcttcaggaggctctggtggaggatggggcaactgatatcatggaagtggtgaaggacatattgcaagaggttgacactgacaaggatggcaaaattagctatgaaggaattcgtagcaatgatgaag

SEQ ID NO: 395610 - DNA, 468 bp, Oryza sativa
  unsure (1)..(468): unsure at all n locations
ccaatccaaaccctagctcgcctcgcctctccgcctccgctccccagatctntccntctcgcacgcgtctcatggccgcgagagctcttcccgtctgcgccatctagccccacgcacagcacagcacagatcgcccatggaggctcccccgccgccgccgcccgactcatgggagaccgccgacctcgacgagcccatgagccgcctccacntcccctccgcgcgccgggtctcctcctctcccgacctcgccgacgccgatgccgacgacccgcagcacccgtcgtccggtcgccccgattcggttgaccagctcgatcagttcctccgggaggcgctcgagaagccgagggagcggctctctgtgctaaggatggagcaagacattttgaagttcattcatgacccttacgcagacagagtttgacttccatggtcttcctacttcttacctgcgtcttgctgnac

SEQ ID NO: 395611 - DNA, 669 bp, Oryza sativa
  unsure (1)..(669): unsure at all n locations
tccaaaccctagctcgcctcgcctctccgcctccgctccccagatctctccctctcgcacgcgtctcatggccgcgagagctcttcccgtctgcgccatctagccccacgcacagcttgaggcaagagagagagaaagccatggcgagcgacgtgcccatgagccccgagctggagcaggtggacggcgagatccaggacatcttccgcgcgctccagaatgggttccagaagatggacaagatcaaggactccaacaggcagtccaagcagctggaagatctcacctgggaagatgagggagtgcaagcgctttttctcggaatttgatcgtattctcaaagaggatgagaaaaagaactcggctgatgtcaacaagcagctaaatgataagaagcagcttgatgatcaaagaattgaattcctatgtcacattgaggaaaacgtaccaaagcagcctgggtaataagaggattgaactatttgatactggtaatgatcaggtggccgaggacaacactgttcaaatggcatcagaaatgtcaaatcaacaactcatggatgccggaaggaaacagatggaccaaacagatcaagttatttgagcgttcggaaaaaggttgttgcacaaacccgttgnaaggttggntctcaaacctgctgcagctct

SEQ ID NO: 395612 - DNA, 301 bp, Oryza sativa
  unsure (1)..(301): unsure at all n locations
gacgaccaaccacctcctgcgactgctcggttctcgcgacgcggcggcggcggcgagatacggagatccggcagcttgaggcaagagagagagaaagccatggcgagcgacgtgcccatgagccccgagctggagcaggtggacggcgagatccaggacatcttccgcgcgctccagaatgggttccagaagatggacaagatcaaggactccaacaggcagtccaagcagctggaagatctcaccgggaagatgagggagtgcaagcgcttaatcaaagaatttgatcgnattctcaaag

SEQ ID NO: 395613 - DNA, 534 bp, Oryza sativa
  unsure (1)..(534): unsure at all n locations
ggatgatcccatttgtcactatcttccactgggacacccccttggctctggaaagcaaatacggaggattcctcagtgaagacatagtgaaagaatacgtggacttcgcggaggtgtgctttcgcgagttcggcgaccgtgtcaagtactggaccacatttaatgagccattcacatatagcgcctacggctacggcaagggcgtgtttgcgccgggacgatgctcttcatatgtttccaagtcatgcggcgtcggtgactccagtcgcgagccctacctcgtggcacaccacatccacctctcccacgctgccgctgtccagctttaccgcaccaagtaccagccaacacagaagggacagatcggcatggtggtggtcacccactggttcgtgccgtacgacaactccgacgcttgaccgtggcgctgtgcanggagcctaagacttcatctaatgggtggttcatggancctatcgtgcatggtgactaaccaagcaccatnaaaagttgggtccggaatcgggtgccaaa

SEQ ID NO: 395614 - DNA, 239 bp, Oryza sativa
ccatctttccatctgtggctctgcagctttccaaaaggaaccatgactatatacgatatgctaatggtaaggggaccggggttatagcagaatggagggtggagcagctagattctttccagtctggttagaaatactttgtaccttgcattaaattacatttttcttgctgaactgaaattcagttactttcttttagtgaacagctatgcatacatttctacttgggtaattattgg

SEQ ID NO: 395615 - DNA, 481 bp, Oryza sativa
  unsure (1)..(481): unsure at all n locations
ggatttgcttatgatgccaagtaactgtggcaatctaagacttgtacagtggccattgtttcttctgactagcaagattatgttggcgaatgactatgcttcagattgtaaagactcacagtatgagttatgggacagaatatcaagagatgaatacatggcctacgccgtcaaggaatgctatttcagtgcagagagaattcttcactctttagttgatggtgaagggcagcgttgggttgaaaggctttttcgggatctgaatgaaagtatagcacaaggttcacttttagtgaccataaatctcaagaagctgcaattagtccantcgaggcttactggtctgacaggacttctgatacgcgctgaaactnctgatcgtgcagctggtgttacaaaagntcctncgtgagctttatgngntttgtacccatcagtttctggnaccgaanccgaagggnccncntggtacattgcaact

SEQ ID NO: 395616 - DNA, 518 bp, Oryza sativa
  unsure (1)..(518): unsure at all n locations
cgcanttctctccctctctcttacttatagcagcagcagatccgcctcccgaaacccagctctttgtgatcctcaagagccgcctccaacccccaatccacgcgcgacccaagaatccgagaaatttttctgtccagaataagagggtttggtttgattttgggagctccagttgttttcttctcctccttcttcttcttcttctttcttgcaatttgaggaggtttgctctggtttggtttggttctttgttgttgctgccgctgccgcggcgaatggtggcgacgcgaggaagggaatgggttcgttctcctgcgccgcgggcgatctgtcgtgtcgagatagtggcgcgccctgacctgagagatgtttgttcttgttggatttttgtgtgtttgtttgactgaaaggtgctcgtccttttcggaaagtgagggggtttgtcctattctgggtcctgataataataagataagttggtcccttgngtaatcgatccctgccngccaaacctgggt

SEQ ID NO: 395617 - DNA, 371 bp, Oryza sativa
ggcggacgtgccaaaaaattgcagattcatactctctcctatgctttctcctcttctccaagagttctttgctgggtgctggctgttcttggatattcatacagattacaggcctcaagtctttctgctggtgaattaactgatcttcaggtttatacttttataccaagagtacttttacggtgatctctacatgatattctgaagatatagctgaagagtcctagaagaaaaaccctgaattacagtaatgacttgctttcctgcgttctggagaaacaaaaaatccaggagtcaaattgtgcagcatgacaaagatacaccgatcatcagaaatgtgaagatctactcctccaaggagctcagaaaag

SEQ ID NO: 395618 - DNA, 480 bp, Oryza sativa
  unsure (1)..(480): unsure at all n locations
gccnacagaagttcacagggctggaaatgtatctcttatgcctgatgtatctgttgagcttctgtcgcatttgatggatgcgggcaaaaagccttcagttgctgccattcaaggccttgctcttggtggcggtttggagttgaccatgggttgccatgctcggatatctacccctgaagctcaacttggactaccagagttgactctgggcataattcctggatttggaggaacccagcgtctgccaaggcttgtaggtctgcccaaagcaatagaaatgatgctgcaatcaaagttcatcacagcaaaggaagggaaagaaggtggtcttgttgatgccctgtgctcccctgatgagttgataaagatgtcacgcctttggggctctgggagatagctaattaccgtaaaacccttggggtaagatctcttgcccagaaccaggttaggncttgggtcactgtcttaagntcggtcctg

SEQ ID NO: 395619 - DNA, 679 bp, Oryza sativa
  unsure (1)..(679): unsure at all n locations
gtcttcttcttcctttccttcgatctatatactagacctccgaaccaaaccgagggcaagagcatccgattcgccgccgccttcgtcttcctcgcagagatggcggacgtggaggagtaccgttgcttcattgggaatctgtcatggtccacaactgatgaaagcctcaaggatgcctttggcaaatttggcaacctcactgaagcaaaggtggtttttgacaagtattctggccgttctcgtggttttggctttgtgacctttgatgagaagaaagccatggaagatgctattgaaggaatgaatggattggatttggatgggcgggcgatcactgtcgataaagctcagccacaaggacctggtagagaccgtaatggagaccgtgattatgatcgtgaccgtggatctcgttatgaccgtgggccgtgactttgggtggtggtgggcgtgcaccacgtggctcaggtggtggtggggattgctacaagtgtggaaaacctggccactttgctagaagagtgcccatctggagatggtggtggtagaggtgatagatatggtggccgagatgataggtacggtggttgttgtagcggttgcngccgttatggatcttaccgtggtggttaccnttattcttgtcgtagtcgagatgggtggttgctacggttgaggt

SEQ ID NO: 395620 - DNA, 554 bp, Oryza sativa
acaggctcaactccaccagatcagccaaccagattgcacacctgacatgcgggcagtgcccggacgactctgatgcacccacctggagccctcaactgtgcagtgtgccaacctgcagatatgttaaccatgtccagggatgctcggcctccaaactgtccttgtagagaatcctaagacactggatgataagggcaagctggtgagcaatgtggttgttggtgtcacctcatggaaaagatgatgaacaggggctcatctagggtttaatcccaagggtctatggatgattgatacccttggtggatttgtatcattactacaaagctattgttaaatcaagtgtgttttgaagcttgatataaacaagagaaaaacaatagggcaaaaaatgaagaaaaaaatatatccgaaatgtgccatgtttgtgcttcttttgtgagaaaaaaaaatgtaaatatgctggctatggtgctagcctatgtgctttttagcaaaaaggaatggaaatgagatgagcagcattgtgtcctggaaaaaaaaaaaaaaaaaaa

SEQ ID NO: 395621 - DNA, 658 bp, Oryza sativa
ggagtgatcccaaggttcaattgcgtaatccaattccactgaagaaagagctggcagatggctccatgatgcctgtcaaatatcctcacacttcacaggcattttcaaattttcctgagaggcgatctgctgccaagcattcgccacaggagaaattttctgtaaacaatggctctggttttgttgggtctaatgttcagaggtgggctgcagcagagaaatttgagcctaattcaaatttgagtggtcgtattggtagtgctagcccaaagatgaaattatcgaacgtggatggcttaggaggtgcggataaaccttgcggtcagaagtcttctgccataatcgcaaaatcctacacatcaaggctctctgttggtgatccagaagggactattgttatacgatgcaaccaatataacagtgatgatctccgagtggactatccctttgcaaagttctttgttatcaagtcaattggtgaagatgatgtccataaatcaatcaagtatggtgtatggtcaagttcttctagtggaaacagcaaactggacattgcattcaaggatgctaacaggatagctaagaggaattctaccaagtgccctgtttttctgttcttctccgtgaatggtagtgggctcttctgtggcatggctga

SEQ ID NO: 395622 - DNA, 376 bp, Oryza sativa
gcacccatagattgatagagagagggacagagagagagagagatagagctcaggttgcaagcagatagaacgggtccaggtagcttcgcaatcaagaagaagaagaagagtgaaggaggaggaggagcaagagcaagccatggaggagccggcctcggctgatcccccgcggattttctggaagtcgaggaggagatcagcctcagccaatggccggagcttgcaacaagaacttaacaaagaggctgctgatgaacaactgaacaatcaggctcatgaagaggccatgaaaatagatgatgcaaatgcagtaagtactgacgacgatgttcatccagatccaaaagctaacttatcttaggaagaggaaggcgct

SEQ ID NO: 395623 - DNA, 369 bp, Oryza sativa
  unsure (1)..(369): unsure at all n locations
tgtcagtggaacaagcaccgaagaacgactatcgatagaagttgatgatgaggcgcanttggtgattgtaatggtggcctgcagctgcgccacagccatagccagaggaggaggaggaggaggtctgaagctcaacctctactcggagtcggagaggtgcccgagggcggaggaggtggtgagggaggaggtgcggaggctgtacgaggagcacggcaacacggcggtgtcgtggttgagggcactcttccacgactgcatggtctactcctgcgacgcctccctgctgctccacaccaccaccaccacaggcgtctccgagcagtcctcccaccgcagctttcggcatgcgcaacttcaagtacatca

SEQ ID NO: 395624 - DNA, 404 bp, Oryza sativa
cccacgcgtccgcaatttctcacaccagaagcaaagcaatcatgtcactccttgcattaccactcctagccttcttgtccatattcttgactcctacaacggcagtgagcagctcaacgctgcagctggcacgttctcactcggtgacgcccaatgccggggcgccgctcagcgcgtgggccgcgtccgtagccgcccagtcggcggcgggacacggcgcgcatcgtcagcatgctcacgtcgggggcggggcctctgacgaccagagccaagcccaaacccaagaacagggcaaacccacccgtgccgatcgcgccggggcgtcagatcctcagcatcccgaactacatcgcccgcgcggccttggcacgccggcgcagacgcttccttcgtggccatcgacc

SEQ ID NO: 395625 - DNA, 349 bp, Oryza sativa
  unsure (1)..(349): unsure at all n locations
tngangngcggcgctgttcccggacgcgtcgttcccgcgcaanaggtcacacgtgtcaccgtcaggatggccgggcacaacctcaccgacgacgacgacgcgacggtgatcgccgccggtgtggctcccggggagtacgtcatttctctgagccccaggctcatgcaccccgccagcgacaaggccgccgacgccgtggcgaacgcggtgcgccggccgtggcggcaatgtggctgtgggacggccgcgggcgccgctccggggcttnacggaggccatggtggactacctctcctccggcgccgacgcnttcgaggccttgccgntaacgacgacgacgacgacgacg

SEQ ID NO: 395626 - DNA, 467 bp, Oryza sativa
  unsure (1)..(467): unsure at all n locations
ccgngagcgcgnancngntgcngngaancggtgacgtccgatcggatcggagaggcaatggcgagcactaagatggcggtggtggcgatcctggcggcgctgctgctgatggcagctgtggagccggctttggccacgccgcccagcttgctgccggcaagaaagctgcagatgcctcgcctcatggatgtcgtctccgcagagtcaaagctggcttgcctcccagcaggcggtttttgcatgtttcgtcctatggattgctgcggtaactgcggttgtttatatcctgtcggggtttgctacggctcgcggtgtgaggaatgaactgtacgtacgtacgtgtccattttactagctaatcacgcatctgcagtgtcacaataaaatcgcgttctgcgttcggtccctagattgtttgctcatgatcaacaagctcgtcttttaaagatcgagctttagtttttgna

SEQ ID NO: 395627 - DNA, 356 bp, Oryza sativa
gcgagccaaaccacccacgcacatcaaggagtcatctcaccactcaacgacagcctcgcacaagagcagggaggaattttcggttgttcctcgtcccaaggatcaatagatggagaaggcagcgtgcaagagcatgtgatcgggatcccagtgagcaacagggctttcggcatcgaggagccggatttcccaagcgaaggagcagccgcctaccacgccgaggcgaaaagctctgcaaccgcgcgtacgagctccagatttggcaggacaggggacaggctcgctcaaggcatcaaaggacatgtgactctaggaccaaaactgtacgagaccatgaaaggcaagctgacgcttgg

SEQ ID NO: 395628 - DNA, 406 bp, Oryza sativa
  unsure (1)..(406): unsure at all n locations
cagaaaccacacacgcgtaaacgacgacacgcgcgccggcgccatgggcctccccggccggcgcaacccgttgctgagcgcgaggcgcccggcggcgtccctccggaggagcangacggctgcccgtctatntcgccgcagtcttcttcgtcgcctccgtcctcctcatgttccgcgacgagatcctttatctgacgacggcaaggtcgccgtcgtcgtcgttgccgacaacgggaggatcagccggcggcgccggggctcgcccggaaggaggagctagtatctgtcaacaagccagtcttgcttggtcacggcggcaaaccggagaagcaccacagcgtgacggagaggcaccggccgaagtcaagcgngaagaggacggncgaacaagaangcggccaaggag

SEQ ID NO: 395629 - DNA, 290 bp, Oryza sativa
  unsure (1)..(290): unsure at all n locations
gactagttctagatctntatcgntttantctctctgtccctggcttttttcgtctcttttcatgtcgccggcacatatccaccaccggctccaaccctccccaaccgtggcggagcccctccctctaccccggcgcccgtccctccgggctccggcatcctcctgcctatgccgctcggcccgtgcttcgtcgcaccgctgccagggctctcctcctcctgctcagaggcagttcggtgacgagcgggttggagcagcctcgcccctcctcgtctggatccagccgcaga

SEQ ID NO: 395630 - DNA, 270 bp, Oryza sativa
gcttagctagagcctagaggagtcatctccatttcttagcttctctcctcaccagaagccaccatgagaggccctagcaccaccaccatggccaccttcaagcaaagcttcctcaagaacctcctctcgagcctcaaaagctccagcaaaaacaaggccgccatgtcgaccctgagttcagaggaagcgtgccatcaagtcctccgccgacatcgccatggccaccgcccgcaccggcatcgccggagcagcacggtggccacatgcccc

SEQ ID NO: 395631 - DNA, 299 bp, Oryza sativa
agaaaatgaacagatgctagtttatgaattcatgccgaatggacctttacgtgatcatctttctggaaaagtccaaacccacctctcggtttttgggtttgagggctgcacatttgcatttggggtgcttcaaaagggaattctgtatctccacaaccgatgcagatcctcctatatttcaccgtgatgttaaggccagcaatatttttgttgggattctaaatatggtcggccaagggtgcgcacttcggtctttcgaggcttgctccagtaccagatgttgaaggggctttaccccc

SEQ ID NO: 395632 - DNA, 265 bp, Oryza sativa
  unsure (1)..(265): unsure at all n locations
ccacgagcngacgaaacaaggtggcgctggtgatgacgtcggagtcgatcgccccaaactggtacgccgggaacaagcgcanttcattgctgggcaactgcctcttccgctccggcggctgcgcctacttcctcaccaacgacccccgccaccgccgccacgccaagctccgcctccgccacctcgtccgcacccacaccggcgcctccgacgacgcctactcctgcgccctccagatggaggacgacgccggccgcccgggatt

SEQ ID NO: 395633 - DNA, 545 bp, Oryza sativa
  unsure (1)..(545): unsure at all n locations
accgaagtttncttctctcccgttcccgtagcctctctccatctctcgctctctttctcctcggtttaaagcttcctcgagtcgcctcctccgaatccccacagcccaggccaaaggcagcctgagccagggtggggagcttcctctcctcgtcttcctcctcatcctcctgatcccggaaggaccccaggattacaagtacttcatgtcaatgaccaatctaaggaggcgactccatcatggagatgtcgatggaaggaagaatgagcatgttgacatatccagcgtagattcccttaatgaacctttactagggaaatctagctctgatactggtggatcagaggtatatgatcccaagaaggcaagacttatggggatgatgatagaaagaaggaacagctacactggtcaatttcttttctcaaatttgattgcgcaatgggcacaatggttagcaaatattattgtnggctctggatcactatttggtagattgtttcccttttcgttggacaaccagaacagcagtccagtgtatctna

SEQ ID NO: 395634 - DNA, 733 bp, Oryza sativa
  unsure (1)..(733): unsure at all n locations
aagaaggcccgnntcgccgccgccgccgccgggaccacggcgacgacatggtctccagcttcagcaacatcgactcccagtttggcttgtcgaagcagtcgtcgctggagatggccggcatggatgacttcttgcagctccagccagactccgtcgcctgcagggcccgggcaaagcgcggctgcggaacgcacccgcggagcatcgctgagagggagaggagaacgaggattagcaagaggctgaagaagctgcaggatctcgtgccgaacatggacaagcaaacgaatacatcagacatgttggatattgctgtaacctacatcaaggagcttcagggccaagttgagaagctaaaacatgaccaagcaaactgcacttgctcaggcaagcacgattgctgaggctggagaaccagatctccgagctaatcgttgtaatgatgtgattggtgaacccaaagttttgcttcagaagattagggtgtaaaagcacttcacatgtcaagtggcctccatgcctcgccctcccctttatcggttgtgttatggacagcgtcaatgacttgaagagtaggcggtgacaaagtagattaattgttgtattttaattgatgtaaggcagtggcttgtatgtaaaatcatccatttcaacgccaatgggattgcttcttattatcattgctcttattaaaagtatcctcctctttggnnccaaaaaaaaaaaaaaaaaa

SEQ ID NO: 395635 - DNA, 571 bp, Oryza sativa
tgtgaatcccacgtttattatcaaccatccagagataatgagtccattggcaaagtggcataggtctcgacctggattgactgagaggtttgagctctttgttaacaagcatgaggtgtgcaatgcatatacagagttaaatgatcctgttgttcagaggcaacggtttgaggaacaactaaaggatcgtcaatctggtgatgatgaagctatggcattggatgaaacattctgcacagcccttgagtatggcctaccaccgactggtggttggggattgggaattgatcgccttacaatgttgctgactgattctcagaatatcaaggaagttcttctattcccggctatgaagcctcaagattagatatgtccacaaagcaggaacctgtcagaaggattaaagcagactgaatgctgactgagaggatttcaattggccctcgagatggaggattgggagctaacttataattttgttttaattgtgcatgtgaggtttccatgtcctattgtactttatttttggagaacattggtggtcagttaagcaaacagttaatctcgctgc

SEQ ID NO: 395636 - DNA, 433 bp, Oryza sativa
  unsure (1)..(433): unsure at all n locations
tgcatcgtctgcgttgcggctgctgcgatagatgctaggccaaccgcgtcatcttatctctctctctctctctctccccccatcatttcatctgatctagtatctcatctcctcctcccctccttttccttctcccccaaccaactcactcttcatcttcaacaccttgctgttcgtcctcgtctcgtcgtgctgattgttcaagaacaggagaaagaaaggaagaagcagtttgattgatctgtttctgttggggggagctcggtgatccatgcatggatggcaaagaactcctctcaccgtccgaactgtcatactatgcgcaccagcagcatcagcatcagcatcagcagcatcagcagcaacaccggatgctcgggggcggaggaggnggcggcgggcatagcgcgtcgncgctcgtcgggatgcacgg

SEQ ID NO: 395637 - DNA, 360 bp, Oryza sativa
agccaagcacgtccagatctgtgtataaggatagtagaaatggcgcgatgccgcaattggggaatgactatgggttcagcttgaagacgccgttttcgccccaagaactactgtcacctattaaagtgggtcatatcaaagggatcaatgaggataagctgtctgctgggccatctgagaaaattcccatggttggatttgaaaccagaggttgatagctccaaggatgatcgcgtggagacgattgaaatccttccactatctgctcgaagcttagatcaggttggttatggtgaagttgttgctgcagttgatacaaaagctccagagcaactgcctcatgagtttcaggaggagttt

SEQ ID NO: 395638 - DNA, 387 bp, Oryza sativa
taccatttccccatttccaagaactcagagctctcttccaccggtcatctcctccatctccggccaggctagccatggcggccggctcggcgtcgctgctgctgctaatggtggtgctctgcgcggcggcgagcggaacggcgctcgcgcaattcaccgacgggctgctggcgaacggcaacttcgagcgcgggccggcgccgtcgcagctgcgcgggacgggggtggtcggcgcgtcggcgatcccgtcgtggcggacgtcggggttcgtggagtacatcccgtcggggaggaagcagggggacatggtgctggtggtccccgaggggagccacgcggtgcggcttcgggaacgaggcgtcgatccggcaagcgggttcgacgacg

SEQ ID NO: 395639 - DNA, 398 bp, Oryza sativa
  unsure (1)..(398): unsure at all n locations
gagagaggaaagcgaagaaagcactagcagcgcgaagaaaggtcaaggcatcgtggagaagaaggagaggaagaggaagaggggataaaagttttgcttggattggttcttgttcttgaggcgttttttcgcgtgggatggagagggattttcttggcgcgatttggaggaaggaggaggcggccggcaagccggaggagcattcagtttctcgtggtgcaggtggtcgaggaggaggagggggcgcgtcggcggcgatgcagtggcagtttccggcgaccaaggtcggcgccgcgtcgtcggcgttcatgtccttcaggtcgtcggcggcggcggcgagggaggaggaccccaagnaggcggcggtgttcgaccgtttctccctctccgggtttcgc

SEQ ID NO: 395640 - DNA, 476 bp, Oryza sativa
  unsure (1)..(476): unsure at all n locations
gacctgagagcagccactgagataatatgttccaggacaccatcgcagctgcaaataatgaaacagacttatcatgcaaaatttggtacttatcttgagcacgacattggtcagcgcacatcaggcgaccatcagaagctcttgcttgcttatgtggggattccacgctatgaaggtcctgaggttgatcctactatagtgacacacgatgcaaaggacctctataaagctggtgagaaaaggctgggcactgatgagaagacctttcaatccgcattttcactgaacgcagctgggcacacatggcatctgttgcctctgcttaccatcatatgtatgatcggtcactggagaaggttgtgaagagcgaaacatctggaaactttgaacttgctctgctaactatcctcagatgcgctgagaatccagccaagtnttttncaaaggtcttncgggaagtccatgaaaggtattgg

SEQ ID NO: 395641 - DNA, 623 bp, Oryza sativa
  unsure (1)..(623): unsure at all n locations
nnnnnnnnnnnnnnnnnnnnnnnnnnnnnnnnnnnnnnnnnnnnnnnnnnnnnnnnnnnngtcaggaaggttaaggacgcatagatacttcaccaaacagctaccagcaacttacacttcataactagttaaaaacaagaaagaaaatctgtgacggtaacagcacccataaaaagctcaagcctaacaacgaccaattgctaaattcactcggtccttgctaaacacagtttgacacacttgtcgctttcattcacttgtcccggttgatcgcgagaatccggcatatgatcagtacttgacgggcatgcctagccgatccaacctgcccgatccagggtaggccttgttggtgaacttgctatgcaaggaggccgttgtcctctgtgccaccggcgcgcacgatccgggtccgaacgcgtgcgccgacgccttccggagggagctggacttctcgtactgcggcctctgcttcggcgcgctctgggagcgtgccttggcgcggaacgactcggtgttcgccatgtagttcgggtagtcggagtagccgccgaacaggctgagcgagtntcgcgcagcctgttcnccatgtagttcgggtagtcggagtagccgccgaacag

SEQ ID NO: 395642 - DNA, 301 bp, Oryza sativa
  unsure (1)..(301): unsure at all n locations
acttggtctcgtctcctcgtcttctcgccgccgccgcgagcggaatccccctctctccgtctaaacctcgccgccgcggcgaagaaaagcacctccctcttcgccgccgcccgccggcaatggcggggctgtcgctgcggtgcggcgactgcggcgtgctgctgcggaggtggaggaggcgcaggcgcacgccgagggccaccaaccacgccaacttctccgagtccaccgaggccgtcctnaacctcgtntgcgccgcctgcggaaagccctgccgntcccagaccgaggtggacctgca

SEQ ID NO: 395643 - DNA, 305 bp, Oryza sativa
cagccaacgcatcgtcttccttcttcgtcgtcgatagatcggctctcgagctcacaaccacatcgatcgtctccggcaagccgacgtacgtacgactagctagctagagaggaagcgagaaatggaagccgccgtggggtacgccgccgacagcctcatcaaggccaccgagctcaggctgggcctgcctgggacagccgacgacctgccctccacgcccaggggcaagaagcgcgccgccgcgccgaaggacaacaacgccaacgtcgccgtcgccgacgacgacgagcacgacgccgttgagg

SEQ ID NO: 395644 - DNA, 383 bp, Oryza sativa
  unsure (1)..(383): unsure at all n locations
gcaccgtcggcgccgggaacctcgcccccgtcacgccaaacaaacagatagagaagatggtggatgaggccgctaggctcgccaaggtgttctgcgagaggaactggccagtctttgcgtttcttgacacccactaccctgataagcccgagccgcctttcccgccacactgtataattggttctggcgaggaaaattttgtcccagctctggagtggctggaaaaggatccaaatgtaacgatcaggaggaaggattgtattgatggttatcttggtgcatttgagaaagatggctcaaatgttttttcagattgggttgcgaagtttcagatcaaaaccgtattggttttaggaatatgcacagacttttgnnnnttggnt

SEQ ID NO: 395645 - DNA, 247 bp, Oryza sativa
tgatgggcgaagacggtgttgacgaggaagaacacgatcacgggggtggcgtacagggacgacccgaccatcctggcgtgggagctgatgaacgagccgaggtgccagtccgacctgtccggccgcaccgtccagtcgtggatcaccgagatggcggcgcacgtcaagtccatcgaccgcaaccacatgctggaggtcggcctcgagggcttctacggcggctcctcgccgttccgaatcgccgcgt

SEQ ID NO: 395646 - DNA, 267 bp, Oryza sativa
  unsure (1)..(267): unsure at all n locations
ggacggnantactncatcctctccatctctctagtttctctctctaattaagcattgcaacaattcaaccaaaatgcagctaattcttcttctctcaaagccaagaactctccaacttttccccctcctcctctgcctccttctccttccatgtctctcccagcctctcccctctccttctccttcancttcggcgtcgncttcggggcgtcggcgncgncnncatcgttntcgctgtcgtcgttnaatgagcggctngaggcggcg

SEQ ID NO: 395647 - DNA, 474 bp, Oryza sativa
  unsure (1)..(474): unsure at all n locations
cagttcacttggttagcgagcgcgtgcggcggcaggcattgaaccctgtgatcgagcgatcgagctagctagacttccagcacgagcggcgatgtcgacgacggcggcgacgacgctggggcgcgagctcctggaggcggcgagggcgccggagttcgcggggtggctgcgcggcctgcgccgccgcatccaccagcacccggagctcgcgttccaggagcaccgcaccagcgcgctcgtgcgcggggaagctggacgcgctcggcgtcgcgtacgtttggcccgtcgcgcagaccggcgtcgttgccaccgtcgtcggcgccgccggccccggccccgtgttcgggctccgcgccgacatggacggcgctccccatccaggaaatggtaagaatgggaaattcaagagctttggaaanatgggaaaagatgccatgacgtgtangggcacgatgttcatngtcggcaaatgct

SEQ ID NO: 395648 - DNA, 289 bp, Oryza sativa
  unsure (1)..(289): unsure at all n locations
tcttcgacctcgtcttcttggacttcccgcccgtgcagcgcctcttcttctacgacaacgccgacctccgcgacgcccatnacttcctcctccgcgagcttcccctcttcagggagtccctggccgctgccctgcaccatttctaccccttggtcgggaagctgccgtgcgggatacgggagcgcatgtcgccgccggaggtcgcgtactcggatggctactccgtctgcctgaccgtcgncgtcagcagcgacgacttccagganctcgccggcgaccaaccgcgcga

SEQ ID NO: 395649 - DNA, 356 bp, Oryza sativa
  unsure (1)..(356): unsure at all n locations
ctgcagacgtggaacaacggcggcaacaacacgaggctgatcgtgcgcgccgggtaccggccatcgtctcgtcggcgtcgttctactacctcgactgcggccacggcgacttcgccggcaacgactccgcctacgacgacccgaggagcgactacggcaccagcggcgggtcgtggtgcggaccgtacaagacgtggcagcgggtgtacgactacgacgtcgcgggcgggctcaccgccgaggaggccaggctggtggtcggcggggaggtggcgatgtggacggagcaggtggacgcggcggtgcttcgacggcaggggtttngccgagggcgtcggcgattgcgaagcgctttt

SEQ ID NO: 395650 - DNA, 257 bp, Oryza sativa
  unsure (1)..(257): unsure at all n locations
ggcactacagaggtgttcgacagcggccatgggggaagtgggcggcggagataagggacccgaagaaggcggcgagggtgtggctggggacgttcgacacggcggaggacgccgccatcgcctacgacgaggcgccgctccggttcaaggggaccaaggccaagctcaacttccccgagcncttccagggccgcaccgacctcngcttcctcgtcacccgtggcatcccccccccnnnncacccacnncctacncct

SEQ ID NO: 395651 - DNA, 438 bp, Oryza sativa
  unsure (1)..(438): unsure at all n locations
ccaaaccaggcagcaaacctcgcgagaaagtaacgagaactcgagaggcggagttggaggcggcgagggagatggagaacggcggcggcggcggcggcgatggcggcaagagcgacgtcccggcggacgccaacgagcattgccctgggacgcatcggaggaggcggggaaggcggatgcctgcgccggatgccccaaccagcagatttgcgccaccgcccccaagggccctgatcctgacttggttggtattgttgaacggatggctacagtaaaacacaagatactggttctgtctgggaaaggaggtgtagggaagagtacattttcagcccagctctcatttgcccttgctgaaatggactgccaggttggccttcttgatatagatatatgtggccctagcatcccaaaaatgttaggccttgaaggtcanga

SEQ ID NO: 395652 - DNA, 318 bp, Oryza sativa
  unsure (1)..(318): unsure at all n locations
gtttgacgggatttctaaaaattataaaacagatgaaacccaacgagacaataaactctaaaaactataagatctaatttttaaaggttcgggcttctaaataataaaaaaaataaaccccaatgataatcatgtttgattttaaaaactcaatgacaataaagaagagcggcaggagncgagccatagaggagtatggtgactaagtcgctgatattttggtggaacttctaggaagtaaaaaaaatgaacctaaacaaggatccaatacgggattaatttaaaattcagggtttaaaaatataaaaagggnaaagg

SEQ ID NO: 395653 - DNA, 516 bp, Oryza sativa
cagaggcgcccatggcgtggatcgactgctccctcctcgcctggctcctcttccgcgtcgtcttcttctcctgccacgccaagcagttcagcatcttctaacactcgatctcagctaggctgaaaccacatatactccagcatatatacacagcaactgattaagtaagctgttgctcgccgacggtggccgagcatgtccggtgcacggcggtgcggtgaccggaggtcggagagaagttcggtggtgggcgacaacaggaatggatacgtcgagactgacccaactggtcgctatggccggttgtcggaggtgctggggaagggtgcgatgaagacggtgtaccgagggttcgacgagctgcggggggtggaggtggcgtggaaccaggccaccatctccgacgtcctccgcaccccggacgccctccaccgcatgtacgcggaggtgagccttcctcgccgacctccggcacgacggccatcatcgcctttcaaggctccttggtccacccct

SEQ ID NO: 395654 - DNA, 612 bp, Oryza sativa
  unsure (1)..(612): unsure at all n locations
taacaattcaacaaccattccatataaagaagcatcgacatcgagtactacacaaaacgatcaagtttggcccttccgagcgtgtgaaggaagtttctggaactcatggcacgctccaaaccctagcggatattctgacgtacctgaagattgtcacggatgttaccacgcacgagtttggtgtcccgaatggaacggccttcagtgtcccgctccaggacgacgctcgtgccgtcggcttctttgcgcgctctggactgctcgtcgatgctattggcgtctatgtccaaccatgatgcgatgccctgcagctacgtacctgtgccattgcccgttactgcatgctctacaatggtttgttgagaatcagagtggattatatatgtattttgcacaaccgaatatttcaataattccactctgattctgtgtcgtaagtcatatatatgtattgtaaatcgtatatgtattgtaagttgagggatcctgctgagtctgcgttctacctgataacctcaaaccttgccttgttattatttacaaagtgtgtgccgtnattgaataaagaattgtggtncataccacattatnnnnnnnnnnnnnnnnnnnnnn

SEQ ID NO: 395655 - DNA, 347 bp, Oryza sativa
  unsure (1)..(347): unsure at all n locations
ctaaattggagtggaggctactacctaattaatacgatatcctacaagaacaagatgcgcgccatggtcgtcgttcttgtgctcgccgcggccgggccgccgctgccaccacgaagaagaaggagtgcaacgacggcgacaaggccgcactgctggccatcaagttntccctcggcgacccctaccacttcgcctcctggacgcccgacaacctctgctgcgaatggtacgacgtcacctgcgacggacaccaccgaccgcgtcgtcggcctctccgtctttcaggacggcaacctcaccggcaccattcccgacggcgtggacggtcttnatccaacttcgnacct

SEQ ID NO: 395656 - DNA, 474 bp, Oryza sativa
  unsure (1)..(474): unsure at all n locations
atggtttctgcccgacaactcccaaatcttctcttcctcttccttctcaatccgattgttttctgaaactaggttggttatctttcttcttttgtcccttttgatttgatcaccgtattcaactcgatgtgctttattatgtgatcaggttgcgaatgcggatcaaactttttgtatttttgttcacccatttcccactaaattttcaactaggaaaaaaatgaaaaaaaaaaacgcgccctgtttcttctgtacaaacagaattgccgggggagggaagggtccgggtgggtgggtggacactttgggcggagatcttgctgcatcggtggtagcagtgccacctttttctgtccgctgttgagcttgtgctacacgtggcatggtcctcccttcgntttgcagacagcattttcaacgcaaaagttcacccttttttctgcttcctttttctgtttgcgaattcgatgtagg

SEQ ID NO: 395657 - DNA, 703 bp, Oryza sativa
  unsure (1)..(703): unsure at all n locations
antgaaatnngcccatttaggagctnancccnnctacgaagctaactatcacnggngtggncacttccacttgcccgtgacaaaagtttcanggaaattgctgatccaatnctcaaggatntcttcngtncgaggctganctgaaagcgaatggtgcttgttgggcttgcatgcagtcagaacaaacaggaacagaggccgataatgtctgaagtcgttgagctgctcaagggagaatctgctgagaagctttccaacttggagaatgatgagatgttcaagcctgatctgaccagctccttccaggactcatctcattcgtctcatcctgatagttcagactgcatcacagaagagaagaactcaaaagcagatacaatagacgaggcagttgattcaagtgagacagtaccttcagctaggtagtttgatgcatagaattataagttatctgtcattcatcagcaggagttattggtttccttccgtggagcattgtgtgtttacctctgcatgcgtgtttatgccttgtttaccggcaggtttgggtgcttcccttgtcatctcacagatatacttatctgtgtgtatggttaattgttacaatctgttttcggtatggttgtaccatggcttgtaaaattctgcatatctggtgctgatccaaagccaacatgttgttcccaaaaaaaaaaaaaaaaaa

SEQ ID NO: 395658 - DNA, 407 bp, Oryza sativa
gctcgctattccctccatcctctctcgcactcaccccgacgccgccgcctccctcctctctctctctcactacctgcgcgctcgctccaccccgcgccctaatctccgtcacgcccttcgcaagcaccaccattgccgtcgccgccgccgccgccgcccgtcgtggcctcccctccgtgcgcccggttgctccttcacatcctgatgagagaaaagagggatgggaagaaaatggcattatgttcaggatgatgcgatgctctgaccattttacactgttcttctcaggtttgcccaggagtacgagatgtgcggcagggctcgctgcacccttaggcccgtcccaggccgctagggctttcggcttgccgaccacgaccttttcgcgggcggtgggacttggggcg

SEQ ID NO: 395659 - DNA, 377 bp, Oryza sativa
tctcatcagtcaagagcggaagagctcgacacatctctccgatccccatttcgccttctgctccggtgagctccgatctgactgcgcgtggggggaatcgatggggtccatggcggcggcggcggaggcggcgcaggaggaggagacggtggtgttccggtccaagctccccgacatcgagatccccagccacctcaccctgcaggcctactgcttcgagaagcttccggaggtggccgcccgcccctgcctcatcgacgggcagaccggggcggtgtacagctacggcgaggtggaggagctcttccggcgcgcggcggcggggcttcggcggctcggggttggggaagggcgacgtggtgatgaagccttctccg

SEQ ID NO: 395660 - DNA, 471 bp, Oryza sativa
  unsure (1)..(471): unsure at all n locations
ggacgctgngnancgtgnggncnggnacgttnggccaacgaagcgggcggcaccgcaccgcaccgaggaggaggaggaagcgcggcgaagtttcggtgggatagctgcgtcgcgtcgccatcgaggagcagctatggtggtggcgagctagctcaaggtacgcacgcccggtggaggaggaggaggaggaggaggaaggagaagaggggaggaggaggaggaggaggcagttatggtcctgtgctccatgcgcaaatcgttcaaggactcgctcaaggtgctcgaggcttgacatccagcatgccaacaccctggcctcggatttctcgagggattatgacggggctttcctncagatgcggatgtcgtacagccccgccgcgcagttctttcctcttccttgtncagttgacggattttagctttccggttctctttgcctctaagatctattataagttttnagatgac

SEQ ID NO: 395661 - DNA, 404 bp, Oryza sativa
  unsure (1)..(404): unsure at all n locations
cgggacggtggtttnctggtagcatcacatacgctaataatggattaattaggctcaatagattcatctcgcaaattagtccagggttatggaataggctttattattagtctatgtttaatacttctaaatagtgtccaaacattcgatgtgacagggattgaaaaattttagccccatccaaacccaatctaaaccattattgttattactttttattgtgcattactaccattccaccattccatcgtgatgttactacaagtgtaccataacaactatattttatgcagtaacatagcgtgtaggtattactgcaataacatgtgggtaactaccggacacatggcccaaggactaccatccaccttggactggcaaagctaagtgcaagtgatatattt

SEQ ID NO: 395662 - DNA, 482 bp, Oryza sativa
  unsure (1)..(482): unsure at all n locations
tgcccttctcctcaatcttgttgatctcttctcccacctcgcgccttcgagctagtcgtgtttaggtttagccccattaatcttggtaagggtggtagtggttgttgctgttgttgttgttgttgccctgaagctttcttcctcaaggaccagaatttgtcttcagctgctaaaggagggcctaccactaaagatttgtgatcaatcccactttgatctattaccattgtggcgctgaatattcagtgataacaacggcaagatcaactccctattaattgttcggaggtgcatcattcctcagcgactccagcatataaataaaatccagagggttgcaccagagaatatgtcaatgcagggctctaaccgaccatacagntatccagncaattctcaaataccatactacagccggnggttaatgcatgtggggcaaatgggacttacctgtgcanaaaatcatggggtctttaggggga

SEQ ID NO: 395663 - DNA, 442 bp, Oryza sativa
  unsure (1)..(442): unsure at all n locations
ttctcagcgagctagcagctatagcttagctggagatcgatcgagaggtagaagaagaagaagaagaagaagaagaagaagaagaagaagaagaagaagaagaagaagaagaagaagagaggcctcgcatggcgatgagagctcgcatctggtagccaaggatgacttgcctgtgtctctgctcatgtgcagtagaagaagatgcatttctagctgctttctgcatatgtgatctcacaggcagtctccttggctagcctgagcggctctcatccttcatgcctggctcatctcttcttaatgatctcttattagtcacagatcctgtagagattagttgatgtttgatgcttgtccacttcagtgccaacacataaacatagcggccgttgatcaactgatccaagtcccagcctgacagagnaattcaagagagcattga

SEQ ID NO: 395664 - DNA, 496 bp, Oryza sativa
  unsure (1)..(496): unsure at all n locations
cggacgngtcngnacgngcgacggcntcatgcnacaggaagcagctgtgggtgtttggcgactcgtacgcggacacgggaaacctgggtaaccttgggagggagctgacccacgcctggtactacccctacggcatcaccttcccgcgacaccccaccggccgcttctccgacggccgcgtcctcaccgacttcgttgcttcggccgttggcatcgcgacgccggtggcttacaagctgcggcggcgcggcgggcacggcggcgaggtggcgtcgcgcgggatgaacttcgcggtgggcgggtcgggcgttctggacacaggctacttccagcgcaacatcagctcgcagatcgacctgttccagaagcagctncgcgggcttgcngccccancggcgtcgcgctcgtcgtcgtctccggcaacgactactccgccgtcgtagaaagaacaacggcacaagcgaggcggcgatcnctacattccgacggtggttan

SEQ ID NO: 395665 - DNA, 678 bp, Oryza sativa
  unsure (1)..(678): unsure at all n locations
gacgaggcgtgaggaagaagacgacgactgattcgctagacagcgcgagaagcggaagaggaggaggcgagagagcaccagcgatggcggctcgggtgcccggaggaggaggcgccgccgcggcggggcagcgcggaggttgtcccgacgttctcctccctggagccgatctacggcgacggctctccgctcgacgaggcgcgcctccgcttggcccgcctcgccgacaagttccacgccgtctacgccgcgcgccccgcgctctttcgcccgctctccggggcgggtgaatctgataggggagcacatcgactacgaggggtactcggtgttgcccatggccatccggcaggacatgatcgtcgccatcaggagggcagaggggaaggagggtgcgcgtcgccaatgtcgnacgacaagtaccccatctgtgtctacccggcnggaccccgacaaggaaattgacataaaaaaccacaaatggggncactatttcatgtgtggatacaagggagtttatgagtattgtaggtcaaaaggggatagatatggggtggacctgttgggccttgatgtagttgttgatggcaanagttcctacaaggatctgggactttcaaagcttcagcangcatttgtctggttcaagcaacaagttgctatcatgggagtttcttg

SEQ ID NO: 395666 - DNA, 518 bp, Oryza sativa
  unsure (1)..(518): unsure at all n locations
agcaaacatgagagtccctctctccccttccacattccacctccccatgtgatgtgaagccctcccctgtcccctccctacctccatctctctctccctctcttgaacactgagcctctttgcttacatacaattcagtagtgtagtaattcactgcagcagctgcatttgttttggtgctgcactcactcactcgtcttttggtttcttgggggtcaactgtgctgtgctcttccatctttcctttctcctcctcctctgcttctttgattgctttgcactgtttcagctgggtgtgtgcttctcctccattccttggctcctgcaacttttcactggtcttggcagggtcctgtgtggctttgtgttgttgctcttgttctttctgactgttctcttgttcttccataggatcggatcggtacaatacagccattccatccataaaggtggncaaacctcatctttcagattcaggttgggttgttttgctgcgtgttaacaaagttttctggagc

SEQ ID NO: 395667 - DNA, 823 bp, Oryza sativa
gcagtggactacttaccatgtattggctactaatttccaccactccttgccagagaattgggaaagtgaattctcttatgcaggttctgtcagagtattgtaccagtcattgagatgactgtattcagtagagaagttttgtagataggttaaatttcaggtacaaaccaatgaagtaaaaaaagtcttcaggtatgaatggatgcgcagaggctcaagaagttccctgattggagaagcaaaggaataagttttttatatggatgtgctatggattttaattaaaagaatggagaagtttcttttgttgaagatgaagctgttggcagctggagagaatgggggtggacaccacagtaagtttgatgcagatggacactgttcgaattgcttgggaactcttccatggaatctggatggataccttattgagtagtaaatttcttaatacagctcgctatccagatagtgctagctgtgattgtttggtgatcaatctattgggattgtgccgactggagctgttcgacattgctttggtcttttgttgatttgcctggagttcggcagtatacagcaaccctggagtgcatgcagtggtttcctcattttttaggacctgactgcattctgtagtgagaactatcctgctaaatgcataatacttgcaggtgttttctgttgtattggcaacgtgatagtttttgtggtgcaaaacattcaagatggggcgccatggacggtacaacttgagtctactgctgttcaacatggacaagctaagataaatgtggagggacatgctctaggttctctgttgtct

SEQ ID NO: 395668 - DNA, 596 bp, Oryza sativa
  unsure (1)..(596): unsure at all n locations
agagaggaagaacactgggggagaagaacacaagtgtgcagcgtgcgtgtgtggaggcgagaggaggaagacgaaggcgatggagggaggaggtagctgcgcgcgggcgatggaggtggggttcctggggctgggcatcatggggaaggcaatggcggccaacctcctccgccacggcttccgcgtcaccgtctggaaccggactctctccaagtgccaggagctcgtcgcgctgggcgccgccgtgggggagacgccggcggccgtcgtcgccaagtgcagatacaccatcgccatgctctccgaccccagcgccgcgctatctgttgtattcgacaaggacggcgtgctcgagcagattggggaagggaagggttatgtggacatgtccactcgttgatgccgccacttcttgcaagataagcgaggctataaaacaaaaaggtggggcttttgttgaagctccagtttcaggaagcaaaaagccagctgaagatggccaattggtcattcttgcctgcaggggacaaggtattgtaatgatgatatggtccctgcatttgatgtacttgggaaaaanccgtcctttttgggga

SEQ ID NO: 395669 - DNA, 372 bp, Oryza sativa
  unsure (1)..(372): unsure at all n locations
aaccagcagaagcagatgccaggcttcatctagcggcggtagagcaacgaaggaggcggcgagagctaccgcgggaggagcgggcgcggtgggtcgacgacgtgggtnacggagtacgacctgtacgggctgctgggcgtggagcggtcgtcgccgcagtcggagatcaaggccgcgtaccggtcgctgcagaagcggtgccaccccgacgtcgccggcgccaagggccacgacatggccatcgtcctcaacgaggtctactccctcctctccgaccccgccgcccgcctcgcctacgaccaggagcaagcgagagttcggagttcgtcgggtacacggggaagccgtntactnggcgttgttcgcggcgag

SEQ ID NO: 395670 - DNA, 357 bp, Oryza sativa
  unsure (1)..(357): unsure at all n locations
cccacgcgtccgagctactagacttccgctccatgtaaacgcctgagcacgcgcgactcacgtgcgtctcacgtcacctcaccgcccggcgcccgccatggccatcatgcacgcgcgcttcgaggtctccgacgtcgtggcggcgaggttccagcagcggcgggagcagcccggcgtcggtctccggcccgtccgacagcnacggatccagctgcagcagcagaagcgccgccgacgagctattcccggacgcgcgcaactttccctccacctccgnctctgtgccggtgctcgccggcgtcggtttccacccgatctttncgacgtcgctgtccgtgctcttcgacatcgacgtga

SEQ ID NO: 395671 - DNA, 405 bp, Oryza sativa
taatttcccagacggagcaagagttagcatgtacaagtggacaagcagctgctttcgaggctgtcacttccttgctaaacaatgaaagtgtgtctgatattgatcgtttacggttagtattgctctatgctttgaggtatgaaaaggagagtccggttcagttgatgcagcttttcaataattggcttctcgttctgctaaatacaagtcagggctggttcaattcctcctcaaacaggctggtgttgataagagaacaggtgacttatatgggaaccgtgatctattaaatattgctcgcaacatggctcgtggactcaagggcgttgagaatgtatacacccaacatcagcctcttctctttcagaccatggagggaattttaaggcacggttacgagatgct

SEQ ID NO: 395672 - DNA, 405 bp, Oryza sativa
cctcccaaaaccgctctctttcttctcccaattgcccacctaccggaagagaggaagagagagagagagagatgggttcttgcggattgaggagggtcagatgatgccattaccaatttaacatcttctgcatcttttttttgcctttcttggcatattcttctcttctggatgtgtagatccttctttccccagtcctgcttagctttcaagcagaccaacaggtccgagattggtgacctgggagcggtttcttgaggtgtggtgccgttctgggtaagatcgactctgttgccctgcaagaattcgatgcaggagtaagggcggcggcagtatgtaatttggtgggcggttgttggagaagaggagcaattttgccatcggtttcttgggtcaaattgaggg

SEQ ID NO: 395673 - DNA, 499 bp, Oryza sativa
  unsure (1)..(499): unsure at all n locations
aaaggagaagagtgccctctaacctacctatgccttcctccaaaatcctgatatcttgagccacttgttgctgccactctgccataagcttccatcctatcaagcaccaatatatgagccactatagactgtacactcgcagcaatcccactcttgagcactgaatcaccaagaggattacctgtgtaggtgttgtgtgctgtggaagtttcttgggagggcaagctgtgcagattgcatagcttcagtttctgcattgattcaatggggagacattcctgctgctacaagcagaagctgaggaaggggctctggtcacctgaggaggatgagaagctcatgaaccacataaccaagcatggcatggctgctggagcaccgtttccaaaacttgcaggggtttcagagatgtngcaaaagctttcaggctgaggttgggtnaactacttgagggcttgnccttaagggggggtgcattctntttaggggggagngggcc

SEQ ID NO: 395674 - DNA, 533 bp, Oryza sativa
  unsure (1)..(533): unsure at all n locations
ggggctatcaagcagtatctatgcctctcgcttttgaagaactgtgcctcggcacatatgatagtctttcagctatcttgttcaatttttattagcttggtttcaagattcagaccaggattgaaggcagaaattggagtattctttcccatgattattctgagagttttggaaaatattgctcaaccaaattatcaagcaaagttgattgttcttcgtttcctgggaaaaactctgtgctgattctcaaatcttggtagacatttttctcaattatgattgtgatgtacactcatcaaacatatttgagaggatggttaatggtctactaaaaacagcacaagggcctccagcaggcgtgtctaccacattggttccgcctcaggacaccacaatgaaaagtgaagccatgaaatgcttggttgctattctgagatccatgggagattggatgaataagcagctacgcattccagatcctgactctcctaaagtagagtcggagcaaaatgataatgatggaggacacgagn

SEQ ID NO: 395675 - DNA, 523 bp, Oryza sativa
  unsure (1)..(523): unsure at all n locations
ccagacaatacttactaccactactactgctgctgctgccagttctagctagcctactgctcttctccgagctgaagatttttcgagctagctaggatggcagccagaatgggcagcaaggtcgctgcaatcctcgcgattctgtccgtgctcgtggtgcatggctcttgcaaggggcatcctgtgaactacaacgtctccgacgcctccgcctacggctccggctggctccctgcccgggcaacctggtatggcgctcccaccggcgccggccctgacgacaacggcggcgcttgcgggttcaagaacgtgaaccagtacccattctcgtccatgacctcctgcggcaacgagcccatcttcaaggacggcaagggctgcggctcatgctaccagatcaggtgcaacaaggacccgtcgtgctcgggcaacatcgagacggtgatcatnaccgacatgactactaccccgtggccaggtaccanttngaccttagcggaaggcgtttggggcattgccaagc

SEQ ID NO: 395676 - DNA, 397 bp, Oryza sativa
cccacgcgtccgagaagatttctcttcgcgtcgccggcgctgacaccgccgccgccaccgccatctccggcgaaaaccctacctgcacccgtccagcgagcgccaggaggtagggctctagccgggcgggaggatggtgttcgggcaggtggtgatcgggccgccgggctccggcaagacgacctactgcaacgggatgtcccagttcctctccctcgtcggcaggaaagttgcggttatcaatctcgatcctgcgaataatgtgttgccatatgaatgcgccataaacattgaggacctcataaaactgagtgatgtcatgtctgagcattcgcttggtccaaatggaggccttgtgtattgcatggattacttggagaagaatatcgactggctt

SEQ ID NO: 395677 - DNA, 354 bp, Oryza sativa
atcattgttgccgccatgtcgtcgtcttcctcattgtacaagcagctcggcctcggagccggctctcccgtctccgcctctcacctgcttctgctcgtcctcggcgccggcttcctcgcgctcaccgtcttcgtcgtccaccccaacgagttccgcatccagtctttcttctccggcggctgcggccgtcctggcacggacgccgccaccgccgccgttgctgcctcgccggtcaagaatgtcagcggcggcgcaagtaatgctgctgccgcgaccacggcggcgcgggttcgcgggacaacgacgtgaggggtgctcatcggcatccagacgctgccgagcaagtacgagcgg

SEQ ID NO: 395678 - DNA, 473 bp, Oryza sativa
  unsure (1)..(473): unsure at all n locations
cggacgtgncntncatcttctcctccaaattcctcttccacatttcctcctcctcctcttctttctctcaagaaaatcagtagctagccatggcgtcttcttcttctctcaggagcaccagctgcctcgcctccgccgcggagaccgacgccgacaacctctgcctccgcctcggcccgccgggaagcagcatcaccaccaccaccaccaccggcggcgccgacccggcggcgaagaggtccctcggggcgaagggtcgctggagagcacggacagcatggcctccggcaccggaacttccgccgccgggacgagcacgacgacgacaacgccgcaccggccaaggcacaggtggtaggatggccaccagtgagggcataccggaggaacaactttcatnaggccgccgccgccgccgccgaancaagaagggttgttatnagaacagaagaagaagagnagggaggaggttt

SEQ ID NO: 395679 - DNA, 624 bp, Oryza sativa
  unsure (1)..(624): unsure at all n locations
caccgcaacatcaccgaaagggtcgaggatatcttctgcttcgccatcaggggaggatccacctcttcgtcctcttcttcttcttcttcctcctcctgcgacgacatctttgcgaccctgccgcttggagttcttgggctgtgcagttcttgatttgcttcttggttgggggtgttgtgggttttgagggaggagaggagttcttggcttgttgggtggagcgagaaagggcgttcttgggagagacgcgaagtccggacatgggagcaatgccaagttcaggatcgaagatgttgtcactttgcctgcagttcagatgatgggcaagtctgcaacagagacttcagatctgatcagaaatcacaagaactctcatacacatctcagttcttggattgccaactgatctagacaaaatcacagatcaaaacatctagccgaatttggggtgtgttgcaatggaaggtgtaggtgctaggcagaggagggaccctctgatacccagaccaaacggttcaaagaggcatctncagcatcagcattcagccaaatgctngccgagaggagaccnccgcgacatcggantacttcagtatncaggggttcctcgtgttggcttctnac

SEQ ID NO: 395680 - DNA, 451 bp, Oryza sativa
  unsure (1)..(451): unsure at all n locations
caaaacttcatcaagctccttttagaaacatgcttttctatggtccacctggcacaggaaaaacgatggcagcaagagaactagctcggaaatctggattagattatgcactaatgactggtggagatgttgcaccattgggatcgcaagcagtcactaagattcatcagttgtttgactgggcaaagaaatcaaatagaggtttactcctcttcattgatgaagctgatgctttcttgtgcgaacggaacaagacatatatgagtgaagctcaaaggagtgccctgaatgctctccttttccgcacaggcgaccaatctaaggacatcgtccttgcacttgcgaccaacaggnccggtgaccttgactctgctgtcgccgaccgaatcgatgagggccttgagtttccttgcctnggggaaatgagcggtcaagctttcnaactatatct

SEQ ID NO: 395681 - DNA, 343 bp, Oryza sativa
  unsure (1)..(343): unsure at all n locations
ccctcacctcggcttttcctctgcacttctacaggcgacggcggcggctctgacttgctgcggcagctgcggcctcgcttggaggaggcggcggcggtggcggcggcagctgcgaccggaggctgcaacggcggaagttgctcccggaggctacggcggcggcagccactttctcctctcccccaagtgttcctgcgtaacgcaattgtgcaaatcatcggaaatcatcgtgcgggggtgctgcgggcggttgcgtcgagccgcgatatttccccccctccgctcgccctcgactccgactccgactcctcgcgagttcgcccgccgccgccgccgccgccgn

SEQ ID NO: 395682 - DNA, 431 bp, Oryza sativa
atgttcacaccgagctgaaggccataaatagtagagaccaagctgcatcttcttgttatcttcagttattcagaagttcagagcagtagaggaagaacaggataagatcatagctagagatttcagagagagaatctagagagagagagaagagatggctggaggagagcatggagttaatggccagcatgaagaaaccagagctatggaggaaggcagcagagatcatcaagcaaggtgtgagaattcagagcaagatggaggaagcaagagctctagtaataaccaccccatgttctctgtccaattcgcgcagaaggtgatcgcggagatcttggggacgttcttcctcatcttcgcggggtgcgcgacggtggcggtgaacaagaggacgggaggcacggtgacgttcccggggatcttcatcacgt

SEQ ID NO: 395683 - DNA, 267 bp, Oryza sativa
tagtgcaccaacacgccatatactagtttcagaattgagacacactgatcattgtgagagagaagtagaccaaacaaggcaagctcgcatggcttcgggcattagcaggactccggccacgggtgtcaccgccggcgggccgcacgacgaggaggcggcatggttgcacgcgcttgagctgatctcgggcttcaccgtctccatgacactgaaggcggcgatccagctcggactcatcgacgcacttaccgccgccgccgacggcgc

SEQ ID NO: 395684 - DNA, 299 bp, Oryza sativa
cccacgcgtccgcccacgcgtccggattcagacacgacagacttcgaatttgtaacatccgatgaggaagcagccattgctgagcctactagggttattaagaaggggaggaagaaaagggtatttgtgtcagattcatcctcagattctgaattcgttgtatcagataaggaattggggaatttgaaggagtctgagcctccagagtctctgaaagtgctgccttcatcacccagggagatttctgttacaggtaatggggagcacaaggggaaggagaaaaaggaccacaggaggct

SEQ ID NO: 395685 - DNA, 264 bp, Oryza sativa
  unsure (1)..(264): unsure at all n locations
agcaaaggcttgatcagaattaatccatttaattctgctctgccttgcaaggaactttgcctgcaggcttctccatggattccaactccatccagcgtttggctggcaaggtggctatcattaccggtggagccagtggcatcggaaaggttacagcaaaggagttcatcaagaatggtgccaaggtcatcatcgccgatgtccaggangagctcggccactctgcggcggccaagctcggcccggacgcctcgtacacgcact

SEQ ID NO: 395686 - DNA, 570 bp, Oryza sativa
  unsure (1)..(570): unsure at all n locations
tcctctttgctgcggctgctgttgcacaagtagcatcaccaacctctccctgtctatcccatattattcgtctccttgcttgcttctctgaatatcatcagagcttgtncagactgtgtccctgttcttgctcagcttctaatccagggatacacagagatatcgcccttttttggcagtgattatctctctctctagcttggttgagagagaagaacagcagctcttgcttgcctccttactttcttcttggtgttcttggagagagagggagaggattagaggttgtgatagatgggtaattgctggtttagagggagcttaattgttaacagagtctcttctaatgcgaagcaagagactcccaagatccagagcccatcggagagggaccggagcgacgagagcaagctgccatcgaacgccaaggaggtggaggcgatgcggttggactcgtcggcgcgcaacccgctcgtcgccttctccttcgagggagctcagggcggtcaccagcaacttccgccaggactccctcatcggcgggcggcggcttcggccgcgtcttacaag

SEQ ID NO: 395687 - DNA, 331 bp, Oryza sativa
  unsure (1)..(331): unsure at all n locations
cattcccctccacgccgccgccgccgccgccgcgtggatggccggagtttccgccgcctccgccgccgggaagatcgggagcttcctctccaagaggccgtacgcgccgccgtcctgggcctcgcacctgtcccccgccccctcgcagaccttctcgctcggccatttcccgacgccgatccacaagtggaatctgcccaatttgccgaatggactggaggtgtgtgttcaagcgagacgacatctcaggcatgcagttgagcgggaacaaggtccggaagctcgagttcctgatggcagatgccgtcgtgcagggcgttgactgcnttat

SEQ ID NO: 395688 - DNA, 366 bp, Oryza sativa
gctcttctccaaaattaaccgcggtctagaacctattgctaacatgtttaaaacgcatgttacaaatgagggcacagccttggtcaagcaagcagaagattctgctagtaataagaagcccgagaaaaaggacatggttggtatgcaggaacaggtttttgtctggaaaatcattgagctccatgacaagtatgtagcttatgtcacagaatgtttccagggtcacaccctctttcataaggcccttaaagaagcattcgaggtcttctgtaacaagggtgtctctggcagttcaagtgcttgaactgcttgccaccttctgtgacaatattctgaagaaaggttgcagtgaaaagctcagtgatg

SEQ ID NO: 395689 - DNA, 319 bp, Oryza sativa
cgcagtggtattagcagctactacaaagaacaagacagtaagatcttactacttagcgaggagaagagatcgatcgatcgatcgtaggagcaatggcgtcgaccaggcaggctctcatcgcgttcgccgtcgtcctcctcgccgccgctttcctcgtcgccgcctccgccgccgacgaaacccaggctaacaagaaggaggacaccaaggtggacgtgcaggactactggcgcggcggcggcgggtacccaccacggggcggcggctatggttatccggggcgcggctacggctatccggggcgcggcggcggcggttg

SEQ ID NO: 395690 - DNA, 389 bp, Oryza sativa
gaaaaatactagggcaatccatttgagagagagctttgagccaaaagcaccccacgcactagccggaccggcgaaatggtggactcgctgctatacgggctcctagacctgcgcatggcggcgccattgcttgcagctgccgtggcgttgtacgtccttgtcgagcagctgtcctaccaccgcaagaaagggtccctgccagggccgccgctcgtcgtgccgttcatcggcagcgccacgcacatgatccgcgacccgaccgggttctgggaaatgcaggctgctcgcgctagaaagtccggcgttgggttcaccgccgacttcctggccggcaagttcacgatcttcatccgcgactcggagttgtccaaccgcgtcttcgggaacgt

SEQ ID NO: 395691 - DNA, 464 bp, Oryza sativa
ctcctccctcttgcttgttagtttcctcgtagctagtggggtgagggtgtgtgtttggttggtgagcaatggcggcggctcgcggtggaagacgacgacgaccgtggtcgtctccctacctcctgcggctctccgtttctgatgatgctgatcagctgtttgctgtggctgcaccgggaagcagctccgtcgctcgccgccgataccgtgaccgtcggccggccgctctccggccggcaggtgctcgtgtccagaggtggcaagttcgcgctcggattcttccagccagataactcgtcgcagcgttggtacatgggcatctggtacaacaaaatcccggatcacaccaaggtgtgggtcgctaacaggcgggccccactctccgacccggacacgtcacgcctcgccatctcggccgacggcaacatggtcctcctcgaccgtgcaagccaacggtcttggtc

SEQ ID NO: 395692 - DNA, 363 bp, Oryza sativa
  unsure (1)..(363): unsure at all n locations
cgaagaaaacatagctatagctagcacacaccactagctaattaagctcgctcgatcacttcatcagttagcaatggctatcaccaaggtcgctcccctcctcgccctcagcctcctcctcttcgccgtcgccgccgtgcacggttgcgagccctactgcggccacggtggcccggtcatcccgacgccgacggtggtggtgccgacgccgtcgtcgtaccaccgccatggccgctgcccgatcgacgccctgaagctgagggtgtgcaccaacgtgctcaacgggctcgtcggcgtcaagatcggagccggccccgacgacttctgcccgctgctcttcgggatcgtcgancttcgacgtcg

SEQ ID NO: 395693 - DNA, 451 bp, Oryza sativa
ggaggaagattttgaggatgatggcacatcgtctaccaaaaaatggaagagaccaaggaaagagtcggatcctgcagaccctggaaacgatgatttagaggatgatggtacccctactgcaagcgatgcgaaaaaacaaaagacagattctacagcatcaggagaagataaggatagtgaggatcctgcaattcaggacccttctgctggtgatttggaaggcgatcctgaccctgatcattagctaagggtataaagcagcatccagcgacccagcttttcaatgtttgctggtattaatctatgtgttgacaccaccttatcagtgtatcaggcctcaattccgacacaatgttttgtagttgaaataggtttttcaacccgtgtttgtacattcacctcatgaaacaagctttcatagtttttctttctctaaaaaaaaaaaaaaaaa

SEQ ID NO: 395694 - DNA, 337 bp, Oryza sativa
ccagaagttattcagtcaactgataaggttctaattttgcaatatatggatggaattcgtttgaatgacaatgattcgttagaagcatatggtgttgataagcaaagacttgtggaggagataacccgtgcatatgctcatcaaatatacgttgatggcttctttaacggcgatcctcaccctggcaattttcttgttagcaaggaacctccacacaagccgcttctccttgattttgggcttactaaacgcatatctcaatcaatgaggcaggcactagcaaagatgtttttgtcatgcgctgagggagaccatgtggcactgctgtcaagccttt

SEQ ID NO: 395695 - DNA, 534 bp, Oryza sativa
  unsure (1)..(534): unsure at all n locations
aagaaagccgtagccctgacgaacatctatcaacaccctattgtcacgcacgcgtatcgagtatcgacgcctccctcccctcctccctcgccgctataaatcgaaccaaataaaccgctgcaattccttccttccttcctctcatcgtctccatcgccggccatcgcatacacaccaccagaggaaggagaagagatcgccctggtggtgggtacatactccgccgccgccgctccggtcaccgccagtaagccagccactgtgagagtgtgagctgaggtgagcatcgccatgggagaggttgcagaagacatctacacccaagatggcaccgtggacgtcaagggcaacccggccaccaagaagaacaccggcaactggcgtgcctgcccctacatcctcgctaacgagtgctgcgagaggctggcctactatggcatgagcaccaacctcgtgaactacatgaagacgcggctcgggcaggagagcgcattgccgccacaatntaccacttgtcggggcttnctacatacc

SEQ ID NO: 395696 - DNA, 492 bp, Oryza sativa
  unsure (1)..(492): unsure at all n locations
agagagagagaggcggcgagatgggggaggaggaggcggcggcggcggcggcgagggtggcggacaggcgagggagctgcaggacgcggcggcgggcctcctgtcgaggtcgtcggcggaggaggaggcgctccgccgccgcgccgccgccttcgggcccgagctcgccaggctccgcaaggccgccgcccacgccgacagcnacaaggttgaggaggacttggatcgagcgacgtgcctcataagcaatggagacattgcggcgctgctcccgagcaagacacatggtgctccccggaccaggtaatctgcgggcaccgaggaaggaggttcagctcaaggtgaaggaagagtataatagctacagggtattttacaatttgtactatttgatgataatctattagccatcaagttgtgttttnaaatgaaaatttttggtgtggattctggtgtctttnagctttcatttnataaaaagttcaggattta

SEQ ID NO: 395697 - DNA, 375 bp, Oryza sativa
  unsure (1)..(375): unsure at all n locations
agaagaagaggtaggaggccattgccacctgaccttctcctcttcctccattcatcttctctttcttgggacatggcgaccatcctggagaacatccagaaggcgaggttcttgccgacaaggccgctcaaggacgagctgccgacgttccagggcggcggcggcggcggtggcggtgggggtggaaaggagagccacctgatggggctgaggaagaggctgtcctccttctccgacaagatccagcccatctcctccgcgtcggcggagtgggcgttccggcggtccaagtcggcgccgtcgctgggcgcgttcgccggcggcccgctgaancgtggtgggacttgggcgtcggctggctcatgtccaanaanc

SEQ ID NO: 395698 - DNA, 384 bp, Oryza sativa
  unsure (1)..(384): unsure at all n locations
cgggggagaaggaggagtagatagagggaggtggattgagctgtgggaggttaggttggtgattggtagaggaggaggaggaggagatggagaggaaggtggtggtggtgtgcgcggtggtcggcttcctcggcgtcctctcggcggcgctcggcttcgcggcggagggcacacgcgtcaaggtttcagatgtgcaaacttcttctccaggtcaatgcatatacccaagaagcccagccttagccctagggttaatatctgcggttgctcttatggtcgcccagtctattataaatacagtggctggttgcatctgttgtaagaggcatccagttccctcagacactaactggagcgtagtctnnatctcattcatcgtgtctt

SEQ ID NO: 395699 - DNA, 464 bp, Oryza sativa
aggccctgcaggatcacagcaagctcaaaaccaaggccaaggacgacaagaagaaaaagaagaaggacaacaacaccgtggtggtcaacaaggagcagaagaaatgccccttctccgtcaagatcgaggagatcccacctgaggaggacaacaccgctggatgcgtcgccattagaaaggcttttgcattgggcaatggcaaggcaaagaagaaggaactgtccccacaggatgcggcattgctgatccagttgaactacagggctcacctggcacaccgttcacaggtgcttcgctgcctgcgtgatctggctgtggctaaggccaagctcaaggagatcaggtccctcttctataacatctcttacaggcatcgcatggcacatgaccatgaagagcgccaaaggttcactgagaaaatcatcgtgctgctgtcactgtagatgcgctttagggtcctgact

SEQ ID NO: 395700 - DNA, 450 bp, Oryza sativa
gcaacagcaacatcacaccagctgaccagcgagcaatcgacaagtgtgcaatggtgcgtgaagtggtcaacaagcggggaaaggagcaaatcctttgtgactaaatttaaatggaatattgaccgatttcatatcgaagggatatctgttcgtttttgaaacggcaaatcaaacaagaggctgttttgaatcaaagcggaaaaaaatggtgcatgcagcattgccacaccgaaatgtcttgtgtccagtgttagggatggtggtgatgcagcgggggtcgacgagggcagcgactttgcgccggcagccctgacatggacttatctcctaaaatgaaggaaggcagtcgacttgccgctggactggtgctgagtcatatgggggactcactgaacgtagttggcaatgcaattgtcaagcttgacaaggagtaggtcccaaattcattag

SEQ ID NO: 395701 - DNA, 342 bp, Oryza sativa
  unsure (1)..(342): unsure at all n locations
ccctaaccttttctttttcctcttgcaacaagatccggcgcatgcggcgcgccctcgacgccgccgacatcgagctcgtcaaactgatggtcatgggcgagggcctggacctcgacgacgcgctcgccgtccactacgccgtgcagcactgcaaccgcgacgtcgtcaaggcgctgctcgagctcggcgccgcgacgtcaactcccgcgccggcccgacaggcaaaaccgccctgcacctggcggcggagatggtctccccggacatggtgtccgtgctgctcgaccaccacgccgacccgaacttcaggacgctcgacggcgtaacgcgnttcgacgtgct

SEQ ID NO: 395702 - DNA, 373 bp, Oryza sativa
gcctcttctacgctaccaacaacaacaacgacgacaacaacaacaagaaagcgcacaacaacaacaagaagaagaggaggcaacaaggaggagttgaagtggaagctttcagctcacctctgctcccattcttgcgctttctcggagcgcaggaatgggcgcgatcggggagtggcggagggggccggtcatcggccgcggcgcgacggcgacggtgtcgatcgccacggaccgccggacgggcggcgtgttcgcggtcaagtccgtggacgtggcgcgcgccggcgcttcccggcggaagcaggggcatgctctctgctctggcctcgccgttcgtcgtgccgttcgttggatccggcgtgtcggcggcggt

SEQ ID NO: 395703 - DNA, 476 bp, Oryza sativa
gggcctcgaatggatgctcaagtcggcaagcagtggtcgggcggagagcagccaagctggcggggctgacaaagatgaggaggaggttgcacccgaggaggtgaagaaagccaatccaaaggaattgaatccatacctgagggataatggcagtgggtaccctgatgaatctagcccttcaaatgcaggcaaccagttgcttgcttcctctgtggttggtgatggaggtgctagctggaggctcaaagctttgaagcgtgcaaaagagcaagcagctcgtgaaggaaaacaacttgaggaggttgttggtgagagatggggctcgttaggccacttagctgcatcagtgtcagcatctagagctgccccttcgcatgctcatttacatgccattagaggcagaaaagctgggcaagcaggcagctcagaggacattccaaagaaatccaagggggtcagcaagtggggcagtgtag

SEQ ID NO: 395704 - DNA, 482 bp, Oryza sativa
  unsure (1)..(482): unsure at all n locations
ttttttttttagaagaaaaaattttaatcgtatatatatttatggcatgtaaagagcctccaatccttggcaatccacgctccaatcatgatcaggagcgccgatcatgcactcatggaggctcatggcgtcgtcgggaaacgaatccaacgagtcgtacttgggctcctcccatgtcgacaagctcggcacgatcgagcaccacgacgacaggctgccggcgccggcgacgtccgtgggcaaacctagcgagtcgaagcagctctgatccatggcgaagttgagctcgccgagcgcggcttgcacgctcgcgtccgtgcacagcatggaggtggttgcggtggttgcagtactcgtcgggtcgttgccgctcgctggactggaccactcgccgaacccgtcctggttcgggtcgaacttcgccgacgccgccgccaagatgccggggttaaatcgttgacgggttaacgttngacgcttgt

SEQ ID NO: 395705 - DNA, 458 bp, Oryza sativa
ctcgcaagcaactttgttcggagcagatcacatcgcccatctctcttgcaagccgccagatccgatcacatcgatcgctctctcgggcttgatggccggcgtcgaggtttctgtttccgtctcccctaccaagaagagaaaaggggagtgttccgccctggacggaggagaggacgatgctcttgctcctccagcaaagaagaagaagatgtggctgctgccgcaggaggaggtggactggatcctcgcccagtcgaacgagcccgtccccaccgagttccgggagctgaagcgcgccaacccttcgctggtgccctcgccggaggaggaggaggacgagtccaccatgcttctttacgcgtgcgtccgcaactgcttagggaggaggaggccaagttcgccaagttccaggcttgggttcgcggcggagtacgttcggaaaggattcgtgggaggtg

SEQ ID NO: 395706 - DNA, 458 bp, Oryza sativa
gggaggatgcttatccggcttcctccgatgccgcggtaggtgaggagaagggcgaattgggcgaggagccggaggagaaggctccggctctggctccggaggcgaatggcgccgccgaatcggatgtggaggagaagccggaggaggataacgagggggaggaggtggctactgggggtggggatgatggtgaattgggaatggagaaagaggttgatgtttctcctggggccgcggaggcgccgcagccggaggataaggtagctcctgaagctgaagctaatggagatttgggcgacaaggcggaggaggaagcgagtccttcggcggcggtggaggtggtggaggagagcaattctccagaagaattttttgagaaggctgtggtttcggaggcaaattgcgttgcttccgccgtcgaattggctttggaggagaagctagaggataacaaggga

SEQ ID NO: 395707 - DNA, 418 bp, Oryza sativa
cgaaagtgcaagtgagactaaccttgtacctgtagtgagtactggtgatgatggctgcgagtaacggagaggaacctcctagcacatccatggcaacaagttcttctccattgcccatggtcgctcaactgatggtcaccacagaccgtgctgtaagcagcagctgaaggatctagtgaataaggaaaactccactaccatggtggcggcgttgtccttaagtagagaggcttatgaggtggcgatggcgttgaagaacggggaggagcatcggcaagggagatgcagcggcaagggagatgcagcggcaatgtttgatgatgatggcgtccaaaaaagaagacggccgcaaagcctttccactgcgtccattgaaccccctgttgctatcacttagcatcgaagggtcgtcttaaat

SEQ ID NO: 395708 - DNA, 380 bp, Oryza sativa
atttgcatacactggagatggcctaagctagatgtgctgctctctcggatgctcgggatcactcactcttggcaggtcctatattatgaggcatcaaatggcttacaagagcatgaaatatttgcaaaattcatatgaaactcaattgttccaagcagagcctgcattagctctggacaggatttattcatcattttttttcttgcccaatttctaaccaatcaattagtcatacttgctacctatcttagcaagaagatcagagagctccctcggcctggagcacatgacggcgtggtcggccccggcaatctcttcgacttccacggccgggctcaacggtaatcatggtaacggtgcacctccttcaaggtcatcct

SEQ ID NO: 395709 - DNA, 435 bp, Oryza sativa
  unsure (1)..(435): unsure at all n locations
caaagcgatgctaaggaagatcctaaagctagattcttcacatagatttgaatccatgggcaattcagataatttccttcttgagaattatatgccaaatggtcaaggtcttgacagctcttcatcaactcggaattctggtgttacccttgcagaggtcccagctaactcaggtttgccatatgtagctacaagctctggactttcagctatttgttcaacttcgactcctcagattcagtgcccagttgttttggacaacggcatacccaaagaagttccaaacatgagtgcggtgccttctgttccgaaggctgtggctccaggcccaactgatatcaatattctggaattcccagatttgcaagatatagtagctggaggaaatgttgatattcctgggggggggctttgaaatgcctggtcctgagggng

SEQ ID NO: 395710 - DNA, 426 bp, Oryza sativa
ctgatgttgcgatagtgtgatgcttgtacatcttggaggagtagagtatcccggtcaaagccatcagccatctcgacgttttcttccatctcgcatatttcctgcaatggcagggaatgcgtcaggggtgcggaggctctacctctctctctacaactggattgtcttcatcggatgggttcaggtgtcgtggttcatgatattggcattgctgaagaacggatatgaggccgtgtatgctgccgtagagcagcatctgctgttcgcgcagactgctgcaatcatggagattcttcattccattgtaggtttggtgaggtctccagtgccttctactgttctacaaagttacttggaaggttgttcatgatctggggcatcttgtggagcttccctgagacacactctcatatccttgttacctcc

SEQ ID NO: 395711 - DNA, 399 bp, Oryza sativa
  unsure (1)..(399): unsure at all n locations
ctgggctgaacgtgatcaccgagctgatcatcggatacctgtacccggggaggccgctcgccaacgtcgccttcaagacgtacggctacatcagcatgtcccaggcgatcatgttnttgcaggatttcaagctgggccactacatgaagatcccaccacgctccatgttcatcgtccagctcgtcgggacggtgctggcgtcgtcggtgtacttcgggacgtcgtggtggctgctggagagcgtganaaacatctgcgacccggcgaagtgccggaggggagcccgtggacgtgccccggcgacgacgtcttcttcaacgnctccatcatctggggggtggtcggcccgctgcggatgttcggccgcctcggcctgtacgccaagatgaactacttctt

SEQ ID NO: 395712 - DNA, 391 bp, Oryza sativa
ctggaactggttcccttcccaatcccaatcccccactactcagagatcaccgatttgccctatcaaatcaaatcatccgccaattcgatccgaatccgtgcaggtacctatcggtggagaaggctcgatatgtatacgtgaggctgttcccggagcccgggcgggtggccaaggaacggcccccgctcgcccgcttccttctccgagcttgctggtccggcccgccacgccgctcctgcgtctcccctgtgcatgagcatctcctccgaagcagcgaagactttttctggcaacttgatacgatgtacgctgggcgtttcactattgatgttgagtttttgggacctgaagatagcctctaacaatgctgcagaatcatctacctcgattt

SEQ ID NO: 395713 - DNA, 341 bp, Oryza sativa
  unsure (1)..(341): unsure at all n locations
cggacgggtcaggggacgctgtgggngattagccagtgcaaattcaactatggttaatgaagcactgctggcagcatttcttattggacagcggatgaatagggagactgatcgcgagctcaaaggatattgtctagcctttgatgatgaattaggtccaactccagttgctgatgtcaaatcattgacacactatggtgagccctatgatggaaatacacgcttttccaggagtactctgtttgttgcagctgttagagcctgctatggtgaggcttgtctcctccatggtgttgagtggatgccacccaagggaggcataacagaaggtcagatgctta

SEQ ID NO: 395714 - DNA, 424 bp, Oryza sativa
cccacgcgtccgcccacgcgtccgaacccactctgctcagctcgcagcaggtgccgccgccgccgcttgggccgagctcgcgtggacgtggggcggccaatcggcgcgggcggcgaacacaacggcaggagcgagatggcggcgtcctctactacatgccgcaccggtcgaatccgccggggcatggcgatgacgacggcaggcgacgacgacctcggagacgacgggacggcgacctcggctggcgacggatctggcgacggtgccgacaacggctggcgacggcgtcgacgacggcttgacgacggcgcggcgtccggcaacgacgacctcggagacgacgcgccacgacggttgcgacggttaacgcgactggcgatttgaaaggaagagacggggcgtttgaaaaagattttcgagttga

SEQ ID NO: 395715 - DNA, 340 bp, Oryza sativa
taaagagatggagggcaagctcagagaaatgggctttgtgggtgcaagcgtgaagccactctctggaaaggatggacagagatccatgctggtgaaatttgctagcagcctcgctggtctcagcgagcccgagaggcttgctcagtccttggagaaacaaggccatggacgcgctgaatggtatcgcgtccgtagtgttccccctggtgctgatgggggcagcaatccgctgcttgtgaaagtgggcgcaaagggggaacggacatgggtcctatatggctacttggcgaccgcatgggacctggatgcactcgacctggagtcgaagcaaaatgctgta

SEQ ID NO: 395716 - DNA, 469 bp, Oryza sativa
ccttctagaaccttccactcccgctcctcgtccgggcaaggaggtgccgcctccctccgcctcgccggagatggcgacgatggagaacgtgatcgtgctcgtaaaccgcatccagcgagcctgcaccgtcctcggggaccacgggggcggcgacggcaccgcctccctccccacgctgtgggaggcgctcccttccgtcgccgtcgtcggtggccagagttccggcaagtcatcggtgctggagagcatcgtgggccgcgacttcctgcctaggggctcaggtatcgtaacgagaaggccgctggttttgcagctgcacaagacggaggacggggtgcaggagtacgctgagttcttgcatatgcccaagcgccggttcaacgattttcctcttgtgcggaaggaaattcaagatgaaacttataggctgacaaggaaggctaaacaaatatcacctgttcaattcatt

SEQ ID NO: 395717 - DNA, 450 bp, Oryza sativa
  unsure (1)..(450): unsure at all n locations
cagaagctgatggttatcaacctcatttaattgctcctgagcaagggtaccgccgactgattgaatctgctctcaattattttagagggccagctgaagcttctgtagatgctgtgcattatgttttgaaagagctggtaaggaaatccatcggtgagacccaggaattgaaaaggtttcccactcttcaagcggagttgcgggctgcatgctttcatgccctagagagattccgtgaagatggacgtaaaaccactgtacgactggttgatatggagtcagcatacttgacagtggagttcttccgcaagctttccacaggaagtcggacaagactgggactggggacccttccacttcctttctgttgatcgttatgctgacgcgcacttcaggaggattgcttccaatgtgtcctcatacatgggcatggnatctgatacattgang

SEQ ID NO: 395718 - DNA, 334 bp, Oryza sativa
  unsure (1)..(334): unsure at all n locations
cgcctagtcgcctagctcactgggcttagcagtttagcgagtnaccgaaatggcagccatgacagctacaatnatccacgtcgagtccatgcagaccgccgtgccgacgcggatcacgggggcggggcggacgctgcccgtngccgtgtccggaggggaggcgccgccgccgctcaccgccgcctcgctgcagcgccgcttccgcgcggtgctctactaccgcggnatcgagcagctgcaggcggaggaggaggaggaggagcncgcggtgtgggttaaggagtcgctcagcgcgtcgctcgccgaccacccngagatggccgggcggcttcgg

SEQ ID NO: 395719 - DNA, 726 bp, Oryza sativa
  unsure (1)..(726): unsure at all n locations
cattttcagacttcagagttgtgtacaagtgagaagccatgatcaagctgaggtactccaagaggctgttcaagaggagctgctcctcgtcgaaggcgactgcttgtgtcggtggcggcggcggcggccatggcaatgcggtggccgccggcgggcgtgcgcgcggcgcgggggagatagggtgggaggtgaggccgggagggatgctggtgcagaagagggaggggagaggcggcgaggaggtgatcttggtgagggtgtccactggcttcgcctggcacgacgtgtccattgctgcgacctccacattcggtgagctgaaggtgaggttgtccatggtgacagggctagagcccagggagcagaggctgctgtttaggggcaaggaaagggaggataccgatcacctccacatggttggggtgagggacaaggacaaggtcctcctcctcgaggaccctgcccttaaggacatgaaggtccgggctgccctcgcagcagcccgggtcatgcagagcccgtgccagccttttatccaagtctaagggttagttggccgtgacccctgttctgttaccacgctaactattagagtactattaataagttgtactacaattttagtcgatcgacatctcaatttctggaaggttttattatatccggaataggtggggggttggtgctgttcancccctcctctctttagtttactgtcagtggtgc

SEQ ID NO: 395720 - DNA, 429 bp, Oryza sativa
tccagttaccatacagcacaccatgatggaaatgagaggaaagacgctaagaaaagcattgatgcggactgtgttgaaagcaactaaggggcagcttgatgaggggaacaggcagtattactcagggaagtcccaggagaacgcagatcaggttgctgaccgttgcttcgatctgcagcttattggagacaatcaacgtgaggagcttccaaagttacctcctgtgaggctcaagtctgaggacaagctagttaatatgaattgggaggaaaaggtcaaccataacgggtcaggagccaagcaccccagtgctggaccatgcttttatgattgggtcttatcttgatgttcccatcggacaagaaataacaccatcaggtgggaagacggcacaattagttaattaacttggttctctgtcagtcaagg

SEQ ID NO: 395721 - DNA, 570 bp, Oryza sativa
  unsure (1)..(570): unsure at all n locations
ggcatccatgtatgatgtggatttttcaccacatcaagccacacctaaggagtcaatgaacttcaaggatgatgcgaaggtgcagccttcgtcagggcaaacaccaaacaaggggaattattacatgggccacgcgaatgccatcatgatgatgtttcagtacatacgtgatggctgccggcatgttgagagttccatggaagacttcaagtccaagaaggtagaagaaggacgcgatgagaaaaggaaggtgggagaagggtatgatcctcgctggtcttctcccatcgagataacaatgaagatctgcaatgacgacgtctccgatgaagcaaccgagaaggaaccatgatttagtattgtcgctactgtgttttggccttncaataaaataacatttcttgtgaattacacaagaaaattcagtacacaatgtcgttcaggtccattaagtactgcttgtgaaatgcaaccaaatttgatgaaactttgttatgatgcctattcaatattgcttgtgattcagttgatttctgggacctatacnnnnnnnnnnnnnnnnnnnnnnnn

SEQ ID NO: 395722 - DNA, 286 bp, Oryza sativa
  unsure (1)..(286): unsure at all n locations
cggacgtcggtgcacggtgggcgccgatccgagatggccgcagcagcgcagaggcggcgganagcagcgcctccccggagttccgcttctggcccctcgacgccgaccccgccgcatccccctcctgcgccgacgagctcttctccggcggcgtcctcctccccctccaacccctcccctacccccgccgcgacgccgacctctccatgtccctcgccgtcgcggatgatgatgatgatgaggacgaggaggaggaggaggtgcagcctggtgcggccgtcgcgtn

SEQ ID NO: 395723 - DNA, 418 bp, Oryza sativa
  unsure (1)..(418): unsure at all n locations
cccacgcgtccgttgatcttgcatccatggagtcgggctacggcttccgcttctccgacgacgacgtggagtcggcgagctcgctgacggtgggggagcggctgtgcgcggcgttcctgccgttcgtcgccattgccgaggccgtcttcttcgcgctcaccgactgcctcgccgacctcctcccgccgtccgccgccgcctcccgccaccgccgctccgccgcttcctcctacctcgccgccgtcgccaggaaatggaaccaccagcagcgtggcagggtcggcatcggctgcacctccctcaccctccgcnagctcgcccgcttcgccgacgaatccagatgcttctncgtnaacaaggtggaggcgctgttcgagctctacaagaagatcagctggttcatcatcgacgacggact

SEQ ID NO: 395724 - DNA, 581 bp, Oryza sativa
ggcagggtcacactagaaagtgttgtattcagttttggcacaatactcatcgatcttctcagtggaaagcgcattcctcctacccttgcacttgacatgataagaagcagaagcatccaagcaataatggagacaaatttagagggaaagtactctatagaggaggctactactctggtggatcttgcttcaaaatgcttacagtatgaaccaagagataggcctgatattaaaaagttggtttccattcttcagcctttgcaaacaaaatcagaggtaccttcttatgtgatgcttggagttccaaagcctgaaggaagtaccaaaggcgcctcccgccccacagcacccactttctcccatgggagaggcctgttccaggattggaccttactgccatccatcagatcctagtttcaacacattacagggatgatgaagggactaatgagctatcttttcaagaatggactcaacagatgagagatatgttggatgctaggaaacgtggtgattttgcatttcgagacaaaaatttcaagcaagccatagattgttacactcagtttgttgatggtggg

SEQ ID NO: 395725 - DNA, 478 bp, Oryza sativa
acttaatcgaataaccactggtaataatgtggttggagttcctggccctcttgaaagtccagaaattaagccaagattattcggtgttacagctgagccccagcagaggagcactgaagcaccatctctgcatgaaaatcatcgggcgcctggaagtgttgcaaagaccaaaagggcacccagtgaacaaacaaggaaagggagctcgtcctccagttctcgccctcttcaaaagcaaccacagaggcctgaaatttcaaaaggagcttccaatgtgcttgatatgccttctttgaacaaaatgactggccagcccagacccttcttccaaccagcagaagcagctataactcagcaaatgagaaaaagcgagacacctaaaagttctcatccactttgaaattggcacaccagaggcttgagtttttcaaaaggtgctttttggtgttcatgatatgccttccttaacaatacaagt

SEQ ID NO: 395726 - DNA, 657 bp, Oryza sativa
caaccatgggagatattgtgcacctgacccggaacaggatttcagcaaagggtatgatgggaaagatgtggtagtccagaatttacgtcaagtctgtgtttataaagttgctaaggagcatggaaaaccttggctgtggtgggactacgtgacagattttgcaatccggtgcccaatgaaggaaaagaagtacaccaaggaatgcgctgatggagttatcaagtcacttggtcttgatcacaaagccatagataagtgcattggtgatccagatgctgataaagaaaatcctgtgctgaaagctgaacaggatgcacagattggcaagggctctcgtggtgatgttaccatcttaccgactcttgtaatcaacaatagacaatacagagggaaacttgataaaggagcggttcttaaggcaatttgtgctggttttcgagaaaccactgaaccagctgtttgcttgagtgaagatatacaaacaaatgagtgcttggagaacaatggtggctgttggcaagacaaggctgctaacatctctgcatgcaaggacacttttcgtgggaagagtttgtgaatgtccagttgtaaaaggtgttaaatttgttggtgatggctacactcactgtgaagcttcgggatctggccgttgtgaaa

SEQ ID NO: 395727 - DNA, 425 bp, Oryza sativa
gccgtggcgggttcaaccggccccctccaccggagcgcaaccgctgaggagaggaaggatgatgaagataattcctgatattgggttgcattggactactggaacatgttgctgtcttgctggacatagtaggcaaatgaactgctactgagcatggatacagaatttggtggctcattttgaactatgggtttacaactttccatgctgtttctgcatataatttggtaatgggacgacaaactgaaacagcctttactttcagttgtagattctggaatgagtttattggtgatgggtgatggttacaaatttggtgggtgatggttgcaaatttggccgcagctttatactctgaacgtcttgctgagtactatcttgcatgcagcgttataattctgaatatgtcgttaaatttaactttc

SEQ ID NO: 395728 - DNA, 350 bp, Oryza sativa
  unsure (1)..(350): unsure at all n locations
gagctatagccttagcttagttaatctggctgcctttctggagaggcagctggaaggcggaggaggaggcggtggcggaggaaggagaagacgcgagccccacgaccaagtcgacgaatgctccgacgatgaagccatgggtcttcttgccgttggccctcaggtaccagccgagcatctcctccagccacccccagtcatggcccccgccactcatgtggctcatcaccatctcctccatcgaccgccggaagtctccgtacgggtcggccgagtcgatngacatcgccgtngacggcgcgttccttgacgacgatngagctcgtangacttcggagctcgaagaagag

SEQ ID NO: 395729 - DNA, 360 bp, Oryza sativa
  unsure (1)..(360): unsure at all n locations
ctctcgctcagatccgagcgaggcgagaaatccatgaaaaatcgagggtaatctccgctcggtggcttcaaaaacttcgaatccttccccaatttcatcggctccgcagtttttttctcgaggtttttcggatctaaagcgcggctttgtcggcgcttgtaagccacgagagagagagattcttgtgccttcgagctcactccatccggccccaagaaagctcccctcctcccacccaccgccaccactgaggaggagagaaccctaactataacccctaatcctgccactaatcccagttcatggcctcctccctcacgtcccgtaggcnttacccgaagaaggaggacttgggcaacg

SEQ ID NO: 395730 - DNA, 704 bp, Oryza sativa
  unsure (1)..(704): unsure at all n locations
nnnnnnnnnnnnnnnnnnnnnnnnnggacctcaattcaccagcagtattaattatccaccaatcacatagctccacataggaagcttcacacaagaccacaaagatagtagcacaactccatccactttggtcaagactctatctcaccttggtcaagcactcaaagcatgaccacagccatggcagcagatgcatgcatatgagctccaaccaattagtgaggagtgagcagcccaggagaggaggaggaganaagtagggagtgaggagcaaacaaatcagtgaaatgcaagattgcgccccatccattgcaagcaccaaatcttgaatcccctataattagtagccaaatagttcttggccaaatactcataccatcactatgtcggctaggaagaggagaagagaaatcagcaaggagggaatgtgatttacccaaggaagaggaaaggccaatgcatcggcgaggatgaacacgggagcacagccatggacgaacttgtcacctaggcaaaggtgaatccctcaatacttggctttcctttttttttagcacctagcaaccaagcatctgttccccctacacagccgcagccgtagctgcagcaaccaccaccgccacagcagtagccgcagcagagctgatccacactagcaatggtagatcggtagccatggcttggatgatttagctgggaaaggg

SEQ ID NO: 395731 - DNA, 443 bp, Oryza sativa
  unsure (1)..(443): unsure at all n locations
catctctcttccaacctctctctctctctctcggcgtcgggatgatgccgatgccgccgtcggggcagcggcggctggagttcagcttccaggggtcgtcggcgtcggcggtgggtgggggaggaggggagttcgagagggttaggatgcggagccgctggggaacccgatggcggcgagggaaggggaggaggagtcgcggtggctgcaggcgtcgcgggtcggctcgccggagtccggcacgccgtcgccggagttctgggggcagcagcagcagcagcagctccagcggctatacccggcgtcggcggggagctcgccgtcgagggcgcaggcgatcgccgggtaccgacgcgagatgctcnagctcgtccncggcctccccgagtcctnctacgaactctccctccgngacaatcgtcgangtccccttcctccttccg

SEQ ID NO: 395732 - DNA, 432 bp, Oryza sativa
  unsure (1)..(432): unsure at all n locations
tttcactcttatcagtgaattagatcatatacttgtgtccttgacagctcgttaattagcatggctaggtctctcgctgctctccttctccttctggtcgcagccgcgggagccagccatgccgcgtcgccggcggagatgtactggaagatcgcgctcccgacctcgccgatgcccggcgccattcgcgacctcatcagcccggcgagctcagcggcctcagcttcgaaggataaggaggatacggtgggctccgtgttcttcctcgagaaggacctcttcccgggctccaagatgacgctccacttcacccgcggcaccgccggcgccgcgcttgctccccggggccgcaccggggtggagctccancttttgttccctttagtgagggtaatttgcgcgtttgggtaatcaatggtataggtgttttcc

SEQ ID NO: 395733 - DNA, 670 bp, Oryza sativa
  unsure (1)..(670): unsure at all n locations
ntcctcctcctcctgcaagcttcctccctcctcgcggccatggcggcgccgttcgtctactgccgccccaccgacgacggcaccagtnagagcgctctcctgagggcggccttcgacgggaacctcggacgcctcaaaggtattttaaagagccttgggatcgagaaaggaaagacccagtatgcagtcttagctcttaacaagcatgggattggggtgctgcacgccgcggcatgccagggccatctgaatgtttgcaagttcttggtggaggaattggggggtgacgtgaatattgctggaaaagaagatataacaccgtttatggccgctgctgagtctggtgatgttcctacggtggagtattttcttgatcatagtggtgatgtaacaaaagcagatgttagaggatgcacagttctccaccatgctgctggcacaggatgctgtaaggtaacagagttcttgctttcaaaaggaatacctgttgacatagactgtggccttggaccaccactctttcatgctgctaacaatggcaaggataagacactgaagattttgttggatcacaaggcagatgcatgtagttgctactatttcttatttcctcttctttttttttttcactgctagtttgatagctagatgttgtttggtttccncttag

SEQ ID NO: 395734 - DNA, 434 bp, Oryza sativa
  unsure (1)..(434): unsure at all n locations
ggcggcggagagaagaagatggaaggcccggacagcggggcgcgcangacanagcaggccgtcgaggacgaggggaataccactccagtacctgatacggtccaggtgggcagttcaccaaagtatagagttgataaaaagcttggtaaaggaggatttggccaagtatatgttggccgccgcatgttagctaacggtccaggtgcttctnaggtatttagtgccagcctatttgtaaaactgtacttgtaaccgtggatggtattaacggttgaaaataaatatcgtgctttcgaatggtaggtggcgctaaagtttgaacatagaaccagtaaaggatgcaaccatgggcctccttacgaatggcaggtttacaacgccatcggtggcattcatggggttcctcgagtccactataaaggacgtcaaggcgt

SEQ ID NO: 395735 - DNA, 219 bp, Oryza sativa
  unsure (1)..(219): unsure at all n locations
ccccatcaacgccgctcgctcactactcgcgccgccgcttccgccgccgctccgctccagtcgcgtcggcttcccgcctcctcgccggcgagccgtgcctcgacgctctccctctgttgctccgccggccagcagcatgccgcgcttctgctcccactagctccngncaccgccgcccctactgagcccggtgagaccgtaaggcggtggtgtgcacca

SEQ ID NO: 395736 - DNA, 376 bp, Oryza sativa
  unsure (1)..(376): unsure at all n locations
ctcccgtctcgctcacgccgccggtcgccgccggcagcctcaatctccgctggcccttcgtcggctgaaggatcaaggattcaaggccctgaggtggtatggcgagccaggagaagcccacgccgcctcagcatccgcctccgcccccaccggcgccggaggtcgcgcctcgtgtgcgcgggttcggacgggcccaccgggcgacggcggaggtggttaccctaacccgccggaagnggcgatccccgacgccgcgacgctgcgggagagtggctgttcgcggtgcggcagtacagcaggtggtactcccacgcctgggggcaccgccatcctcgccggcgccgcttctttcggactnggcttggntcgtcaaggg

SEQ ID NO: 395737 - DNA, 431 bp, Oryza sativa
  unsure (1)..(431): unsure at all n locations
aacaccataaaatagtgtgtgatctccccacacgcacacagaagctagcagcaacaagcttcattcgcctcaccctctcccatcatatcatatgaggaagcaggattctttccaacctacaatatatcttttccctgatggctagctagctctttctcggactttctttctttctctctctctatccgtctctaccacatcgcaccacctaaccttctcgagctagacccacccacaacgagagggaggcaggcaggccgnccggagacatcaaattcattctcctcttctcttccaaacaaccacctcacttaccagnctaaaaaatccaatcaaagagaggtataagttggnttatatctgtgtatatataccatggcctaattgatgaccatggaccgtcgccggaggacgncggaggtgggccgccg

SEQ ID NO: 395738 - DNA, 427 bp, Oryza sativa
  unsure (1)..(427): unsure at all n locations
agcagcaatagcatggctttgaagccgggagacaagtgttctgcaaccaccagctgacagggcgttttctcacgtcgcatttgcgattttgcaggcgagagatttacccctctgcatccatccaccaacccgatcgacgactggtttgcttgcatctgaaaaatgtcctcttctaggtgaggtacagtacaattgtacagaataaagccatacaactcacgcttgatctggcccaattctacctgtctcctgctgatcgatggcggacacccacctctaacggcaccggcgccggcggcgcgactcctccgagattggcggggttcgagcagttggacgcgcgcatcaaggagctgacctcgtcgcagggggagttgctggacaggatccagaagctcaaactggaggtgcagaacttgnggttcaa

SEQ ID NO: 395739 - DNA, 505 bp, Oryza sativa
  unsure (1)..(505): unsure at all n locations
cgatcgncatcaccaactctcgatttgcgaggtgaggacgagctcgccccgggcttgattagctcaagccctgaaccccccagagcagcagcagcagcagcggtaggaggaggaggagggagaagagtgcgggcgcctcgggaagccggccgacagtggtacaattctgcatccgcatcgtatctccacatgagcaaaagggggcctggaaagcacgcgcttttgagaaattaggagaaaagggatacatgcatagcgagatcttgatcttggaatggtgtccagtcgaaggaacaccgggggaatncagcgggatgggtcgctccgggactggctgaaatctgcatgggcggctatactgtcccagaggcatactcggtctcccgagaggtcgaaatcgagggggctgagctgcaagagacttgcatttcatctgtttgtgtgcttcatggtcggcatcttcattgggttcatgccgttcttctcggtcgatgtctctcagagg

SEQ ID NO: 395740 - DNA, 460 bp, Oryza sativa
  unsure (1)..(460): unsure at all n locations
ctctttgacaaggccactgaagttgcacgattcccagaaatcatgaatgaatcaaaagtatttgtgccaaaaattacaaagaaacttctctgccagcacttcgaccttgacaggcgactgattgaatacctatctagatgacccatcatctatcccagctgtctcaaaaagaaagcgccaattcccttttgtcgacgaaccagatgaatgaaccggacagttgtgcggcagaatcacttcagggggtatcttcaagcttgttttattctatgagtttacttgtacccatccaatcaaggacagtatactttagggtagggtgggggtgggcaggattatgatttgcatcttactaccatatgtcacctcttgaattacgggatgttaccacacctgtggagatcttgcaatgatatgccaactatggtttccactgcnnnnnnnnnnnnnnnnnnnnnnn

SEQ ID NO: 395741 - DNA, 604 bp, Oryza sativa
  unsure (1)..(604): unsure at all n locations
cgccgcaaatntcaccactcgccaccgcctccctccccctgcctcagcgcggctccacgctcccttccactttcgccgccgggcgcggacggacgggcagcagatagccatggctgcctccgagcagcgcgtccgtcgccgtcatcatggtcggcgggccgaccaaagggacgaggttccggccgctgtcgctgaacgtgccgaagccgctgttcccgctcgccggccagcccatggtgcaccacccaatctccgcctgccgccgcatccccaacctggcgcagatatacctcgtcgggttctacgaggagcgggagttcgcgctctacgtctcctcgatctccaacgagctcagggtccccgtcaggtacctgagggaggataagccccatggatcagctggagggctctacagcttcagggattacatcatggaggacagtccgtcgcacattgttttgttgaactgtgatgtatgctcgagctttccccctgccagacatgctccgaggcccacaaaaagtatgggtggaatgggtactttattagtcaaataaggtttccgagagtntgaaacccttttngtgagttgtagattaccctg

SEQ ID NO: 395742 - DNA, 212 bp, Oryza sativa
  unsure (1)..(212): unsure at all n locations
cgctcgaaatccccgaatccaatccgaaccggcagcggcaccatgacgccctccgccctcgcccacctagcctccgcctcgccgctccccgccttctcccccaagcccagggcgaggcccggctcggcggcggggcccgccctgcgacggctggcggtggcggcgccggcgccgcggcgcttacttttggtcgtcgcccatgcngtaccagc

SEQ ID NO: 395743 - DNA, 298 bp, Oryza sativa
  unsure (1)..(298): unsure at all n locations
cccacgcgtccgccgcctcacccggcgacgtgccggagggcatctgccacctgccgcacctccagaacttcacctactcctacaacttcatcaccggcgagccgccgtggtgcatgcacgtcaaggcgttcgacgatcgccggaactgcatccccggccgccccgaccagaggccggcggagagtgccaattccaaaacacccaccacgtcaactgcgacgnattcaggtgcaagaagttcgtcctcccgtcggctccggcaccgncaccatngacgacgacgacgtctccttcaccg

SEQ ID NO: 395744 - DNA, 454 bp, Oryza sativa
  unsure (1)..(454): unsure at all n locations
atcatcgcctactccctctctctctctaaaacctcgctgtctttctctatctagcgggtcgcggtgagtcgtcgtcgtcgtcgccggcgatggggaagggaggcgggctgagcaagctgaggtgcatgatcaggaggtggcactcgtcgagccgcatcgcgcgggccccgccgtcggggggggagctggaggagggctctgcggcggcggcggggagggcggcgtcgttccacggcgcggacgaggtgcccaaggggctccacccggtgtacgtcggcaagtcgcggcggcggtacctcatcgccgaggagctcgtcggccacccgctgttccanaacctcgtcgaccgcaccggcgccgcgccgcgcggcttacctccccccaccaccaccggccgtgacggcggcggcgaccccccgganttggaacttccanaanctgcggtaaaatcttt

SEQ ID NO: 395745 - DNA, 470 bp, Oryza sativa
  unsure (1)..(470): unsure at all n locations
cgacgagtatcccgaccaccactctctctctctctctactctccctcctcgccgcgccgcgccgccgccgccgccatgagcgcgggctggaggacgctgctgctgcggatcggcgacaggtgcccggagtacgggggctccgtcgaccacaaggagcacatcgaaacttgttatggtgtgctttgtcgagaatacgaacactccaaagatgcaatgtttgagtttctcctccaatgtgcagatcaattgcctcacaagattcctttctttggagtattgataggtttgataaacttggaaaatgaagatttttccaagggtattgtcgatacaacacaatgccaatttacaaggatgcctttgcataatgaaaatcgtgacagaatcaggatattgctgcgntttctctgtggcctgatgtgnagaaagttgcctgccaattctattattgaacatttgagggactatta

SEQ ID NO: 395746 - DNA, 366 bp, Oryza sativa
gcaaacttcaggcacaagaaccctccccttaagcttacacattagctaccatcctgttgcttaccttgaaagggtcacatactacctatttgcatcaaaggataggaagaaccaaccaaatcttagctttgttcctagaattgatcgtcttctcttcttgctaagtggttagtaatatggcgcaatgcggcggcggcgacgtttcacgacaccggaagggtcaccttgacaccgtcgagagcctctgccaggggctactcgacgacgtcatgctcgacgacgacaagtgccgcgccatgttcggctacctccaggagttgcaggaccttgcaagcatgttttacgggggcttaggcggcgagcccc

SEQ ID NO: 395747 - DNA, 211 bp, Oryza sativa
gccgccaccaagaccgccgccgccaccaagtccgccaccgcccccaagaccaccaccttttccgaaaccaccaccaagtccaccgcccttcccaatgccaccaccaagaccaccgccgccaccaagtccgccaccaccaatgccaggaccaatgccaccacctaaaccaccacctttgccaaatccacctccagcaccatgtccgatgcct

SEQ ID NO: 395748 - DNA, 323 bp, Oryza sativa
agaacaccttctctctctctagctctctctctctctctaagctagccaagaagagagtgaagagctagcttagtgtgagtgtgttggtggctgctatggcgagcacgaacggcaaggaggaggtgtatgtgaaggaggggagcaagctctactcgaggatgatgtccaaggaggcggcggcggcggcggcgccctccgccgtgccgtcgttcagggtgtactacggcgtcgcgtcggcgggatccgtaccgttcctgtgggagtcgcagcccggcacgcccaagagctcgccctccaacgccgtgctcccgccgctcaagccg

SEQ ID NO: 395749 - DNA, 303 bp, Oryza sativa
  unsure (1)..(303): unsure at all n locations
ctctctcccaatcccccaccaccaccgccagccaccagccactgccgcggcgggaatccggttcccgcggcgacatcccccacgtctccgccgctgcaccggcaaaggcagctgcaccgcgacccacccgcgngntcccaatcggccccaagattaagattaaaccaggagagaccacccgatcgagtgttctctcactttcgccatggagcaccgactgtggtcaagcgatggctagcgacaagaacaaggcaatggttgagcagctccagaggtacgggattatcaagtcgagcaaggtcg

SEQ ID NO: 395750 - DNA, 403 bp, Oryza sativa
  unsure (1)..(403): unsure at all n locations
acgaactctccaagctcttcttcctcctgagcactctagcttcactgcattgctttgcagcagcaacagaaacagagagagagaaatacactagctgattgatccagtggaatttggtagctgtgatggcgaagaagatcgcgccggcggccaacctgaagcagatcctgaggaggtgctcgagccttgggaggaggcagcagcagcagggcgcggtgccgaggggccacttcccggtgtacgtcggcgagagcgggtcccgttccgggtgcccatcgcctgcctggagcacccggacttcctgctgctgcttcggaaggccgaggangagttcggcttcgagcacgacggcgccatcacgntttccctgccacgaaggccgactttnaaaggccttctttgc

SEQ ID NO: 395751 - DNA, 458 bp, Oryza sativa
  unsure (1)..(458): unsure at all n locations
aaggctataacactgaggtggtgaaggcagcccgactttggtacagctccataggaggagaaatgccactggagatcactcctaaagtaggtgacacaaaactaggatttgcaatcagccgtactgaggagggttttatctacatatcttcagtgttgcaagatgacaatgacagcgagacaccgtcaacacggtcagggatgcacaatctgttcaaccgggcaagagaggcatcgaaattgctggtcatctcaagggtgtccaatgagaaggtcctgccctggatgatctctagttcaggggcaatccgctgctttgacactctctcgatcagccaaaagctttccttgagccgatacccattgtggtccttccagctgcatctactcatgtgggagaggctatttaatcttgccgggggagnattcatcggccaaaatgnctttttttttttgaaa

SEQ ID NO: 395752 - DNA, 445 bp, Oryza sativa
  unsure (1)..(445): unsure at all n locations
aaatcaacggccgcctcggccgcaaatacgcgctcgaccaggcctggaccgattccgtcaaccgccgcgccgagcagcgcaaggagaagctcgagagcgagctcaatggctacaggaccaaccttatcaaagagagcatcagaatgggttacaatgacattggtgatttcttctatgctcatggccacctttcagatgccttcaaaagctacatccgtacacgtgattattgtaccacttccaagcatatagttcagatgtgtatgaatgtgattctggttagcattgagtttgggacaatttccacatgtttccaactatgttagcaaagcagagcaaaccccaagatacttttggaccctatcaattgttgcaaagttgcgagcacgctgcaggattaggctacttggcaacaaagnagtacaaacttgcggcccgtaagttt

SEQ ID NO: 395753 - DNA, 325 bp, Oryza sativa
  unsure (1)..(325): unsure at all n locations
ccgccctttccttccttattattcctcaccatcagctagctgagagctagggttcaattccctcttgctgctccctctctcccggccggcgacggcgacggcgacggcgaggctgttgggctcatcatcacctagctgaaaatcggccggcttgattaattccaagcttgcaggaggctaattgaggtgatctatatctccggggagagagaggagggagaagcgccctcttgctcatgcttgtctaatcatgagcagctcaagatgacaagcaataacagcacgaatgaggagctcggcggcgtnggcaggaaggcggccgaca

SEQ ID NO: 395754 - DNA, 396 bp, Oryza sativa
  unsure (1)..(396): unsure at all n locations
gatcaaaccactccccagtccccacactgaatagggtttggttacttttgtcgttctgtaggcgagtagatagctccgcccgccgttcgccggcgccgtcgccgtcgccgtcgccggtgcgaatttgagttcaaaaccgaaccgcaaattggcaggagaggagaagaggagagatctgaaggagggggaaacggaagtgattttctcggtcagatccgagggaggaagggggtatcttcgtgagctcgtctttggggatgttggcgccgaaccggctcatgtcccagcgtcgcggccgagcggcggcgggcgggncatcgcggncccgcaaaaattcccgagccccgcttcaagnttgggggttttatttgcccttcaaaccgggggtaaaaaaag

SEQ ID NO: 395755 - DNA, 456 bp, Oryza sativa
  unsure (1)..(456): unsure at all n locations
cggaccgtggccttccaagaaggctgcattgctgcattacataggtaggcagtttgtgtgtgcattgctgttgctgcagagatgggagaagctgcagaggaaggagcagtggatggaagctgccatggtgaagcagcagcagaagctctcgaggtgctcaggtccatggcaatggcgtcctcctcgctgacatgctccatcccacagttcccggcgaaatggcagtctatcaaggacaagctccggcagctctgctccggcctggattccctgtgcggcagcgtcggcttcggcgtcgacgtcggcggcgatgaggagaggcatggcgtgctggtgnagcttgtgncgtcggcttcggcgacggttgaggagcatccaagccatggccgtcgaagtgcgggcgatggcacgtacaagggttgggaggctccggctnaggagtgatttggacaacct

SEQ ID NO: 395756 - DNA, 360 bp, Oryza sativa
  unsure (1)..(360): unsure at all n locations
gcaagctgttcggccgccggcgcgaagaacatggagtccgtggtggtggccggagatctggccgctgcaccggcgccggcgacgccgatcgtggttcgtggcgctggtcgccgtcggcctgcacgcggcggtcgtgtgggcggggacgttcctcgcgtggctccgccgcgcgttcctccggcccgggaagggcctgtcccggcggtacggcgagtgggcggtggtcaccggcgccaccgacggcatcggacgcgcggtggcgctggagctggctcgccgcgggctccacctcgtgctcgtggggcggaaccccggnaagctgtcgggcgtctngaaaaaaggtccgcgcagagcccgggc

SEQ ID NO: 395757 - DNA, 416 bp, Oryza sativa
cccgtctctctcctcctctcacctagcgccgccgccgccgccgccgcgaacgcgaacgcgattggccgcagccgcagtgctccggagccatggcgcccgccgcatcctctcctaccccaccctccgcgccgccgtgatctcgggccccacggcgctaccggatgcgtcggcggctgcggcggcggcgccccagcagccaccgcctctggctggaaccctgtgggcgaggtccatggccaccttcacccgcacgaagcctcatgtgaatgttggcaccattgggcacgtcgatcatggcaaaaccacactcactgctgcgattaccaaggtgttagctgaggcagggaaggctaaagctgttgcttttgacgagatcgacaaggccccggagaagaaagcaagaggaatcaacattg

SEQ ID NO: 395758 - DNA, 521 bp, Oryza sativa
  unsure (1)..(521): unsure at all n locations
ggcagagacagagacaaggaggaggtcgtgcgagaccgcgagaggcgtgtgcgcgtgcggtngtcctctgccccttcccttctccccatctcgcctcgctcccttcccttctcttgcccaccgccaccgccccgcacccacccacctctgcctagattccgtctccaccatcgatctccctcccatccccggatgcgcaaggtggaaggcaagatcgaaccctaaccggcgacggaggaggagcggctccaccaccaccacctcgaaggagttgacaggcgggggatggattctgcagcgtgatttcatttgtggttggtacggaagccctaatgcagcatgtttggattgctcgtaggctccatttcctgctggttcgatgcaactgctttgtaactgttgattgatgtggtgatacatttcaaaacagggattagattctgtttatgcctatgcttcataaatcataacgatggcagttcaagaaaaacttccagtnatnaggaaaccaggagtacagg

SEQ ID NO: 395759 - DNA, 458 bp, Oryza sativa
  unsure (1)..(458): unsure at all n locations
tctgaacattacaagagacaggctaattctaacttttgtgccggaagggaacagtacatccttcgtcaacgccattgaagttgtgtcggttcctgatgatctaattactgattcggcgcaacttctgggtgttgggcagtatcttggactggcagcacagccattgcaaacattccacaggatcaatgtgggcgggccgaaggtcacagctgaaaatgatactctggctcgaacatggtttgctgatcagagcttcttcagaaatcccactgtcgctcaagcagttacttaccaagaaagtctgattacaaagatggatcagcaacgaaggattgatgcaccagacagtgtctacaatactgcgaggcggttggnttgggcagnggnccgcagctccacggcaaacatgacatggggaattcaatggttgatggccgtcaagttacctgattcggttc

SEQ ID NO: 395760 - DNA, 262 bp, Oryza sativa
  unsure (1)..(262): unsure at all n locations
cactactctnacaagcagcacgcatcgctcgctgtaggtgtgctcatggagaacggcggcggcgacggtcggcggcggcgtggcggttcggggcggcgaacccggcgatggaggcggcgaggtcgcagagcatccgcgcgctggtgtaccgggtgtacgcctgcttcgacaggggcgacgcgcggtccgtggcgccgctcggacacggcgaccccgccgcnttcgtttgcttccacgngncgccggcggccacgggcgccgt

SEQ ID NO: 395761 - DNA, 585 bp, Oryza sativa
  unsure (1)..(585): unsure at all n locations
ggctgcaagaggtctgaagaaggctttccgttggtttccgcattcccaatgaagatcatcatcacctggaggaagacgagggaagcagcgagaggcgcggcctgctgaggagccacttggaacaggttgtgccggtcactgatcttgaagacgaaccgaacgcatcatcatcagctgtgaaagaaccaaagacagtagcactgaaggtgtctatgcactgccattgctgcgcgaggaaggttgagaagcaaattttgaagatggaaggagtggtgtccttcaaggtggagctggagaacaagaaggtgaccgtggtcggcaatgtcagccccatggaagtcctggagagcatctgcaaggtgatgaagtctgcacagattttggcggctgcctagtggctagtacttttgttttgtcaacgtgtcatacatagtacatgtttatcggacgaattccgatcacgattgtaatctttaagagaaacgattcttcaattaaaaaagatgcaaatattaggaaatgacctaatacaaaataattagaagaggtaaggtttcgaacccnnnnnnnnnnnnnnnnnnnnnn

SEQ ID NO: 395762 - DNA, 369 bp, Oryza sativa
  unsure (1)..(369): unsure at all n locations
cattgtcccttctgtgcagtacttaagatggaaatgtggagtcctgtggcatattcttataatnatncttgagtactgtctgaaatggttgacttattcttatcataagtcctgtggcagacgatggtatatggaagtggttattttaattataatttcatccctttctttgtgtgcatatgcatagtttgtaatacccttgtcggagtgattccttgtaacctcattattaactaattataaatttctaactttcctggctataatctcttattttgacagctcttggcactaggancccataacatcaaaacacacccgtgaaacttacatagntatatttattacaacagtagntccatacttcca

SEQ ID NO: 395763 - DNA, 489 bp, Oryza sativa
  unsure (1)..(489): unsure at all n locations
gaagcaatcggacacggcggcggtgctctactcgtcgggcaccacagggcgggtcaaggccgtcgcgatcacgcaccgcaacctcatcgcgctcatgtcgctgcacgccgacaaccgggagaaggtcgcgagggaggccgccgaggcgccgaggagccgccgccgccggggtgacgctgctccccatccccctgttccacgtgttcgggttcatgatggtgctccgctccgtctccatgggggagacctccgtgctcatggagcggttcgacttcatcgccgcgctgcggccattcgagcgctaccgcgtgacgctgctgcccgcggcgccgcccgtgctcgtcgccatggtcaagtacgaggaggcgcgcgcggacctcttcttcctgctggtcatcggcatcggcggcgttccctaggccgcaggtcgccagcaattggtttcgttttcccaacgtggggtttttaaggtacgttaacgatngtttg

SEQ ID NO: 395764 - DNA, 498 bp, Oryza sativa
  unsure (1)..(498): unsure at all n locations
caggcaccagaggaagcagaactttcaaacaaaagtcgcttacacaagttgatattagattgtgatattaaacgtttgacaaaggattctttacaagaagagcatatccttgaaagtcttaaaccacatagcaatcttcgggagctacacattaatgggcgtgggggcactacttgcccttcatggttgggtgttaacttgtccatcaaaggcttgcaaactcttcgtcttgatggtgtagactggaacaaatttcctcctctagggaagttgttgttgattaatgagcatggtgaggaatccctggttttgtacaacaagagaggagctttccgaatttaaaaaggttagagcttgttggcatacagagactagcaaaatgggttggaaatgattcttgctttgtgttctctctgctaaaggtgctcatcataagngattgtccaggactcacgggngttgccattttcacattccacatgncctcgatcggngcaa

SEQ ID NO: 395765 - DNA, 394 bp, Oryza sativa
  unsure (1)..(394): unsure at all n locations
tttttttttaaaatctctgctgcgaaacggcgtagtcaaaataggaaattattcacacggcaagaggttggttaacggtgtccaaattaaactttcaccactaataacatgacagcacatcacacaaactacgatcatagtgtacagttgatggcaagcatagagaggaggaaccaagaagaaagcctacattagttctaacccggctaaaccctcctgcggatgcgcctatcactagcctccacgntctccacaggattcgctccttcgttaccaccgactcccctcttccggttgaatgacgcagcatcatcatccactactgcgacagtagctaacaagtcagatagcagggacgggcatgtctcctccaagtaattaaatccttctgtct

SEQ ID NO: 395766 - DNA, 520 bp, Oryza sativa
  unsure (1)..(520): unsure at all n locations
tttaatgatacaagaagcattgatttattagacaacgccccgcgaagttgtaattaattatatgacgggaaattcacattaacagctgtacacagccaaaccaaaaatacataatagtttgttccataagcatggtctgcatgacatgcattatcttattcaagataaaccatatgctaaaatgaagcacactagtctttatctactatatactgcaccagctccctgtctccatcgcaggttgttgtgggttcatccttggtcacatcttcaggcaatcccaagacgcttctttgtgtgttcaagcaaaaactgtgggtcctgtttggtttctgtataggcatgaatcttgttcacttcctcgatgaatttctggagggntgggtcggcccttggtgatatcgtagttctttataccagaaaaggatntctgaaaacctttncaataaaatggaaccatacggaatttccncccaagttggacttggccanggagggatgggccctccgttgacctttg

SEQ ID NO: 395767 - DNA, 406 bp, Oryza sativa
  unsure (1)..(406): unsure at all n locations
ccccttctcctcttcctcctcnctccttctccccgagcngcccctcttctcttcctccgatgggtcgcaagatcaaagtcaagaagaagaaggcatcgagcaagaaagccgaagcttcatcgtctagggtgccttctgccccagccaaggtatggcaacctggcgtggataccctggaagagggggaggagctccagttcgatcctcaggcttacaattatctccgagggtttaacattggctggccttgcttgagtttcgatgttgtgcgggatcaacttggcctcgtgccatcggaattcccacatacattatatggcgttgctggaactcaggccgagagggcttcatggaattatatcggcattttcaagatttgaacataaacgggaagaagggggaccct

SEQ ID NO: 395768 - DNA, 923 bp, Oryza sativa
  unsure (1)..(923): unsure at all n locations
agatcctcgaggagatcgacgacatcgtccgggcgcggaggagctcgccgccgggccggcggtggccgcgaacggcgccgacgaagacgacctcgtgttccacccggaggaggtgaagaaaatggagtacctccacgccgcgctttccgaggcgctccgctctacccgtccgtacccgtagaccacaaagaggttgtggaggacgaggtgttcccggacgggacggtgctgaagaaggggacaaaggtgatctatgccatgtacaccatgggcaggatggagagcatctggggggaggactgcagggagtacaagccggagaggtggctcagagacggccgcttcatgggcgaatcggcctacaagttcaccgccttcaacggcggccctcgtctgtgcctcggcaaggacttcgcctactaccagatgaagtttgccgcggcctccatcctccgccgttaccacgtccgcgtcgtcgacggccacccagtggcgcccaagatggcgctcaccatgtacatgaagcatgggctcaaggtgaagctgaccaagagggacaagagcaagctttgaaaccaagttgttaaacagctttggcaataaggctcatggtttggggaaaaaaaagtatggaggacatgatggaagcaatggtggcttccagatgtggtcggtgaagcagatgatgcgtgtgcactgtgcaaagctttcttctgcatttgtttcttcatttgaagtttgctgttatgtactagtatttgatctgtttcctttttgtccaaatagcaatatgtactgtagccaagtgtggtgcctatagaatttaatgtatatgcgtgtgaggaatactttaagatgatattactaataatttttagcaaggctgtttcaacacnnnnnnnnnnnnnnnnnnnnnnnnnnnn

SEQ ID NO: 395769 - DNA, 647 bp, Oryza sativa
  unsure (1)..(647): unsure at all n locations
ggagcgacnancnacntggacacacagtcacacaccatcccgctctctccatcgatctccatcacaagctagcaaaaccaagagccaagtcgagcaacacatcatacaatggcgggcatcaaccgcaagggcggcgcggcggcggcgtacgcggtggcgctgttgcttgcggcgggcgcggcggatgcggcggggtgcaacccgtcggcgctgtcgccgtgcatgagcgcgatcatgctgggcgcggcgccgtcgcccggctgctgcgtgcagctgcgggcgcagcagccgtgcctgtgccagtacgcgcgcgacccatcctaccgcagctacgtcacgagccccagcgcgcagcgcgccgtcaaggcgtgcaacgtcaaggccaactgctaaattaaactgctgctactactctactagtactaatgcttgtgcagttttgctactgctactgctagtaaataaacgtggttgccgctagctaggcagccatgatcattgtgtgcatgtttcagttcactgtcacgtatgtatggggctatatgaatgaagttctgctatgcttgctatctcttcaatgggaatcttgttgttatgttgctttgtntacacataaaagaaaagagttcagcaanaaaaaataaaaa

SEQ ID NO: 395770 - DNA, 652 bp, Oryza sativa
  unsure (1)..(652): unsure at all n locations
gaaaggagaaaaaaattgaggaaaaaaaagatcacttggagccttgaaaagcagcaaccaaaattgatgcttggggagcatccattggagaggccccaaagcaagaatctttttcattgatcactgctgtttgttatataaaagntcgatcttttggttgttatttgccaagatggagaagggaggtgcttcggtttccatggatgcggcggcgagcatggacatgtgggactgggaggtcctgcctgaccagctgagctcatcctcccatggcggcggcggccatggccnagaagttcttggtggtaagatcagcatcagctcttgggatttgtcacgaaagattgcgtctcattcttgttgcggtgatcgattggatgacagctcaagaaaccgaggaatcgaatcttgacgccgncgccgccgacatggcngtcgacgacgagttcaaaggacatcggcgtcgacgtggccgtgccggccgagaccaagacgagccaagaagagaccatggcggccaaggtaacagaggaggaggaggaggagccgttccagggctccgatgccaaggttgtcgacggcgacgacgacggcggccggcgaanaagaagaagangagnaggagaaggggaagaaggcgggggcggagttc

SEQ ID NO: 395771 - DNA, 469 bp, Oryza sativa
  unsure (1)..(469): unsure at all n locations
aaaaaaaaagaaaaacaagagcgctgtgtcggagacaccgccggaccaccaccgcgacccctcgatcccggcgatcccacagcattggtcggtccccgtcgatccggccgccgtggggtttggtctggtactctctggtggtggtggtggtggtcgccgtcgtgaacgattcctttttctgcttggattttttttgttgcttttggttgttgtgatccctgtggggctcgggttccggccggtgtaggggaggggagatggatttggagtcggtcaacccggagctcgccgagatcgacggccagatcggcgacatcctccgcgcattgcaaaatgggttccagaagctggataagatcaaggatgccaatcgacggagcaggcacctcgaaggcttcactgataagatgcggacttcaagaagcttatcaaggctttnagcgagttgtcaaagatatggcagaagtnc

SEQ ID NO: 395772 - DNA, 349 bp, Oryza sativa
agcgccgtcgcgacttgcgtctctctctccccaaagctcggagccccgccgcaatccgccgccgcgtctcgccggcgcaagtccagattagtgggtccacatatgaccttttctgggatggacattgctttaaaagcaagcacacactcttctacatcccagcaacactggttgcattcaaccaggtaccggtgtcaatatggtttgggttccactcacttgaatggaagaaagagaagtcctatggtactgtctgtaagagctgtttctgggaaatcagacttagatttccagtgatccttcttgggagggaaaggtatcaaggagcctggaataggcggttcaagtt

SEQ ID NO: 395773 - DNA, 742 bp, Oryza sativa
  unsure (1)..(742): unsure at all n locations
gttgcagaccatcacttacgtagccctgtgtgcaacggcgcaagtgcttgtacgctttcagctagcgtagcatggcttccagggcattcctcctcgtggctctaaacctggtcctcttcttcaccgtggccagcgcctgcggcaagtactgcccgacgccttcgacgccgtcgacgacgccatcgacgccgtcctacaacaccaagtgccccaagaacgcgctcaagttcgcggcgtgcgccgacgtgctgggcctcgtcagcgccgaggtcggccagccgccgtacgagccgtgctgcggcgtcctcggcggcctcgccgaccttgaggccgccgtctgtctctgcaccgccatcaaggccaacgtgctcggcatcaccctcgacatccccgtcaagctcagcctcctcgtcaactactgcggcaagaacgtccctagtggcttcatctgtgcttaagctacgtaacgcgcgtacggtgtaacgacgtgctagctttgcatgcatgcagcacgcatgcacgaacacatcgttcgttcttgagtgcctgcatgcatatcggtcgagtctttacttactctgttattagttctgaatgtagaactgcttcagatatcaatccagcgagttaactgtacttgatttgtttatgtttcttcagttaatcagtttctgtcatcatttggtcaattaatggaggttttgttctccaaggaaaaaaaaaaaaaaaaannnnnnnnnnn

SEQ ID NO: 395774 - DNA, 399 bp, Oryza sativa
cggacggtggtagtatgctgatagatgtgaaggagaattttgattctgcaaaagtggtggaagaagaaaaggctagtcccatagagcaaggaaaaactgcagcgcttgaagaacaagcgctcacgagagaatctgccatgctaaaccaagaagcaaaacaactggaagaactaacgaggcgtattgaagagcttgaattggaaaaggagaaattggtaaagggcgtgacagaagcagaaaacaagcagaacctgcattacacttctctacaagaagcacagagatctttagctgataaagataaggagctggcttgattgcaactcagtcactggaggagcttgggttcttgagcttgagagctcaaaggagaggattcaagaattgaagttgattact

SEQ ID NO: 395775 - DNA, 340 bp, Oryza sativa
  unsure (1)..(340): unsure at all n locations
cgaaaagatgggctcaggccagcatattcttaggctcttaaccatgagatcagaactacaatctagtgactactgagcaaattttgctggtctgtttaattccttcatggggaattaaaatggtcatttcaaacatccaccattgatggagatgcattaacgggatgaagcaggttatctcttctaacaaaaatttaaggaattaacgggatgaagcaggttatctcttctaacaaaaatttaaggaataacagaaaagataaggaatttacataggcaatgtcggccaattcaccttgacccaaggagggngcgagctccagtatttacctgggtgggt

SEQ ID NO: 395776 - DNA, 467 bp, Oryza sativa
  unsure (1)..(467): unsure at all n locations
cccacgngtccgagttctagatcgcttacttagccagagagagagagaggagagagagggaggagaggttctcgcggcggcgaatgattggggcgcatgtgtgggacaaccagatcctagctgctcatcgcgatacaaatcccatccccgtctcccccccaattccatcgctgtcctccaatctctcctctctcccaatcatcgtctcatctgcgcgccgtctctccccccgattcggcttcgtccccgccgccgtactgcgccgccgccggtgccgacctgctgntgctgcgggggagatctgtccgggtgtncggctgattcgctttccgtcgctgcagctctacaggtttcttcggcagcaactgtagtagaaaagnaagaggggaagattcgcagttcatatggcaaaacctgctaatagattggccgtagacggcaagatcaatgaggggntaggtcatatt

SEQ ID NO: 395777 - DNA, 562 bp, Oryza sativa
ggtctgtgagcgtggcaccatgtttggctacaatgatctaattgttgatccaaggaattttgagtggctgagagaagctaattgtccagttgtagctgatgtaacgcatgctctacaacagcctgctggaaaaaagcttgatggtggaggtgttgcaagtgggggcttacgagaactaataccatgcatcgcaaggacttctgttgctgtcggagttgatggtattttcatggaggtacatgatgatcccttgaacgcaccttgtgatggcccaacgctcgggccactgcgcaatttggaggagctattagaggagctgattgcaattgctcgagtcaccaagggaaagaagccactcaagatcgatctcacccccttcaaagaataatctggtccagttggtaggaaataatgggcacacttgcttggttgatagttttgaccagcatatatttacctgtttggatgaattgctcgttgtatgtcatacattcgtttatcggtgactgttctctgtattgtactgcctatacaataaagatcattgttttacccaaaaaaa

SEQ ID NO: 395778 - DNA, 509 bp, Oryza sativa
  unsure (1)..(509): unsure at all n locations
cgtagacgagctaccgaccaatccccatggagctgctgctgtaatccacacgacagagtcagagatctggggactaagtcccaagaacatccctccctccccttcccagccgggggaaatccagggcctgaaaacattggaaagtgtaactaagcagtaagaagatctgaatatgagtggaagacgtgatgattcagctaagatggcaaaactgaaggagctattgcacagaagtgaaaaccgtatctgtgctgactgcagcgcgcctgaccccaaatgggcatcagctaatataggagtattcatatgcctcaagtgttccggtgttcacagaagtcttggcacacacatttcaaaggttctgtcagtcacactagatcagtggagtnacaatgaaattgataacgtgttccaagtcggtggcaattctcacgccaatgctatatatggaccctcctgccgcagaccccagcaagccacatccagattntacccaggagngcggaant

SEQ ID NO: 395779 - DNA, 629 bp, Oryza sativa
  unsure (1)..(629): unsure at all n locations
cgtgcgcagttcgtagcagcgaataagcgagctccatttgattctttgattacaatggagtccaccaaggtctcggcgatgctcctgctcgccatgctcgcgctctcctcctccccgctcgccctcgcgtgcggctcgtgcggctccggcggtagcggcagtgcaccgtcgggcggcggcggcaggcgccctcgggtggtggtggtggtatcggaggagtcgtcggaggaatcgtcgggggtgtcgctcccgtcgtcggaggaatcgtcggcaaagttcctcctgtcgtaggaggagttgtcgggggagtagctccggtcgtcggtggaatcgtcgggaaagttcctccggttgtaggaggagttttcgggggagtagctccggtcgtcggtggaatcgtcgggaaagtccctcccgtcgtcggcggtttcgtcggaggtgtcgccccggtcgtcggtggagtcgtcggtggcgtcgccccggtcgtcggaggtgtcgcccccgttntcggtggcgtcgtcggaggcatcgcccggttntcggaggaatcatcggcggcggcaacggcggcggcggctacagccgancccgaacccgccgaagcgacanggcgggaggaaggcgttccc

SEQ ID NO: 395780 - DNA, 862 bp, Oryza sativa
  unsure (1)..(862): unsure at all n locations
cgatcgccatctccaattctccatcgatcatctatctctcacgatcatctcgccggagctgtgtagtggtggtgaggaggagaatgatgatgaggtgtggttggtcgtcggcggcgttggttgcgntggtcgtcatggttggtgtgatggtggcgtngccggtgggggggagctagctcgggtggagcacccgacgaaggaggacgggtcgctggcggtgctcgtcgttggcgactgggggaggaaggggcagtacaaccagacgttggttgccacccagatgggcgtgatcggggaggagttggctgccgacttcatcctctccaccggcgacaatttctacaacgatggcctcaccggcgacaacgacacggccagcttccaggagtccttcaccaacatctacaccgctgatagcctccagaagccttggtacattgttctcggcaaccatgactacactggagatgccctcgcacagcagagccccgccattcgcgccgtcgatagccgttggacctccattaacaagtccttcatcgtcgactcagatatcgcggagttcttcttggtggacacggtgccattcgtgcagaagtattggaacgagagcaagttcgactggagacaggtcgcccctcgtgacacctacctctccactctactcacagatttaggagacgcgatgtcgcagtcgaatgcgacgtggaagatcgtggttggacaccacaccatcagcagcggctgcgagcacggcaacaccaccgacctcgtcgccatgctnctccctgtcctcaagacctatggggctgacatgtacatnaacggccatgatcattgtttncagcgaatcaccagcatt

SEQ ID NO: 395781 - DNA, 278 bp, Oryza sativa
  unsure (1)..(278): unsure at all n locations
aattcggcacgagatggctcaaaccnatgggttactttgtccgttgcaggttgagctcctgctncagnttgcctcatgccagcatgcgcatggtgcggtctgctgctcatgtgttctcttctttccaacatttatcctactcgttgctccttaaggtacgtactgtggcagcgtgatgcccgtgnctcagcactnaggcagtgaagggnatggngcgcaggtacagtacgaggcgacgctggcntactngggnacantcgcggggngcncacgctcga

SEQ ID NO: 395782 - DNA, 412 bp, Oryza sativa
  unsure (1)..(412): unsure at all n locations
atctcatcgtccatggcgcccaaggtggcggtcacggaggcgacggggcggcaggcggcgtcgttcgtgctcggctgcgtggccacgctcaccgtcatgctgctcttccagtaccaggcgccgccggactacggccgcgccgccaggtcgccggtgcagttctccacctccagagaccagctgctgctgcactgcggcggcaatggaacggcgccgcgccgccggtgatcgcacgtggcggcgaggaggctaacatcaccggcaagcctccgacgactgctactgctgtcgccgaggagcagccgccaaccaagcctcctgcgacctctactgcatcttcaccaactcatcatattncagcaaccagtacagatctttgaagaagagggcgncgagttccgggggttttcgg

SEQ ID NO: 395783 - DNA, 438 bp, Oryza sativa
  unsure (1)..(438): unsure at all n locations
caataccctgtgctcagataggaggaacaaagtttttcttgtcagtgggagacgcagggacaaattgggagaatggttttcctcttgtccagatctgggcattgcagcagagcatggttacttcttaaggtggactagagacgaagagtggcaaacatgtacccagacctctgacttcgggtggatggaaatggccaagccagtgatgaatctgtatacagaagcaactgatggatcttacattgatcctaaggaaagtgctttggtgtggcatcaccaggatgctgacccaggatttggatcctcccaggcaaaggagttacttgatcatctggaaagtgtattagcaaatgaacctgtttctgtcaaaagtggccagttcattgttgaagtcaaacctcanggagtaagcaagggagtagtagctgagaggtactc

SEQ ID NO: 395784 - DNA, 590 bp, Oryza sativa
  unsure (1)..(590): unsure at all n locations
cgccatcgctcgcagatctctctcgctctcgctctagctctcgctcgangaggagatggcggagatcgtggtggcgccgcgggccggncgccggcgggtgaggtggggcgccgcgccgccgcaggagctggtcgagaggctcaaggactacngccaggagggcgccttcgcgctctgggacgagctcncccccgaggagcgcgacttcctcgtccggganatcnatagcctaagatcttgctaggattgaccggatcgtccgatgctcgctcagatcacaaggtgttcctttgccagccgtcgagcctgtgccggagtcgagtgtctcgaccgtcgaagatagaactcctgaggacaagcagaggtggtggaagaggggcttgaaagccatttcanaggggaaattggctgttgtccttttggctggtggtcagggaacaaggcttggnagttctnatcctaagggatgcttcagcatcgggcttccatctggaaagtnacttttccaactttcaagctgaacgaattttgtgcatacagaagctggcttgctcagtccacttgatgggnacttcacaaatacactgggt

SEQ ID NO: 395785 - DNA, 260 bp, Oryza sativa
  unsure (1)..(260): unsure at all n locations
agcaacaggcgtttattgagtctcacgtacttacgtagtgtagtagtgatagcagtagtagcattnatggngtcgtcgtcgtcgtcatggctcgtgctgctctcagccgcgctctgcatcggcgcgctcccggcgtcgcacgccgcccgccccttcttcgtcttcggcgactccctcgtcgacaacggcaacaacaactacctcatcacgtcggcccgngccgactcgccgccgtacggatnttacacccccgaccaccg

SEQ ID NO: 395786 - DNA, 495 bp, Oryza sativa
  unsure (1)..(495): unsure at all n locations
tctcttctccactcatacaccaccacactgcacacacacccaacaaagatgaagcttaccatgaagctttccatcgccctggcctgcttcctcttcttcctcgcggcggcgaccaccgcctccgcgcagtgcacgttcgagatcctcgtcaagaccgacggccggaggaacgccggcaccgacgcccgcgtctcgctgcaggtgcgcgccgccagcgggccgacgctgacgatcaccaacctggagtcgtggggccagatggccgccggcacgactacttcgagaaggggaacctcgaccggttcaggggcgccggcgcctgcatgccgtcggagccctgcaacatggtgctcacctccgacgggtccggcaacaagcccggggtggtacgtgagctacgtgatggtgacgcagctcggggcagggggagcctcccgtcgatgacgcaccggtgggcggtggatnaagtggctgggccattgacgaggcaccgca

SEQ ID NO: 395787 - DNA, 486 bp, Oryza sativa
gacgattttatcgatgaacctgaaatagacatggcttgccacttgagattatttccctttactcaactactagtattggttctgtacaaaatcgccgccgtaggggcagatcctgcaaacgcagaactatccacaaagatcacccaacactctccattgtacaacccacagcctcaagactttccaaacgaggagctctaccgcaactatctagtcatccagcggttcaagaagacaatcacttccgaccccaagaacatcaccgccacctggaccggccatgacatctgcggcaacacgacctacctcggtttctactgtgcagcattgcctgggcgtactaagaagcccacggtcactgtggtgatctttaacggttatggcctgcgtgcaccgaagctggaaggatttattgaccatctcccgatcttgcacttttccatgctgctcacgcttcggtggtgacatccctacctaaaaggctgg

SEQ ID NO: 395788 - DNA, 304 bp, Oryza sativa
ctacgcctcacctatctagggttttggagcaaaacctagccttcgatcccagcgcgcatggacgtcgagggcgaggtcccggccgcggcggcggaggccgtggccaacggcctcggcggcgcggagccttccccggcgccggtgtccgcggagcagctggacgtggaggcgtacgccgcgcagtacacggggcggacgcgcctggcggcctcctgttcatcgccgagaggtgcggggtggaggcggtggagctcgaggcgctgcggatggcgtatgacgagatcaagcggggggaggacaacat

SEQ ID NO: 395789 - DNA, 412 bp, Oryza sativa
  unsure (1)..(412): unsure at all n locations
ctgtgtatgtagtgatgtactggatggaaaggccaatcttcgaaagttcatcgaagaagtttgcttaaccctcgagtggacagtgaaccaatatatttattgtgtcgatgctctcgaaactgtggattgcatcacaaatgatttcgatggaaatgtatctcttagatcattaaacatgcaggaaaaacaacaaatgcaaagcacaaatcccgaaagtggctgtaggagttcaacaagaggtacaggaagaaccgtttctgatccctggtgaccccgtaggaaaatcattctcagggttcagtttgtcacttgtaagcttgataaggactgctggctgttaggcaagatcatggtgataattgtcaagnaagcagtcagtacattttaaagaggaagtgtacggcttgttggg

SEQ ID NO: 395790 - DNA, 432 bp, Oryza sativa
  unsure (1)..(432): unsure at all n locations
tcgtcttcgccttcgtcttctccatccaccaccgcgctcggcgaggcgatccaccggcggcgaggagaggcgcgcggcgagggccggagatggcggagaacccgcagctgttcgggaacgggatgctggtgcccttctacggcgagatgttcgtcctcgcccgcaacggcgtcgagttccacgtcgacaagatcccctcagctcctggtggtcatgcgaaaacaaagggcacaatttacctgtcaaacataaggatggtcttttgtcgccagcaagcctgttgggaacttctttgcttttgatatgcccttgttgtatgtgcatggtgagaaattcaatcagccaatatttcactgcaacaacatatcgggtttcgttgagccggttgtacagagaccagaacaggcctgtactggnccaaatttaagattt

SEQ ID NO: 395791 - DNA, 387 bp, Oryza sativa
gagaacccacacctccataacttcaatttccaagttatatatatataaaaaaggcaatggcggacgatcctctctccaactccaccaccaacaacaagagggcagaggggatccagctccagcacggcgactgcgagagcgagagcactgcgcccttgctgctcgcgccacacgagtcctaccgcctctccgccgcaatcctccccttcctatttccagctttgggcggccttctctatggctacgacatcggagcaacgtctggtgctaccatatcgctcaagtcatccaccttcagtggcaccacatggtacaacttgtcatcgctgcaaaccggccttgtcgtcagtggctcactctatggtgctctcatcggttccatctttg

SEQ ID NO: 395792 - DNA, 374 bp, Oryza sativa
atgactaattggcagtattcagaatccttgaaacgatttcagcatgctttagaggcatgtggtgtcaacaaaactctaatcaaacgtggagttaaagagggagacacggtagttgttggtgagatggaaatggtttggacagatgagcctagtaagaccaggtcatcaaagacaatgaactcaaaagatgactctgtcagatggcctgaatttggctagatcaaggctcaagcaatggttctgtgtcgcagcagaggcgattttcactgaaatgtttgcacatgcttacaataaaatgctgcactatgacaccaaaaaaactactagtcatcacaccagctagttacacccagcccaaataaaaggaatactat

SEQ ID NO: 395793 - DNA, 419 bp, Oryza sativa
  unsure (1)..(419): unsure at all n locations
tagaagctgatggcgatcaatggtatgaactcaaaggagcattcaagcttgaaaagaagccatccaaagttactgcatatgttcagggaccgcctccaggtgttgatctcagagttatggggttccaaatttatgctgttgatagaaaagcacgttttgaatatctgaaggagaaaactgacaaggtaaggaagcgtgatgtcatcctgaagttccagggatcagatgctgcaaacctttttggttcatctatcaagatacaacagaccgagaacagttttccatttggttcatgcatagggagaagtaacattgagaatgaggatcttgctgatttcttcatgaaggaactttaattgggctgtatttgaaaatgaactgaagtggtactggacagaggctgacangggggctaaatt

SEQ ID NO: 395794 - DNA, 484 bp, Oryza sativa
  unsure (1)..(484): unsure at all n locations
gagccttatnnncaatnncnctcgatcggttcgatcccatgaccatgtgagggggatgaggccggagcggactctgagctccggcaagccgatgccgcgggtcggcatgggcacggcttcgttcccgctcggcgcgaccgacccgtcgacggtgaaggatgtcgtcctgcgcgccatcgaggccggctaccggcacttcgacacggcggccgtgtaccagacggaggccatcctcggcgacgccgtgggcggaggcggtgcgcgccggcctcgtcgcgtcgcgggacgagctctacatcacgtccaagctatgggttgcccacgcgcaccccggccatgtcctgccatctcttaggcgtgcgctccggaagatgcaaatggagtatctcgatctgtacctgattcactttccggtgagcatgaggttggctgaagatccggagtcaatgcatattcaaggatgacccttgtgatgatgacatga

SEQ ID NO: 395795 - DNA, 320 bp, Oryza sativa
  unsure (1)..(320): unsure at all n locations
gcgctgataaaaataacgcagctatatatactgctcatcttttaggcatataaatatatctacacgttcatacagctcatctctttatgtatccaacgccaaatcaaagtatatatacttatacatatacgtgcagacaaatcaaaacacggtgcggggggaggatttgccggtgtggcagcaaattgaacagtcaggagccacacgagaatgatttaatttgatggtgatcgatgaccatgacgacgacgacgacgacgtttttaaattaacctgtgaaaagggaaaggagaaagagaaggacgncgncgatgacggcg

SEQ ID NO: 395796 - DNA, 970 bp, Oryza sativa
  unsure (1)..(970): unsure at all n locations
cccacgcgtccgctcgtcctaaatggcgcagatcgtcgctgtcattgggnccatgattgtnttcaccgtcgtctacttcaggaggaggaacgtgtacgatcttcaccatgctgtgctaggcattctgttttcggtgctgattaccggcgtgctcaccgacgcgatcaaggatgccgtcggccgcccgaggccgaacttcttctggcgctgcttccccgacggaatcgcggtgttcgataacgtcaccacgggagtcatctgccacggcgacgcgagcgtgatcaaggagggacacaagagcttcccgagcggccacacttcatggtctttcgccggtctggggttcctgtcgtggtaccttgccgggaagatcacggtgttcgaccggcgcgggcacgtcgccaagctgtgcgtcgtcctcgcgcctctgctcgttgcggcgatggtcgccatctcgagggtggacgactactggcaccattggcaagacgtctgcacgggaggcgtccttggattggtggttgcctctgtctgctatcttcagttcttcccggctccttcagatgagaaagggttctggcctcacgcgcactttaggtacatcaccgagaggggaagcgagaacccaacgcagcaagccaccgaaccactggacgccatggaaaccggtaggggaggccaatgaacaaggtgcaagcaagaccaatcttgtgtatataaggccataatgtacagctcctcctcaaggcacgggaggtaatcgtcgttagtttgtaaatactttggcgtgggccaatggtaccgactaacttgactactgacctgacgcaaataggtgttgtttgtacatactgtatgtattttcaacgaagtttgtacatatgtattggttttgcttacttatgtactcctatgtattttaaataattttagtgtctaaaattccgttctaaaaaaaaaaaaaaaaaaa

SEQ ID NO: 395797 - DNA, 462 bp, Oryza sativa
  unsure (1)..(462): unsure at all n locations
tttttttttttttgtatggagtttttttttattaattctttttgctgtttaaactgctgctatggctagttcggtctatgaccgagaccgaaccgaactaaccgaagatcgaaatgctcggtcttgagtttttttaagaccgatcggtcttgtggttgggaagaccgaatttttcagaagaccgaggaaccgaaccgaatttntcgattagaccgaatgcccacccctagatatgagaaacaagctgcgtctgattttccggaggaatcacgctcagacgaaggacgctggttcggtttggatgaagaacacgcccgtgggccctcccggcggcgacagggccagtgcgacagggccagccgcgccttcctccaccgtcagctccccggtgccgagggtcatgtccgttttgacgtacccaggatgcacgcatttgacgcgcaacggcgaggaggaggagga

SEQ ID NO: 395798 - DNA, 515 bp, Oryza sativa
ggcagaaccgttgagggctatggtgatgggagctcctttggaagatgctcgccatcttgcccaaagatacgacaggatgcgtcaggaagccgaagcacaggctattgaagtctcgaagcgccaaatgaaattaagagaaacatctgggaatggtgatatgatttcaagattagaggctgctgaatcaaagttgcaagagttaaagtcaaacatgggggttctaggcaaggaagccgttgcatcaatgaccgctgttgaagctcaacagcaaagactgaccttgcaacgactaattgcaatggtcgaatctgagagaagttatcaccagagggttctgcagattcttgatcaacttgaaagagagatggtatctgagcgccaaagaattgaaggagcacctcctccagctgttgagagttctatgccaccaccaccttcatatgaagaaattaacggtgttttcatgaggaatccaacagtcgcttgaattggtggaactgtggaattcttcttgg

SEQ ID NO: 395799 - DNA, 745 bp, Oryza sativa
ggcgagacgcgcctcggttttatccgcgtccctagcttagagagagagagagagagaaagagagagagaagggcgtttgacctgtgaccccggcggcggcggcggcgacgacgagcgcgccatggcaggttcaccaccaaagccgtgggaacgtgctggggctgagggaacttctggcccagcaccttttaagcccccatctggtggcaccactagcgatgtagttgaagcttctggtacagctaaacccggagaaaccgtcaccgcgacagagaggaacctctctgccaatgtaaataaccctgtctcgaggcctatgccacaacgtccgtggcagcagacatctggctatggaaatacttatggaggttatggatccaatatgtacagttcgtacggtggaatttggcaatacctatggtagtggtggactctacggaaatagcatgtattctagttatggtggaggttatggtggtagcctttacggaggttctgggatgtatggtggaggcatgtataacagtgggttgggaggctcttatggtggttacggcatgggtggcatgggtggcatgggtggtatgggcggtattgggcatgggcccttacggtaaccaggatccgaattcatttggccctcctgcaccaccaccaagtgtctgggtgtccttcctacgagtgatgcatggtgttgtcaatttcttttgggcgagttgcattccttgttgaacacaacacacaa

SEQ ID NO: 395800 - DNA, 477 bp, Oryza sativa
  unsure (1)..(477): unsure at all n locations
ggagcgctcgtccatcgcagcgagcgaccgtcggcatcacaagccatctccctctctcttgtcttgtgatctagctcccgtcgcgatcattgtgatataggcatggccaggtcatcgtcgtcgctgctcgtcctcacggtcctggtggtggccgcggcggcgtgctccactacggcggcggcgcgcagtcccggcggaggagaagaagacggctgcgccggtggcggcggcggacgtgaagcagccggagacgttccacgaggggacggtgttgatccctgggctcgggcggttcgagctcggcagcacctacgtgccggacatcaccggagtcgaccacagcgtcccggcagccgagcacgggcagttccttcccggcgccgacgacacatgggtccccaaccccgggtttgaggtgccaaacccctttcagcccggttcgttttttcctgaataacccgccggttngcgttgttg

SEQ ID NO: 395801 - DNA, 388 bp, Oryza sativa
gacgagccagtagtagccaatggcttccctcctgctgctgctgcgagcaatcgtcatcggcgtcgacgtcgaggtagaggcagctcgttcagcggcgcgagggaggcggcggaggaggcggagaggtcttgttcgaagcatccggcgatcccccggcgatgcggcttcttctccgacaacgatgtggaggaagaacggtggctggtctcatgcctgcggtggcctggagtcgatcgccaggcagcttggatgcaaacgatctgatcaaacttatccagacaagcatatttttcaggataatatatatagccgtgtgcttgcctatcgaatggagatttgctggaccttccctattaatgtaattctgtgtgaaaaaaaaaaaaaaaaa

SEQ ID NO: 395802 - DNA, 407 bp, Oryza sativa
agaaaaatgtattcgcttacatgggctctgcaatatgttaatctattcatgatcaacactggccttatcattttagctggtcaagccctgaaggtacagagcaatcaccatcacccaactcttcttatggtgaaatgccgtgttatttcataacaagagttgggcccttctattcattatctcagtatctaagtttagatttttttttctttttgggaatacacatgttgaatttcactgggaaatctttttccctcctggactcatttgtgaacttcctttctgcaggcaatatatgtattattttagggacgatggaggtctaaagctaccctactgcatagcattatctggggtttgtctgtgctctttttgcctctggaatcccttatctgtctgctctcagg

SEQ ID NO: 395803 - DNA, 412 bp, Oryza sativa
  unsure (1)..(412): unsure at all n locations
cattagcttagctctgtgaactgtgattctactccacttcgaagtccaaagcctctgaggcagaacgccgccatggcggtggtgaggcagctgctggtccacaggctctcctgcagtggcctgcctgcttcccgctgcaagaccagttgctggagcagcggcgagaggctccctggcttgaagtcaagggtaaggttgttggccgtggccatcaagccaccgcgcgccgccgcggggaaggacgagattgtgcgggcggacgacgacgacgacggcgtcacctcggcacggtgaagctgcccgccaacatcgacatanctcggttcgagacgctgctcttccaggttagctgcatgaagccatgaatgaatttttcagcctaaccgatgcgtattcttaatnaattccgatg

SEQ ID NO: 395804 - DNA, 415 bp, Oryza sativa
acttttctggagatggtatgtcttctggtgtaagaagctctgaaccatgggactcgtatgcttattctggatcaagaagtggtatgaatgccaggagagggttggactctgtttcatctgataacagggtgcctagaaatgaacgaagcaatgatcaagcaggacctaggcgaggatgggacaaaggacagggtccatttaggtttggggagggtccttctgctcgaagtgcatggcgagcctccaaagatgaagcgacactggaagctattagggttgctggtgaagataatggaacttctagggcagctgcgagagttgctatccgtgaattggatggggaaactttgaatgatgataatcaaggggatgaaagaggaccaatttgggagtcttggactcgtgcaatggatgc

SEQ ID NO: 395805 - DNA, 356 bp, Oryza sativa
tgaacaagtacaacatccttgctccctgctaccatcaccctgaaattcaagaattagagttcaagaacagcagcttgccatcaagttttagaaagctaggtgagacagagaagcgatttccagtgagaaagcgaatggctggccgctcttggcctctccgtgctcctgtgactcgtggacgcatgacgatgtggcctgaacttggtggtagatcactcccctgcacgagcgacgaacttgctaatgcatggctggatgatgaagatgtaggacctgccattcacgcgggacccgaaagcttaattggggcatgggggactgtatacttcaggaatagagtcctaccatggttcttg

SEQ ID NO: 395806 - DNA, 442 bp, Oryza sativa
  unsure (1)..(442): unsure at all n locations
acgcgtccgcccacgcgtccgaaatggggagaccacctgtagttcctggatcatatataccaggctcatacaccccaatgatgctctcatctggaatgatcccattgcaaggatggagcccttatccggcttcggtaaaccctgtagtgtcaggtggagctcaacaaaatgttcaagctggacctgtgtacggcatggggcaccatggatcttcctctacaattgcttatggtggtccttacgttccatatgcttcctcaactggacaatcaagcaacaatcaacaagaacatggattccctgagcggccagggcagcctgattgtcaatattatatgngaacaggaggttgcaaatttggngntacatgtaaatatcatcacccccgagagttgagtgcacctaaatcaggtnttatggccaatcccttggcttccatttg

SEQ ID NO: 395807 - DNA, 641 bp, Oryza sativa
  unsure (1)..(641): unsure at all n locations
gctcgttcagtttgaagactttgccaaccacaatgcttttgacttgcttgcaaagtacagcaagagccaccttgtcttcaacgacgacattcagggaacagcatcagtggtcctcgcaggtctgattgcggcgctcaaggtggtcggtggaactcttgcagatcacacttacctgttccttggcgccggtgaggctggaactggcatcgcagagctcattgccctcgagatgtcaaagcagacggagattccgatcaatgattgccggaagaaggtgtggctggtggactcgagggggctgatcgtggagtcgaggaaggagtcgctgcagcacttcaagcagccattcgcgcacgagcacgagccggtgaagacgctgctggaggccgtgcagtccatcaagccgaccgtgctcatcggcacttccggcgtcggcaagacattcacccaggaggtcgtcgaggccatggccgccttcaacgagaaacctgtcatcttcgngctctccaaccccgacgtcgnactcggaattcaccgcggaggaggcatacaccttggaccaagggaagtccggttttcgcgagcgggagcccgttcgacggggttgaatacgaggggaaagacgtacgttccggggaatn

SEQ ID NO: 395808 - DNA, 491 bp, Oryza sativa
  unsure (1)..(491): unsure at all n locations
gatgggaagatcatacctcagctacaagaagttgaaacctggttggaaatcgcgaaaaagctaatgccagatggacggatcattgttaactgtggtggagctgatgctgctgtatctcttgctaatgatacgggcctttcgtcctgggttcagaattccacaattaaggcactctgtcctgcatttccggggcagctcaactggaagagactatcagagaaagagagtgtaaattacgttgcattgacgggtcctcttccaaacttggatgagtggtctacctcagttcctagtgagatgagcacaaaagtgaaacagtgggtaccttgcgaacttgcttgaggttgagaatgaacaatttcttctagatgtaccctatttgcttcaacaacttgtgtgncccctctgttgatggctctctttctgtgtgtttaggcatatgctctgatgaacactgaaatgtcaaggatagagtgnaggtaatgagcaca

SEQ ID NO: 395809 - DNA, 391 bp, Oryza sativa
cagaagaaacatcttctgcccatcgcaccaccagatcaacaaaatcttctgcccatcgcaccaccagatcaacaagggcatgcgaaggagaatgacagaaaagttgatggggtaaaagagataagcaatcctctcgacattgagatcagagcaagcttgcttcagcaaatcagggataagtcaggtcagcagaagctgaatggacatgaaaagtcaaaagcagtaggcaatgatactaaaaacttggatgaaagggaggagttgcttcaacaaatcaggagcaagacattcaatttaagacggacaaatgcatctaaggcaaacacctcatcaccaaccacttgccaacttccagcgttgtagcaatcttgggaaaggcaaatgcaatccg

SEQ ID NO: 395810 - DNA, 808 bp, Oryza sativa
  unsure (1)..(808): unsure at all n locations
aacatctaaatcccacgaactatctcttgcatatgatgaggcatccttatcaatgcttgatcctcctctggtcctccaggaatttgtgaaccatggtgggatcctctttaaggtgtacatcattggtgaaactatacaagttgtacggaggttttctcttcctgatgttaacacttatgacttattaaacaatgttggcgtctatcgatttccaagagtttcatgtgctgcagctagtgcagaccatgcagacctcgatcctcatatctcagaacttcctccaagaccactcctagagaaactgggaaaagagcttcgtggaagactgggtttaagattgttcaacatagatatgatccagaggacttgggaccaaagatcggtactatataattgacatcaactacttcccagggttcggggaaatgccaggttatgggcacatattcaccgatttcttgctggatcttccgcaaagcaagtacaagaagtgcttaagcggcggctgaagtgcaaagagtcctgctgaacattaacaaaatggaatgtaacggtctagcagtcagtgtacatatctcggagaaataagtttaatcccaaggctttgaggaagagagatttagggtgtcttcccagaaaatggtggcacttaccggattagagaagagatgaaaaaatggatcgattttctaatgccgagtgcttgtataaatcactaacactgaatgttcccagcgtgccttcgtcaaggcttctgtctcaataatttcattntctttttnatgnnnnnnnnnnnnnnnnnnnnnnn

SEQ ID NO: 395811 - DNA, 378 bp, Oryza sativa
  unsure (1)..(378): unsure at all n locations
tacttcctcattgcagcttacatcgaaattcaactggcgcaagtactgtgaatggccagacagtatgatctggctagctatctcatttaggccatggagggattcatgtctgataaggctgaagctgtcataatcgaacatgggcatcgcattttcgaagaattggtggtctagattttctggatcaagcccattgtcggtcatggtttgcgagtcggtgaggaaggaagaagatgtgacgctgcttgcggtcatcatggtgccaaggaggaatgaagctgaaccaaggaaattggagggcgtgaaggagcggacgggagtatgcatacgtgatgcggaanacaaactggattacatacaggctaggggtggggccat

SEQ ID NO: 395812 - DNA, 457 bp, Oryza sativa
  unsure (1)..(457): unsure at all n locations
gaggaaggtgtngactcgtcgtcgggggcagcggctacctgggccagcacctcctcgccgcgctcgctgccggcggcgaggtcgacgtcgccttcacccaccaccgcgacaccccgccgcagccgctcctgcacgcgctccccgggcttcgcgccttcagagtagacctccgctccggcgactggcctccgcgccgtctccgagtccttcggccagccgcatgtgattgtgaactgtgctgcaatctcggtacctcggcaatgcgaaacggatcctgcttgctgctatggctactaaatgtaccttcatcacttgtcacttggttgttaagctttgggaatgacaacactcttcttatccatctctcaacagatcaagtttacgagggagtaaaatccttttcaaagaggatgatgagaccttgccagtgaacatgacggnaaattaaagttgtgaa

SEQ ID NO: 395813 - DNA, 488 bp, Oryza sativa
gaaaacggcacaggcacaagcgagccagcgatcgagcgggggcggctcctcctcctcctgcggctgcgtctacgagcgcgtccatggcgtccctctccccttccctccacctcccttgcaattcaaggactggctttgctggaaagacacaagggattcgtcttcgtgttatccctgctggcagagttggttttgtcagaacaacagtggagtgcaaagaatctagaattggaaagaagccgatcgaagtgccatcaaatgtgaccctcacgttagaggagcagtttattaaggctaagggtccattgggagaattatcactaaactatccaggtgaagtaaaagtggtgaaagaagaatctggtaagctgagagtttccaaaacagtggagaccaaaagggcaaaccagatgcatggccttttcaggaccctgacggacaacatcatcgtaggggtatcaaaagggtttgacaagaagcttcagtta

SEQ ID NO: 395814 - DNA, 270 bp, Oryza sativa
  unsure (1)..(270): unsure at all n locations
gacatatatatctatataaatttattaacatcaatataaacatgagaaatgttagaatgacttacattgtgaaactaatgaagtagtattcaatttgatttgcttggttcgaagttagaatacgtaggtttcagcatttatttttcttgcaggtgaccttcttgagatggggcggtatagtgttagggacggcgatgcaccatgccgccgtcgacggccatagcatgttccacttcttgcaaacatgggctgctttctgccgggacgnga

SEQ ID NO: 395815 - DNA, 400 bp, Oryza sativa
  unsure (1)..(400): unsure at all n locations
agtgtcgcttcgtcctcactctcactctcctccactgagctaagcttagcttagcttagcttctcctccccgcttcttcttcttgcccatcccactcgccggccgccgccaaccggagaggaggcaagaacggtggtgcgacaatgcagccgttgcggccgagcccggcggcgggcgggtgggcgggggtcgccggggtggggcccaccaccgtcgacgaggcctccatggagcgganaaagagcttcgtcaaggcactgcaggagctcaagaaccttgcggcctcagctctactccgcctccgagtactgcgagaaatcctacctccacagcgagcagaagcagatggtgctgggaaaanctgaaagattatgctgtacgagctgtcgtcaatgctggt

SEQ ID NO: 395816 - DNA, 390 bp, Oryza sativa
  unsure (1)..(390): unsure at all n locations
gaaaaacctctacagcaagagaaaccagatgagaattttctcatctgatttctcttgctgcagcaagacgaaccagctgagaaaattctgcagcaagagaaaccggacgagaaaattttgcagcaagataaaccagatgaggggcctttgaatgaagagatgcctgatgaaaaactgatagagaagccaattgatcagccaggtgatgaatcaattgaaaagccagctgatgaaccaattgaaaagtcagctgaccagataactgaaaggtcaattgagcagccagctgaaagagtaactgaagtgccaatccaagaaccaactgaaagggtaactgaaactccaatagtaaagccaaatgataatgatgttgaggnacacactgataag

SEQ ID NO: 395817 - DNA, 439 bp, Oryza sativa
  unsure (1)..(439): unsure at all n locations
tttttttttttttttggctactaatttgactttattacatagatgcaattatgcatgcatgacacttaatgacacacacacgctagtaagactgatttggtctgcacctacgtactcgatcctttctatttcagttccaattcagagatgaactagttggctagcacagatcaatatccttattaccaaatttcaacatatataatattgtgaatctgtgatatgtgtgtgtgtgtgtatatctccatgcatgtacacatatgtactccctctctgttcttttatgtacgacgttggttaattcatttttgaaataattaacgttatatattaaagaagggaatagagaggtgtaaacttttaatttgtggagatgggtgggaaatgaattaatccgtnttaatttacttagatgatgaggctgtctccgtcgacgtcg

SEQ ID NO: 395818 - DNA, 416 bp, Oryza sativa
  unsure (1)..(416): unsure at all n locations
cgttagttccttacccagcgccgtctccaccgtcttcgctgcctccacggtcatggccagcggcggttgaccatggcatatgctccggcaggcaaaagcagagagatggccttcctcccctttctctcccatctctccttagattaatctctctctctctcaggctgccattgttgttcttttcatggataaaattgttagggatcggcaatatttcctattctaattgtgtcttgactgaaaattagtccgattatatccagaccccgtggttggttcttccgagattggngcttncnggctggattagtcaattagaaaaaggtagattttnatatgcagtattaatttgatcttgtgatnatnttagttcttgtacccngccttcccttgnggctacttccggntacccaagg

SEQ ID NO: 395819 - DNA, 528 bp, Oryza sativa
  unsure (1)..(528): unsure at all n locations
agctagcgatcgagctccagtagtatacgtgcactttgggttgctcatgcactggcttaatttctgaagatgagtaatctgctcaaggctaagagctgggtaccagaggagaaagctgcagcgactgcttctgatggacagaatgacaaggtaaagaaagtccgggaactcctgggaagccaggtgacagcagagatgccgtcattcttgtcggacgccaccatccgccggttcctccgggcaaggaacttggagcacggagcaagcaaccaaggctctcaaagagactgtcaaatggaggcgtcagtacaggccggacacaatccgctgggaagacattcctggaagggagcacgnagcttaggagaacatatatagccgactactttgataagaatggaaggtccgtcttcatatcgaatccgncaattaagagaaatcatcaccaaggccagatanacagttagtgttanctggggtttttgcntgactcaggaaacatgaagcgatgactgttggttactgctt

SEQ ID NO: 395820 - DNA, 439 bp, Oryza sativa
gcagtacagcaccaattaagcaaagccacagcaacgagagagagcttgtgaagttgtgatatttcattttgaccatatgggttactcctactcttccgccgccgtggcgttgagcgttttggtggtggcgttggcggcggcggcgtcgggccagctgtcgacgacgttctacgcctcgtcgtgcccgaccgcgctgtcgacgatcaggagcgccgtgaacgcggcggtggccagggagccccgcatgggcgcctccctgctcaggctccacttccacgactgctttgtccaaggatgcgacgcgtcgatactgttggccgacaatggcaccttccggggggagcagggtgcgttccctaatgtcaactcgctgaggggattcgaggtcatctctagcattaagatgaaactcgaggaatcttgaaggacaccgtctcct

SEQ ID NO: 395821 - DNA, 422 bp, Oryza sativa
  unsure (1)..(422): unsure at all n locations
agcatacacacatataccataatggcactgtcactgacgccctccctgcaagatctcgtatcatcactgatgatactccttgttctcttgtacatatcgtactggagatcaaagtatcagtccttgttcccagtggactggccgatagtaggattgctccctaccctcgtcgccaacctgcaccgcttgcatgacaaaatcaccgaatacctcgccgcctccggcatagcttcacggggaacggcccggcggcgagcaacatgcgactgttcgtcacatgtgaccctgacaatgtccggcacatcttcaccaccaaccatgacaactaccccaagggccacgagttcgccgagatcttcgacatcatggccggcggcttcttcaccatggacggcgntctntaacggcggcagcgtggcaag

SEQ ID NO: 395822 - DNA, 595 bp, Oryza sativa
tcacttctctccctcatccactcgttctctgcccctctctctcctttctgtctctcacgaaggaccaaaagcggcgctgctcgctgctcgtcggcacggttgggccatagctgccgtgagcagctaggcgtcctccccgtgcggctctccgcaggaactccgcgcggcgtcgacgatggcggctgcgagctccgtgcggcatcgacgacatgcggacgcggctaagctccacggcatcgacgacaacggtcgagctccgtgcggcgctgaggacggtgacggagctccacgcggccgagctccgtgcggcgccgacgaaggcagccaagctccgtggggccggcgaccatgcgttgaagaagatggagcgtaggtttgttttgttggtgttttagggatgttgcattctactgttaagctcgttgcactatgtgtattaaggtgtttcattttgttttgatttaatgttgcattgcaatctattgtatatgttttgttgcactctattttattcgtgtgtttcatccttgttttattggatgttgcatatgatgtacaatgtgttttcttcgatgttgcaaaaaaaaaaaaaaaa

SEQ ID NO: 395823 - DNA, 642 bp, Oryza sativa
  unsure (1)..(642): unsure at all n locations
atgagctcctctgatcttggcagtcaacagttcaacaccatccagccatccaccttccccctgagtgtagcgtgcgcggccatggcgggcggagacgccgaggaggaggaggaggaggaggaggagacctacacgacggacgacgcgctcacgcgcgccggcttcggcaggttccaggccctggtgctcgcctacgcctgcgtggggtgggtcgcggaggccatggaggtgatgctgctgtcgttcgtgggcccgtccgtgaaggctgaatggggggtgtccggcgcggcggaggggctcgtcagcagcgtcgtctttcgccgggatgctcatcggcgcctgccttcggaggcctcatctcggacagatacggcagaagggatcggttttctttccacggcagttgtcactgggtatatttggtttgctcagtgccttctcccccaactacgcatccttgctcgtcctccgctttgttgttggtttgggattgggtgctggccatgtgctgtccacttgggttcatagaagtttgttccctgctgcaaagaagagtaactggatggtcgtttttccaattgctcttggactgtggggnaacaaatctttggaaagctctgcttgcctggggctgtcatgcca

SEQ ID NO: 395824 - DNA, 514 bp, Oryza sativa
  unsure (1)..(514): unsure at all n locations
catcatcaacgatgcatccatggctatagcctaagaggaagaggaggaggagtggtcgttcttggngctgctgctcgcgctgctgcggaagtcgctgctcgggtgcagagcggaggacggcggcggcggcgaagggatggagatagggtggccgacggacgtgcagcacgtggcgcacgtccccttcgataggttccatggattcctcgggctccccgtggagttcgagcccgaggtgccccgccgcgctcccagtgcgagtgcaagtgtctttggagtttcaacagaatcgatgcagtgctcctatgattccagaggaaacagtgtcccaacaattctcttgatgatgcaaagacgtctttatgaacaaggcggtcttcgggcagaaggtatttttcgcataaatgcagagaatagccaagaagagcttgtgagagaccaattaaattggtgggatcgtgccaganggtatttgatgtccactnttttgcaggtctaatcaaagccttggtta

SEQ ID NO: 395825 - DNA, 494 bp, Oryza sativa
  unsure (1)..(494): unsure at all n locations
caatcacccattcaccacctaaaaattcccaaggcacctgctcctcctcctcctccctcctcacctccgcctttcgtttcttggaatctttgcctctgccttcttcttgttcttgctccctccgcctcctccttccagccaagaatccattgcagaattttcgtgctcaatttcggataaatgttgggtgttctgtttggtgggttgagagcttgaattcgagccgttttcttgcttcttcgagctggtggtggttttcttggcccttggattgattctgggattcagcggcggagacacctacctccgcgtgaggatttctgccatttcttgcttgctgcgtcgagggatttgggtccccgccctgcttgcttccagctcagtttcggtgccttgttggtgttcatcgatggatttcggcatgggcggcgacgcattggagacattacggtgaaaataaggtcggccgtctttnggtaagaaggggaaattcc

SEQ ID NO: 395826 - DNA, 339 bp, Oryza sativa
cccacgcgtccgggttaaggaagctcattttggtgaagagaatggcggggattctggatgtacaggttcatctaatagaactgtaggtgagatatttagctgcaaggatgttcattacttgaatgatgaatcaaacaattacgagagatcactatgtgcacgtgtttctaactctaatgatgcaatagcatattcattgtttaagaagttggaaagggacaacagtgtgaactgcagtgtcaatgatgaggtgagggattcatgccatccgataggggcccattttaagcataactcatgctgaggattcaaatgattcctttggatgcagctcatgct

SEQ ID NO: 395827 - DNA, 340 bp, Oryza sativa
acgcgtccgatcagtttgattgcatatgaaatggctgcttcatcgctcgacgccgaggcagcagctgcaggccaacaagacaaggccggcagcggcagctacaccactgcagccactgctcatcaaatagacacagattcatggcagcaggtaggggtgctgctggtggtggggttcaactgcgcctacgtgctgagcttctccaacctgatgatggcgccgctgggttgggggtggggcatcgcctgcctgctgttcatcggcgccgcctcctggtacggcaattggctcctcgccggcctccatgtcatcgacggccagaggttcatccgctacaggg

SEQ ID NO: 395828 - DNA, 729 bp, Oryza sativa
  unsure (1)..(729): unsure at all n locations
gaagaaactggcaaccccgaatgttcttgacaccttgaagaagaaaactaaaagagcatataacaagagaaggaatgccatggcaaataccttaaacacggcagtcaccacaaccgaaagcataactgacgccacaaatcataatcaagttaatgagggatggccattgacatctactggtgcacacgaaaccttcccttatggagtggagactatttcattcgatttgtctcaatacaacagtgcacctagcttccactggcctgaaagcagtagcaggtctcagcttcagtgagatgaggtgaaaaatgcaatggtccatgcgttgagaatattctaagtttgacagacttgcaagatgggcaaagttattaattaccttgtttcatgctggagggttcctgaatcctgaccatctgaggaatgtgagaaaaggctcaacctggcgaaaaccagtaataacaaccggcttttaacggattcggtctatattggttgtcccctgatattttagatatatgtaatggctgagatgtacataatcatttcccctttttctcatcctcagataaattgtagcttccactaggtaatgtgtaatgttaatcctgatcattcacgtggtcacgtcttaaataattagactgaatgttactcctgtaaaccccatagtcatggaatgtacattgctcagaactatgcccttctgcannnnnnnnnnnnnnnnnn

SEQ ID NO: 395829 - DNA, 676 bp, Oryza sativa
  unsure (1)..(676): unsure at all n locations
tcccagtcacgacgttttaaaacgacggccagtgagcgcgcgtaatacgactcactatagggcgaattgggtaccgggccccccctcgaggtcgacccacgcgtccgagtacaacaagaagcctagtggtggatatgggtatggtgcttcaagtggtggaggccatggtgggaggtatgaagaagatgactacaagaagaagcctagcgcgcactccggtggcggcggtggcaggtatgaggaagaggaagatgacaagaagaaaaagaagcatggcgaggggtcggagggcggcatgggagactacctgaaactggcacaaggtctccatgaagaagcaaggcggtgagggggagagcggtggcggcggtatgggtgactacttaaagcttgcggaggggttcttgaagaagcgctgatttgtaactgaatctatgatgtctcatgaattgtgaaggaccttgcttgtgtttggttagtttcctgttctacttaatgcccaaattggtgtgaaatcatgtaccgtctccatccggttatacaataaaactgtcttggtcagttggtcatgttgtctctgcattgtaacacgaatgcttagggtgctacccatgaattcgggggaataaatattggatggaaacctgtgttgctcnnnnnnnnnnnnnnnnnnnnn

SEQ ID NO: 395830 - DNA, 312 bp, Oryza sativa
  unsure (1)..(312): unsure at all n locations
gnnnagtgccggtncgggtggatatggaggnggtggaaggtatgaggatgagtacaagaagaagcctggtggtggtcatggtggagggaggtatgaggaggatgatgagtacaacaagaagcctagtggtggatatgggtatggtgcttcaagtggtggaggccatggtgggaggtatgaagaagatgactacaagaagaagcctagcgcgcaccgggcgacgacgacgacgacgatcgccgccgccatcccgctcccgctcccgcctacggccacgactnancccctccgccgggtccctacggccaagcg

SEQ ID NO: 395831 - DNA, 373 bp, Oryza sativa
cgttccactacttgaagtcttgcagggacctagttattagctagctagcggctgccgcctgccgcccagcaaaatcgagcacacagggaaagcgccgagaagaatagtggacatgggacgggagccggagatggaggaagcacgggagaatgggggcgtcggcggctctgtgctgcctctggcctcgctcatctctccaactgggaacgaggtgctcgtcccgttcatgctttgtttctgattctctactcgatcggttcttgtcggttaaacttgcttgctgttctccggttttaaagattgcttatccaggccttgtactgtggcaagcgaacaataagcacatccttgatttctggggtggatttgaaca

SEQ ID NO: 395832 - DNA, 539 bp, Oryza sativa
  unsure (1)..(539): unsure at all n locations
ctccccgatcttgcacttttccatgctgcctccaacgacttcggtggtgacatcccctacctcacaggcctcgcctacaactacaagatcaatgtcgacagcaatctccaaatacaggatgattttagtcgtgacatggtcgggtcgcatgttacaactaaagttcatggttattgcgttaatttagatctagatatcacatttcacctccggcccggaaaagacgacaagaaaggacgaagcatccccggtgccacagattctaaggcgctcctcctcaactacaatcacctgtccgggccattaccggtgaacatcggtttctccaagttaagctacctggccctcgccaacaacaggctcaccggcgcaatcccgccatcaatcttgcatttgcaagactccctcctcgaggtgctcctcctgaacaaccagctctccggttgcctcccccacgagntcggcatgttcaccaaggccgnagtgttcgacggcggcatgaaccagttaacgggccgatcccttctctttctcatgct

SEQ ID NO: 395833 - DNA, 502 bp, Oryza sativa
attgatagggaaaaatggtgcaaaacgacgtacagtgtgattcttcataacacatgtcagagttaaacgtgcgagtgtggtttgagttatgctacatctgggcgtgcgtactattcctcaatgccatattaatgatgcgatggaccaagaaagctcgtgactctatcccagcacaccttgggacctttccagatgatgttgggatggcccaggcaagagtattcaggcataatgttttgcaaagcactgcgaatgagatagttaggctcggtgatcaggataaccaatcttttgagattcttcttcgttatcttggggaagcaaaggaggagattgccaaagccgcttccaagatgtctggtgctgcgggccagttttcatttcatttcatttcagatgttttcatttcagatgtttcagtctcttaatggaatccatgcaactgtacctttcgagcttttctaatctaattaatgtgaatttgcaaattcataattctgag

SEQ ID NO: 395834 - DNA, 404 bp, Oryza sativa
agaacacaaataagataatagcatcatggctatgtgagcttagagagagaataatgcagagccagagagacagagagaggtaggtgattgataataagaaagaagggaagaagaacacaggtctaaccggaggagggcaagagaagatggtggtgatgatgatgcagaagagctccctggacctggtgcttgtgccatgtggtctggtgatcatgttcggctaccacctcatcctcctctaccggattctccgccgccccgccgccaccgtcatcggctacgagaaccacaacaagctggcatgggtccgccgcatggtgcaggcgaagcccggacgagacggggcttggcactgtagcgtcatcttccagcaacatcttcggcgtcgacggaaccttggcgtt

SEQ ID NO: 395835 - DNA, 379 bp, Oryza sativa
  unsure (1)..(379): unsure at all n locations
aaagtcgcaatcagggtgtgcaaatgtgcaattgcccaatccacagacggccatgcaaaattccccccccccctcgctttgcatgcttaaatctcgctatccatcgccatggatggatgattcaaccgcaaaagcaacctagttagtacaaggcagcacatgcgctgctattagtagcagctgctaggtgtcctgctattttgttgccctgcttcctctaatcttcctcttcttcttctccttcaatcgtgtcgtgtcgtctccttgttcggttctttggtgcaggaagcaatggcgattcttcgtgtgtccgtgatgcggctggttgttgcggccatggctgttgcagctggtgttctcttcttctccggcgccggcn

SEQ ID NO: 395836 - DNA, 453 bp, Oryza sativa
  unsure (1)..(453): unsure at all n locations
cggaacggtccganccaaaccaaacccaattttaccctaaacccgngcgaganagagagagagagagagagagagagatcatggcggcggcggcggcgagtctggtgtccctgcccctcctctcggccatcttcggcgccgccatcgccctcctcttcctctccggatacctccgccgcaagcgcgccgccatcgcccatctccccccttccgccaccgccgccgccccggaccagcccaagcaagttcgaccatccaaccagaaccagcctaagaagggacaccagcgatctcaccacgtcgtcgataaggacgccgcaaaaaagcaccatcatcttgatgtcaacactttgagggggcatactgattcagtcacagcacttcatttctccgatgatgcctgcaaactgggcaccgtatgtgcggatggagnttttaagagtatttagggtt

SEQ ID NO: 395837 - DNA, 502 bp, Oryza sativa
cgagacgacctccatccggagtctttcagagtctttcagattcagaaaacccactactgccaagaagccctgcttctcttctacttcctctcaaagaaagagaccgagagaagttcatcttgcaagccaagaactctcgtcctctccttctgaagcgggtggcatggggaagctgtgttgcagccagacggacgacgatccggagttcaacctgctggggctgctcgtcgccgtcgtcctcgcgttgctgctgctgatgctgtgcacgccgccgcggcgcaggcgctgcgtggtgtacccctgctactaatggcggcggcggcggcggtgctccgatcctctcagatgagcagaggggatcgaggagaagcgacgaggcatcgtcaaagcttttaaagccaggcataggttccgatcttttcttgaccgatttgcatattcttcagttttccgaaataatttaatgctgaattttcgaattgtgataagactcgtttctgtt

SEQ ID NO: 395838 - DNA, 498 bp, Oryza sativa
  unsure (1)..(498): unsure at all n locations
gttggctttaaaattcgtgctgctcggtcgatcgatccagcccctgcacagtacacacagcagccatgactaaggtcttcaccaggtctctcctaatgtacttcaacaagatcgtcaggagcctcagacccctcgtccattcgccgccgccgcagccggcggcaggaacaacatcgtccggtggccgtcggacgacgagctgctgccggcgccggacaccaccacgacgagcgtcgtcaccaccgtgtgcaaggtggagggcggcctgctgatgtcgccgtccactttcccgtacttcatgctcgtcgccctggaggcaggaggtggcggcggcggcctcctccgcggcctcctgctcctgctgctctaaccggcggtgggctgttcggccatgaccgggcgatcaaggtcatggcatggtgaagttttgccggaggtgaggaaggacgggtttcggttgggaagttgacgttngcaaggttgttcttgaggacgtaa

SEQ ID NO: 395839 - DNA, 688 bp, Oryza sativa
  unsure (1)..(688): unsure at all n locations
gatcccctcctctttctcatgcctcaccagcgtcgagcagctcaacctgggcggcaaccgcctctacggagagatccccgacgcgctctgcaagctcgccgccgtcccagccggccgcctcgccaacctcacgctgtcgagcaactacttcacgtcggtcggaccggcgtgcttgtcgctgatcaaggacggcgtcctcaacgtcaggaacaactgcattccgggcttcgccaaccagcggcggccggcggagtgcgcgtcgttccacagccagccgaagttgtgcccggcggcgagcgccacccacgtggcgtgccccgccggagctgccaacgctgcggcggcgccggcggacagggtggtcaaggactactccagctacgtgacgtacgccaccctgcacgagtgagcccggcgccacggcacgggcgcacgacgtgcgtgcatgcatgcagtaggggacagctagaagctagcgtctcggggtggtatttgctcttgtattcttgtgttcgtttgttgtgctcgtgagtcgtcattgtggtttgttttctctgcacgtgtggctagctatggctgtcacgtctagatctcacctcctgtactcttgtgtactgtactatgtgaaaatcattggtgattactaaaaaaaaaaaaaaaannnnnnnnnnnnnnnnnnnnnnnnnnn

SEQ ID NO: 395840 - DNA, 740 bp, Oryza sativa
gagagatgcaaaacatctgaaacaaaggatgtgattctcgcagaatctatggaggatcctctcattgagaagaaaataacaagaaagatggacgagatgaagcgtcggaaggtggccgctttcagcataggatctgtttgtgttggagttatggttctcacatccgcagcttctgccacatggctgccttttcttcctatgtgtattggctgcatcgttggcgctctgttgcttgtagccggtcttggcctcctctgctggatcgaccaagatgatggcaggcattctttcggccaatctggaggatttacatgccctttcgttccacttctgccagtcttgtctatcctcgtaaacacatacctgttgataaatctgggtggagaggcatggatgagagtaggcatatggctggctggataggcgtcttggtgtacattttgtacggacgaactaacagctccttgaaggatgtcatctacgtccccgtagcgcaggccgatgagatatacaagagttcatctggatatgtgtcctagaaaaaaatattttttagtttgcactattcttcagtgacaacatgcctcacctgtctgcaattggaagattagcctggacagaggagatgctaaatcattcatacttggggaaaaaacatggatgcaatattatatttaggatgtgcataggtgtatatataaacccaattggacagtggaataaaaaaaaaaaaaaaaaaa

SEQ ID NO: 395841 - DNA, 408 bp, Oryza sativa
  unsure (1)..(408): unsure at all n locations
gactagttctagatcccgttcttcggccacctccacctcatcgacaagccgttccacgccgcgctgtcccgcctcgccgagcgccacggcccggtcttctcgctgcgcctcggctcgcgcaacgccgtcgtggtgtcgtcgccggagtgcgccagggagtgcttcacggacaacgacgtgtgcttcgccaaccgccccaggttcccgtcgcagatgctcgcgaccttcaatggcacctctctaggcagtgccaactacgggcccgcactggcgcaaaccttcgccgcatcgccaacgtgcaccttctctcctcgcaccgggtcaggcattgtctggcatcatcttcgggcaggngcgccanatggtgcggaggatgtaccgggccggcaacgcttcgccgccgggtcg

SEQ ID NO: 395842 - DNA, 394 bp, Oryza sativa
  unsure (1)..(394): unsure at all n locations
attttattccccttcgtctcctctcctctcctctcactctcctctccacgccacgcaagagatactcctccttcgcaaggaacagaggttgagctgcttccgaagccaaagtcgggccaagatggcagatgatgactatccggtcaagctgcatatatacgatcttagccaggggatggcgcggcaattgtcaacaacaatccttggcaaggctattgaggcaatttggcatacaggggtggtagtctacgggaaggagtacttcttttggcggcgggcattcagaaggatcatcccggaagaccaccgtacgggaccccggtcagggtgggaagatcttgggggtcanccatgtccccagggagatctttgaggacttccttcaggatatcaa

SEQ ID NO: 395843 - DNA, 434 bp, Oryza sativa
atcgcatcgtgcttggtggttgcgttggtcttcgtcttctctcctcctcctcatcttcatcttcttctccccaatcggcggcgccccgcggtaggaatcgcggattgcgtcatcttctcctcctcctccgcctccgcctccgcttccaatccccgtcgtcgtcgggtcaccggagccaaaccctagaggctagaggaagagggaagccatgttcgggaaggggcatgatctcgaggccggcggctcgtcggagcccttgtacccggggatggtggagagccccgacctgaggtgggcgctcatccacaagatctacgtcatcctctccgtgcagctcgcgatgacggcggccgttgcggctttcgtcgtcaaggtccgcggcgtctcggagttctttcgtctcctccaaagccggatttgccctctaaatcttc

SEQ ID NO: 395844 - DNA, 382 bp, Oryza sativa
ccctgatcatgacattgtaacagatccatgctatgctgccttccatgaccatgaatggggagtcccggtgcatgatgacaagtacgtctaaacccaatcaaattagatacaagttttacttagaattctagtcagataaattataaagttacaattttcagccctgaacctgcaggaaattgtttgagatgctagtcctgtctggtgcattggctgaaatgacatggcctgcaattctcagcaagagggaaacattcaaggaggttttcatggactttgatcctctattggtagcaaagctaagtgaggaggaaaattctggggccatgcagccctcaaggtctctcctgtcagagcataggctgcgtataatcattgaaat

SEQ ID NO: 395845 - DNA, 367 bp, Oryza sativa
  unsure (1)..(367): unsure at all n locations
aaaatttgggagaccacccacaaatcgctcgtcggcgagcgaattccaaaccaaatccttgttctagtcttgtatcacccgcatctgcgcgtccctctgcggcggcggcggcggcgacggcggcgatggggctggagatggaggggatggcggcggcgatcggcgtgtcggtgcccgtgctccgcttcctgctctgcttcgcggccaccatcccgacgggcctcatgtggcgggcggtgcccggcgccgcggggcggnacctcttacgcggggctcaacggcgccgngcttttcctacctcttcgtttcggggcccactctcccttctcttcgtcgttccatgngttcgggtactngcatgttcttt

SEQ ID NO: 395846 - DNA, 409 bp, Oryza sativa
aatgcatctggtttggagtcactggagggtagcactgtaagtagatggaaggtgaaagtgccactgaacggttgagacgacagattgatcttgaccgaaaatctatacacctcctctgcaaggaactggaagaagaaaggaacgcttcagcgattgctgcaagtcaagctttggctatgattaccagattgcaggatgacaaggctgccatgcagatgggaagctttacattaccagcggatgatgggaggaacaagcagagtattgatagtgatgcgcttgctaaagcttaacgaggctacttgctcaggggggaccaccaaatagagggatttggagctgagctccgaaactacagggttgcagttttcaggttggcccaccagggaccattccatcaggctccttt

SEQ ID NO: 395847 - DNA, 247 bp, Oryza sativa
acgcgtccggcttgattgcctcttgtactgcagtgttgcttcctacactgccattgcatataaattttgcactgcaagattaattcagtctgagagaacgagagagaacatcatgggtggcaagctgttgcctgctgcggcgttcgccgcgtcgggccgccgctgtcgcaggtggcaacgtcggcggcgcacggcgaggactcgccgtacttcgccgggtggaaggcctacgacgaggacccctacc

SEQ ID NO: 395848 - DNA, 348 bp, Oryza sativa
  unsure (1)..(348): unsure at all n locations
gccctcttctcttcccttctctcctaccggcggcaactaccgggaagccgccgccgaccgccggagcggagtcgtcgcggcggcgagggcgaatcggtaacccccccccctccggagttccgggatggggacgccggagttccccaacctgggcaagcactgcagcgtcggcgactgcaaccagatcgacttcctgcccttcacctgcgaccgctgcgaccacgtcttttgccttcagcaccgaagttatacatcgcatcagtgtccaaatgcaaatcagaaggatgtgacttgtcctcatcttgcccactctgtgctaaaggagttnggcttgaacccgaacggagg

SEQ ID NO: 395849 - DNA, 353 bp, Oryza sativa
  unsure (1)..(353): unsure at all n locations
gagaggagaaggactccattggcgacaagctaagcttagctatagctatagctagctagcttagcccctgccttccaaggaggaagaaacgaggcatacatacccatcccctcctcctcgacggctagctgctacctcgtctgatcgatcgatcgatctcctcgtcggccatggcgcanagcagaagaagaacgcgcacgtgccgaaattcggcaactgggacaatggcggcaacgtgccgtacaccgtctacttcgagaacgcgcgcaagggcaaggtcgccgccgccggcaagatgttcaaccccaacgaccccgtcgacaacccggaggccttcttctcctccatcgccg

SEQ ID NO: 395850 - DNA, 379 bp, Oryza sativa
gagaaagctctagagctcgagctgcgcgacgtgaggagatgagcggcgaggtggcggcggcggtcggcggtggcgccccggaggagaacggcgcccctccgaacgtcaccatctacatcaacaacctcaacgagaagatcaagctcgaggaacttaagaaatcgctccgcgctgttttctcccagtttgggaagattcttgatgttctcgctttcaagactttgaagcataaaggccaagcctgggttgtgtttgaagatgttgcttcagcaactggaggctttgaagagcatgcaagacttccccttccataataaacctatagagaatcccaatatgccaagacccaaatcgggtattattagcaaaagctgattgg

SEQ ID NO: 395851 - DNA, 430 bp, Oryza sativa
  unsure (1)..(430): unsure at all n locations
caagcaaccactcgaacttgctgaactttgttaggattatattgttggttccatcatggcagacaagcaaatggccagtttgatcattaaggcaaatctcgagtgtgaaaagtgttgcaagaagatccagaaagtccttaacaaactcaaagacaaggagaagatcattaacatcgtttatgagaactcgaacaatagggtgatcatatcgggccatttcaagccagaggagctcgcccataagctaagatgcaaggcctgcggggtcatcaaagacattgaatttgggaagcttgcagaggcaaagaaggaggagaagaagccggatcaggccaagaaggaggagaagaagcagctgaggaaagaacctgaggagangagaatccgaggaggagaagagnaggcgcgagaagaaccggggaagcaagag

SEQ ID NO: 395852 - DNA, 381 bp, Oryza sativa
gatccatcctctgccactcaatttatactagaacctacttcagaattgctaccgtctgatgcaactgttgtaacaattgttcaagacaaggctgaatgcaggccaaatactgaacagctgactcagcaagttcaagttttgggacatccttctgatctgctgaaccgttcacctcctgttagtttgaaagaatcaggaaactcgctgaaacataaccctattcaagtgaactttgatggtagctcaggtggaaaactaggagctcagaaagtgaagcatcatactagcgctcctaataagagtgttgttcgtaaggagccgcggaccaattacattcccaacttccggcgtcctctcttgagtaagcagatgacaaactgg

SEQ ID NO: 395853 - DNA, 529 bp, Oryza sativa
  unsure (1)..(529): unsure at all n locations
ggatcgatctctctttgtcggtcacagtcaggtgggcccgggtggggagtgctgctggggcggctcgacggcaagacctccgacttcaatggctccctcaacctgccggcccccaccgacaacctcaccgtcctccgccaaaagttcgccgccctcaacctcaacgacgtcgacctcgtcgccctctcaggtgggcacacgttcgggagggtgcagtgccagttcgtgacggacaggctgtacaacttcagcaacacggggaggccggaccccaccatggacgccgcctaccggagcttcctgtcgcagcggtgcccgcccaacgggccgccggcgggctcaacgacctggacccgacgacgccggacaacttcgacaaccactactacaacaacatcgaggtcaaccgcggttttcttcagtcggaccaggagctcaagtcggcgcnggaggacccgggacgacggcgccattgtcgaccgttttggcaacaaccaagcngctttttccgagtttgggnagtcatgat

SEQ ID NO: 395854 - DNA, 691 bp, Oryza sativa
  unsure (1)..(691): unsure at all n locations
cggacntgacnggaccaagaacctcacggcgcantcgtcccggcgatgaccaacgtgcacgccgcgctggcgaggctcagccttgacaagcccgtcaaggtgtcgtcccccatcgcgctcaccgcgctcgccggctcgtacccgccgtcggccggcgtgttccgggaggacctcgcccaggcggtcatgaagcccatgctcgacttcctcgcgcagaccggctcgtacctcatggtgaacgcgtacccgttcttcgcgtactctggcaatgccgacgtcatctccctcgactacgcgctgttccgccccaacgccggcgtgctcgactccgggagcggcctcaagtactacagcctcctcgacgcccagctcgacgccgtgttcaccgcggtgagcaagcttgggaactacaatgccgtgcgcgtcgtggtgtcggagaccgggtggccgtccaagggtgacgccaaggagaccggcgccgcggcggccaacgcggggccttaccaaacgggcaacctggtgcgccgcgtcctctccggcaacgcgaaacgccgcgccgccccgacgccgacatggacgtgtactcttcgtctttcaacgagaaccagaagcccggaccgacctccgagcgcaactacggcgtgttctagccgaaccagcagaaggtctangaagtcgaagttgtcctcgg

SEQ ID NO: 395855 - DNA, 374 bp, Oryza sativa
gggtgatcggtggcgatgggggagggcgcggcggggtcgtggtacgtcacgagggatgaggtcgagaggggttcgccgtcgaggagggacggcgtcggcgccgccaaggaggccgagctccgggcgacctactgctccttcatccgcgacgtcggcctcaggctgcagctgcctcaggtgacaatcgcgacggcaaccttgctcttgccatcgcttttatctccgacagtctcacgccaagaacgagtggcaggtaaaaaaaaaatgcagttcttcagatacggatgcgcacatttgtttgcccactagttgtggcactatccaatgttgaaaatcttcctctgaggttatagtgacactgataattaaagcta

SEQ ID NO: 395856 - DNA, 447 bp, Oryza sativa
ggagatttctttctttctttcattcctttcctcctgcgagtgcgagtgcgatccggggcaaggcaaatccgattccgagctcagaggcatcaggcgtcgagttcgtcgatcgatcgctgcagagaagcagagagagatcgagagagatgtgggtggcgattctgtgcgggctgttggcgtacaagatcatccgccgcgtcttcttcgccgactccgacgaccccgcgcacctcgccgacctcgattccgcccactccgacctctgcttcgccctcgcctccaggctcgagaagctctactccgcccgctgcttcgtcggcctccgcatccccgaccccgacggcggcgagcgccagatgtcgacctcgtcctccttaccaacagggaggtcatggtagtggctatccacaacatttctggttttgttgaggtcgataaggatggcaa

SEQ ID NO: 395857 - DNA, 351 bp, Oryza sativa
  unsure (1)..(351): unsure at all n locations
cacatgctgacaccctcctagctccccccacctcagccatcaccgccaagcccaagcaagcaagctcacgagcactccaattatctactctacttaagctccggtgagttaatccttcaccgctgcactctcacgctcacacacatgagctctagttttactatatagagagagtgtgccgtgctgtttgccaagagaggtcgagagcggtggcggcggcggccatggagggcggtggcaaggcggggtacagctatggcggccaccaccaccaccaggacgccaagctgctcaagaacctcagccgggtggagcccgccggttcggcctnggcctngtngccgggttcct

SEQ ID NO: 395858 - DNA, 341 bp, Oryza sativa
  unsure (1)..(341): unsure at all n locations
ccaactgctgcaaggccggcgtcgtctccgcctacggccaggaccccgccggatccgtctccgccttccaggtctccgtcggcctcgccggcaccaccaacaagaccgtcaagctacccaccaacttcaccctcgccggcccgggacccgggtacacgtgtggcccggccaccatcgtcccttccaccgtcttacctcaccccggaccggcgccgccgcacccaggcgctcatgacgtgggaccgtcaacttgcaacttacttnccagcagttggcgtcgngttacccgacttgttgngtcttcttcttcttcttctacaacagnacatngtgccgtgngg

SEQ ID NO: 395859 - DNA, 363 bp, Oryza sativa
  unsure (1)..(363): unsure at all n locations
agctgttcgtctccccaaccccaaccgcgacgaactagggcgacgggccatcgccgtcgtcgccgccgccgccgcagctcgcgctcgctctcctcctctggcgccgttcctctttctcctgcgtcgccccatcgacctcgaccgctcagcgtctgtttgtaactttctgttatgggtgactacaccatccagattagcaccaagctaatcgaccagcttgctcgtgatgacgagaggatcaaaaaggaaaccaggggaaacccaagcctaagaaggcctgtcaaccaccattaacaagagccccagggacaactcaagggaactnccagcttntggaaanccaaggcttctactggctggcca

SEQ ID NO: 395860 - DNA, 366 bp, Oryza sativa
agaagctgagaccattgtaaagcttactgaggagttagattccatagatactggccttcttgaagaagcctcaaacatcataaaggcattaaacaaagcactagataactttgagatgacacagcttctttctggaccttatgacaaggaaggtgctgtgattaatattactgcaggtgctggtggcaccgactgcccaggattgggcttgacatgttactgaggatgtatgttaggtggggagagaagcagcggtacaagacaagagtggttgagaaatcccctggtgaagaagctggattaaaatcagctaccattgaattagaaggaggatatgcctatgggtatctctctggggagaaaggg

SEQ ID NO: 395861 - DNA, 517 bp, Oryza sativa
  unsure (1)..(517): unsure at all n locations
caagctcaatttttttctctacacaaccgaaaggtggtagctttggcgaaggaccaaccaatttcctctctctaatcgccgcggcgggggatagattgggagtgagcgcgtatggcggaggagcagttcctcgccgtcgcggtggacgccgccaagaacgccggcgagatcatccgcaagggcttctaccagaccaagaacgtggagcacaagggccaggtggatttggtgacggagacggacaaggcctgcgaggacctcatcttcaaccacctccggaagcactacccggaccacaagttcatcggcgaggagacgtccgcggcgctcggcgcccccgcggacctcaccgacgacccgacctggatcgtcgaccccctcgatggcaccaccaatttcgtccatggcttcccttttgtttgcgtctcgatcggtctcaccgtcgggaaaattcctactgttggagttgtgtacaancccatcatgaatgagcttttcacagctgttcgtgggaaaa

SEQ ID NO: 395862 - DNA, 595 bp, Oryza sativa
  unsure (1)..(595): unsure at all n locations
tgcaagcattagcatgtggcgcaataggagccgtaatcgttaacagagtgatccaaaaacagcttggtgacctactgtcctcagaagcagaaaagatagcatctgctgataaggcaaatgctcagcaagttggatttctttcggacatagctggaccaacaggagctcaattgcagattgtatatggtgtatttggatacatgcaggtcttgtcagcatgcttcatgtcatttgctcatggaggcaatgatgtctccaatgccataggccccctggcggcanttttgtccattcttcaaggtgtagcaagcagttctgagatagtcatacctactgaagtccttgcttggggaggttttggaattgttgcagggcttacaatgtggggttacagggtcatagcaacaattggcaagaaaatcaccgaactaacaccaactagaggttttgcagcagagtttgcaganttctgtagtattgtttgcatcaaaacttggttgcaatatctgctacacatacacttgttggtcagtgatgggagtgggatttcaagagggtcaatagggcagacagaacagtcgtnaatttggctctg

SEQ ID NO: 395863 - DNA, 359 bp, Oryza sativa
attaactgatagaaagaaggtttctcttggtacccaaccgataagccttcgtacattctcatcaaagggtacaacccacgtgtttgcttcatcggatagaccgactgttatttatagcagcaacaagaagttgctgtatagcaatgtcaatttgaaggaagtcaaccatatgtgtccttttaatacagctgctattcctgacagccttgcaattgctaaagaaggtgaactctcaattgggaccatcgatgacatccagaagcttcatatccgtacaatccccttgaatgaccaagcacgtcgcatttgccatcagggacagtccagggcataggggtttttcagcttcaggcacaacc

SEQ ID NO: 395864 - DNA, 379 bp, Oryza sativa
cctcggcgagctcgagtacgaggggctggtcgcccgtggcaccccggccgccgagctgcccagcctcgccgacgagtgggacgccgtcacgctcaactacacgtcgggcaccacgtcggcgcccaagggcgtggtgtacagccaccgcggcgcgtacctgagcaccatgagcttgctcatgtcgtgggtcgtcggcgacgagccggtgtacctgcggacgctgcccatgttccactgcaacgggtggaccttcacctggggcatggcagcgcgcggcggcgtcaacgtctgcatccgcgacgcgcgcgccgcgacatctaccgcgccatcgcggccacggcgtcacccacctgtgctgcacgccggtggtgttcaacat

SEQ ID NO: 395865 - DNA, 443 bp, Oryza sativa
  unsure (1)..(443): unsure at all n locations
tgcagctggtgctttgaagaaatatggagctatagttacctgtgtggacagtggaaaggaggcaatttctaggctccagccacctcataaatttgatgcttgttttatggatgttcagatgcctgagatggatgggtttgaagctactagattagttcgttctgtagaaagtaaaatcaatgatacgatccaggcaggtgaagtgtcttccgagatctatggaaataaggcccattggcatgtacctatattagccatgacagcggatgtaattcaagcaacttttgagggatgtatggaatgtgggaatggatggatatgtggcaaagccatttgaaggaccagcaactttactctgcagttgctcatttcctaggggctgatgcaacagatccattgacctagggggttagttgctagtggcccantgattcagggtctct

SEQ ID NO: 395866 - DNA, 483 bp, Oryza sativa
gatcgatctgttccctagccaagaagcatcgatcagctgagtgagctggcaagcgagagatactagctaggatgtacgacgtggccggggagcggtggagcggcggctgcggcgggcaccaccgccggctgatgggcgcgtcgtcgtcgtcggctccggcgccggcgggggaggacgacgcagggaaaagcgggtcgagcaaggacgcgatgaagatcatggtgtccgtgctggtggtcgtcatcttctgcacgctgctctactgcgtctactgctggcgatggcgcaacgcaacgctgtgaggagggcgcagatggagaggcttcggccgatgtcgagctccgacctgccgctcatggacctcgcctccatccacgccgccaccggacagcttctccaaggccaacaagcttcggcgagggcggctttcggccccgtctacaggggcgttctccccggcggcggcgcggagatcgcggtgaa

SEQ ID NO: 395867 - DNA, 464 bp, Oryza sativa
  unsure (1)..(464): unsure at all n locations
aattactatccccttcgcagaactaagccatacgaccacgcgagcttcgtccaatacgtggctggagggagcgcaccggcgctacagggaacactgcgactctaccgacggttgctgcagctcggcatcaagccggtgttcctgaccgaccgcaccgaggaccagagggccgtcaccacccacaacctcctctcgcaaggctactacagctgggagaagctattactccagcctgttgggctccagaccacgactcaggcgttcaagaccggcgagcggcagaaattggtgagcgccggctatgtcatcgtcggtaacatcggtgaccaatggagcgatatcctcggatcaccggagggctaccgaaccttcaaataccccaaccccatatactacgtcgcgtagttttggtgtcggcgccatcgntagtaagttagctataagttagctatatcgatggatca

SEQ ID NO: 395868 - DNA, 498 bp, Oryza sativa
  unsure (1)..(498): unsure at all n locations
agcgagcaaagcaagatgatgatgaccatgtcgtcgccggcggccaccgcctgcctccccgcctcgccctccctcgggccccgctcccttcgcctcctccgcggagctctggcccggacgggcagccgccggctcggggtggtgcgcgcggccagcgcggagtgtggccgcgcccgacgccgccgccgccgctccgggctacacctccgactccctcatcctctacttcaaggcggagggtaccatggaggagagggccatccccaagatcacccaggccctcgagggggtggagggggtgagcgacctggaggtgctcatcgaggaaggcatcggaagtgttgtgttgacaaaggagacgacggtgcaagctaccggggtgggctcaaacctggttnaaaccatccanggaacttgcttcnactgcaaannttnncctcaagctttccacaattttaatgaagatgcanccacntcgcnngaanaggatgacnacca

SEQ ID NO: 395869 - DNA, 459 bp, Oryza sativa
  unsure (1)..(459): unsure at all n locations
caagagtcacagttcgagtcagagctatctaaccaatccatccatcgagcaattgttgatccgtctgtgaattgtgatggcggcggcggagggggagcaggggaagacggtggtggtggtcggggtggacgacagcgagcacagcaactacgcgctggagtggacgatgcagcacctggcgagcggcatggcgggcagcggcggcgccgagctcgtcatcgtccacgccaagccctcgccgtcctccgtcgtcggcttcggcgccggccccgggtctggagaggtggtgagatacgtggaggccgacctgcgcaagacggcggaggatttcgtcgagaaggcgcgccgcctctgcatcgccaacgcgatgaacgcgttnatcgaggtgatcgaaggggagccangtacgtgctttncaacgcggttggagaagacancgcggggttnctcgtcgtcggc

SEQ ID NO: 395870 - DNA, 729 bp, Oryza sativa
  unsure (1)..(729): unsure at all n locations
ggaccgtcncncacgcttnngnnggagtcgagtagatgacttagatagatcggcgtagggagaagacgacatcgccggcgacgagaccagatcgatcgccgaggtatcgcctccctccccgaccgagcagggtcgccgccgttcgttcctcttgctgcttccgccgcatccatcctgcggggactaaaccttgaagcatctgggctgttgtttcaccattgtagtggattccacttcggaactgaacttttctagttgtttccgtgacaatgaaaactcacgagagagctgctaatttggcccttgcaggtttgagcttggcaccccttgtggttaaagtagagccaaatgtgaacgtcatattgacagcatgtcttgctgtctatgtgggctgttaccgttctgtcaagccgactccaccctctgagacaatgtccaaggagcatgctatgcggtttcctttggtgggaagtgctatgcttctctctctgttccttctattcaagtttctctcgaaagacttggtcaatgctgttctcactgcctactttttcatccttggcattgccgctctctgtgcaacattgctgccttccataaaacgattccttccaaaagaatggaatgataatgccatcgttttggtgtgctccatttttccacttggctctcagtggaggttaccaagtctcaagttgttgcatcaatcccagggattttccttttgca

SEQ ID NO: 395871 - DNA, 314 bp, Oryza sativa
  unsure (1)..(314): unsure at all n locations
ctcacacaggtagcagtagtacgtagccagccagtagttacacacgcgctctgctcctctcgcctacccacgattccaaggagaagagcgcctcccgcacagcgtaggctggcaaccgctgaccgcaccgcgcgccacaatggagtcgtcgcgggggaagcccggcctgaacggcagcggcggcggcgnccctttcggtactacagcagccgccggggctactacacgggcgccggcgnggcgtngccgacgtttggacgatggttccagggcgacgacggtggacccgtgctgcgtggttctgcgggtgtcgt

SEQ ID NO: 395872 - DNA, 463 bp, Oryza sativa
caaagttatacttgccgaaagtgctgatcgaaaacaacaattggcttcttgggttgctgacaagaaaaaagtcagtgcacatgctatggatctgaagcagctagataatggtgtcattgtgccacctacaggatggaagtgcagcaagtgtgataaaactgagaatctctggttaaatttaactgatggcatgatcctatgtgggaggcggctttgggatggaagtggggggaataatcatgctattgaacactacgaacagactaaatatcctcttgcggtaaagcttggaacaattactgctgatttagaagcagcagacgttttctcatacccagaagatgatagcgttgaagatccactattagcgcagatttttgtcacattttggtattgatttttcttcactccaaaagaccgagatgactactgctgaagagagctttatcacaacacaaattat

SEQ ID NO: 395873 - DNA, 545 bp, Oryza sativa
  unsure (1)..(545): unsure at all n locations
agcacttaagccttcctctctagctagcatctcttgtgtcaggaagttggaagggatttctggctagtttctagctggtgtctcctctcctcttcctaaccttctcactgattaacaccttagagttagttaataaccttcatcaccagtagcaatggcaggaggtttcttgtccatggctaacccggcggtcaccctctccggtgttgcaggaaacatcatctccttcctggtgttccttgcaccagtggcgacgttcttgcaggtgtacaagaagaagtcgacgggagggtacagctcggtgccgtacgtggtggcgctcttcagctcggtgctgtggatcttctacgcgctggtgaagaccaactcgaggccgctgctgaccatcaacgccttcggctgcggcgtcgaagccgccttacaatcgtccttctaccctcgtctacgcgccggcgccgnggccaagggcttccgcanccttcggcctttctttcctccctccttcgaanggtcggccggcctttcggccctncaatcggtcggtt

SEQ ID NO: 395874 - DNA, 474 bp, Oryza sativa
  unsure (1)..(474): unsure at all n locations
gagagatgcttggagtccatcgaaagaggtgaggatgccccaattgatagcaaagggtttgaaaatgccctctataccatggacatagggcacaatgatttaatgggcgttttgcacttgtcctatgatgaaattcttcgaaagcttcctcccatagttgctgaaatcaggaaagccattgagactttgcataagaatggggccaagaagttttggatacatggaacgggtgcattgggttgcctgcctcagaagcttgctacgaggggggaaattgatcgtgatctcgacgagcatggctgcatcacaagaatcaacaatgttgccaagaggttcaacaagttgctgagcgaaacctgcgatgatctgcgcttgcaattcgcaagcttcgacggtcgtcttcgtggacatgttcggccatcaagtatgatcttgttgccaaccacacggnaacacggggtttnggagccattt

SEQ ID NO: 395875 - DNA, 464 bp, Oryza sativa
  unsure (1)..(464): unsure at all n locations
tgggttgatttttgcagacacacagaattggggacagacctctgttgttcatcttaggtgagaatgtatttacagactttctttttttctgctgggcaacactggcaatctattctggcattaatctctctctctttcgctacttcttgatttggtcggccattccatgtggaatttgtttgtacgaatttacgatttatttatttatttattttcgattatcgagatcgatgcctgtgatctacttcattacgatttagacagcttaattttaccgtgaagaggaggcatactaaaaaaggaatttcctttcttttgctcttgcttcttgtgatttcaactttcagaaatgcacatactaggaaaattacttgggcctattggacgatatcagtggtaggactggagcctacatgctcttcttctcgaggggcacctaaacaagtcctcctcatcatcacant

SEQ ID NO: 395876 - DNA, 493 bp, Oryza sativa
  unsure (1)..(493): unsure at all n locations
attttaatttcnagcacttgaaggagtcggtgtctgtggtggaggaaggggacttcttgaaagattggaagcgctgggacaagaagaagggtcctggccggatctcggtgcggaaggtaccgtcgtacaaggtgactccaatgcagcttaagagggacaagagcaacatcatttggaggctgtttgatgggcaggagcctgagaattactggtacagggtgtgtgaggggcgagccgctaaggtcatccagcggccttggtatgctatttggaagtcgaagaggctgatgaacattgtcactgagattgctggtaggatggactgggattatnatggtctgcatgtcatccgagggtggaaggcacagaacaagcaaatgtatccaaacctagatgccgatacatcacccgaggcacttgtaggtaaggttccaaaacttattaagcagccgatgagaaacctctacattgcgaccaatgagccgttctatac

SEQ ID NO: 395877 - DNA, 247 bp, Oryza sativa
  unsure (1)..(247): unsure at all n locations
agcgantccagcagcagaagcagcagcagcagctcagccgccgccgatgggtccacgatcatggncccaacctcccgcntcctcgccgccaagacccccttcctcggccatccccgnccctccaatgcccccgtccgcgacatcgccgccgccgccaccggccgcatcaccatgggcatggagctgtggtacgggccggatcgggtgaagtacctggggccattttcggcgaaagagagtcagtaac

SEQ ID NO: 395878 - DNA, 460 bp, Oryza sativa
  unsure (1)..(460): unsure at all n locations
ccgactacgggtggccgcgcgagctctcggaggtgcagaagaagcgcgcgctctaccagcccgagctgcccccctgcctccagggcaccactgtnagagtggagtatggtgacgctgcaattgctgctgatcctgcaggcgctcatgtgatcagccacgcgttcccccacacatacgggcagcccctggcccattttctccggaagacggctaatgtccccgatgctactgtcatatcagagcatcctgttgtcagggttggtgttgttttctgcggaaggcagtccccgggaggccataatgtcatctggggactccatgaggcaattaaggctcacaacccaaacagcaaacttattggttttcttggtgggaagtgatggtcttctcgcacagaaaacttttggagatcaacgacggagttcttttcttcatattaaaaacaaggtggtattaaatt

SEQ ID NO: 395879 - DNA, 786 bp, Oryza sativa
  unsure (1)..(786): unsure at all n locations
caagttcgaggagagaaaaccaaaccctagctaggctaaggcggagtggagaacccncgccgttgccggcggcggaaggcagcggcggcggcgcgcggagaacactccgtcgcggtcgattccgtatcaacaatgtcagatcctggaagggatagcaacatgcagcagctcatcccgatagcacctccaccaaaggcttcttctggtaccactggcaaggagctcgtggtcgtggatggtacgggaaaggcttcaggaggagtcaagctacgggaagacgaggaggacctggaggtgaagctcaggcgcatcatggagaacgtccctgtccgtgtcagcaacacctccggatcctctgctggttctggctctggtgatttccaccagtatcggcaaatgaaggaggagagaacaggaccgtcttgcaaggatggatgctgattaccagaagaggaaacagatggctgagtttgaattgaggagggaggaaaggctaaaagaagcagaggagcggacagcaaagaagcgcctgaaacgccaaaagaagaagcagcggaagaaagagaagaaacgatctaaaactaataatggtggcgagcaacctaacggaggggagtcgtctngtggtgatgaggattcagacgatgaggataagccataggcaagtggcacacatcaatcggattttgaagttgctattaggctactntttgaccatttctttgnggattactttcttaagtaggagctttttagcatgactnatatttgcaggctncaggcccc

SEQ ID NO: 395880 - DNA, 407 bp, Oryza sativa
gagagatcgatagacagatacacgccggcaagggcaacgaacccagcggcaggtagctgctcgcgtgtcgggcgggaatgggacggcacgcgtgctctgccgccggtgtccagcagaagctgcgcaaggggctctggtctcccgaggaagacgagaagctctacaatcacatctaccgctacggcgtcggttgctggagctccgttcccaagctcgcagggctccagaggtgcggcaagagctgcaggtgcggtggatcaactacctgcgccccgacctgaagcggggcagtttctcgcagcaggaggaggacgccatcgtcggccttcatgagatcctaggcaacaggtggtcgcaaatcgcgtcgacctttccggggaggacggacaacgagatcaagacttttt

SEQ ID NO: 395881 - DNA, 459 bp, Oryza sativa
  unsure (1)..(459): unsure at all n locations
agaagattgatggtccactgtctacgggacatcttgccctgatagacactgatgtcaagaagaaccctgcggttaccttcaactacttcagtcatccacaggatctcactcgttgcgtctatggtatcaagaccattgaacgaatactgaagacaaaccgtttctctgaactgtctgccaacactgatggacattcaatggaaagagtgctcaatatgagtgtgcaggctaatgtgaacttgatacccaagcatacaaatgacacagaatccctagagcaattttgcagggatacagtaataaccatctggcactaccatggtggatgccatgtaggggaaggtggttgatcaagcaacaccgtgtgctttggagtttcaggcgtccgtgtaggtcgatggctcaacattttctagatcaccagggacggaccctnaggcacggtcatgatgttgggca

SEQ ID NO: 395882 - DNA, 327 bp, Oryza sativa
catcgggccacccgcctcgttcgcttccatcctctccgcagtccgcacccgcgcgcgcggctacgactcccgcaccagccgcgtcatggcgccattccagctgcgcttcggcctccggatgtccccctcgcgctcctccgacgaggaggaggaagacgacgaggacgaggaagggttcgagtacgaggagatactgagcgacgacgggacggactcgccgccgccgctgatgatgcaggcggagaagggagggggagggctggtcggggcggtggtgggggcgctgcggaggtcgctggtgatgttcagtccgggaaggtcggggaa

SEQ ID NO: 395883 - DNA, 945 bp, Oryza sativa
  unsure (1)..(945): unsure at all n locations
tcaaacccgcgtcgcctcggccctggtcgccgccgccgccgccgccgtcgcagcagcagcagcagcgggagcccccgatccgtcgagatccggcgcccggcgcggggagagggtgtgggacgcgagtacaccggcgacgatggaggccgtcgaggagctcacgcagctgtcggagtcgatgcgccaggtggcgtcgctgctggccgacgacgacccctgtgacgactccaccccacgccgcctctccaccttcgtcaatgccgtcgcgctcggcaacgtcggggcgggcaagatggccgtgctgaacagcctcatcggccaccccatgctggtgagctcgtactaatggccaccaccttgcccttctccgctcacagccgcgcacccacccactgtagcacacggggtgtagggagcaggtgataggcgaggcgagcaacctcctccatggcgccgccccagtgccgatgagcagcgtcctccctgctgttcgagtgctgatgagatggatgtggctggatgttgttggtgtgcggttgctcctatgcgggaagagctgccagctgcagtggatgaaagtaatatatgtgataatttacattagtttgttccctccagcacatgactaagtgattgagtactgtagtagtatcacttcttgttggtgtcagattatatgtttttgctaaatctaaattaactataggattgatcaactttgactctgtgagtgtacaatttgtaggtttaaacattatagtcccaagtgtaaaaatatggttttgttcagaattttacttgctcacataaattttcgattatgcacttcagatttcttgacttcacttttcctgacttgggttccgattaatttgctttgtaataagtgatcatttaacctggcatgcacatgtcaagagaaattaggaattatcnaaatgcnng

SEQ ID NO: 395884 - DNA, 463 bp, Oryza sativa
acatgacatccagggtgaacgtgagccttggtcccagggaggatcgccttctcatgactggattgcacacagtgaatgatatctattgtagctgctgccaacgactccttggttggagatacgtaagttgccagtttccatgttgtttagtgagaattcatttgaacactacaaatgtaggacggtctatgccttcatgatggtcaacctgttaaatattcgatactttatctatatctggataagttaatgtcctaacagaagactgtgagagatttgactaacttttcttattgagcatgatcatatagcattcatgtcttttgaaacaataggagggtagagtttgctacataatgtatggggatctccaaggcataacctctgcatttctggggagcaccataactaaggattatgttggctataggattgcatttttgctaagagccatgcataccct

SEQ ID NO: 395885 - DNA, 413 bp, Oryza sativa
  unsure (1)..(413): unsure at all n locations
ctcaatcgtgtgaagaagctagagcataaactgcaactgataggaagctagctagctagcaggaggatcaatggcgtcgtctccgacgatgttggtggtgatgtgtagtagcttggccatggcggtgatcctgtcgtcgagctcgccggcgatggcgcantggacgtggggttctacagcaagacgtgccccaaggtggaggagatcgtgcgggaggagatgatcaggatccttgccgtcgcccccaccctcgccggccctctcctccgcctccatttccacgactgcttcgtcagggggttgcgacgggtcggtcgctgatcgacttcgacggcgagcaacacggcggagaaggacgcgccgccgaaccagacgctgcgagggttcggctccgtgcagcgatcaaggcgagg

SEQ ID NO: 395886 - DNA, 463 bp, Oryza sativa
  unsure (1)..(463): unsure at all n locations
gaaggaacccttcgtcctcgtcgcctcacttttgtntcccactccttcgtcggcggctcggctcggcgcaggcgcacgggggagaagaccaaggaggagggagaggcggacgcgggagcgacagagattaatttccagtggggtttggggcgcggtgaggaggtgagggatgcagcggcggcgggcgcagacgtgggcgggggtggggaagacggcgcaggcggcggcggcgcacgnggcgctcttctgcttcacgctcctcctcgcgctcaaagtcgacggccgcacagcctactcctggtggattatattcatccctctatggctatttcatggcattgttgcccgtggaaggttttcaatgccagccccttcgnttcctcatggccgtcattgggctccttgccattcaattgttgcagcccgttgcttattgcgtttaactgctgctttgatatatctc

SEQ ID NO: 395887 - DNA, 405 bp, Oryza sativa
gaatcatcttttcctatactaattactagcactactactccagtagagtaggagtcgtgctaagtaatattctgcaaataaagattttcttgtcgcctccggggcggaaaccaatcaacccgggccaacctctttctacctataaattctactactaccccggatagcggattcaccaagttcgcagcagcaatcgtcttcctcttcttcttgttgttgttggcgatgtcggcgatgtcggcggcgggcggcggcggcggcgtggggaaggtggagcggctgtcgtcgatcgacgcgcagtgcggcagctggtgccggcgaagtgttcggaggacgacaagctcatcgagtacgacgggcttctcctcgaccgattcctcgacgtcctccatggcctcacgggga

SEQ ID NO: 395888 - DNA, 393 bp, Oryza sativa
caattgatgcgaacacttcatcctcatctttccttttaaagagggatagctatgagtttgacagagttcacagcaatctctcttcttcaactcctccgagaactccattgcatcctgtttctgagagttactgggacgagaattctgcctcaatgatcttttggtagtatgggacaaagtttttgcttgttcaaacaatatgctgctaagtagtgatgaggaatataactttcgtatcttgtgttcagatagaggagcatttattgcagccatggcagtttctatgcttcttcatattaggtcgtctttgttggctactgaacttggatgtcttctgtcttcagagattattaaattttccaacgaatattgatgtgcagaagctaattgagg

SEQ ID NO: 395889 - DNA, 414 bp, Oryza sativa
  unsure (1)..(414): unsure at all n locations
gcctgacagtgacggccaagtgaccaactaaccagtagagcagttgactntagcagttgctccaagagcccttccttgtataggttctgaaagtggaggattgatggtttcactaatctagttttgcagcgaaattcataatacttgctgctcttatccacttgcttgaaaaactgcatcaacaatggatgatccttttcggctcttgtcacggatcgatcatggncatatgctgtaggtcgagaccgccgcaactntgatgaatcaccacacaggcacttcctcctagttgaccctaaacagcaacagctctagcaaccgtaaagccaccgggaccaccggactgatccggccgctgtaggagcttgctgcttctaacacgggtcggttcaagggggtagcccgnctttaact

SEQ ID NO: 395890 - DNA, 470 bp, Oryza sativa
  unsure (1)..(470): unsure at all n locations
atgacactcttcttcacttgctgaacctgatagcgacattattcttcctctcaccttgccccttcacactcgtcactcgctccaaccagccgcctgagctctctcgccgtacgtcggcgctccatcggccggaattatcggcggcgatggggctgctgtcgcaccggtggagcggtcggagatgaagcccggcgaccacatctacacatggcgcgccgcctacacctactcccaccacgggatttacgttggagggagcaaggtggtgcatttcacgaggaagaaggaggcagggacggcaggtctggactcggcgatcgcaatctccagcctcctctcgcagggctcgccggagtgcccaacttccggactgcggcttccagctcccgggacaacggcgtcgtcctaactgcgtcgactgttctcggncggttcctcacggttcgagacgcgtccgcggcggtgttctc

SEQ ID NO: 395891 - DNA, 400 bp, Oryza sativa
  unsure (1)..(400): unsure at all n locations
aatcatgctactaattcatattaaatctcaacatgcagaaatcaacttgttaagaaaacagcaaaggaaggccagatggtatgaactctggaatttaagaatgtgaattaaattttctattattcttgttcttgtgcagatgccttctttcgtattcggtgacacagttcactttatttatttgttttattattttccttaacaagttgatttctgcatgttgagatttaatatggaatgtgttttataatcatgctactaattcggtgctgtatatcataatcaaaggactgctatcactagatcaagatttaacattggaaatttatcaacgacaagatcacagaggtganggttctgaggaataaatttccgngctggccttgagaatgaaaatttg

SEQ ID NO: 395892 - DNA, 448 bp, Oryza sativa
  unsure (1)..(448): unsure at all n locations
agaaatcacgagagacaacagagagagctagtctctgtgtgctcgtgttaccctcactcacgacgggaactatggcgattggcaagaagcacaaggaggctgctgcactgtcgtcatcatcatcgcctcttctccctgcagatcggaaggctttgctcttgctgctgctgctgctcatcgtcttgctagctcgccctgctgcatcctccgatggagtgcgctatgattacagagcttacactgagtgcaaatcgcatcctgaacctgcactgtacaacggtgggcatcctgcgctgggcggacaaagtgacggacttcagaacagaggacgatggcaactattcgccggcatttgtgctgtataatatgtccgcggcaacagtatacagcttctcctgctgggtgaaaatcgatgggccaacaactgctcatgtgaagccaagtattn

SEQ ID NO: 395893 - DNA, 688 bp, Oryza sativa
  unsure (1)..(688): unsure at all n locations
aaatggnnnanccnnccatgggnttttccccaagtntccnacgtttgtaaaaangaccggncccaatnanncccnnntnaaatncagtattnnacctantnagngcnaaatttggggtacnggnncccccccctcgnagnttcgtccccanntcntnccgcagcactgtcctagtgtgggcacgttgatcttgctctacttcacactctcaatggggaggatgacaggaggtcaggctgatggccagtgatgccatctgaccgcacagtttatcacttttcatagtgtttctgatgtttgtaaagatcaagaaatggacggttggtttctatactagcagtgttacatcactgcttaattatatcaccatgatttagatgtttgtacaaaaatatgtaggccgtatgttagagagtttttaagtggcatgaggtgattggtgaatacttgaagtgtaaataaacacatgaacagcaattggatggacgacggcggtggaacaaaatggcagggaaaattggataaaagcattgtcgctgcaacaacgaagttacctattgtagctttggggttttgactgtacaaatgagggtttacacatgaaggggtaaatattcttttgcggaccattgaaccgctcctcctaannnnnnnnnnnnnnnnnnnnnnnnnnnnnnnnnnnnnnnnn

SEQ ID NO: 395894 - DNA, 320 bp, Oryza sativa
  unsure (1)..(320): unsure at all n locations
cactcgcacgcgccgccgccacagagctcagcttagctcgaagctactccgtctcgaggtagctagctagctaagccttcatccatggcgtcaggagaagcagagccactgcagtacacgaccaccgtgctccgagtgtcgatccactgcgagggttgcaagaagaaggtcaagaaggtgctccagaacatcgaaggcgtgtacaaggtgacaatcgacgcggcgcanacaaggtgacggtgacgagcagcgtcggcgccgacgtgctcgtcaggcggctgcacaagtcagggagcacgcaaggtgtgncgtcgcgccgt

SEQ ID NO: 395895 - DNA, 472 bp, Oryza sativa
  unsure (1)..(472): unsure at all n locations
cggggactgttcgacgaagtgcatgcccggggtgcactacgggacgcgggagagcgtggggtgcgcggcggactggtgaagcgcggcgtggtcggggtgagggacttccgcttcttcgacggcttctgcgggtgggagagggagcagctgcgcgacgaggtgcgcgcgggcttgtggcgcgtggcggcgtgcagccccgccgtgctgggcctcgccaccgtcgtcaagggcggactctgggaggaggtgcagggcctcgtcggagagaggagggtgtggtgactgattacttctcaagggtgaccattatgtaattaattaattaattaatctcttaattaactcgcaagtaaaagtatttactcctttcagattaatgattttaggcttttagtcatcacggtaggtttaaagagggtttatttgtatactctgnatctngtactctatcgtttgccacatacgggacana

SEQ ID NO: 395896 - DNA, 514 bp, Oryza sativa
  unsure (1)..(514): unsure at all n locations
gngcggncngnngggggacnggncnggtggnnngnntnntntngntntcggacgtaatttaagttaagctccgaccacgaagcttctggcgattgtcggcgtcaagaacagcttgacgagcaggcagcaagaggattcgttcttcttctgtggtggatcttgattgggctccctgttttagtgttctgttcttcgcaagaaaggggccattctcttttggtttctacatgcagatgagtagcatggcatgccattcccttccagagagtggaagcaacttgtcagctgctgatgaactctttcagaaccaaaggtcagagcagggaatttactggacactctggggactccaggctatctgatgatctgaacacaacgaccgtatattcagacaatcatggcagcaacggtggcggcacgaaatctttcggcacctctgaacattgcagtacagtgccttcagattcagatgagcaacnnggtatccatcacagtttnggcctttcacatgggg

SEQ ID NO: 395897 - DNA, 554 bp, Oryza sativa
  unsure (1)..(554): unsure at all n locations
tttagtgcatgtttttgccaagaatgatcttgctaccaggtgcatggagattcttgctactatggagaggcaaagcatcaagagagaactagagagctctaggcggaggatgttgctcgctgcaggcgctgccgtgtttctctcttggcctaatccggcagcatacgcagcagaggcttaagaaggggttcttgcctgtcaccgacaagaaggatggatactccttcctctacccatttggatggcaggaagtggttgttcaagggcaagataaggtgtacaaaggtgtcataagagcctttggaaagtgtgagtgtcaacacaattccaaccagcaagcaagacatccgtgagcttggtcctccagatcaggttgctgaagctcttatacgtaaggttttggccgcacctacgcaaaagacaaagttaattgaagcaaaagagaatgatgttgatggcggacttactacacttttgaggtcacagctcaagntccaaatttcacgagacatgcgcttggtgcaattgccattgcaaatggcaaattttacacg

SEQ ID NO: 395898 - DNA, 282 bp, Oryza sativa
  unsure (1)..(282): unsure at all n locations
agctctcgtggagcgtataaaaggagggctggtgatcgatcagctcaagtgctcaaaccctctcaagtttcatcatcacccaacacaatcgcaagcagctagcaacagggccaacccgacgaacgtgagatggcggcagcgtaagaggaggccttcccgatcgggttcacgaaggggatacggtcctactggcgaacgcacagtaccatagcgtggacagcagcgcggcgggccggggcacgagcaacctggtgcggctcgggggcgnaangggcacgggca

SEQ ID NO: 395899 - DNA, 469 bp, Oryza sativa
  unsure (1)..(469): unsure at all n locations
ggacggngngtcgggcggcggctcaaccctgttgggttggagcaagattatcctagtaaaagattgcctaaacacatctctgttcttcctgagttgttcgagttcttccacttttccttttcattttccttagttgtgttgagtccatctggtgacgctgacaatttctggtatcagagccctttcgccccaaaattctcttggcttggttgtaaaattccagggaaggattgggatctattcttcggaattgaatcccgcgaaaaggcaacttgccttctcctgggttaatcgagttcggagcgtgggtgagagagatctgagcagaatatcctagtgttgaagggaagctttaggaaccatggctcaagcaacaaacttggacctgctcttgagcccatagcggggaataagaagaagagggtngaacagaagaccgttttcctggagattcccggctttaaggaag

SEQ ID NO: 395900 - DNA, 595 bp, Oryza sativa
ctgcagaagtgcaatatcatccaagactgcctgttgccagaggtatctgaatccgttggcaatggggttcctatattccctttccttactttcgtggctcaatgccccaatagttggtatgtccttttgcaagttactattgggtagtaacaggctgcatattactaaaccttggagtaaattttgcgagagtaaacttggccagtgatgaaatactaatgggacatgcaaaatataaagttatgccaccacaaggtttgcctctaaattttgcctatgactttgtctttttgaatacttgctgtaattggacctacatgaaaaactcttaaccatagaattgtcctacaaattctcatgtatagtgatatccttcttttctatgttgtcattctgcaaatttttccagctttcagcatgtttttggcatgagttgaccatcctgtggctttcagggcttgcagtaccactatggcaagcaaataacaacttggatgttgagcataggttgtaactgttgtagttgtaccgtatactttttatacctaaatacttagttgatttatttggatcttcgtgaaaaaaaaaaaaaaaa

SEQ ID NO: 395901 - DNA, 532 bp, Oryza sativa
  unsure (1)..(532): unsure at all n locations
cggacnggnangnagtagaagcaaccattgtctatgccactcatatatttgatggattggaatcatgggctactgacattgcatacatccaagaaggtgaattgagaaaatcagcaaaatactctgacgttgaggagctaaagagtgccaaaaacttgctgtcagttgtcgagtcatggctgcgatctgagaccaaactccctaagaaagaacatccccgtcctgagacccagcccaggcgctcctctccatttgatgcttcaccgttccgatcttcacgccacatggcctactaccgttgatgattgttcccacctctacacctattctggtgctaattaatcatacttccacaatttgtttctgttctgtttctcatccctttctacggcattgtacctaatatataaataaagcgaacttacccttgtgccgatgagcagtgagtacccatcaagttcatttctgtacttctttcngntaatctaatactacatgaattcagtccctgtcaaaaaaaaaaaaaaaaaaa

SEQ ID NO: 395902 - DNA, 499 bp, Oryza sativa
  unsure (1)..(499): unsure at all n locations
cctcgctcctcgtcctgtctggctgtctctcctcctccccgcgtggcgncgtcggtagataccgcgtgattcatccggcggcggcgagctccgccgatggagaaggtgaagggtctgctgaagccgcggccgacgccgcagcagcagctcgggtagtggcagcgcaactccgcaacgagtgccgcgtcctcgaccgccagatccgagatgtgcagagggaggagaagaacgtggagaagtctatcagggaggctgcaaagcgcaatgacattggatccgcaaaggctcttgctaaggaactagtgaggtcaagacgtgctgttaatcgtctctatgaaaacaaggctcaactaaattcagtatcaatgcatcttggacgaaattgttgcaacggcaaggactgtcggtcatctgtcaaaaagtgctgaagttatgaaaatcgttaacaatctaatgaaagctccagaattngctgccaccatgcaagaatttagtaaag

SEQ ID NO: 395903 - DNA, 380 bp, Oryza sativa
  unsure (1)..(380): unsure at all n locations
catccaccgagcaggaatccaatccgaatccaccatcagctctcctatcacattccctgcatccgtcttcgagcgagctatgcggcaggaggccacctgcagccttgtgctgacccaggacgcccaacaccggaagaaccagccaccgctggctgaggaggacgacgatagggatcataccgacgatgccatgccgccgccctgctcgatcttgctccgccaggaggaagggcgaggcgacggcggcggcggcgggggaggggctgctggtgccgccgctcaacttcgccatggtggatcatggcgtataccgctccggcttccccgacatctccaacctgccgttcgtcgagtcccttcgcctccgctccgtcctgtnc

SEQ ID NO: 395904 - DNA, 435 bp, Oryza sativa
  unsure (1)..(435): unsure at all n locations
gagaaatcccccgtctcctccgctccttgcgacaagaacagggggagggagaggcgccgatccccatctgctcgagcaaagcagcggaggggaggggatcctgcagatctggaagaagctcatctcttaatttcagagagagcctcaaccttttgatacaagagtaacagtattgggggttcatctgaacccccaaatgtcccaagttggatccgcccctgagacgatggatctggagacggagaatcgtcttgcttctttacttctcgaggaggcgaggaggttgcaggcggaggctgacagggaaggtgttcacgcatatctgcgaaagcccaatgtaaggcaccgtccgaattcgcgcttccttacggccacagtttcgtggagttcagcaagcgaaccgtgttttggaggtcaattaaatntggggtgcca

SEQ ID NO: 395905 - DNA, 368 bp, Oryza sativa
  unsure (1)..(368): unsure at all n locations
caccagcagcagcagcagtagctgagcttgaagcagcagagcgaggtagacatggccgccgncaccatggccctctcgtccccggcgctggccggcaaggcgccgcgaaggtgttcggcgaggggcgcatcaccatgcgcaagtcggcggcgaanccaaagcccgtcgcgtcggggagcccgtggtacggcgccgaccgcgtgctctacctcggcccgctctccggcgagccgacgagctacctgaccggcgagttccccggcgactacgggtgggacaacgcggggctctccgccgacccggagacgttcgccaagaaccgggagctggaggtgatccactccaggtgggcgatgtcggcgagctgg

SEQ ID NO: 395906 - DNA, 466 bp, Oryza sativa
atccgaggagcagatcgaccaaaagtttctgatcccctcttcttctcgcttgcttctctcctactcgatcaatctcgctagagcttcttgcttgctttgatctctcgagcctctagcctagcttagctagctaagctagctactcatcagtgtcctaagtagagttgctagctagctaagcatggcgagcaatggcgaggcgacgacggggagcgagacggcggcgccggcgccggtgccggagccgaccccgccgccgtgccaggggaggctcatcaccgtgctgagcatcgacggcggcggcatccgcggcctcatcccggccaccatcctcgcctgcctcgaggccaagctccaggagctggacgggccggaggcgaaggatcgcggactacttcgacgtgatcgccgggacgagcaccggggcgctgatcacgtccatgctggcggcgccggacgacgaccg

SEQ ID NO: 395907 - DNA, 534 bp, Oryza sativa
  unsure (1)..(534): unsure at all n locations
aaaaaaaatcaaaattcccgagaagaagaagggaaaaaaacacacacacatacagagagaaaatatcatggcgctgctgagcccgcgtgtgccgcggctgccgctcgcctccgcctccgccgctggagcggggctccggtgctgcgtcacggcggcagggccgggtcggcggcgtggtgccacgcgtcggcggccggcagcgtggcgtcgtcgtcgtcggagctggaggccatccggtgggggaccgccaagctgcagggcgcgcgcgacgagatggaggacgaggtcgtcctccgccccggctccctcctcgacggcttctccttcgccgccgtcttcgacgcccacgccggattctccgccgtcgagttcctcagggacgagctgtacaaggaatgcgcggcggcgttggacggcggcgcggttgttgagaacaaagaacctcgacgcaatnaaccgaattgatcaagcggggcttngcaacgtcgacgcaaactttcaanttggttgaganatgacaaggaagttagtccg

SEQ ID NO: 395908 - DNA, 330 bp, Oryza sativa
  unsure (1)..(330): unsure at all n locations
cacctttcctcctccaaatccgacctcctcttgttcttcctcctccacccccatcgccgatccgatcccccaaactcgcagtccacttcctcccgcggagatccatccaccaccagccgccagccgccgcggcgcgagattcagattcgtcgttctcttggttgtttgaggaggaggaggaggagggacaagatgggggcgtggatgtcgcgggtgtggttcttgatgttcccggcgaaggagtacaagatcgtcgtcgtggggctcgacaacgccggcaagaccaccacgctctacaagctccaactcggggangccgtcaacggcgga

SEQ ID NO: 395909 - DNA, 308 bp, Oryza sativa
gtgggggaaatactttcttttgggatgatgtttgggtgggagatactgctttaaaaattcaattcccatatctgtacaatatttgtagagctcctagagctacgatcaaacaaatttgtacaaatggggagtggaatatcgaattaagaagatcattaagtgagcaagaccttgaagagtgggataatttgcatgagattctagagagggtgacgttaacagaagaagatgacaaaatgagctggggtctgactaaatcagggtggtacactactaagtcgcttataaagggtgttttggggggtaag

SEQ ID NO: 395910 - DNA, 392 bp, Oryza sativa
ttcggaaccaactgatccaattcgaacttttactcacaactgcaacatttgttgtcgccatttttggagtggttgctgggatatttgggatgaacttcgagacctcagttttcagcatacagaatgcattccagtgggtgctcatcatcactggggtgatcggcgctttcatcttctgcggattcctatggttcttcaagtacaaaaggctgatgcccctgtagatgatcatagcatccataggaccaatgaatcaaactcaattgtcgtctacgctgttgaggtacttgatcagaagcctgaatttctgcccgatgtaaattaccattcttttagaattctacagcatacctaccaaagaaattgaatgaaaaacaaaagttttcatacca

SEQ ID NO: 395911 - DNA, 962 bp, Oryza sativa
  unsure (1)..(962): unsure at all n locations
cggacggtgggcnancagctgatgatgacatctcctccagagctgggaatttagttgatcagagcatgactgctgatttagctggtgaggtgacatctgctgctgggccagtacggttggaagacctgcagagaatactgagtgctatacagccatcagatgctgtggcagaccctgatgctggattaggattaggagacatcttgaagcctgatttggtgttacccactcatggaaactttgcccattgaacagttggcatcatatcttccagagggcccatggactgctggtgatattcttgaactattgcaaagtcctcctttgcggcagaagtagaagcgtttacccatgtgctgcggactgggcaaatagatctagcacaatttggagttgaccctagtaaatataaattcacagtagcttcgttcctggaggctcttgaagactccgtggcaaaagcttcaggagctggagacaaggattcagagtcccagagaggcggtggaaatgatcccatggatgagagttaatgtcaaaatggtttggtttgaaaacttgatgaaacacaaagcgggactggacttatgttggcacgcacaggcctatttctagtcatttgatctgattatagatgcttgataggtggcatagacattttgaagctggctttattctgcactgcctgtgctgttatgtgtatacaggggggatacggtggtctagcctattttgcactggtgtatgctcagtagagtattaaaggtactggcccattgttaagtgtacttgggcgtcgtcgtcatataatggatggatggatcggctgatcgatcagctgggttgggcgtacgtctgcgcactgctcctcccagttcaagtacnnnnnnnnnnnnnnnnnnnnnnnnnnnnnnnnnnnnnnnnnnnnnnnnnnnnnnnnnnnnnnnnnnnnnnnnnnnnnn

SEQ ID NO: 395912 - DNA, 424 bp, Oryza sativa
  unsure (1)..(424): unsure at all n locations
atcctctcccatgcttccatggattccttctagcttcgccttagcttctcctcctctacagtctacacgcgcgcatgcatagcatctatagagagagaacaaattaattattaggatttagtcgcaatggcattagccatggcgcccaggctagtccaccacccttgctgcatgatgctctccaagaacccaagaacgccgccgccaccgccggcgatgcaccaccaccatgcccacaagccgctcatcaccgcgctcaccagcacgtcgtcgttcttgctccgctccgtcgacgtctccaaggacgacaagccgctggagacggcgactacgacaaccccgcctacttcggcaacggcggcggcggctncggagaccgaacaagcggaggcggtggcgtcgcggagttggagtttgaggttga

SEQ ID NO: 395913 - DNA, 502 bp, Oryza sativa
  unsure (1)..(502): unsure at all n locations
aacaacatctgaattagggacagctgctcccttatcgaccatccctggttcagagaatgagttcaagcaagatcaactgccacttgcacggggcgctgatttcatccgtgggggtccttctcatgattgggttgaatcttttcggcctccaggactcccagaatttgctgtgccagatgcacagctttaaagaatttgagcaaatttttaacagcacagggccaacctttggaccaccagtcatggatggtccaccacaaagggtcttatctggtgtcctacgttctttcctagcaagtggtcaagctggtgtgccatttcaacctgttccagtaccagcgcttggtttgtctgaaagtgacaagcaatgtatacgtgatcgtagttgcattatggcacggcacattttngctgaccagcctgaaggaatatatccaggacaggtaaacacattgttgcattcacttgatatcgccagaaatttcgatgaagggccctgcnc

SEQ ID NO: 395914 - DNA, 400 bp, Oryza sativa
  unsure (1)..(400): unsure at all n locations
ctgaaacggtgatcgatccaaagaacaacaactcggagcaaagctagctaacgaagttagtntccaaacaaagctagcttatcgcgattagctagctagaagagagttagctaggcgccatggagctaggcgtgccactgccacgacggcccgtgcccggtagctacggcgtgccgttcgtctcggcggtgcgcgaccgcctcgatttctactacttgcaggggcaggacaagtacttcgagtcgcgcgccgagaggtacggctccaccgtcgtccgcatcaacgtcccgccttggcccattcatgggcgcgcgacccccgcgtggtggcgctcctcgacgccaagagctttccccgttcctcttcgacgtcgccaaggtcgagaagcgggacgtgttca

SEQ ID NO: 395915 - DNA, 719 bp, Oryza sativa
  unsure (1)..(719): unsure at all n locations
tnctcaaagaaaaggtgacgccagggcatgaaaggaaggatggaaccaaggcaagaaaggcaaggaagcagaacaaggccagccactttgcgcaaggctgtcgtgtttgcggtcggtgtaggcatcctttggtgctggactgcttctccggctggactcctcgggtggctcttgcccaggttgtaagttccattatcatctaccaccatggctagattaacgcctagcgcgcacttcgatcgaataggtgatagataaagcttcaggtatgtgcttcatgatgttagaagaatgaagatcatattcttggagctcattcatatctgttctgttgttggtttggaagccttgctgatgatattttcatatcttcatgtacatataggatgaatttgctgtatatattttcagaaactgggtgcttctgtatgttgcatgcgtttgcccgaatgttgtacatatatggggtcagtggtggtggaactagggaaaaaaatccgtcgacatcaacaatgtattaagtataaaacttgtattttcagttgctggagtagccagctcttgtttgtataataaaaacttgtatttttagttgctggtttagacagctcttgtttgtattataaaggcctaggcacgcttgtgacactatgaatttccatttgccaaattggtcttttttcttgtcnnnnnnnnnnnnnnnnnnnnnnnnnnnnnnn

SEQ ID NO: 395916 - DNA, 909 bp, Oryza sativa
  unsure (1)..(909): unsure at all n locations
aaaaactagaggtggaagacgacggcttctcgagtccatagaaagaggggaggagagagaggcggtggtgggaagcaagaatggcgtgctctccgcgtgtgttcctctcggcgtcggctactcctcctcctccatctgctgctgcttcctcttcgtctccgttcctctccacggggcatgtgtcctcggctccgtccacgtccagatggactgtccaatacaagcagccaggacatatcattctatcgaaggacccatgtgcaaagcttcttggcttttgctagcaccagatgcatcagaaggcaaaagaagttcaggtgataatgtggtaatggttgatccactggaagctaagcgcttagcagctcaacaaatgcaacaaattcaggccagagaaaagctgaagagacgtcgtcgagcagaagctattaatggtgcattggcaatgataggactgactgtaggattggtactggaaggtcagacaggaaagggtatcttggcacagctggctggatatctcacggctttgtctagtttattcgggcaatagcagatcatgattcatgagttcctttttttgcttttaacttcctcaaccaggaaagcttttgtctgaatctcatttgctggatccaaccaatttgtttatggttaatcctgtccatatttgcaatgacatgcagatttgcaggctagtgatccaattaattgtattgatctggcgcctgtcctgaaaattcatacacggtgtatcaagttaaaacattgtattctcccgcaaaaaaaaaaatcaatgctttgtattcatattcttttccatgtactcaacagcttattatgacagtgtaaagcaactgaagagtagttcaattgatcattcatnnnnnnnnnnnnnnnnnnnnnnnn

SEQ ID NO: 395917 - DNA, 409 bp, Oryza sativa
cccacgcgtccgggaaacgagtcgtaagtaaatcttatgtgaatggcatgggaatcgactggtctaaagtaagaaacgtcatggacatgagagctgtatatggaggtttcgctgcagctttgagggaccaaaaagtctgggttatgaatattgtgccaacggattcagcagacacgctgcccattatttatgagcgtggcttgtttggtatgtaccatgactggtgtgaatctttcagcacttacccgagaccatacgaccttctgcatgcagaccatctcttctcaaagctaaaaaagagatgcaaattgttgccggtgtttccgggggtcgccagaatattgaggccagaaggaaagctgattgtgagggataatgcagagacaataaacggactgcaaggcatggt

SEQ ID NO: 395918 - DNA, 501 bp, Oryza sativa
  unsure (1)..(501): unsure at all n locations
cacttaaccacaacaagtctgcatcattcttgtccctctaaatcagcatggcttccataggattcagctatgcacagattcatgtgcagcaggacaggtgcaggaggaccaatgaagagaagatgaagaagatgatggcagaagaggaggagaagagcaagaagggcatgtgtnaaggagaagaggaggagaagaacaagttcatggctgctgatgagaagagttgccactcatggaccagtgagagggtgcacccatgctcatctccggcttcaaagattggccggtgaggtcgatcggctgttggccatggagctaagctagtaaagccgttcaggagtctaactttagtttgtgctttcgtgttaggtttctttttctaaaaaaaaaaaagcatttccttcagtcttgttaaggnaataaagatggnttttgtttgaccttactgncttgtccttggngtaattgtcattgnagggccaggaaattggggaaagcttt

SEQ ID NO: 395919 - DNA, 495 bp, Oryza sativa
  unsure (1)..(495): unsure at all n locations
cctcgtctgaacacaaaaccccgtaaaaatctccgcctccgccaccgccaccgccgccgacgccgccatggccgccaccgccgccgcggcccacaccctcctccacctcggcggcgccgccgncncaaaggcgnaggatggagaaatatggacatttagcgtaagatcctttgaggcacctcccccagaacgaactattcatgtgaactacgaaggcttcgctgaagatgtgagagttggtgatgagcttcttgttgatggtggcatggctcggtttgaggtggttgagaaattaggaccagatgtcaagtgccgttgcacagatcctggtttgttgctgccacgtgccaatcttacattttggcgggatggtagtattgtccgtgagaggaacgctatgctacctaccatttcatcaaaggattggcttgacatagacttttggaatttctgaaggtcgtagatnattgcagtttgngtcaaatctgcagaagt

SEQ ID NO: 395920 - DNA, 532 bp, Oryza sativa
  unsure (1)..(532): unsure at all n locations
ctcgtctcggaccacatcgagcgagccgccgagccggactcctcctcgaatcgaatcgaaacgcccccgatttgaagcagcaaaaagatatccgaaatcgaatcgagtcgagtactcgagtgacgccttcgcctcgggtgtccaggaatagctcgagcttccgccacgccacgcgcgagggaaggagcgggtcgcgcgggggagggggggcatgggatcggaggggcggactggagcggggcggcggccgcggcgggcggggcgcctgcccgggggacgtgccggcntcgggcgcgtccgtggacatagcgctgccgctcccggagatnacgccccgcatcataggtatctgcaaggaattggtgagggggttgtcatcgctggacaactcgngcttctcgatcgaaacgntgtcttgcggcatcacgaatatttttctgaaggtgtccgcagaagatggnaagggtaacaagtcttctgttacanttcgtttttaatggccaaatacagactttggtnatttatcgaaaga

SEQ ID NO: 395921 - DNA, 474 bp, Oryza sativa
  unsure (1)..(474): unsure at all n locations
cnccaatncnccttctcccatcccaggaggagccgccggaaccctcaccgtccccccaagatccaaccaatctaccggtagacccggtgttgtgccgtgatggatccattaggcggtcgccgccgccgtactgctgcatctgagagtggaggaggatggatgaagggttgtaccagtgtgagggcgagagatacgaggagcaggaataggaagaggaagaggactgtagtaccacctgcagcagctacttttcctgatctgctgccggaggagattgtggtggagattctggctcggctgcccgtcaaatccctgctacgcttcaagtccgtctgcagagggtggcgtgcaatcatctccgagccatccttcatccgaacgcaactccagtgctcggcttctaaacaggagccatccatcctcatcaagcccccaaaccctccttggggtttcgatatttaaacccccatttgg

SEQ ID NO: 395922 - DNA, 704 bp, Oryza sativa
  unsure (1)..(704): unsure at all n locations
taacgcccgttgncccccnnttaattccgccccccttttngggccgnattgggtttnccgggcccccccccctcgggttcgncccccaagcttccggcccattcaccagcagcttcaacgtttcatcgatcagcaacaaggcatctccagccactggccatgttggctcagaggaacggcattagcaggaggggccttctcactttcctcacctccactgcagccatacctgaggctggtgaatcaagaaaggctctactgcaagagtttctgaagaaatcaagggaaaacaaagaaaagaacgacaaagagaggctagacgactactacaagaggaattacagggattactttggtctgatcgagggccctgcaagacagaagaatgaagatgagcttacagagtcggagaaaggaattctcgaatggcttgacaagaacaaatagtcagaagctcaggataatatgcatgcctaaattctggaaggttttcttacagttattgctttagttatgcagtcttgtgctgcttatctgagaggcatgctttcttgaaggtcatcctttgtagtgccggtactctggcagtaatgttgtaattacaagtgtgttcatagacaaagtataaaaaatgctgaacgatctcaacataatagttcacaatcagagaggcgaagacagatattttaaaaaaaaaaaaaaaa

SEQ ID NO: 395923 - DNA, 352 bp, Oryza sativa
  unsure (1)..(352): unsure at all n locations
ggcgcacacacgaagacgaggcggcgatggtgagcggcggaggagtagcggcggagaacggcgagatggtggggaacggggaggggaggaagggtgcgggggcgagcttnctggtgacggggggagcggggtacatcgggacgcacacggtgctgcggctgctggagaaggggttcgcggtcaccgtcgtcgacaacttccacaactccgtcccggaggcgctcgaccgcttccgcctcatcgccgncgccgccctctccgcccgcttngacttcatcgccggggatctcaagagcaaggacgacatggagaaggtgttcgccgccaagaggtatgacgccgtgatccactt

SEQ ID NO: 395924 - DNA, 822 bp, Oryza sativa
agaccgagagagagaagcagcacccaaaccctagccctcccctctcctcccgcacgcgcgcgtcggcgccaccaccgggagctccgccgccgccgccgcctcatccgccccgtgccatggcggagacccccgagcgcaggaggtactcagggtccccctctccttacaggggaaacccaaaatcaaggtcaagatcacgatcacctgctgctcgatcccagtctaggtctccagtccctgaccctagatctcaggcaaggtcaagatcaagaagccgcgagagggagcctgatgctgtaaatcatggaaatacactgtatgtgactggactctcttctcgagtgactgaaagagaacttaaagattacttctctaaagaaggaagggtgactagttgccatgttgtccttgaaccccatacacgtgtttctcgtggatttgcttttgtcaccatggacactgttgaagatgctgaacgctgtatcaagtatcttaaccagtctgtaatggaaggccggaacatcacagttgaaaagtcacgtcgaggtcgcccaaggacgccaactcctggaagctatcttggtcatcgatatgaccgtagagagccacgtgggagataccgcagcagaggaggtggctatggccgtgatgagtactacggcaatagctaccgcaggtctccgcctccaatgtacccatcctacagggacacaagggacttagaataagtctctggaaaccaaacagcccctagtctgtaatctggaatgattttaagtacgactggtatgtcttattttggcaaaaaaaaaaaaaaaaaaa

SEQ ID NO: 395925 - DNA, 525 bp, Oryza sativa
  unsure (1)..(525): unsure at all n locations
taattctctcgccgtgtaacaacaacacacgcgccaccgagagaaaccaaacactagacccccaccacgagttcacgacgtgcacgagcgagcgagctagaaaagcaagcgagagcaagcgcatggccccggcaatggtagccgccatgggagagaagccgaagcccgcagtcgtgttgggcggcatggtgagcgggctgagggaggtgtacgagagcgggaggaccaaggacctggagtggaggcagtcgcagctcaaggcgctcatcaggctcctcaccgacaaggaggaggagatcttcgccgtcctccacgacgacctcggcaaagcaccgcgccgagtcgttccgagacgagcttgggattctttgtcaagtcgatcaagtacacgcttgcaaaacctcaagaaatgggcggcttcggagagggtgagcagtaagctcgtgcagtgttacatctgcatgcatttcagacaggtactaactcttgtttaccatngcttttggctcctaagctgtgcttttg

SEQ ID NO: 395926 - DNA, 659 bp, Oryza sativa
  unsure (1)..(659): unsure at all n locations
ggtgaggccggtactaggggagggggtagtagtagtggtacaagtggtggttgtcgtcgtcgtagtcttgtgggttgcgtgcgtgcgttcgtgcgcgccanaangtttcttgcgacgatcgtgtggggtgggttcgtgtgctctctcgctcctgccattggttgatgagcatggggcattactccgagcagaggccggggttcgaggtgaccaaggactggaacggcgccgaccaggtcatgatccggtcgccgcggggggcgtccgtccttggtcagcctgcacggcgggcaggtcgtctcctggaggaacgaccgcggcgaggagctcctcttcaccagcagcaaggctatcttcaagccaccaaaagcgatgcgaggtggaattcccatatgctttccacagtttggaaattgtggaacattggagcagcatggatttgcaaggaacaggctatgggccatagatgatgaggctccaccactaaatcataatgataacaacggcaaagtttctgttgaccttctgttaaagccatctgaagatgatctcaaatgttggccanactgctttgaattccgtctcagagtttctctttcgacggatggagatctctcgttagtnatcacgagtcaggaatgttaatgggaagcccccta

SEQ ID NO: 395927 - DNA, 451 bp, Oryza sativa
  unsure (1)..(451): unsure at all n locations
ggcctccagtccgccggcgacgggcgnagcaaggccgggttgtgcagccgcacgtgcgagtccgaccactgcacgacgccgccgttgctgcgctacggcaagtactgcggcatcctgtacagcggctgccccggcgagcagccgtgcgacgagctcgacgcctgctgcatgcaccacgacaactgcgtccaggccaagaatgactacctgagcacggcgtgcaacgagcgagttgctggagtgcctggcgaggctgcgggagggctcgtcgacgttccaggggaacaagtgcatgattcgacgaggtcatcgacgtgatctcgctcgttcatcgaggccgccgtcgtcgccggcagnttgctgcacaagccttagcttacatagcctcagccgtgctgcaggnaccacccctgccggcggcgaacggcggccggatcgacggcatgggcgn

SEQ ID NO: 395928 - DNA, 394 bp, Oryza sativa
  unsure (1)..(394): unsure at all n locations
tcgatcgtctccgtcgactcgaccttgtacctgtacctgcttctgagcgcgacgaagacnacgncnttgatgcgccgaggacagtgaggaagccgtagtagtagtcgaggtgcgaggcgttgaggttgttggtgacccaggcgtcgccccgctcccgcgtgacgcgcgacacgagcgagaggaggaagctgctgagcacgttgccgacgccgtacgccgtcagcgacatggccgtgccgaggctcttcatgctctccggcgcctggtcgtagaagaactcgatcttgcccaccaccaggaacgcgtccgccacccccatcagcacgtactgcggcagagcttcgaagatggtgagcggcacgggaacctccgngggcggcggcgtccagcccgt

SEQ ID NO: 395929 - DNA, 469 bp, Oryza sativa
gaaagcgaaacccgcaccaaacggcgacgcgcacggcggcggcgccctcgagcccaacgccgacgagcccccatggcgggcgtgcagaagccggccaagcggctggggggaatggcggaggcgctctccatagccgccgacctcggcttccccgccccttccccgcgcaggaggatcagggcagctcagacaaaagcgatgatctagtgagggttttgagggaactgactgttgtacagaggaacattgccaatttgcaagtggaactacagggcagaaaggatgataaaaatattgctcatctgactcacgttagtagaatggagaagaagtgtgaatctttggccagaatcaccactattttgaaagatgtaattcaaaacaaggaccgcattattgctcgctgcacaaccttactcctcgattgcattcctgttgaagtgaataccagaacaatttcagggctact

SEQ ID NO: 395930 - DNA, 407 bp, Oryza sativa
  unsure (1)..(407): unsure at all n locations
ttttaggcacgagcnganncnaaatncagnacgagtcatacttaagttccttagcatcctaagtatctcttagctgtgctctgcattatggcataatgtttggtcttggtgaaggtgaatagtgacgccaactactgaaaacctggacaatgcaagtgttggaagatgttgtaaatgttggatctaacatgacacgcacccacctattgttgccatagttcgtgagccgcaatctctatttttgtcggaaaggaaaagagtattaatctttactatcacgaccggagaagaatgccgttacagtgcgatatggtgccgggaacattcctgacgtgatancacgttcaagtgatagacaaactattttttcaagcaattgcagggagtttcgatgtaatattagtagc

SEQ ID NO: 395931 - DNA, 471 bp, Oryza sativa
  unsure (1)..(471): unsure at all n locations
tggtaggcgagtcgctgggcagcgagggagacagcgcggcggcgagcgagatccaagcggcggcgggcggagatggcggcggaggggaagacgagggtggtggtggtcggcggcggcatcgcgattccgctccttgccaagaccatgcagccccacgccgacgtcgtcctcctcgatccgaagactatttagagatcccttgggctgaattgagatcaatggttgaaccctcttttgctgagagatcattaatctatcacagagattatctcaccaatgcaactattgtaacctcttctgcagtcaatatcacaggacaagccgtgctgacccgcttgatggtcaatctcttgcgtatgattatctagttatagcaacttggccacgnatttaacttctccttgggagcagaagcaagaggntaaaagatttccaaggggtaaagggaggtttaatcctccgatcagtctt

SEQ ID NO: 395932 - DNA, 462 bp, Oryza sativa
  unsure (1)..(462): unsure at all n locations
ggggggcgccgcggtgggcggaggaggacgccgtcgactggggcctcctcctcggcgacgcctaccaccgctgcggcgaggtctgcgccgagtacgccaagaccttctacctaggtactcagcttatgactcctgaaaggcgcaaagctgtctgggcaatctatgtatggtgcagaagaactgatgaactggtagatggccctaactcgtcttacattacaccaaaggcacttgatcgatgggagaagagattagaagatctcttcgaaggcaggccatatcgatatgtatgatgcagccctctcggacacagtgtcaaagtttccagtagatatccagccattcaaagacatgattgaagggaatgagggcttgacctgtggaaatcaaaggtataggagctttgatgagctctacctctactnctactacgttgctggcacggtttggctnatgacagac

SEQ ID NO: 395933 - DNA, 410 bp, Oryza sativa
  unsure (1)..(410): unsure at all n locations
caccccaccagcagcagcagcagtagctgagcttgaagcagcagagatgcgtagacattgccgccgcaccattgccctctcgtcccctgcgctngcccanagcgcccgcgaaggtgttcngcgaggggcgcatcaccattcgaaggtcggcggcgaancatagccctncgcgtcgggaagcccgtggtacggcgccgaccgcgtgctctacctcggcccgctctccggcnagccgcangnctacctgaccggcgagttccccggcgactacgggtgggacacgcggggctctccgccgancctgagacgttcgncaagaaccgggagctggaggtgatccacttcaggtgggcgatnctcggcgcgctgggntcgtgttccngagctccttgccgaacgggttaaagttc

SEQ ID NO: 395934 - DNA, 819 bp, Oryza sativa
  unsure (1)..(819): unsure at all n locations
nnnnnnnnnnnnnnnnnnnnnnnnnnnnnnnnnnnncaggcagtaataattattaacaataattttgtgataatgcatggatggatattggagagcagctgctggtagaggagaagcatctgagctcgcagcagcgcgaggtgctggagaagtacaggtcaaaggcggagtactacgtgtgctcctgcatgggccgcaaccccggcggcgccgcccacaacgccggccgcactccggcgggcctcctcttcatccgcccgtggaacaacctccagtacgtctccaacgccgccttcctcctcaccgtctactccgacgtcctctcctacctctccctccccctcctctgcccggaccccgacgccgccgccgacgaggccgctcctgcggcggcggacgccggcgaggtgctggagttcgcgaggtcgcaggcggattacatactggggacgaacccgatggcgacgagctacctcgtcgggtacggcgaggcgtacccgcggcgggtgcaccaccgcgcggcgtcgaagcgcgtcgtacgcgcgcgaaccgcgacttcatcgggtgcctccaggggttcgactcgtggtacagcgcggcggcggagaacccgcacgacctcgtcggcgccgtcgtcggcgggcccaacggcaacgacgtgttcaccgaccaccgcggcgcgtacatgcagacggaggcctgcacgtacaacacggcgcccatggtcggcgtcttctccaggctcatggagctcgagtcggcggcggcgcggggaagacgcgccgccgtcgtcgacgtcgccggtggcggaggatgatc

SEQ ID NO: 395935 - DNA, 495 bp, Oryza sativa
  unsure (1)..(495): unsure at all n locations
agcatgctcagcgccttcttcggcccctacttccgccaggacttcgccgacgccatggtcaagatggggagcgtcggcgtgctcaccggcgccgccgcgaggtcaggaaagtctgctccaagttcaactgagtttgaaaaaaaattaagctagagctattagctggtagaatgagatgaaaattaatcatccatggttggcataattttaatttcttcttgaaatcaacaaaattgtgtagatcataattaaattactggaaattaaaaggaattgatcaagttcatgtgcatcttgctgggacagaagaagagagaaattttgcataaagggtccaaaaatattaaattaattgagggtctgtgcagttttcttcttttctggggtctcagaaggtggnatatatacagagagaggggtataagntaaatttggnctcatgttatatatatacatatatgtncaagtgggtatggcatttttgtccttgggttg

SEQ ID NO: 395936 - DNA, 358 bp, Oryza sativa
  unsure (1)..(358): unsure at all n locations
cggacgttgcctacgcagcagcgcatcgccgtggcgcggcggcgggacgtcgcggcggaagggtcgcggaacgcggccagccgcggaagtcgtcgacgcagaggatggccggggacagcgagaggttcttggacacggccgccatgtgcagcgccgacgcgcccaggaaggcgccgagctccacgatgacgtcgggccgcacctcctcgatcagctccgcgaacaccgcgccggtcgagccccacccgcgcggcctcgccgagcccgggtgcagcagcgcggcggtgtgcggcggcgggaagctctcgtacgggctcttcccgtcgaacagcttttngaggagcgtccgaacgacggc

SEQ ID NO: 395937 - DNA, 425 bp, Oryza sativa
  unsure (1)..(425): unsure at all n locations
agcacccaccaaatccaccctcgaccaagaaactgaggcaagaagaagaagaagaagaagccgccgcggcgggatgcagcagcagatggccatgccggcgggggcccccgccgccgcggtgccgccggcggccggcactgcgaccaccgagcagatccaaaagtatttggatgaaaataaacagctaattttggccatcctggaaaatcaaaacctagggaagttggctgaatgtgctcagtaccaagctcagcttcaaaagaatctcttgtatctggctgccattgcagatgcccaaccacctcagaatccaggaagtcgccctcagatgattgcagcctgggtgctaccccaggtggcttgggcaattacatgtcccaagtacccgatggttccctncaaggaacttcctttaaccccaacaa

SEQ ID NO: 395938 - DNA, 459 bp, Oryza sativa
  unsure (1)..(459): unsure at all n locations
cacaaacaaaattggtttgcagttgcagacgaagaacaccggcaatggcgttaactgcttctcttcgctgctaccctctactgggctcagcagcagcagcatcatcgtcagtctcacttccggcctccacaagagcgccggtgcttcacaggacaacaggagtaccgaggagaaggctgcaacgatgcctgtgctcgcagcagtacgccgagaagcagtcatccggctcgcagcagcagcagcagaatcagcagctggagcgactcttctccaatctcaaccaggcaaccatgaagcacggacctgggagtgtcaccagttcgatcttccttgtggccggcactacggtaggggcgggtatccttgcaatccctgcagtgacacaggaagctgggattctttggcctcagcagttacatgcatcttctgcttggnttatatggttgtaacagggttgtt

SEQ ID NO: 395939 - DNA, 646 bp, Oryza sativa
  unsure (1)..(646): unsure at all n locations
gactagttctagatcccactcgcttcgacactctcttccccttcttctcccggagaaaacctcgagccaaggccccgactccgactccggtgatgtcggcggcggtggggggagccgagttccacgggttccgtgggggtggcggcggcgcggcgcagtgcagaggtcgcggatgctcggaaggccgctccgtgtggcgacccctcacgcggcggcccccgctggcggcggcgggtcgtcgtcggccagcatacgcgccgtctccgcgccactcaagaaggatgcatctgaagttaagaggagcaaggttgaggatcatcaaggagaagagcaattttcttcggtacccttttgaatgaggaactggtctcagaggctcccaatattaatgacagcgctgtccagcttattaaatttcatggaagctatcaacagacggaccgtgatgttcgtgggcagaagaattactcgtttatgctccgaacaaagaatccttgtggaaaagttccaaaccagctttactttggctatggatacgctagctgatgaatttggtattnggaccactccgattgacgaccagacaaacatttcagctgcatggcgttcttaagaagaacctgaagactttcatcagcactgttat

SEQ ID NO: 395940 - DNA, 391 bp, Oryza sativa
  unsure (1)..(391): unsure at all n locations
ngagcgannangncngacaaagacggagaagagaggttggtgtggtgagcgacgatggcgatggcgtcgtcgtcgtcggcgtctgcggcggcggcgcgaggggggagcctggtggaggagtggagcgggcgcgtgaaggcgctggaggcggggttccgcaagtggatggcggacagccgacgcacatcgaggccgcggtgaccacggccgtgggggcggtgcagggggcggcgctggggggcctcatgggcacgctcaccgccgacgggggttccccgttcccgacgccgccgccgccggcgnccaacgcgaacccgcaagccatggcgtccttnaagcaggctcaggctttagntggtggaccatttggtgcaaagcccggaattttgca

SEQ ID NO: 395941 - DNA, 297 bp, Oryza sativa
  unsure (1)..(297): unsure at all n locations
gtgatcttatgcaggtgaacttcacggtggacatacgcgccatggacgacaaggtgagggagacgatcgtcaccagcttctcgaggcttgttcttcagagatgcgacgacagattggtcgactgcgccgtcgagcagaagcacgcggcggcggcgacgctancgacgcggagtgacgtcgcggctggagcgcgcgacgggtcgacgatctcgtcgatgncggcgggcgttcgcgggccgcggcgagacgcggtgctgatgagcgnaggnggcacgacgngatggcgatggcgaggct

SEQ ID NO: 395942 - DNA, 310 bp, Oryza sativa
  unsure (1)..(310): unsure at all n locations
ggacgtgcntttcgaccgccaaaaaaaggggcaccaccaccaccaccaccaccgcatcgctccacgccaaaacgggagcggattcggcggtggcggtggcagtcgcagggaggggggggcatgtcgacgcggtccaagtcggtgccggtgcccgcggggggcggcgcggcgacggtgccgctcgccgtgctgctgcggcgggaggtggtcagcgagaagaccgcggcggaggccccgagctgcaggtcgggctcttcagccaggccaagaagggggaggactacaccttcctcaagcccgactncgagcg

SEQ ID NO: 395943 - DNA, 522 bp, Oryza sativa
ggcgttggcctaaccggatttgcagtgcatcaggtaagggaaaaaggatggttagatagagagaaggggagttctgtgattggagaggagaggagacagggatgaggcagagcatgggatggggctatcaacagatgtagattattccttgcacaagagatgatgatgagctgtgaatgagttctgagagatggctggtgttgttgttgctccctcccctgcactgcctcttccctggctcccctgcacacctctctctctctctctctctctctgtgtgttagtatattgtttttatgttttagtaattattttccttccataagtgatacggtatttgtagcatgtaggtaggaaaaaaaaatgaactagagtgatgtgacacttcaagggctgttgcaaattaacacattttaaaatgggcccagcgtactatttctcagcatgtgggtctagctcaaaacatgcatttcatcggcatgcctgtaagtttaagtcagatagcattcataatttatttgc

SEQ ID NO: 395944 - DNA, 511 bp, Oryza sativa
  unsure (1)..(511): unsure at all n locations
agaggagtgccccctaacctttccctgctttccactgaaatctcctatccgcaaccatacagttgctcaattctggtctcagccaaagccccaatcattcatcgttatataggtcactataccctcccttgcatttcccaccaccaccccttgaagccatgaatcgctgaagaagtcgtctgcgctactgctaccaccggggaaggattagctgcgcagaattgtgcgagcgaagctgccagccgtgcgaatttcaagctccgaggtcctgcattgcactgaaatggggaggcattcttgctgctacaagcagaaattgaggaaggggctctggtcccctgaggaggatgagaagctcatgaatcacataaccaagcatggccattggctgcttgggagttctgtttcctaaaatttgcaggggttccaaaggttgccggaagganctgcaggttgaggtgggtaaaatatcttagggcctnacctcaagggaggtgcattnttttagggg

SEQ ID NO: 395945 - DNA, 528 bp, Oryza sativa
  unsure (1)..(528): unsure at all n locations
gggggaaagctgtggatcttcgttttaaagaattagatgaggcagttgcagtttcaaagaagcagaaaaggaagaagtacctggatgaaaagaaaaagaagcgcaagggcgacaagatggaaactcttccagaattccctggacgtgaaaaggttaaattcggtgaagttgttgaggctccaccaaagttgtcattccctaaggtgaagaatgctttagacgctactcgtgagatgctaagaaaagaggcgattgagaactacagaaatatcaagggttggacatcaaggcctgggctccagcttccaactctagctgaaaataaatcattgtgaccctttatttcatatcttctcattgtatccttagcggacttactctgctgaaatcagggtngcttttagtacaggtcttgtaccctcttgtaggcaattttgtaacaaacgttgatttttgtgttctgggtcatctactctgtttattttcttgaagtaatctttttaatactggtaaaaaaaaaaanaaaaa

SEQ ID NO: 395946 - DNA, 455 bp, Oryza sativa
  unsure (1)..(455): unsure at all n locations
ctacagcacgcacacacaccccaccagcagcagcagcagtagctgagcttgaagcagcagagcgaggtagacatggccgccgccaccatggccctctcgtccccggngctggccggcaaggcgccgcgaaggtgttcggcgaggggcgcatcaccatgcgcaagtnggcggcgaancaaagcccgccgcgtcggggagcccgtggtacggcgccgaccgcntgctctacctcggcccgctctccggcgagccgccgagctacctgaccggcgagttccccggcgactacgggtgggacaacgcggggctctccgccgacccggagacgttcgccaagaaccgggagcttgaggtgatccactccaggtgggcgatnctcggcgcgctnggctgcgtgtttccggagtncttgcccgaaaggngtcaagttcggcgaggcgntttgttaaagcgnt

SEQ ID NO: 395947 - DNA, 445 bp, Oryza sativa
  unsure (1)..(445): unsure at all n locations
tctagatcgcgagcagacacggacgagacgagcgcccaaagccctcgctggcaagaggtgaagaggggggagaaagacgcgtcaaagccatcaaccagatcgattgatccatccatccatcaatcgatcgatcgagcgatccaaccgagccggcgagcagatctgaaggcgcggccggccgacctcctcccgcctacctcaagtctcgtctcgactcgaattgaagaagggacaataccgtgaagtatctgggctgttgcttcgttattttcgtggattcaccttggaacttcagaacgaatcttcctgatattttccgtgacaatgaaaacacatgagagagctgccaatttggctcttgcaggttttgagcttggctccacttgtggttaaagtaaacccccaatgcgaatgttaatactgacagcatgnctttgccgtctat

SEQ ID NO: 395948 - DNA, 441 bp, Oryza sativa
  unsure (1)..(441): unsure at all n locations
ggaaaactcgtacttgtattcacactcctggttatcctcctatggtccctgaagagctcacacaagaaaacttgtttgccgctttagacggtgctgacattgtatattttgatgtcagattgcatgaaactgctttactagttgctgaagaggtaatattttcctggcacaaaattttatcttcttatagaggatcttgcaaatataaatgcctactctctgtttttaatattttttttgggtaggggcactcaaatttcccatttgcgtttagtggaaactattagagttcttagaacatgaattgtcacttactaaaagtttattccagttctatacaacttaatgggcaactgataccatacataggaatgtttttcttcctattcggaattccactctttctacatgtatgtctggggatatcactatgaataggna

SEQ ID NO: 395949 - DNA, 480 bp, Oryza sativa
gggctgccgatttcggcacgagatcaaggcaaacccatgcagaaatctgggaaagatcattcgctcctgttgatacttccatcgggagtttatcgttacagatttgttgtagatggagaaaggaaatgtcttcctgatcttccttgtgaaactgatatcatgggcaacgctgttaaccttcttgatgttcatgattttgtccctgaaagtgttgagagtgtggcagaatttgagcctcccccatccccagattctagctacagtatccaggcacccgaggaaaaggatttctcaaaagagccaccggttcttccatcccaactccatctgggtgttctcaactcacagaactctgatgaaagttgtgcacggccccagcacatagtcctcaaccacctcttcatcgagaaaggctggggtgcccatccgctggtggccccttggtctaacccccaggtttgatcaatatgttaccgtctc

SEQ ID NO: 395950 - DNA, 709 bp, Oryza sativa
  unsure (1)..(709): unsure at all n locations
gcggacggggataaaaaatactaaggggtcgtttaaccacgggaacatgagcgacctgttcggggatggcatcttcgccgtcgacggcgacaagtggaagcagcagaggaagatcgccagctacgacttcaccaccagggccctccgcgacttcagcggcgacgtcttcaagaggaacgccgccaagctcgccggcgtcgtctccagccacgccgcgtcaaaccaatccatggacttccagggtttcttgatgagagcaacgatggactccatcttcaccatcgcgttcggccaagacctcaacacgctggacggctccggcgaggggcgccgcttcgccgcggcgttcgacgacgccagcgagttcaccatgctccgctacctcaacccgttctggaagctgtcgaggctcctcaacgtcgggcgccgagggcgatgctcaaggagaggatcaaggtcgtcgacgggttcgtgtacaagctcatccgtgacaggtccgacgagctctccaacaccaaggcacacgacactgattcgaggcaggatatcctgacaagattcatccaggcaacgactagcgantctgggacggttgattacaagtacctgagagacatcatattgaacattgtcatagccggcaaggacaccacagccgggtcgcttgcttggttcctgtacatgatgtgcaaacacccggaagtacagg

SEQ ID NO: 395951 - DNA, 479 bp, Oryza sativa
  unsure (1)..(479): unsure at all n locations
nnnnnnnnnnnnnnnnnnnnnnnnnntttttttttttttagtagataaagaaatcacattgaataaaaatcctcaagaacaacagattcccctctcctaatcgagctgatgcatcgaccttatccaccccgcatcaatcaatcccaatcccaaaccaaaaaacatcataggaaacattgaaaaacatcacagaaatttttcactaaaacatcacacaagaacatctaaataatcatcccgccaccgggcagccaccgcctcccctctcgccgccggatctggtggaggggaaggcaccgcaaccgggccaccgacggctacgccggatccggcctgtgggagttgccggccgatagaggagaggaggggaaaagggacgggaaggagagggagtgagagggcacggcggccaccgtggggaggtgagactacgctgccgccgccgactcaggatccgtgtgggggaatacccggatccg

SEQ ID NO: 395952 - DNA, 478 bp, Oryza sativa
aggagaagaaaaaggagaagaagaagaggaggaaggaggaaaagaagaacttgggcaaaaaggctgcagtgacaaactcgtgggggaagtatggcattatccgcgaagtcgatatgtggaacaaacgaccagagttcactgcatggttgtctgaagtcaagcaggttaatttggaggcattgtcaaattgggaagagaagcaaatgtttaaggaatttatggaagatcacaacacagctacttttccgtcaaaaaaatattatgacttggatgcatatcaccgtcgtgtgatggaaaaagagaaaaagaagggcctaaagaatgccttgggaacagaccgtactgtatttaatgatgaggacagcgacggctggaattgctcagggaacgtgaacgggcaaaaggaggaagaagtggcagcttttaaacgctccatgcaaccggggaatggctcaagcaatgaaagagcaggcccggc

SEQ ID NO: 395953 - DNA, 410 bp, Oryza sativa
  unsure (1)..(410): unsure at all n locations
cttttccacgaccgtgccacggcgtcanagncaaactaatactaactacacaagcctcctccgttcctcctcttcttcttcctcattctcctcctcctctcgaggccggccgagatatcaatggaagtcgaataccacgaggagtacgtgcggaactcgagaggggtgcagctcttcacctgcggctggctgcccgccaaaacgtcgcccaaggccctcgtcttcctctgccacggctatgcaatggagtgcagggctacatgagagagtgtgggatgcggctggcggcggcggggtacggggtgttcggcatggactacgaggggcacggcaantcgatgggcgcccgctgctanattcgcagcttccgccgtttcgtcgaagaattgccaacgctttnctttttgttt

SEQ ID NO: 395954 - DNA, 641 bp, Oryza sativa
  unsure (1)..(641): unsure at all n locations
caatcaacaggcctcaccaatgccgtacatggtaacagctgatggccattctccatcttctgcagacaattcctgctcagatgtggcaaaagactcaccattggtgtccaatgtatctcagcagaatttctcagtctatatcagacaatcagagttctgaacttgaagtagagtttgatgaagatgatatcaggatgaagcttcaggagctggagcatgctttacttgatgatagtgatgacatcttgtatgagatttcccaggcaggtagcattaacgatgaatgggctgatccaatgaagaatgtcatactccctaactcaccaaaagaatcggaatcaagcatcagttgtgctggtagcaccaatggagaaccacggaccccaaagcagttgctctggtgactgtgcaatggcattatctgattataatgtagatgaagcacaggcaatcataacggacctccggcagatgggtctcaatccaagggggacccttctcaggggattgcagcctatctagtggaaggtctttgcagcaagaattagtagcttcaggggaaggcattacaaggccttgtcgtgcaaagggccccgnctctttatcagtttcggaattcaaatcccctttgnaatttgccc

SEQ ID NO: 395955 - DNA, 581 bp, Oryza sativa
  unsure (1)..(581): unsure at all n locations
gggcagcagaaggnggttatgaagaagttgatcttgttttgccaggcactggaaggttccgtgttcagctaggggtgaatatgccagctcgagctcggaaagtgcaagaggacgtgaacgtagaagtagaaaacagggacaccattgaagagtatgatgttgtcctataccttggtatcatcgacatactacaagagtataatgtgtccaaaagagttgagcatgctgtcaaatcactaaaattcgaccctctttcgatatcagctgttgatccaaatttgtattcgagacgatttataagtttcttggagaaggttttccccgagcaagattgaacagtaaatagatattgcaagtttcttggagaaggctttccctgagcgagactgaaccaataaatagcagcgatgcggccacacatctagatctccttgtaaagaattaacatatacccccattggaattactttacagtcggcaagcttcttattaagctccaacgaatttcagttcaactgtgatttttttttttnnnnnnnnnnnnnnnnnnnnnnnnnnnnnnnnnnnnnnnnnnnnnnnnn

SEQ ID NO: 395956 - DNA, 567 bp, Oryza sativa
  unsure (1)..(567): unsure at all n locations
atgtagaggagagaagtgaggagagagatgatgagccacccctaaatcaagaggcaacctccacacaaatttcaagaaggatgtaagagtattagatatattaatatttgtatactagatgtgatacattatatgagttgcctcttagtttatgattgaataaaatagataaatttagaggtgatagtcacatctaccatagcacttgcccttaggtactactagtagtagtcggggcaatcaggcatggtggtcatgcccttttgttctgtacttgtcagtttcatttaatatgatatttcgattaccaggtaatatagtagaagtagtaatatgttggtttataataaaattactgcaagggttgtcaaaaaatattacggggttaacatgtcaagtttcttttaaaagagggaatactatagtaaggtatcctgtttggaaccgtatctccgaggtatcaaccgatattctancatgtatcaaacgatacctttgagttatcatcccgtattttctttgtacaaacttatgattggtgttcatatagtatttttctaaacatcg

SEQ ID NO: 395957 - DNA, 543 bp, Oryza sativa
  unsure (1)..(543): unsure at all n locations
aaacctttcccctgaagaggccaagtaagttatgggagaggaggcagccatggccaccatggagagcgcctaccatgatgagcttgctccggcggcggcgccgccgccggcgaagggaggagggagcaagaagaagaggaagcagcagaagagggaggagaagaggaaggagtgcaggctggtgagctaccacgagctgccggactacatgaaggagaacgagttcatcctcgactactaccgctccgagtggcccatcctcaatgccctcctcagcctcttctcctggcacaacgagaccatcaacatctggacgcatcttcttgggttcgtgctgttcttcggcctcaccgtcctgcatcttggccagtacttcccccaggttgctgatctcatcggacaactttcctggccaattctcaaaggttgctgaaaatgtctccagtaacattggagatgtcctctctggcgcggcgtcgttcatgcaggcgagcccggcgttcgagcgccggcgccatggcggcggngtgnccggtgacggcc

SEQ ID NO: 395958 - DNA, 519 bp, Oryza sativa
  unsure (1)..(519): unsure at all n locations
nnnnnnnnnnnnnnnnnnnnatagtctgaaatggaggaagtatcgtttaatttgagactttgaatacttaatttacaaagaagtgtgtatttgtgccgtgttttctcgctctatatatatcgcagtttcacccatctaattagttgaacagtgcgtcttaatctcaatctccattcgccaattgactgtacatgtctgaatggaatccttctatgtattatctgcacagctagaatcctacaactagcgtagtgtggtggtggtcgtcttcgagttcgacgcgccgccgccgccgctcatcgcgacgacaagagcctcgccagcgtccgcagtagcagcttcctagtcttgttgcactccgagatcgtctccagcctcggcgaccacggctggttcctccgccccatcagcagcgcgtaatgccgcttcacctccggcgtgctgcacagctccgtcgccgtccacgtcccgtcgtcgtcgacgcttccgggggggcgcaccgccgccgtctcncgnant

SEQ ID NO: 395959 - DNA, 606 bp, Oryza sativa
  unsure (1)..(606): unsure at all n locations
cagctcaaggaggggaagaatctaccttccattggatgaattggcagaggcaggtctgacagaagaagacatattcagagggaaagtgactgataaatggaggaagttcatgaagggacaaattctgcgtgccaggttattctttgatgaggcggagaagggcgttgcgcatctagactctgcgagtagatggccggttctggcatctttgtggttataccggcagatccttgatgctatcgaagcaaacgactacaacaacttcaccaagcgcgcgtatgtaaacaaggcaaagaagctgctgtctttaccggtcgcttatgcaagagcggcagttgcatcatgaacaatcactagatcagatgccttattattttttntctttcattttcttttcttttgatttcgcacgatttcttggctgttgtatatattcaagcagctacctgtatgccataagcctgccacagtttttctttagttcaagggactgatttcaggtccctcaatactcaactcttgttagaaacaaatacagagggggtaagccccacagttcaagaagcatattactcttcatttgtcttcaagaaaaaaaaaaaaaaa

SEQ ID NO: 395960 - DNA, 373 bp, Oryza sativa
cacaatgatcaatttagtgcttacaaagctatctatctctcaatatcgaaatcttcgcggattctcatgcaaatagaccctccacgtagcgtcatacgaatccagagttagaccccctcctatagccgtcggatcgcagatgtacagtgacggatctctgtggtggacctcgttgtaatatagaagattttaggtgcatttttttgcaaaaaaaaagtcaggcccttctctccccttcgccaccactctattcctccaccttcgaccccctcttatccgccacctcgccgctctcccctccgacctgcgccgacgtcaccgccggctccttgttattcgacccgccgtcctacggcgacgtcggcggcttttt

SEQ ID NO: 395961 - DNA, 705 bp, Oryza sativa
  unsure (1)..(705): unsure at all n locations
agaggtcgaccnacgcgtccgcttccccacaacgaggagaggaacagcagagcaaagccccacctcctcccctcctgcgcatctcctctcctccccggaatctgctctccgccgccgccgcccggcagaggagatggacggcagcagcctcaagtcggcgcagtcctcgagcagatgcgcctccacatggccaccgacgccggcaaggacatcgccaagaaggtcggcctcgtctaccagttcaacatcgcccccaagaaaatcggagtcgacgaggagatcttcgtcgtcgacctcaagaagggcgaggtcaccaaagggccgtacgaggggaagccagatgcgaccttctccttcacggattctgatttcctctcgatcgccacggggaagatgaacccacagatcgcgttcattcgaggcgcgataaagatcaaggggagcataagcgcggcgcagaagttcaccccggatatcttccccaagccttccaaactgtagaaggttagaggtatattgttttgggcgaggttggtaataataagggttgctagttgcaatactgtgtttgatagaatggggggagaaaactggaaacaggaacaacacacgagtgcctgatgttatggctggaaatcggatatcgctatggttaatgttatcactgatatcaagttcaatcctnnnnnnnnnnnnnnnnnnnnn

SEQ ID NO: 395962 - DNA, 439 bp, Oryza sativa
  unsure (1)..(439): unsure at all n locations
gattggtgcatgtgactatggttactctgaagattttgatcaaatggtttggtatatcctatataattgcgatcaggcccaggattatataaaaatgtttcaaggcgaattacaggaagcaggggtgcaagcagctgatattgatagaaggactaggcttggatttgctacttggttcaggaaccatatgtggaggttgaacaattcagatattgtagatgatgacctgtttgccttagcatgtggccctgacctgagagtaagatcttactcttcatgtgttgtcaatggtgtccggtttctgtactgctgagcgttgacataaataagaagactcaaaactctggagtggcgtgtgctgggaatacataatgggtcgggtaattgattactttgggaaagttgacagntattattgagttncagtccaacagcaagg

SEQ ID NO: 395963 - DNA, 373 bp, Oryza sativa
  unsure (1)..(373): unsure at all n locations
cacacacaccccaccagcagcagcagcacgtagctgagcttgaagcagcagagcggggtagacatggccgccgccaccatggccctctcgtccccggcgctggccgtcgagagcgctcgcgcaaggtgttcggcgaggggcgcatcaccatgcgcaagtcggcggcgaaccaaagcccgccgcgtcggggagcccgtggtacggcgccgaccgcgtgctctacctcggcccgctctccggcgagccgcgaggctacctgaccggcgagttccccggcgactacgggtgggacacggcggggcttctacgncgacccggagaacgttcgccaagaaccgggagctttgaggtgatccacttncaggtgggcgat

SEQ ID NO: 395964 - DNA, 450 bp, Oryza sativa
  unsure (1)..(450): unsure at all n locations
ggaaaataattaaaaggaaaatggcggcggcggcggcggcggcgggggcgaggaaagctcgccggaacactccgcctgctcgccgccggccgcggactccggctgtatccctcgggcgcgggcatctccatgcgagacgagtttccttccccaccgctcctactctgcggcgaaaaccggagaaaatggaggtgccactggtggcgggaagaggtcacggatccggagggtcgtctcgattggggttatcagcatcgctggcggcgtcgcgcttagccccttcaacgaccttgctatattccatggatgcagcagtaaggcaattaaaaaggctactgaggaaccaagaagttttagaagcaattggggtnctatagtaagaggaccatggtatgatgcatctcttgctgtgggtcatcgacgaagatctgtatcatgtacattcccagt

SEQ ID NO: 395965 - DNA, 890 bp, Oryza sativa
  unsure (1)..(890): unsure at all n locations
tatggatgcatataaaactgagcagacctcggagatggaaggtaaaaagtttatggctagaaagtcatgcaatcctgcatttgctgctgcacagttaaaatttgaagagttgacttccaattcgacggtcagtaggtccaacagtctggntggggcaaacaaaccaaaggtacatactcctcgttcacaagacaatgtntnaacccaagcaaagnaatgacacaagcataccagagagctcagtggggcatgatcctaaaatcgtagttgctgcttcagaatgtggaactgagatatcaatctcctctacacttgactcaccggatagatcagaagctgatggtggcgagattgtactggagattggatccctggaagataggaaccgtgttggtgataatgctgaaaaggataacagtgttttgcattctgaagtgaacacttctggaggagctatcgagccagaaaaggaattacaaactgatgacactgctatcgctgccaatgcaattgatcctgtgcctgttgaacaaccacatctgggacaggaaaagcctgatttacatgatgaactggaaaaatctgtaggatcttatgtgaagacacctgaaggtacttcccttgagccgaactacctttgctgaatctcatgggacaccatcaagtgaggtctctgttaacaccaaaaaaagcaagagcaaaaggcccaagtctcatgtaagcaagagatcactaactagtccaagcagcgattctgtgggacggagcagcatggataatctgtcaaaggattacagacttgggaggcgagagagctcnnncaaggttanatctgatcatgttgatcaagaacctcgcatnnnnnacagcacnnnattnnnnngttatat

SEQ ID NO: 395966 - DNA, 583 bp, Oryza sativa
  unsure (1)..(583): unsure at all n locations
gacagaaagcaaattaattaagcatccaaaatggcttcctccccaagcacagtatttcttgtactgtccctaaccctagccaccgtctccgtcgtcgtcgtctccggcgccggcgaaggccaagcccggcaccgacggggcccctcaacctgacggagatcctgacgaaggccgggcactacaacaccttcgtccggctgctcaaggacacggaggtgacgtcgcaggtgagcagcctgctgaacaacgaccggaacggcgacgggctgacggtgctggcgccgacggacgccgcgttcgggcggctccggccggggacgctcaaccagatggacgcgcaggcgcaggcggagctggtgctgtaccacgtcctccccaggtactacggcttcgtcacgttcgagaccaacaacaacccggtgcgcacccaggcctccggcagcgcggcgtctgcaccgtcaacgtcaccaccgccggcgaggacagggtgcgcgtctcgtccggggtggtggaggccgagctcgggaggccgntccggacggccaaccgttcgccgtgtactngttcgacgccgtcctcttcc

SEQ ID NO: 395967 - DNA, 494 bp, Oryza sativa
  unsure (1)..(494): unsure at all n locations
agggaataatactctcctttaacaactgagcaaaatgttggcgtatgtgtgctgggaggtggatgatttatttacactcgcaagaattttggtgggttaggccaaaagattgacactacacctctgacgggctaacccaaaccctcatctttaacggcttcgcgcatggttagtgatctgtggtcactggtgagtccagacacctttgacgggtggccggccatcacaggtgacacccacctctgacgggcaagttactagaaggccgtcagaggtgttggtctccgctagcctagggcgagttgggacccgtcacaggtgacttatctctgacggcctttaaataaaggccgttagaggtgatggtctccgtaggtataagctgtcacaggtgatctacctgtgacggncccaaaagtaaagggccatcacaggtaggtcaactctgacggggctttatttgctaatccgtnacaggtgaggtaccctttgcg

SEQ ID NO: 395968 - DNA, 447 bp, Oryza sativa
  unsure (1)..(447): unsure at all n locations
tgtatgcaatattgtgtgctgctcctcaagttctgccaaggttgttgtttgttcctacagttgagagttgagaattgagactcgcaaaccaaacaagtcactctctgatctcctgcgagagtacaaccttcctccaggcctcttccctcggaatatcatctgctacgaatatgatcaaacaagctcgaagcttgttgtgcacctgtctaagccctgtgaggtgagcttcaaggattcatccgtgatacggtacgcgcctcgtgtcaaggttgactctgtctcgaggcaagctctccgcgatcgaaggtcatgaagaccaaggtgggttgtgtggggtgaagggtggctagcataaagcttggagagcttcaggtctgacaagatctggctttnaatagccggccgttaagaagcttgaggcagaaggatgctttatgaggtccccag

SEQ ID NO: 395969 - DNA, 502 bp, Oryza sativa
  unsure (1)..(502): unsure at all n locations
caaaatttgtctccacgttttcttggatagttagttgctcacccgatcctgtatccatggcggccgtgtcggaggtggaggtcgacggcgtcgtgttcccgccggtggcccgcccgccgggctccggccacgcccacttcctcgccggcgcaggtgtgaggggagtggagatcgccggcaacttcatcaagttcacggccatcggcgtgtacctggaggagggcgcggccgtgccggcgctggccaagaagtgggccggcaagtccgccgacgagctcgccgccgacgccgccttcttccgcgacgtcgtcaccggcgatttcgagaagttcacgagggtgacgatgatcctgccgctcaccggcgagcagtacttcggacaaaggtgacggagaactgcgtcgcggcgtgggaaggccgccggcgtgtacaaggacgccgaaggcgcggcgcaacgngttggagttcagtttttttnccttaagtgaggttaattncggtt

SEQ ID NO: 395970 - DNA, 453 bp, Oryza sativa
  unsure (1)..(453): unsure at all n locations
ggctgcgcggcggcgggtcacgtccgcagtcaaagtcacaggagggcctccgcatccacgccaaggagaagctccccatcgcctccaacgcgctcctccaggctcacggcgagatccacgccgccaccgggccccgacctatctcgccctcctcttcaggaacttctatccccgtctctccgccaatctaggcctaggcctcgccatccacttccgcaacaaccaaccactaccactagcatgggacaacttctcctacaccctccgtgccagcaaggntatcatccccttcccctccaacggcttgcttcgggatcaacctcaagggacggcttnctcggcgacaaaataatttcaacccgaccggccggactngttgccgtngagtttagcattggaccataatttgatctcaaaaggggtcaaggttgtcaaggnttaaaattgggttat

SEQ ID NO: 395971 - DNA, 433 bp, Oryza sativa
  unsure (1)..(433): unsure at all n locations
acctactctcccctcaccccttcatcaattcggctcagaggctgctcctcctcagtcctgagtctcctgtcctcatctccattttgttttctcctcctcctcctctctctctctctctctctctctctctctctctgtctctctggtggagtgcagtgcagagattcaagaagttcaagatcgaacaggcctgctgatcatgccttgtgctgcggccgagctcgccaatggcgaggcggcggcagcagcagcatgcgcggtgaaggtcggcacgacgncaccatcggctcgctgatgacgagggagctggaggccatcaaggccgcgccgccgcacgccacagccgcggcgacgacgccggcggnctgaggcggcagagcagcccggtgtcggtgccatgcggancagcccgaggaagatcgccgcgctgang

SEQ ID NO: 395972 - DNA, 464 bp, Oryza sativa
  unsure (1)..(464): unsure at all n locations
ggaggagcagttcacagttgcagttccacgctcgcagtagtgtccagagcagagcgcgagggaagagggcgcagagagcaggaggagaggcaggcagccatgggcgaggaggagaaggtgaaggaggaggcggcggcggagaaggggaaggaggcggcggtagcggaggagaaggaggcggcggcggcaggggaggagaagaaggaggacgcgccgccgccgacgacaccgccggaggaggtggtgatgcgggtcttcatgcactgcgaagggtgcgctcgcaaggtcaagaagatactcaggggatttgatggagtggaagatgttgtcgcggactcgaaagctcacaaggtgatcgtaaagggaaagaaggctnctncttgacccaatgaaggtggtncaccgtntcagaagaagacaggcccaagtttnacttttnttaccgattccacctccgttgagga

SEQ ID NO: 395973 - DNA, 460 bp, Oryza sativa
cttccctgacgaaggagcacacaagagaagacagagagaggagtacaggagatggcaggctgtgatgaagctaagtcgttggcttcaatggaggaagaggcgtgcattgagaagaagtatggagggattgcaccaaagaagcctctgatttcaaaggaccatgagcgcgcctactttgattccgcagactgggttcttggcaagcaagctgcaaacagcaacggttcaaaggccgcggttgagactctcaagcccaagctcaagagaacgcctcatcaccagctccctcctcgcaagccaacctgcgcatcaagctgagccgcgagcattatcaagaatgcagcggcagttgaggacctcgaagcaacaaggggacaggtggactaagatcagtgttgtagcctgtcctaaatcgtaggtggaaagaacagccagcaacttttgattttcagattagcct

SEQ ID NO: 395974 - DNA, 410 bp, Oryza sativa
  unsure (1)..(410): unsure at all n locations
ttctcctccctcctcctcctccnnctcctcctccaactccctcgagatttctcatggcggcggcggcggcctcctcctcctcctcgtcggcggcggcgacgcaagggggggtgacggagcggcggggcatcccggcggcgtccttcgtcgaggacgtcgagacctacctccgccaggccgggctcgacgtcaactccggcctcgccttcctccaggaaaggctgcagcagtacaaaatagtggagatgaaacttctagcacaacagagagatcttcaggcaaaaattcctgatatagagaagtgcttggatattgttgcaactttacaagctaaaaaagctttggggtgaggcactcacagccgatttttnaattatcttgaggggaatcttacttccgtgcggaaatcg

SEQ ID NO: 395975 - DNA, 446 bp, Oryza sativa
gtgacaagctcacccctgccaagcactttggagcttggatcaacatgtgcagtggagaaacttatagcaatatgagctatgaagaatatgtcaagaaaagaccgtagacaagtgagtataatggcgagatgatggtccattgtcatacacaactggcggtctctgcgctcaacaattggcaggaagaagaagagaggatcaatgaagtgagaagcaacgcatgagacgaggaagacacggttccacatcagcacaacattgcctccagggtctagcatactctcttcgcggcttatccagattctggtaaaatcctttaacttgagcactatcttgctgctcattgttttaactgaacctgtggccaagttattcttgtctgtgtcttgcttcggttctcaataaggtttaagccttcagggtaaaaaaattcaatggaaattttt

SEQ ID NO: 395976 - DNA, 554 bp, Oryza sativa
  unsure (1)..(554): unsure at all n locations
ctcttcttctctcctcctgcttacaacaacaacaagtcaccaccaccaccacgcctctctctctctctctctctctctatttctcttaccacacaaacggggaagggtgggtatccttcccaattccccgctgatctctatccaatccgcgccgcgcctcctcctctccaagacaggagatgccgccttggtggtggtggtgggatggatggatgtgagaccagattgattgattttagctgctgctgctgattgattgattgattggattggtgatgataattgctcaatcggatgcatgcnatgatccaattcttcttcttcttcttgtgatctacaaattccaatacatatactagtagtacgtaaggagtaaagcattcatattaaggtaatgggaggcggtcgggatcctgaaccacccacttgcccgccgcgcaaagaacttcctcgccgggcctcaggatggccgcccctccctgcggcgatgctnccccacccgggntcctcaccgccgatctngccggccgctccgcacatgatggctctcatct

SEQ ID NO: 395977 - DNA, 466 bp, Oryza sativa
  unsure (1)..(466): unsure at all n locations
gaagcttgcatacaaagttgtagttcagcttgcattggatttggccagaggattgagctatctccactctagaaagattgtacatcgtgatgtcaaaactgaaaacatgctccttgatacacagagaaaccttaaaattgctgattttggtgttgctcgggtcgaggctcagaatccaaaggatatgactggtgcgacaggcactcttggttatatggccccagaggttcttgatggtaaaccgtacaacaggaaatgtgatgtttatagttttggaatttgcttatgggaaatctattgttgtgacatgccatacccagacctaagttttgccgatgtctcatctgctgttgtcccatcagaacctgcggccagacgggttcctagcatgctggcccaaggtgcattcggcaaatatcatgcgggaaatgctggggttgcaaatcctgataagnggtcccgatat

SEQ ID NO: 395978 - DNA, 410 bp, Oryza sativa
  unsure (1)..(410): unsure at all n locations
cggacgttccgcccacgcntccgcccacgcntccgcgagcgccatggtcgggtggatcgggcggaagggcctcccgcacgtcaagcagttcgcgctgcgcggcaagacgagcggcaaggtggtcgtcaaccgcggcttcctcgtctccaactccaacaaccacgaccacaccgtcgtggtgcagcaggccaggatctacctcgcgttccagctccagttctccctaccgactcaacccaccagcacatcaatccctcgccttcggcttcctccatccccgtcaacaaacaagctcaaccaacgcaccaggacaagacatccttcaccttcgatttcaaccactggtaaagctttcgtggacgggtcgttncctacggtctnaggagggcacacggtggtnttaaactgtt

SEQ ID NO: 395979 - DNA, 1202 bp, Oryza sativa
  unsure (1)..(1202): unsure at all n locations
caagctccgtcttctagggtttgcgccgcgacgagctctcgaagatttcgccgaggagaaatccaagaagaagaagattcacctcgcggcgatggccaccgtgcaacccgccgcctcggaccccgcgcctcctcctcctccggagacggaggagcagccggccgcggcggggggcgaggagatcgcggcgctcgacgagcagctggccgtcgcggacggcggcggggatgatgggaaagcggctgcggcggcggagggaggaggaggaggaggaggagggaagctggtggcggagaccatgcgcaagtacgccgcgccgcggtcgtcgcggtaccacggcgtcacgaggttgaagtggagcggcaaagttcgaggcgcacctctgggacaacagcagccaggtcgagggccgcaagcgcaaggggaagcatgtntncctaggaagctatgttactgaananaatgctgcaagggcacatgaccttgcagcccttaaatattggggtgcagggccaaacaccaaacttaacttcaatgtttctgattatgagaaagaaatcgagaggatgaanaccatgtcccnagatgaatttgtggtgttcataanaagcagancanctgtttctcaagaagaacttcatcatataggggtgtaacaaggcgaaaggatggtagatggcaagcacggattggtaggattggagaaagtagagaaaccaaagaaattttttttggaacctttgaaacggagatagaggcagctgaagcttatgacctagctgccatcgagcttcgtggtgcccatgctgtgaccaactttgatattagtaactactgtgaagatggtttgaaaaaattagaagcctcatcagaggttccaaagcgactagagggtccatcgaaggctgcgaagctcgctggacgatagataaaagaatacaacttgtaaattgttttttgttttatttattttctttttaacaccaagttggccctttttagttttcccgcgcttgtatgtgtttttcgagatattcttatctcccgtgttgtcatgctggtgtttaccagctccagagataggaccatgtgatgttgggggtgttcggttgatattactttttggcataatgatagctaggcttgttacccnnnnnnnnnnnnnnnnnnnnnnnnnnnnnnnnnnnnnnnnnnnnnnnnnn

SEQ ID NO: 395980 - DNA, 546 bp, Oryza sativa
  unsure (1)..(546): unsure at all n locations
acctgaccggcagcagcctcgagtgcggcgacggcgacgactgcgccgggagcatcgtgtccgacggcctcatgtccttccgccgccggcagcgcgagctcgggtcctcgtcgtgcggcaacacggccgaattctaaaccaccaccaccaccaccaccgtgtgattgattgattccaccgaatacctagtacaccattagacagttgaggcaattaggtacgcggattgcgacagctgccatcgctggtcgacgccggcgaggtcgccatggcggcggcggcgccggcgagctcccatgtgtagtgcactttgtgctcggatgtgtaaagttgacagggctcgcgacgcgcgtttggcgggtgttgcttgcaagccagagtaatggcattgttctgtgtgtactttccaaacttaggcattgttcaggaagaaagacgcatgtgtctgaaattcttctgaatttctgcatctgtaaataagatcaaaatccttttgctccgatccnnnnnnnnnnnnnnnnnnnnnnnnnnnnnnnnnnnnnnnnn

SEQ ID NO: 395981 - DNA, 391 bp, Oryza sativa
  unsure (1)..(391): unsure at all n locations
ccacgagtccgggtacgtgtaantcncttncctcactttccgacggcttaacaagggagagctccttaattgccacgtcccgcccgctcactgcctaagcttccaagttccaacggggacatctcttctcttgcaccttcctgatttcatggatcggacaagccagtgggtctcgtcgccggacatccccgccgatcttctcatccggatcgccgacgacgtcttccctctccataaggcggtgatggtgcccaagtgctgctacatccgcaaggccgtagcggcggcgcgcggtggcgaacggccaccgtcgacctcgacctgtccgngntgcccggcgccgcgacggcttcnacaaggtggcgngtaattgtacgggggcaactttgag

SEQ ID NO: 395982 - DNA, 454 bp, Oryza sativa
  unsure (1)..(454): unsure at all n locations
nnnnnnnnnnnnnnnnnnnnnnnncgcataacaccttattatcaagcatattattgactcacacttgccctattacattcagctctacaaaggcagcacaggatgcataataagtaacaacgctagcaatacactgcaagcttaatgttggaccgcgacaggagcagtgcctacagtacagtcaagagacacagaacgtacacacgcacatcatcaaaggcatatcacatcaggcagcagcatagaggtgagcgggcagcttgggctcgacgacagcctcaagcgggaacttgcgcggcgtcgacaagccgaagatctcctccatgctcagctgctccctcgtcacgccgtcgggcagcctccacgcgaagcgttccagcagattggcgaggctcagctggatcacctttcagcccaagggttttgccgggggcacattcggcggnccgacccg

SEQ ID NO: 395983 - DNA, 544 bp, Oryza sativa
  unsure (1)..(544): unsure at all n locations
accgacgacgacggtgccgggcgtgaccacggacgccccaccggacatggcaaggccgatagcatgccaaggcggcggcggcggcgggggcgccggccaaggcgtgatgcggcgcgacgactcctgagctcgcctgcctcgccgtgggcgacgcgtcgtcctcgcggagagcctcgcggctggccctcctggccgcgcccctcgcgctgctcacgctccacctgccgcggctatagcggctgatcacgtacgcgaaaaccacccgaaatttttttggtcaaaagggcagggggatgcgggggacgtcgcacgattgcacgggccnccaccantccnccaacacatcattaccaccaagagcgcgcgaacgccgaaacggtgtgcgcttcggtcgcttctgctgctgccgccgcggcnccggcggcacgggtggccggtgcgctcgacggtgtgtctgccggtgtcntgcacngtgtggggccancnaactcngtgtgtgngggcnatcgggtgattccgtttggccnanatccgcttgcccatt

SEQ ID NO: 395984 - DNA, 374 bp, Oryza sativa
  unsure (1)..(374): unsure at all n locations
gatttcaggccacacaacttgagcagaggaaggatggaagcggcggcggctgcctccaccggcgaacttttgacaggcaaaagttcagcgcctctaccccacaagaggcgatcgcgagacactacgctctgctgctgcgcgcatcgccagcagaaaatcgcagcatttgcaggctctcgcatcattttcagtcgccacgtgatccaggtggtggtcgtctgcgcggctcggcggaggagggcggacatccagtcggagacgtaacgtgctgatggagccaggggaggaggaggagttcgtgagcaaaggaggagctggagggcaggctgagggggtggctggagcggtggcccggcggcgactnccgcgaacct

SEQ ID NO: 395985 - DNA, 646 bp, Oryza sativa
  unsure (1)..(646): unsure at all n locations
acaaaacaccgatcgagtcttcgagctcgttcccgtgagttcttttattagtttgctccatcgatccccctgctctcttcctctgcttctgttgttagggttcagaggacgaacaacgccggtggttggactactctcgcgctcggggagatggcaagcttcggcgaagacaacagagcagcgacacagagggaggagggatcgtcccagaacaaatatggaggaatttctccaaagaaacctctcattaataaggaccatgagcgtgcctatttcgattccgccgattgggcacttggcaagcaaggcgcaagcaacagcacaaaaggcacaaccgagcccctgaaacccaagttgcagcgcacggcatatccccagcttcctccacgaaggcctgcgtgcacgtcaggcgcgacggaatagtgtgctccaatctcagcagtcagcactacatgtttacatttgtcgctgagactgtgagagtatggcagggcaatcacagggggggcatagagtttgatccaattattaattgggatgtaaatatggatattgtcagcatgtagctatgtgcaatggaatttacaacatttctgtgnnnnnnnnnnnnnnnnnnnnnnnnnnnnnnnnnnnnnnnnnnnnnnnn

SEQ ID NO: 395986 - DNA, 490 bp, Oryza sativa
  unsure (1)..(490): unsure at all n locations
agcagtgtgcagatcgtttgagcagctagcaacaaattacaagagggtggcagctagctagttaggccggatggcgcggctgcagcgacgacgtctggtgctggcgctcctgcagctcgccgtggcgctctggttggcggctaccagcggctgcttctcccgccagccgccgagtccgatagccggcgtctcgtcgccgccgattctgccggacggcaaccggccaccgaagtcgcctccagctcccgcatccgcacaacacatgaaccgctcctttcagccgggctgcccgccggattgcaccgaccagcaacgtcagccttaattagttatggactatcaacgacgtacgttcagcatatatactctggttgcaaacgtgttagtatgtactncactctgtaagttcgttccgatttcaaatgtaataatgcaaatttagggcattgtattctcaactacttgtaagtataatttctatttactagga

SEQ ID NO: 395987 - DNA, 484 bp, Oryza sativa
  unsure (1)..(484): unsure at all n locations
aaacggagaccccgaggaaatggaaggcggcgganaaccgcacccgccgcgccgcacccggcggtggcgccgctggcgttcctgctggggcagtggcgcggggaaggcgaggggagcttccccaccatctcccccttccgctacggcgaggagctcctcttctcccaccacccctccaagccggtgatctcgtacacgcagaggacgtggaaggcggcgtcaggcgagccgatgcacgccgagagtgggtactggcggccccgccccgacggctccgtcgaggttgtcatctcgcagagcactggtctggccgaggttcagaagggttcgtttgatgctgaaaagaaaacagtgacgctccaaagcgaacttntggggaacgcatccaaggtgaaacagatcacaagagcttttcaattggtagatggggagctctcatatgttgttcagatggcaacaatcacaaccagttttacagccacat

SEQ ID NO: 395988 - DNA, 468 bp, Oryza sativa
agagatcggagcagctagctagagcatcaaaagcggccagccatggcgttggaggccaggttctttttggcggccgtgttcgccgtcgccgcgacgtgcttgtgcttatcggcggtggcctctgctttcgccgtgccgagcgtcgccttcgacgaagggtactcgccgctgttcggcgacgacaacctcgtccgctcgtcggatgataagagcgtccgcctcttgctcgaccggcgctccggttctgggttcatctcctcggattactacctccacggcttcttcagcgcgtccatcaagttgcccaaggcttacacggccggcgtcgtcgttgccttctacctgtcaaacggggacgtgtacgagaagacgcacgacgagctggacttcgagttcctgggcagccgttggggcggccagtggcgtgtgcagacccaacgtacggcaacggcagcaccgcgcgcggcc

SEQ ID NO: 395989 - DNA, 779 bp, Oryza sativa
ggacgggctagtttagactactccagtacagatcagagggtgtattgcagtattgggtagttggatatgcagggggaggtggatcacccgatgcagatggtgctgcgggtgaagcacccgtcgtcgctgggcggcggcggcggcggcggggaggaggaggccggcgaggcgtcgtcgaggtcggcgctgtcggtgttcaaggccaaggaggagcagatcgagaggaagaagatggaggtgagggagaaggtgttcgcgcagctcggccgcgtcgaggaggagtccaagcgccttgccttcatccgacaggaactggaagggatggcggatccaaccaggaaggaggtggaggtgatcaggaagaggatcgacgtggtgaaccgtcagctcaagcctctcggcaaaacctgcgtcaagaaggagaaggaatacaaagaaatcctggaggcgtacaacgagaagaacaaggagaaggcactgcttgtaaacaggctaattgagctggtgagccaaagtgagaggatgcgtatgaagaagctcgaggagctgaacaagacggtcgattcactctactaggcgccagataatgttatcccctagaggcatataattcctctctgtaatctcagtgccatggatttgtgaaatgttcacgtgacccgttcatgtttgcttgtaactcaagagtgattcgttctctctcttttttttttcgcctcttctctcagttaattaattggcttgggtgtttgttgcgttgtcaaaaaaaaaaaaaaaaa

SEQ ID NO: 395990 - DNA, 954 bp, Oryza sativa
  unsure (1)..(954): unsure at all n locations
acctacctctctgcgcgcctgatggccggcgaccgccgcggcggcgcgncgttcgtctcggccgacggggagcgacggcgggggatccggccgcctccgccggatgcgcgggtaccgcactcccccgtcggcctcgaggaagagatcatgatgtttcagacaagagttctgttgggaggaatgagcatgtatgatcggtaccaggattggcgccttgatgttgataacatgacatacgaggagttgcttgagcttggagataaaataggttatgtcaacactggattgcgtgaggatgagatagttcgcaaccttaggaaggacaaacacccagcctttgactcctcgttccggtatgcaacagaaatggaaaagaaatgcagtatttgtcaagaagagtttgaagccaatgtagagttggggaggctggattgcggacacagttaccatgtttactgcagtaagcaatgggctttctcagtaggacgtttgcctagtttcaagaatgacgttaactagatttgaagtccgggacttcggtgaaacgacgattgattacctgggttcacttttcaaaacaagattgtttgtgtctgtcaggtcgattacatatttaattgtataacacatcttcgtattgtgttttnnggtaggtatgtcatttnngggnattntatngnttttagtnagttnannnntnnttnnnagngttnttnntnnanntatatantatttgtagagnngnancntggggtgttttngtttnacttnntgngntttttangnngntttttanannttantannnggatgtntannnttntctttnanggtnnnnaagnantaattnatannnagnaatttantgtttnatnntntnttgtnntatattgntnttnngnnngantanttatntttttnannnttnnatntttttttttnattnntntgttg

SEQ ID NO: 395991 - DNA, 433 bp, Oryza sativa
  unsure (1)..(433): unsure at all n locations
nnnnnnnnnntttttttttttttttttcagagatggaacggaagaacagccgcgatttctcctttccttttatttcattgtcaaacacgagggcagtagaagtgtacaagaagtgtaggaggagctcttagatgcgcggttaattcgcagctcgattttcacgcggacaccggcgcgggctccgccgccgccacgtcgccggtggattccgccttcaggagctgcgagacgcgggccgctatgctccgcttcgccgccgggaggaccccgtgctcgccgatgatggaatccagcaccgcctcgcagacgccctgttctcgatcgccgccgccgccacgggccctctggcaccgacgagtccttggagaacgcgacggtnaggacggccgggcggggagttggttaagaggattgacgcgcccggaggaaagct

SEQ ID NO: 395992 - DNA, 636 bp, Oryza sativa
  unsure (1)..(636): unsure at all n locations
tgtgagatcggccgagtngaacattcttcttcgtcttcctcgatagccaaaatacactgtgcttggagatcatcaatggcgataggaagagcgagtgtgagcgccttgcatgggcattgctactggagagcaacctcctcgtcggcaaccgtcgcagcaacggcgacgacgacgacgacgacgtcgatgtggctccagctgcctgatttaattacggatataatatgattattactactgatcatctagactatattatgatgagtataacgatctctacgttaataagttctgcatggtctaagagtactcatctacatgcaaatatgcagcactttcaattagtcctgtaataggtgatcactgtggtgagtgtgcagactgcagaggttttgctgtgtactagctagttagctactcgtactaattattcgatgcatgcctttatctattaattactcctacttacttatgtgatatatatagttggcaataaagaagcatggtatatatgaatatatctggagtgctatatatataatgggaaacttatgtttatatggcgcaataactcctaatgttacacgacgtgtttaacattatggttttgtccaggtatgtttaactatatatatt

SEQ ID NO: 395993 - DNA, 449 bp, Oryza sativa
  unsure (1)..(449): unsure at all n locations
aatccgactcgagcggggtgaggatctaaagaaaaccctagcggcggcgattggtgcggcgggaggcggccatgtcccccaaaccgaggaaatcggtggcggccttgagcggtcccaaatcgtcgccggcgaggtcgactcggtccaaatcgaagccggattctgatatcgccgagcacgacgacagtcccaaatcgtcgtccgggaggttgactcgctccagagcaaaggcgattgaacaggtggggaatcggactgtggaggagtcggcgggagtgtcttcgaacaagaagaagagaaggattgaggaggagacggcgggggagtcgcccgcggcggggcctccggaggggcatggcaccttggcgtcccggccacttccgncgacccacccgccgctacaacccgngtcagaaaaagttctncatcgtccggttgaagtttctcga

SEQ ID NO: 395994 - DNA, 493 bp, Oryza sativa
  unsure (1)..(493): unsure at all n locations
gggaatacattgcagagattaagcttcaccctgaagtcacagctcaagtaaggctgaccgtatatgcgaaataagccctgaagctgcttgattgaatctttagtggatggtgggctttggatgaattctgatttcaccagagatttttgctgaaactccaaggtgcagtgtcacatcacggggcttggtctttacacattgccactgtccatcctacctgtaaagtcagtttcttgcacctttttttttttgacaaatttatttgtgttaatgttatggggttaaatgggcatgatgtaaacaacaaagggttcagagtctagggcaactgatacttgtcttgtaatcttgtttaaaggtgcacgttctttatagtcatataggttgatagagctactacaatatttggggttgggtgggccaaaatggcacgtggcagtctggtggtcgtaggttgggccgttgggcgctgtnttattaggcccaacatagg

SEQ ID NO: 395995 - DNA, 764 bp, Oryza sativa
  unsure (1)..(764): unsure at all n locations
gctgacaagagaaaggagttctacacaaaattagaagagaaacacaaggccttggaagctgagaagaatgaggccgaggcccggaaaaaggaagagcaagaaacagccttaaaacaactaagaaagtccttagtcatcagggcaaagcccatgccaagcttctaccaagaaggacctcctccaaaggctgaacttaagaaggtccctccaactcgtgctaaatcaccaaagtttacaaggaggaggagctgcaagtgatgcaccgccgacgccagaggcagcaaataccaccgcagcatctagtcgatcacatcgtcacagcattgcgaaccctaaagatgctaacagagtacaatgctcaccaaaaaatggcgtcgctgccaaaactagagctgtcaaacctgtgagctgaaggccctctggagattctagatcagccaagtgttgcgaatgtcgctgtacaaacctaactttagccgtctctcggtttcatggcattttgcatttgatttatacttcctgtcaccaaaagaaggccacagtgccgaggccggtgtgcttgcagctgaaccctttcatttcttttcttcttttcgcgttgctgtgtaagaactctgttgctgggaccatgtactgtgttccttgttgtaaatggtcgagggtttctgtcagaactcagaaggaagacactctgcccttttaaagcccttgatgaaccgttgcaatgttttgcttgatatttnnnnnnnnnnnnnnnnnnnnnn

SEQ ID NO: 395996 - DNA, 670 bp, Oryza sativa
  unsure (1)..(670): unsure at all n locations
gggaaatacatcacttattgactcaaatcattcatattgttttcagaaaagagcaacatcatttcatactggacggctttttgcccttttgggtgtacccactagagactccccttgcctcttttttcttaatttgttttttacaatgacttgaacaagcagctcatatgtgcatattgtacatcacatttgcatatcgattgttcattaaaaactcaggaaacagacaagacatgcaaacagtctagcatattcattacccagccttaggttgtgaaatgtgtctcagtcctcaatcacaaaagttaccccgtcgtctttcttgaaatcgtgcgtagtgtggtcgacaatattggtgttgctgagctccagggttgtaggaaatccaccgcatccgccttgaactgcgggccccgcatggccaggtcccgatgtgcagcttcaggaacttagcgccggaaaccctgaagacgcagacttcagctggatcgggaggaaggtagtagtggccagcacgcgactgcacgggcttcctcccatcgcgccctgctcgtgtgccccatcctccacgatcgagggcttggccacgccgaggtaccaatcttcgccgccgatggagccgaggcactgggtcacgctcgcgtggtgggtgatcgtccagnaaacttga

SEQ ID NO: 395997 - DNA, 497 bp, Oryza sativa
  unsure (1)..(497): unsure at all n locations
agagaatctgaatcttgccggtgtagatcgggtatttgtgtgcacagcaatatcccctaccactgtctacttgatgcactgtgctctccgtctgaaacggtctggcacatctattcctagaatggagctggttgaagttggaccttcgatggacctagtagttaggcggcaccgatatccagctgaaagtttgaagaaggaagcaatgaagactgccgatcatgctaagaagatgaaaaatgtcacgaaggatcctgtgcagggcaagttgggcaaggtctacattccagaccagcagattgcaaagatgtctttatcaaccgacatcaaggggctcaagagggagcgccgtgaggccaagaaaaccaaggagcacacgaggaggcaaaggttaaccgttgagttaaggaaagctgaaggctattcattttttgttgacaatttgccaggtcagnttaaagggttctgtggggtacctnctccactcttgcgtaacc

SEQ ID NO: 395998 - DNA, 528 bp, Oryza sativa
  unsure (1)..(528): unsure at all n locations
cntccttggncatcagggaaaactcagaagaccatganccactccggccactcatagatgaaaanantacttgtnatatactggtgtaatanttntggagcgatgattcacaaacaaaggntgctgtagttncttaantncatttaanttgcgaggacagcagagtccgaagatttgccttctagatgcgatatcaggattgtgaatcaggtcaaaagcactgcacctgcgatggacagtggtggtgaacagcgtggcattcatgacaatagagataggcaatggctgagatttaacttgctcttataccaaaataatgaaactctccttcaatgatgtnaaatgattgaaggcaganagttaatgctacacgggagctagctagctactactactccagaagatactgattcctagcgggcatgtngagttgtactactagttaattaatggggcatgttcaattaatgttggtcgctgtttnaagtggatcggagtagtagtatttaatatgggcnccagccagca

SEQ ID NO: 395999 - DNA, 366 bp, Oryza sativa
  unsure (1)..(366): unsure at all n locations
actttagagttcagagtagagagagagagagagcaatgcaaggtttcagctttgcggccatggaggagttcacgttccccagcgtcgcaccggagcgatgcaacgccggcaagaagccgcctttctcccctcacttcgccaccccgccgccgtggtttggcggcggcgttgtcgtcgacgcggtggtgtacgatcaccggaggagcttctcggccgtcgagaagggggaggaagaaggcacggtgagaggcggctggtactattgctacgacgacggcggctgcggcaatgtctcggcgaggttcgcggcgggagngagaccaagacgatggacatgctgtggggaggacttnaacgaggagctct

SEQ ID NO: 396000 - DNA, 229 bp, Oryza sativa
  unsure (1)..(229): unsure at all n locations
tagcggctggcggcgnnattcgcgctggtaagatgctagtggtaaagatgtgcttgtactgaatgtccaggatccgtgatcagaggttgcttctgcatggtgtatgtgagttctataacgtatcatctacaaccacgactacaatgagagatggaaagctgtggaagacgacaaccaatttaggaggagcccgggaccgcgcctccccccaggtctcaaataagtaagc

SEQ ID NO: 396001 - DNA, 568 bp, Oryza sativa
  unsure (1)..(568): unsure at all n locations
tttatttttnttgttataaacttaanatatnttattatcttatatcagcagttttcgtaaagaactgggccgaagtataacaatacaggagtaaagtatgtgtccttgttaccataaaagaatgtaaattcacacagtagaaactcgccagcaacagttttgtatctgttcactcttttctatcagtgcaaagaaaatgcaagaattgacacggtaatatatgaggtcgctcatgctagcacggcttatgtaagactaactattacacgtccaaatttaggagaaaatggnnataaaataagcctaactatcaccaaattctttctttccgttcgcatcgaaactactaagtgaagttttggtccaccgtaccgccatgagtccagtcctacttcatgttcttatacatgctgtcgatgacgttctggtaatatttgagcagctgtggccgcttcttcttgtaagttgggggaattaggtcacgatccatatcgaatggcactggntccagatgaaacagccctgatgagctcaaagcctttgagcttcttttctttaccagtcttgg

SEQ ID NO: 396002 - DNA, 384 bp, Oryza sativa
ccaaaagtgcggtatgtttgtattccatattctctacaacctgaatattttttcattggactagcatgtgttctttgttcttacaaaaaatgatagatatagctccaataactaaggaagattaacagtagactgttcctgcagccctgtaatggaaactagccattcttccaggtgttgcaatactaggtatggcccctgggactatgtattcatcatcaatttcatcaaatctgatttctctcaagtcaacagattagtgtgggaacctcgcggattaaagctttcgagtagtgcctgattgctgttcctccttccactgcctcttctttccttgccttgctcttcttcgtcttcttgaagatctagagatccctgaaacat

SEQ ID NO: 396003 - DNA, 694 bp, Oryza sativa
  unsure (1)..(694): unsure at all n locations
gggggggggggggagacgcggcgagatgcggggagtcgggggcccgctgctcaccatcggcgacctcctcagcgacctcgccgtcgacggggcgccgacctcgccggcggggaggtgtccgtcccgtcgtcgccgtcgtcgggggggcagcaggcggaggaggccgacccatccgagctgaaccggctattcggggagcactatgacaatttgatgaaagcgctgcaagaaaatgacccttcatggccttcattgatgctgaagctgtgcacggctctgaagaccgcagataagctggtgagctgtgcgagtattgatgctgagcagctgctgcagaaggtagagttgctggagcgcctcttagtgaggggcgatcgtgcggtcacggcaatagttgaggaactccagcgttaacggcccctccgaggatagtcactcatcgaaatcaaaaccaagtggcaaatagtgccgtgatcgtgttaactcttgtatttgatcacatagatcagggcaactattgtcagtgttcatgagactgaaggagctgtttgttggccctttcatgaatttcaacagtatctgtgtagctgcttatattctagcatttcctggaaaaatctgtatttcctgcaatagagtgtgaaatttgcttattgcttgttaattctcaaaaaaaannnnnnnnnnnnnnnnn

SEQ ID NO: 396004 - DNA, 819 bp, Oryza sativa
  unsure (1)..(819): unsure at all n locations
aaattactnataagggacaagggggttcnccgcgnggcgcgtttagaatangaatccccgggtgcaggaattggnaggggttccccccccgccgttcttcttcgggccttggaaccgccncgccgcggcagcttgccgccgttganatggttaagtgcacggatcgttcgttcgcnccgggaaggtgcgcggccagacgcccaaggtggggaagcaggacaagaagaagaagccccgcgnccgcgcccacaagaggatgcagtacaaccgccgcttcgtcaccgccgtcgtcggattcggcaagaagcgcgggcccaactcctccgagaagtagacgcgccgggccgctccgccggtgatgtcccgtttgttcttggtagtagtttccttttaagtgctatatgcaagaaaacaagaagggggaaccaatcttttgtagcgtgtgagctcgatgctcgtgtgatttggatcgaactcaaaagtgcttagtcttattatgccgcatgttaagtttgggatatgttatgagctcgcgcctcaattttgcttatgttcacctctataatctccaatcaatagtgactaatccaatcaaaaaaaagcgaccgcgaatacctgcgagccaggggtatccactagtacgagagcgacgacaccgcgtggagctcagagctatgtccttgaggagggtaatatagagctagcgaaatcatggcatagctgttactggggaaatggtatcattcacaatccccaacttccgggcgagctaaagtaaagccggtcatagagggtaaccttatatattgtccaccttca

SEQ ID NO: 396005 - DNA, 364 bp, Oryza sativa
  unsure (1)..(364): unsure at all n locations
ttcgcngccgctttccacttggacactgaggaaaacaataaccttgttcctggtttccttggttcgttaattgggtattcgtcctggtgagactagatcatttcctcttcaattccctgagtcctttcaacaagaaagtctgcaaggtgtccgtgctcaatttactgtggtgtgcaaagagctcttctacagagagttgccagaattggatgactcacttgctggaaagctccttccaggctgcactaccatggatcaggttcgagaacgcattttgcaaagatgtaaagcaggtggggaaaccagtcatttggacaagcaacagtgattgcatccttgatcagctgggaaagttagttgaagc

SEQ ID NO: 396006 - DNA, 422 bp, Oryza sativa
  unsure (1)..(422): unsure at all n locations
tggcaactggnaaggaggaatctcctcttctttttttactgtacatagttcttttatgtactctttcaactcttgaaatcaaatggacagtgctcagatgatttccatcttataggtttttacagacggccgatatcaaaacatccacacaagggtctttcttgaactattgtatacaaatatatgtggtgcccatcctatacagtagaattctatgcacatttcagcatttggtcctacctcagtcagacccgccgcagcacagagggcagcactcgaggcatgcgaggcacgagtgcgcgccgcacagctggcaccatgacgatggcgcaccggtcgttcatcttggctgcaggtgttgatagcacatgcagcagcagcaccggtggcggctcaccaccgcgcctttgctgccatttgcc

SEQ ID NO: 396007 - DNA, 440 bp, Oryza sativa
  unsure (1)..(440): unsure at all n locations
nttttttttttcatcaaaatcatggtatgtttatcctgaatcctcctctttaaacatgtatatgtgacaaaaatcaaatggaatgaaaatgtacactatggtacaacaagggctacaacaaatttcccaaatcccataggcatcacacacacagttgacacttccctcaaaatccgctactcagaaatacaccaatgcaaaccacagctcctcacactgatgaagaatccgttaatctgtatagctcacgaggcaacagcaatggcaatggttggtttgcattggcaatggcgattgcagtagcaagaggatgtatacaacaccacattgggtgaattctttaccgtggaattggggggattgggggtgatctgttctagctttgttgctgctgacggcggccttcttgaggagggttgaggcgccttcttgcgcagngg

SEQ ID NO: 396008 - DNA, 734 bp, Oryza sativa
aagttcacccacgctccgccaatttcaaacagattcatatgggcgcgcccgtggtagagccagaggaagaggaaggggttggggtggtaggggaggctatggtggagggtatggtggatatgataacaaccaaggaggttatggtggatatggacaccagggtggatatggacaccaaggggggtatggcaaccagggaggatatggccacaatcaaggtggttatggagggtatggttacaaccaaggtggatatggaggatatgaaaatggtggctggaactacaaccggaacagaggtggtggtggtggcgggggccgtggaagaggcaactggggatatggtggtccaggaggatatgaacgttcaggtcccggcatatgaacgtggtggcagaggtggaggtagcccaggcgggcagaggctatgcccggggccgtggacgaatgggcggtggccgtgggcgaggcaaccaaaactattagatcgactttagttggatgtgccagcccggtcgttgggtgctgtatgaagaacaaaaactgtggatgcgttctccataggacggaaccctagctgtttctttgtgatcaatcgactagtcttcccagcttttcgctataatcatcaatggtgtctgccattgcttcgattctgtgggattttgacaagaatgttaagttttaccttggacatattttcctgtatttaagagtgcaaaaaaaaaaaaaaa

SEQ ID NO: 396009 - DNA, 391 bp, Oryza sativa
tcgcggccgctggatgagccacgctgagcgcttcttcatgtggctcggcagcttctgttgctctgagctcctcaaggtttgacacgagtgatcacccacccaattcagtaacaagcaaagaatctgaagctaccattgactgctattgttgaatgatgatgatgatgttgtttgtgcaggtacttgagagccatcttgagccgctgacgaatcagcagttgatgggcatctgcaacctgcaagcaagtcatcgcagcaggccgaggacgcgctgtcacaggggatggaagctctgcagcagacgctgggagacacactggcatcggcggccgccaccgtggtcgtcggcggcgtgacgcgacaaccgtcaccactacagggcagtggccat

SEQ ID NO: 396010 - DNA, 741 bp, Oryza sativa
  unsure (1)..(741): unsure at all n locations
nnnnnnnnnnnnnnnnnnnnnnaatccttgaaagacaggtttgtaccatttcttgaggtgaaaagaaacacgatttttgcttgctgtttaatatgctctgttcaaaacaaaatgcagtgattgtccatgcgaaactgtaaacatggtgatctttaacgtaaaaccatctagactgactctagtaccacacttcggtacatagtttcctcaggnaagaaagaaagcagagaaaataaaacactactaccatacaaagtgatttactgatttatcaacaaaatcgaagctcaagtaaaattaacaagtgaccatataaacgcttattgttcttcacaagcataataccatacaacaactggcaagaacagaaagaacgggctccgtcgccgatcgatcactgcaggcgacgcccgccgccgggtagatggacgacgaccggcgacggcggcggcgacgatggcctctcagatcttgtagacggcgcaggccttcttggagaacttgatgggcttcgtcttcttggcgtcgacgacgatggggcacgttacgtgcaccttgtgcgtcaccctcaccagcttgccgatgacgtatccccgggaggtgaggtcgaagtccagcgtnaatggcaccgcgccgccggagctcgacagcatcagcnccccgccggcgccgtagaggggcaccttgttgccgtggaccaccgccgtcaccaaccggtggctcttcctcggctggtagtac

SEQ ID NO: 396011 - DNA, 508 bp, Oryza sativa
  unsure (1)..(508): unsure at all n locations
gcggctgggcagcccggaggcaccgaagggcagattctccctcaacatgaaaccacagatttgcagcaccaaggaggctattccgacgacagcgacgacaacggcgacggcgagcgaggagaagatggccgtggtgaagggtgacaccacgccacggctgaagctcagcaggcacaagaagaagctgtccatagaagcttgatgatgatgatccgctgatcactcacactaccaatccttttcacttttcttcttctctgaattcttgataatcgagtgccatcagctcagtagatgtgttgccgtgttggtgtcgtaactgcgaacttagtgagttgtggttagagtgttttccctccctccatccatccagcaggaggagaatctagtgaaagagctgttacctgttcattttctggtgctaagtttttgacattttcatcatcatagtaaaaattgccaaagtgttgttagcatnnnnnnnnnnnnnnnnnnnnnnnnnnnnnnn

SEQ ID NO: 396012 - DNA, 657 bp, Oryza sativa
  unsure (1)..(657): unsure at all n locations
tcggcgtaccggctgccgacgcgttcgtccggggcacccagtctgccgcncactccggcgtntcgctgttcgacacgtgctacgacctntcggaccggacgagcttggaggtccccgcgntgtcgctgcggttcccggcggcggcgagctccggctgccggcgaagaactacctgatcccggtggacggcgcggggacgtactgcctggcgttcgcgccgacgaacgcggcggtgtccatcatcgggaacgtgcagcagccaggggacccgcgtcagcttcgacacggccaagtccaccgtcggcttcaccaccaacaagtgctaagtcattagccagcgatggcttaacttaattagccagatcaaggagtgattagtggtggtaaatggtaattaagcgcgagagtgtgtgatgtgggggtggggcccagtgccaggctctgtgggctttgggagagacgaaaggcgaggacaaatgccagcctgtcctgctctctgcttgtcgatggatgggggggcccactctcttcttctccggtgctttgctgtttcgtctttgatgtctcggcaaagacgaattaaaatgaatccattccaatctgttcatgtgttcnnnnnnnnnnnnnnnnnnnnnnnnnnnnnnnnnnnnnnnnnnn

SEQ ID NO: 396013 - DNA, 313 bp, Oryza sativa
ttttttttttttttttagaaccaacagcaagagttgtaactcatgaaataaactgtgtcgacgaacttgacccaaattacaagtattagttgctacgtatgtacttgtacactgtcgatgaaatggaccaaacagtttgcagcttcttcacttcactcaccaaatggaccaaactaaaccacacgctatcagctagatctgaatctatacttaaccctgaatgcatcttgaatttgtacccattacactggctgggtacagttaattgtacacttgaatatacatacatatacatcggactcgatcgagcagg

SEQ ID NO: 396014 - DNA, 398 bp, Oryza sativa
  unsure (1)..(398): unsure at all n locations
aaaagatgttgctgattggattttngctgaaaaatcttcactgaaggtgacgacaggccaacgcatgacagagagttctgtccttgatgcacactcttcagatgtcgatggagaaccattactggtactatgagtatctagttcggaaatctcctacacaatctgcaccagaactcaaatctgcttcgccataacgtagcctgcactgctgaacgagatgggtacttgtactccttgaatgcttcaacactcagcaagcagtgggaatctatggggccttctttacagaaaacagtggcatcctttcacctcctaccccctacagaaaattatgttcctccataccaggatccatggagattttggggacaatcaattggttccccctttacttttta

SEQ ID NO: 396015 - DNA, 431 bp, Oryza sativa
  unsure (1)..(431): unsure at all n locations
aagcgcnantggagaggactggtgccccacctgcacctacaggggttcctgctggtggtggtagaggtgctgttgatgacagggaggaagatatggatttggagcagcctcgtgagcaacgaagggagagtagagaagaaagggaagcaaggattgagcgtgacaggattcgtgaggagaggagacgtgagagggagagagagaggaggctggaggcagggatgccgcaatgggcaagaagagtaagctcactagagacagggatcgttgatgtcagtgagaagattgccctgggcattggcaagcactgtgcggtcttaaaaggttcggggaagtcatgtatgtcccagaggttgttcaaccaggataaaggaatggactctgggtttgctacagatgatcagtataacatctactccaagggtctcttc

SEQ ID NO: 396016 - DNA, 490 bp, Oryza sativa
  unsure (1)..(490): unsure at all n locations
nnnnnnnnnnnnnnnnnnnnnnnnnnnnnnnnnnnnnnnnnggacgngncngngnacgcgtgggttatgaaacaaaaatacgagaggttcaactgactgatatttcagatgtcaagttttcaagcaccgtaacaaataaaatcagatcagtacatcatattataggagagatggcacaatccaggcaaaagttcttaaattctagtttcatagctgctttcatagcaaaacaggatctagttggccacggcagctctcttccttggggtagcctcagtaccttctctgaagttgctcttgaacctcctaggcacatgtcgcatgtacctcatccttccggttcctgtggtcttgcgcctaatggccttcacgctccagttgtacttgcggatgcgggcggcggggtagccgcaggaggagcaggtgctcttcttggaggtggaagcttccggcggccgcaacngggtggagctccacttttgttccctta

SEQ ID NO: 396017 - DNA, 376 bp, Oryza sativa
tgtcttgaggattcccaatcttccatataccatttgaatatgagaaccaagtcaagctgtgctctccctgtatttgcattgctctggatgttggctcccagcttgtattgatctcatgtgtcatgagttgtagaaagttcatacaaacggcaatcgatttatgccaattggaggttgaatgggatagggattagtcattcgattcttccatattagtgctcctgtagatagcattctccttatagggcatctctcatagctgattagctgtcattttagtactatctcatctcttgaattgttactattcatcaacatatagaaatttactcgacagtacaattccttttgagtttggaccaaaaaaaaaaaaaaa

SEQ ID NO: 396018 - DNA, 326 bp, Oryza sativa
tcgagcggccgcccgggcaggttttttttttttttttttgttcagaagcaaaagagaatttccgccaatatgtcaaaagcattaacattgaacttaagcgttcgcaataactattatactggaaggtatcaagatagcatatttttagcatatgtcaacagcggtcgatcctgcaaacatcactgctacataatttaactgtccttcaaaattaaacggcctcatgcgaaggaaaacatcatatccaaactacgggaagttcactccatcgaggaagaggtcgggccagcgccaaagcctccgccaccacctcggccgcgaccacg

SEQ ID NO: 396019 - DNA, 525 bp, Oryza sativa
  unsure (1)..(525): unsure at all n locations
gaggaaattgtcctttgcctcacccgctcattgcagagaatccaaactcataatccatcagtttagttaattggtgttggactatagactatagagattctggttgcttgtgccattctccaactctgctatatagatggctttaggaagacccatactgattcagaactaatcatctttgggagaggagagatactagctacacattcagattcagagctaacatccgcagtcaccattgcttcattggaggagagatcattgggtagcaatggcagcccaccatggtagcagcaggaagacaaaggcagagcagtggctattcggtggaagatggaggagaactgtgaaggagacaaagcatcctgttgcctctgaagccaagcctccaagctccaaccatttcctacagccattcagaaggatggcgacatctgccttgaggaagtccagagttcaatcttcctggccttgggacagaagggagatcctccgataattgcgcccgggnggaagttaattccc

SEQ ID NO: 396020 - DNA, 487 bp, Oryza sativa
  unsure (1)..(487): unsure at all n locations
ccaccacaagcctagcgagcttggttgatttttcgtgtgcgtgcggttgtgtaggcgaaatcctccggttttttctcgtagtttgggatcgatcgatggcgtcgttgggtggtggtggtggtgggcaggggccgcccaacggcagcggcgtcccaaccaaccggccggtgttcaccatcgagggccgtgtcgtggagccgcccacccttaccgcggcgcagtggacatgattaggtcaatgtatctctcgtcgcttggtgtgccacctgtcaacggattctatccgggcgcagtacagtacccgagaggagtgttcgtcccttcaaacgagtacgaggcggcaggggcaactcgggcttgccaaaagggccaagcagactgacatttccgctgagaacgagctggccgcgaagaccaccggcaccaccccaccaccagccgcgccgaagaagtgatgcccgcgagatggatacatgggagngcgcgg

SEQ ID NO: 396021 - DNA, 472 bp, Oryza sativa
  unsure (1)..(472): unsure at all n locations
aaatctcccgtctcgttgtctcctccgctccttgcgccgccgccaagaggagtcgcggctgaacaggggaggggcggcgatcgagcagagcaggggagggaatcctggtgatgtaacaaaagtggtcaccagtgcctgcgcaaaatctcgtctgtttgtatatggtattaataagcagcttcagtgcctggctgatccttggggtgaatggaaggcaacaacctaccctctggaagcttgatgcgttctaactctgggcaaatgcatgctccaaatcctggaaagcagggctttgaccatactcagatgcctgggcaatttatcgatgcatgtaaaccagtctacagattctgatcactttgtcagaatttcaattcggagagcttgggaaggttgaccaccaccaccaccatcaccatcgtcaacacggccaagaccggcatgagttatgatganggaacatggtntcaac

SEQ ID NO: 396022 - DNA, 404 bp, Oryza sativa
gatccccacctctctctctctcgtctctcgctctcatggccgagccgccgtcgcagtcgccggcgcagacccgccgcaggcaggcctgcagcagcaggggcccggggagagcgcgcgcgacgacatgatggcctgcgtggcggcgctggaggcggcgctgctgccctgcctccccgcgcgcgagctccaggccgtcgaccgctccctccaatcctcccaccagattgatgttgagaggcacgcgagggatttcatggaggctgcgaagaagctccagtcttacttcatcagcctgcagcgcgaggacccgaccgtcgacagaaggacaattccttcgaaaggatatttgctataatggaggaagagctgaagaccaagtccgagctcatcgacaaacataagaa

SEQ ID NO: 396023 - DNA, 368 bp, Oryza sativa
  unsure (1)..(368): unsure at all n locations
ggcgagagtgagagagatggtggagatcccggcgatcgacctgcggctggccggcggcggcggcggcgcggaggagacggcgaggctgcgcgacggtgcgcgcggctgggctgcttccgggtgtcggggcacggcgtgcgccgggcgctccaggccgagatgaaggccgcggtgcgcgcgctcttcgacctccccgacgacgccaagcgccgcaacgccgacatcatcccgggcagcggctacgtcccgcccggcacagccaacccgctctacgaggccttcggctcttgcgacgccgccgcccccgccgacgtcgacgccttctgcgcccgcctcgacgngccgccccacgtcaaggagaacgtgaa

SEQ ID NO: 396024 - DNA, 522 bp, Oryza sativa
  unsure (1)..(522): unsure at all n locations
cagaccacccccaaaacctcctcgttggccgtccagtgcggcggagagagagagggagggaggaaggaggccgccgcgcgatggggggcgacctgtacgcgctcgacttcgacggcgtcctctgcgacagtgcggcgagagctccctctccgccgtcaagcgctgcgaaggtgaggtggccatgggtgtttgagcaggtcgacgctgccatggaggagtggatcgtggagcaaatgtatacccttcgcccagtggttgaaacaggatacgagaatctgttgcttgtcaggttgcttattgagattcggataccctctgcccggagatcatcggttgcagatgggcttagcatccaagaaatactggagacctggttaaaactgaagcccacaattatgagtgaatggaatgaagatagggactctctagttgatctcttttgcagcataagggatgacttgattaaaatgacttttctggttggataggggctacagattttatcctgggacagccntgcat

SEQ ID NO: 396025 - DNA, 314 bp, Oryza sativa
  unsure (1)..(314): unsure at all n locations
gcaacaagcatgcagacgccaaccatgtcgacgtccatggccacgccggcgaagtcccctcaccgccgtcgctgccgatagcgaggcaatgctgctgccacctgctgcagctagggcggcgcggcggcgcgggcgtggcgcgggcgtcggcgaagaagaagaacccgtggctggacccgttcgacgacgggcccgacgacgagttcgactaccgcggcggttctcgggggggaagcaggaggaggacccacggccntcaccagttggagcttcaancttttgtttcctttagtgagggttaattncgcgctttg

SEQ ID NO: 396026 - DNA, 527 bp, Oryza sativa
  unsure (1)..(527): unsure at all n locations
tatcaagcacaagcagcggangttaggcaggagcagaggacgtcggatcgcgcgaagacgatggagggcggcgacgggaggaaggagacgacggcggcggcgagggcgcagaaggaggcggcggcggcgggaatctccgtgcgcgagtcgctgcagcacgcctgggcctcgttccttggcctggtgaggaaggtgacggcgaggagcgaggaggaggcggcggaggcggacatgagggcggccaagatgcaggtggaggccaccgacgaggcggaggccaagaagaagcagctcgccgacttgacagccgcagcatggccacagcgacgcagttcttgttctgctcagccgctcttgctttcgtacaagtagcttgtaacatcttgaaaactagttgtaactttgtaagaacatggtagtcacatggggtgcttagtatgccacttcgcacgatttttctacctgtttcgtctctgtatgttaagtaaccggatttcaagatctagctacagttttattgattactt

SEQ ID NO: 396027 - DNA, 419 bp, Oryza sativa
aaaaaccagcatagcaaagcaagggtttagggcggcggcggcggattccgcggcggccatggcgacggcggtgcggctcctgcgaaggagcctgcgtgggggcgaggcagcacctcggttcttatccgcttctcaaaatttggtacgactagttgcaaacaacaccagatcagttgatgttggccaaccaacaccccgatctcatcctgagttattagctgaaggagagtttacaccaggtatcactagcgatgagtacatcttcagaagaaaaaagcttttggaggttctgcccagagaagagcttggccattattgcgtccgcagagcagcagatgatgactgatgtagtgccatactcattcagacagaatggtgattacctgtatattacaggttgtgcacaacctggtggtgtg

SEQ ID NO: 396028 - DNA, 455 bp, Oryza sativa
atttcgtcttcctctttcagagcctcccggataaataccccaactcctgcctccccacgctccccctcccgactccgagagattacttcctccaccttccatccatctcctcttctccccctctccctctctctctcgagatcgaacgaacgaagaaccctaggtcatccatggcgggggcgatccgcgtcaccatggaggtgggcgccgacgggtcgcggtcgtcaccatctgcaacccgcccgtcaatgcgctgcatcccatcatcatccagggattgaaggagaagtacgcggaggcgatggatcgcgacgacgtcaaggccatcgtgctcaccggtgctggaggcaaattttgtggaggctttgatatcaatgtgttcacagaagttcacaagacttggaaatgtatctctttaatgcctgatgtatctgttgagcttgtgtcgaatttat

SEQ ID NO: 396029 - DNA, 520 bp, Oryza sativa
  unsure (1)..(520): unsure at all n locations
gcggccgcgcgctgtgtcagtagtgcgtgttggtttgggagagctagcgcggccggcacagcatgggagctgggattcggattctggtggtgatgttggcggtcgccgccgccgggagcgggtccgtggcgcactcaggcgggactactacgccagcgtgtgccccgacgtcgagaccatcgtgcgcgacgggtgaccaagaaagtgcaggagacgtccgtcgccgtcggcgccaccgtccgcctcttcttccacgactgcttcgtcgagggatgcgacgcgtcggtgatcgtggtgtcgtcggggaacaacacggcggagaaggaccacccgaacaacctctccctcgccggcgacggtttcgacacggtcatcaaggccagggcggccgtccgacgccgtgccgcagtgcaccaaccaggtctcctgcgacggacatcctggtcattggccacccgagacgtaattttcgtttgccggcggcnttcgtacggcgttgaacttcgggaagcttgacggg

SEQ ID NO: 396030 - DNA, 544 bp, Oryza sativa
  unsure (1)..(544): unsure at all n locations
attccnatcccctttcgatcccccttggtcgatctactagggtttccgatccacgaatcaacccaccanagtcgcccggccatgccttgggtttatnatccgcaacttgaattgctggccgttccgcaacaacctgaatcgtgtcccatggctgcggcggttacgcagcctgaatcgccggccatggctggggttgatcgtctccgcttggacggtgccatgcccccctcgtatccctcctcctggtctgtgctgccgcgggaggtcgtggttgtcgacgagatcgacgacggggaggagctacgccggtggaacaatcctgagatgcgatcgcagggccggctacgcggtctgcgaaggcagtggtggagggcgtgaagctcggtgcgcgcatcgtctccgaccggggcttctccgccctgtgcatcatcgtgagcaaagccgcgcgggctgggacgagaggccaagtctgcgcggcggtgctggctatcaagaatcatgtcatcgtcctctccgtcgcctttnccaaaagtgatttgttcca

SEQ ID NO: 396031 - DNA, 329 bp, Oryza sativa
  unsure (1)..(329): unsure at all n locations
agaatctgagcctcgctgctaccgtgccgctgctctccttgcgcgcctcgccctcggcagggagagttcagataacattagtgtcgttgtgattgatctgaaaggaagagggtaggcagagatcatggaggtagcctggtctcagatcacaataagaatttatctggctgcttcattttccttcatgttttagcctttgttatgttcaaccctcacaaaagcaagctctagtagtggttgttagaacaaagggaggagttgtttctgaaagttggggtggtctgaannnnnnnnnnnnnnnnnnnnnnnnnnnnnnnnnnnnnnnnnnn

SEQ ID NO: 396032 - DNA, 458 bp, Oryza sativa
  unsure (1)..(458): unsure at all n locations
nnnnnnnnnnnnnnnnnnnnnnnnnnnnnntttttttccaagaagaaaagcaatcgattgccacagaaagtgaagcaaagaagagtgtacaatccgtggtcgtagattccattgcttcagctaaaatgagtaactagcctcgagcttgaacaatgaacagaaacaagagtctggctataatttttctaggtgcatataggcgaaatggatcttagtacatcttaactccttccaggttacacatgctatgctcagtcctatatacacccggtaccgcggcaacaattatcgagggcgtgctgctatgtatcacaagggtggatcagtaacttactgtgcacacacattgcagctcttccggcagaagccagggtgcttcattggtaacccaccatgtaggttcgggtttcttgggaacacttcccctactgcaagcccaattggggggcagagggana

SEQ ID NO: 396033 - DNA, 481 bp, Oryza sativa
  unsure (1)..(481): unsure at all n locations
ggacgtcnagcngcagctgctctacgtcgccatgctccacggcggcctcttctccggcaaccacgccgccgggccggcgnttacggcggcgactaccccgccgaccaccaccacaagcccgccgccgcggccagggtctaactgaatttgaccccgacacaccggccaatcgatcgatgccatccatcatgcacacgactgcctatatatctcggtgtgatcgagctttgattttctcgtaatttcttcactttgtgtttcccgctcgtgcattgctgctagatgcaatggcaatgcacgaacaacgctgttcatatactctccgtatgtaaacttctgttctctgtatcgacgttcgtaatcatatgtatgtaccgtttggtttgggtttagttcaaatgtttgctgctgtgtgtttggttctgtttgaattcaagtataaaatgtgtgcacggatgaattgagaaaaaaaaaaaaaaaa

SEQ ID NO: 396034 - DNA, 453 bp, Oryza sativa
  unsure (1)..(453): unsure at all n locations
agaaaggtggagtactcgagtatctcctccccaggccccaaccccaacacccccaacccgcccgaaagaaaatctcccgtatcgtctcctccgctccttgcgccatctcgcggcagatcaggggaggaggcgccgatctccatctggcgagcagagcggggagggggcgccgtcgtcctgctgcatcctgatgttactcgcgcttcaaaactctgaggtttgttaaatctgttggctaatcatggaagaacagcaagtaaagccctctgattcacatccaccacctgctactccggtaggacagccagggattcacctgcacctcctgtcagaacttctgaccctgttttctcaggctactttcaaatgattctgccacccagttttgccagtacagtccatgtagccccttnaactgcacctgttccaaatgttgttccatacaagatgttg

SEQ ID NO: 396035 - DNA, 722 bp, Oryza sativa
  unsure (1)..(722): unsure at all n locations
ggggacctggcgcgcgtccacggccccgtgatgacgctcaagctcggcctcgccaccaacgtggtcatctcctcccgggaggccgccatcgaggcgtacaccaagtacgaccgccacctcgccgcgcgcgccaccccggacaccttccgcgcctgcggcttcgccgaccgctccatggtgttcatcccgagctccgacccgcagtggaaggccctgcgggggatccacgcctcgcacgtcttcaccccgcgggtgctcgccgcggtgcgccccatccgcgaagaggaaggtgggcgacctcatcgcctacctccgcgcgcacgccggggaggaggtgctcgtcggccacgccatgtacacgggcatcctcaacatggtgtccttctcctacttctccgtcgacatcgtcgacatgggcttcgcagatggcccgcgagctgcgggaggtggtggacgacatcatcttggtggtcgggaagcccaacgtgtccgacttctacccgttcctccggccgctggacctgcagggcctgcgccgctggacgacgaagcggttcaacagggtgttctccatcatgggcgacatcatcgaccgccgtttggctcacatccgcgacaacaagccgaggcacgacgacttcctcgactcaatcctcgagctcatnggctgcccggcaagatcgatcgtgtcaagtgctcaacatgttgtttcgaaaggtttc

SEQ ID NO: 396036 - DNA, 491 bp, Oryza sativa
  unsure (1)..(491): unsure at all n locations
ttttgggttgcagcctttggacgtggcgacccgagccagagcaacgatccttctcctcctcgcggctgtcctcttcgccgcggcggncgcggcctgcaggtgaggatcgccgccgcgccacatcactgcggcgctgcctgcagcggtcgcgaggcaggaccggccgccgtacgagcgggcccggtgcgtgcaggagtgcaaagaccagcaacagcagcagcaggaacggcgaccagagcacggcgggcacgacgacgaccgccgcgaccncnaccggcgcggcgangggtcctccgaagaagangattatggnctcnagcgcggaanccggcggnngncgttcttnttccgccggggcaacttccggcaagtcntccgcancgacaagggtccgtcaggntcctcccnccgttccaccangcgtccancctcctgcgcggcatcaaaaactaccncnttcccggtgctcnangcgaacccnngctncttcn

SEQ ID NO: 396037 - DNA, 659 bp, Oryza sativa
  unsure (1)..(659): unsure at all n locations
gagcggtancngngggtgngnnagctggtggtagngancaggntngnggncgtgtggtgcttcctgtgcaaacgattggcacactgcactcctgcctgtttatctgaaggcatattacagagacaatggcatgatgcagtacactcgctctgtccttgtgatacataatatcgcttaccagggccgtggcccagtagatgaattcccctacatggaattgccggagcactacctgggatcacttcaagctgtacgaccccgtcggcggcgagcacgccaacatcttcggcgcgggcctgaagatggcggaccgggtggtgaccgtgagccccggctacctctgggagctgaaaacaacggagggcggctggggcctccacgacatcatacgggagaacgactggaanatgaacggcatcgtgaacggcatcgactaccgggagtggaacccggangtggacgtgcacctgcagtccgacggctacnccaactacaccgtggcctcgctggactccancaagccgcggtgcaangcggcgctgcaacgcgagctggggctggangtgcgcnacaacatnccgctnatcgggttcatcnggcggctcnacggcaaaaaagttngactcatcngcnaccnatgcctggatctccggcagact

SEQ ID NO: 396038 - DNA, 568 bp, Oryza sativa
  unsure (1)..(568): unsure at all n locations
aaagcnttggcgaggagaggacatcgtgttatggttgtggtaccaaggtacggtgattacgcggaagcccagtgatgtaggaatcaggaaatactacaaggctgctggacaggatctggaagtgaaatatttccatgcatttatcgatggagttgattttgtgttcattgacgctcctctcttccgtcaccgtcaggatgacatctatggggggaacagacaggaaatcatggaagcgcatgattctgtgttgtaaggctgctgttgaggttccttggcacgttccatgcggtggtgtgccctatggggatggcaacttggtgttccttgcaaacgattggcacactgcactcctgcctgtttatctgaaggcatattacaganacaatggcatgatgcagtacactcgctctgtccttgtgatacataatatcgcttaccagggccgtggcccagtaaatgaattcccctacatggaattgccggancactacctggatcacttcaagctgtacgaccccgtcggcggngancacgccaacatcttcggcgcgggcctgaaaatagc

SEQ ID NO: 396039 - DNA, 463 bp, Oryza sativa
  unsure (1)..(463): unsure at all n locations
ccgttttaaccgccttcgccgccgccgccgcgactatcgatcccctccctctcgccgtcgacgccgtggcatgccatggcgccagggctctacaccgacatcggcaagaagaccagagatctgctttacagggactacgggacgcaccacaagttcaccctcaccacctgcacccccgagggcgtcactatcacagctgcaggaacaaggaaaaatgagtctgtctttggtgagctccaaacccagcttaagaacaagaaattgactgttgatgtcaaagcaaactcagagtccgatcttttaacaacagtcacggttgatgagtttgggacttcagggtttgaaatcaattcttagttttgtagtttccagaccagaggtaggggagnttggacttcagtaccttcatgatatgctggcatcattcaagtgttngcctgaattccatctatggttacctttt

SEQ ID NO: 396040 - DNA, 993 bp, Oryza sativa
  unsure (1)..(993): unsure at all n locations
gaaaaaagttggggagaggagagaccgagatcgatccgcacccaccgcgacaaacgctctnccctcccctcccctccccctccgcccttcgctcccatccgctccgccccctcgccgcgcagccggcggcgagaaggttgagttcgtggggggtgtgaccgaacgatggcgtaccgggcggacgacgactacgactacctcttcaaggtggtgctcatcggggactccggggtcgggaagtcgaacctgctgtcccgcttcacgcgcaacgagttcagcctcgagtccaagtccaccatcggcgtcgagttcgccacccgcagcatccacgtcgacgacaaggtcgtcaaggcccagatctgggacaccgccgggcaagaaagatatcgagctattacaagcgcatactatcgcggagcagtaggggcactcgttgtctatgatgtcacgcgacatgtcacctttgagaatgtggagaggtggatgagggagctcaaggatcacacggacgccaacatcgtgatcatgcttgtggggaacaaggcagatttgcgccaccttagggctgtctcgactgaggatgcgaaagcatttgctgagaaagagaacactttcttcatggagacgtcggccctggagtcaatgaatgtggagaatgccttcactgaagtgctcacccagatatatcatgtagtgagcaagaaggctcttgacatcggcgatgacccagctgcaccaccaaaggggcagaccatcaatgttggtggcaaaagatgatgtctctgcagtgaaaaagtctgcttgttgttcatcagcgtagatcgaaaggacttgacaaacatggagatacccgaggtggttgatactatgcagtaggacacaggatgttattgcattcatagacctcatctgtattcatgtgttactaagtgtctccttcgttttgccatttgaaacattaattcattcaggacataaaaaaaaaaaaaaaaa

SEQ ID NO: 396041 - DNA, 477 bp, Oryza sativa
  unsure (1)..(477): unsure at all n locations
gccggcctcgccatcagatctcgcccaacgccgcctcccccaactgtctttgtacctcgccgtcgagctcccatcgcggtggcccacctcccgcgcgtgcatttgctccggccttgcagggacatcgacctctcctctccgcgtcggggcgtgatggtccagtgatccaaggagtcgttcctctgccggtgagtggtgcgttcgggttgtattggtggcagtgcgggagatttttggttggttgtttggtggagggatcggggatgggctgcacggggtccaggcacgcgttccggggtggcgtccggggcggcaagacggcgtacggcgggancgcttcccggtccggccgccgtgcaccacaacgtctcgctcaagtnctncacactgggttcgctcagcctcgagcgggacccggacgaggagatgatgaaatggcgcgacganggcgcgggcgaaagaacaagcccccaacca

SEQ ID NO: 396042 - DNA, 883 bp, Oryza sativa
  unsure (1)..(883): unsure at all n locations
aatcgaacaaacaatacaaaacccacgcgacggaactcaagacttgcacccaaatccattcccacccaccggattcgcatccgccgctgctggccccgtcgcctcgccctccgccaccgccgccgtgcttgctctcctctccctcctcctccagatcggcccgatcccctgcccaccccccctccccgatggaggccaagatcgggaagctcgtcgagtcggtggggagcttcttctccggcggcgacaccatcccctggtgcacccgcgacatcatcgccggctgtgaaagggaggtagctgaggctgcaaatgaagagcagaagagtgatagcattatgaggctgtcttgggccctcgtgcattccaagaaccaggaggatgtaaatcgtggaataggcatgcttgaagcatcattaggtcaatccaacagcccactgcagactagggagaagctatatctgctggcggttggacactacagaaatggtgactacccaagaagtcggcagcttgtggaccgttgtttggagattcaacctgattggaggcaggctttgtctctcaggaaggctatagaagataaaattgccaaagatggtctgatcggaataggcatcgccacaactgctgttggacttctggttggtgggattgcagctattgctgcaaggaagaagtgagatgatatctgcttgctgatgtagtaaccaagtagatgtttggcttgtttgttcttttttcaattcgtggtattccagtcgagaatcgccacagtaatgtgcataaaacaaattgatgaccatggtactccggatgcaacatgtacctttccttttctttggttttattgtcactagtttcaagcaaaaaaaaannnaaa

SEQ ID NO: 396043 - DNA, 580 bp, Oryza sativa
ggcgatcatcgatcgcttaactaattatatatatatccagccagccgcatcaggagagatcgatcatatacatcgatcgaagagagagagagagagagagtaattaacatggcgacgagcaagaaggaggtgaggcacggcacggcccaggcgaaggtgaacggtgacgacgagatgctacggactggcttcatcaacggcaccccgctcgaggccggcaaggtcgctgactcccagcccgtcgatctcttcgaccaggctcgccgcgtctgtccggaggagggaagaagatgaggccggctgcaggaagatcgcagagtcggagcccgtggacctcttctccgacgccggccgcgtgcgcaatcagcagcagcacaaggttgtgggccgccaagcgtaatcgcgccctgccccgccttcaagcatatgcacatgcgtctaagaaccgtctcctctcctctcctctcctgctaattaagccaggccgtatacgtatgtgtgtatgtatactagtacgaataatgcatagtactactatgcgacaagctgctagctagtagctagcctttttttttcgaaa

SEQ ID NO: 396044 - DNA, 552 bp, Oryza sativa
gagccggtggagttgaccgcgccggtgatcacggccgaagagcgcagccaggggaagggtcagatgacaatgcagtttctgctgccgtccaagtacagcaaggtggaggaggcgccgcggccgacggacgagcgggtggtgctgcggcaggtgggggagaggaagtacggggtggtgaggttcagcggcctgaccggagacaaggtggtgaaggagaaggcggagtggctcaaggccgcgctggagaaggacgggttcaccgtcaagggccccttcgtgctggcgcggtacaacccgccgtttactctgcctccgctgcgcaccaacgaggtcatggtccccgtcgagtgatacggcgagactccattgttggtgtctagtgatgtactgatgcgcatgtacttttatcagggtgtccttgttactcctaggccctagctatttctctatttctttatccttttgactttgttctgtactgatgtatgtttggatcaacgaataatggacatatcttgggaaaaatttcagtagtcaaaaaaaaaaaaaaaa

SEQ ID NO: 396045 - DNA, 581 bp, Oryza sativa
  unsure (1)..(581): unsure at all n locations
ggagcggacnttcnacccaatgaagaagaagaatgtggtggtggacgtgtgcagggacgtggcggcgtggccgggagcacctgctggagggcggcgagcaccggcggtacttcgggctccgcaccgcggaccgcgggtgatcgagttcgagtgcggcagccagagagagcatgacatgtggaccaagggcgtcgcccgcgtcctcgccaccatcgatgcccgtcgcaagcgcttcgcctgaccgaacgccgccgccgtcgccggcattgcctgcaaaagctgttgtgatcatgtcactcttcactgttgctgtcattaggagcagaaaactgaacaagattcagagatggtttgtagatgtgtgtggtgttgatttctcttttcttttttggttttatgtgtcatgtaagaagtgttgttttgtatcttctcttttcagttgtctctgatttaacttgagggggtttgggcaatgaaaatacagacagacaagcatcatctgcatttgtaaaaaaaaaaaaaaaaaactcgagggggggcccggtacccaattcgccctatagtgagtcgtattacaattc

SEQ ID NO: 396046 - DNA, 519 bp, Oryza sativa
  unsure (1)..(519): unsure at all n locations
caaggagcagaagaagacggagagcggcggcggcgcgggcntccaggactggcacgacgaccacggtgggggcggccatcacggaggtggcggcggcggctaccccggtgggcagtgccatcacggatgctgcggcggctacggatacccacggcggctgcccgccgtttgctgcgcgaccgccgacgataagccggaccccatgtaccgccccgaggcgcacaactaattaagtctcagacgatcgtccgacgtacgtacgtacggccggcgccggagctcgctagcaacgtacgcagcaactaaaccaagtgaatactgaataatgaaaatgtgtatgccagcacgtatatatgtgtacatataaaagtctgtgcacgtatatgtatatatggaccacgtacgtacgtatgtatctgcgtgcatacggcggcggggtttgtgccgatatatgttactatacatgagtatatgtcaataaaaactagtactagtacttctaataaaaaaaaaaaaaaa

SEQ ID NO: 396047 - DNA, 518 bp, Oryza sativa
  unsure (1)..(518): unsure at all n locations
ctgtaagcggcgggaggaggaggaggatcaggcggncggcggcgcggaggagcggcgtggcgctgaggcggaaggtgcgggagctccggcggctggtgcccggcggggagggcgcgccggcaaggagcctgctcgtccgcaccgccgactacatcgtccggctcaaggcgagggtcgagctcctcagggcgctctccgcgctctacgacgagcttccactccccgccggcgtctgagcccgccgccgggggcggtggcgcgccgcgatcgatcattgcttgcttgcaccgagatgagagatatacagtagctatgtatagaagaagaattgaatgaattcatttcgaacaagacagcataaaagacatcactattgaattgtttgttgtagagtggatggagttcatgcaggctggcggataatcgattaattaattacaagctgttatttagttacatggagtatataatatatacctcatcatgtgctattaactnnnnnnnnnnnnnnnnnnnnn

SEQ ID NO: 396048 - DNA, 387 bp, Oryza sativa
  unsure (1)..(387): unsure at all n locations
aagtctcgcaacttcttcaaggtcaccaccaccgacgaccctgtcatccgccgcctggctgaggaggacaaggccacggtgttcgccaccgacgccatcctcgccgcgcttatgtgcacaccccgcagcatccactcgtgggacatcgtcgtgcagcgcgtcggcaacaagctcttctttgacaagcgtgatggttcccagctcgatcttgctatcttgtcaacgagaccgcgcaggagcggctcccagaaaacaaggatgatatcaactccgcgcactccctggctgtcgaggctacctacatcaaccagaacttctttgcagcaggntgctttcttcgcgatggttagaagggtacctttgatgagcctaanccgtttgcttctt

SEQ ID NO: 396049 - DNA, 410 bp, Oryza sativa
  unsure (1)..(410): unsure at all n locations
ggaatcagaagccagaagcagcaacgctcgctctgattctttctttcctcctcgagctagcagcaggaagtagttttaattttggtgtgatcgatggcggcgatgatggcggtgacgacgatggtgacgaggaacaacgccggcggcgcgccgcggtggcggtggtggacaggaaggggtggttcgtcccggaggtgtcgttcccgtggagctcggtgcgaaggggagtgcatcaacagcagcagcaagaggttggagttccctcgccggacggctgcgccccgctgttcgccancttcgggctcancttgccgtctgcggcgaagggccgggacaactgcnacgtcgcgcggcaantttgccgccgcggaaggcccnaggaggccgncggtggaagaagaggcaaggca

SEQ ID NO: 396050 - DNA, 846 bp, Oryza sativa
  unsure (1)..(846): unsure at all n locations
nttngcctcgcctaaacccatcaccccacgccaccacctcgccaccgccgccgccgccgccgccgacgaagacgacgatgaaggtggtgcggaacctcgacctggagcggtacatggggcggtggtacgagatcgcgtgcttcccgtcgcggttccagcccagggacggcaccaacacgcgcgccacctacacgctcgccggcgacgggcgcgtgaaggtgctcaacgagacgtggaccgacggccgccgcggccacatcgagggcaccgctaccgcgccgacccggtcagcgacgaggccaagctcaaggtcaagttctacgtgcccccgttcctccccatcttccccgtcgtcggcgactactgggtgctccacgtcgacgacgcctactcctacgcgctcgtcggccagccctccctcaactacctctggatcttgtgcaggcagccgcacatggacgaggaggtgtacggccagctggtggagagggccaaggaggaggggtacgacgtgagcaagctgaagaagacggcgcacccggacccgccgccggagaccgagcagagcgccggcgaccgcggggtgtggtggatcaagtccctcttcggcaggtaggtaggtggtcgtgccagctgccatgccgtccagactccagagcttgatgccaccatgatcgtgtacattattattgcttcagttcaaaggctagttggtgaattctgttcaactcgtcggcctcggggaatcccccaagctgtgaacctgttcgttttctggattagtgtttaatgtgtccgttttgtgatgaattgtggatatctgcnnnnnnnnnnnnnnnnnnnnnn

SEQ ID NO: 396051 - DNA, 595 bp, Oryza sativa
  unsure (1)..(595): unsure at all n locations
tcggacgaacgactctgaattcgcttctacattggggcgcttgttaatttgcatgcgagcttgttgaggttgaagcgagcgagatcatcgttgagagctgtagtacgtggtgagcatgggagagcagcagcagcaggtggagcggcagccggacctgcctccgggctttaggtttcacccaacggacgaggagattatcaccttttaccttgcacccaaggttgtggacagcaggggcttttgcgttgctgccattggagaggtggatctcaacaagtgcgagccatgggatttgccagggaaggcgaagatgaatggggagaaggagtggtatttctactgccagaaggatcggaagtacccgacggggatgaggacgaacagggcgacggaggctggatactggaaggcgacggggaaggacaaggagatcttccgcgaccaccacatgctcatcggcatgaaaaaaacctcntcttctacaagggcagggctcccnagggcgacaagaccaactgggtcctgcacgaatacaggctcgccgacgcctctccgccgccgccgncatcctccgcanaacccccaagcangacac

SEQ ID NO: 396052 - DNA, 442 bp, Oryza sativa
  unsure (1)..(442): unsure at all n locations
accacatcgagcgagcgatccgtcgcgcaccagcttaatctaccaaccagttcgccggagaattcaggtgaggatatatggcgtacatgcgggtgactcaccgggacgaggaggggaagaaggtgacggagaaggtgccgatcccggagacgcggcgtcccgacaccgcgaggcacttcgagcggaagttggaggagcaagggttccaccgcctggagcgccacccggcgaacgggcccgcgcgggcgggcatcggcgcgccgcgcccaagtccggccgcggcggcaagttcacctgggaggggcccgacggcccgtcgacgcccaacttcagcccgccccgcccgccgtcgattcccaacgaccccaactacgacgagggcgacggcgccggagtngacgaggaggtttncaaagaaggtcgtnatcggcgaggttgaggt

SEQ ID NO: 396053 - DNA, 498 bp, Oryza sativa
  unsure (1)..(498): unsure at all n locations
gnnntnnnnnnnnntcngggtgaggattccgcacgagcaatgcgatagtcgatctcatcgatctctcaaaagactacgagctcttcacagggaatcgagtgtgtttcggtcgtttgggccgcgccaagggaagcggagggatgcaggggacaacgaccaccaaggccgggcgcaacggcgaccgcgccggcaccgaagccccgggcgcgacgagggcgactgacgggaggggcggcgccgccgtggcagcccgcaaggtcggggacatgcccggcgtgtcgggcgtggaggccaaggactcgctgaccatcgtcgcgctgcagtcgccggtcaccgtcgagcgccccgtccgcggcgacctcgaggaacacgtccccaagccatatcttncgagacccttggcggcgccggacatttaccaaccagacggaaccacgacggacgnttacgagcaacaacaacttagcntcttcaagaagaagttggcttttttgaccg

SEQ ID NO: 396054 - DNA, 475 bp, Oryza sativa
  unsure (1)..(475): unsure at all n locations
ctcctcctcctctttccccaatctcgcgcgacggcgggaaccctagcccccaccgcgattcgctcgccggagagggagagggagggaagggaggctaggggaccccctcgccggcggggagatggaggtgaagctgtggaacgacaagcgggagcgagagctctgggagagcctcgccgacctgtacgccatcatcaaggcgacggagaagctggagcgcgcctacgtccgcgacctcgtctccgccgccgactacgaggccgagtgcctcaagctcatctcccagttcaactccctctcctcctcgctcgccggcgtcgtcaccatcccccggttcgtcgaggcctaccgcctcgactgccccgccgcccttcaaccgcctcgtttcagttccggcgtccccgcccaccgatngagcttccgcgccgcggcgttcccttcgttccgcgccggncttccttccgcgggcgtccgc

SEQ ID NO: 396055 - DNA, 550 bp, Oryza sativa
  unsure (1)..(550): unsure at all n locations
ttttttttttttttttttgggtgtgaaacgttatggagaacgaaatttacagaagagcatggagaagataaagggaaaaggaagagaaaaatgctgctctccattgctttcttcttcctccctcccctcccccaagaaaagaattccccccagtattccaaagaacatcctaaaatatttcccccaaaaaaaaagtcgaaataagaatgttaatgttttgatcctggagtggaatcgaccactggatggccagagaataagaagaaaaaaagaagaaagaaaaagaaaagaattagcagaagaattagggcggattatagtcacaagttcttgggatcccctgggtgttacccgtagtaggagaggtaccactttgacgaacttcttgagcccgacgtcgaggttggtggtcggcttgtagccggctgctgcccccaagggaattttggntnctttaatggccctccccntgcngggatctcaacttttctcttggcctcnngngggngttttccncaaaaanganncntgtnggnccccccccggttnc

SEQ ID NO: 396056 - DNA, 696 bp, Oryza sativa
  unsure (1)..(696): unsure at all n locations
cgacccaaggggtccgaacattttcttgaggtcgatcagtagtacccatggccggtggtggaggcgccgtcggagaacactacatgcgggtgatccgcggcgacgacgggtacggcgacgacggcggccagcaccaggagaagccgggggcggccgtgtccgttgcgaagggcgccgcggcggcggcggcggcggggtcgatgctggcgctggcggggctgacggcgacggggacagcgctggcgctgatcgtggcgacgccgctgctggtgctcttcagccccgtgctggtgccggccgctttcgcggcgtcgctgctggcggccgggctcgcgtcctccggcgcgctcggcgccgcggcggtgggcgtgctggcgtggatgtaccggtacctgcagtcgccgtccggcgagcacgcgcccgccggcgccggcaaggtggagcacgcccgcgcgctgctcgacgccaaggcgcacgacgttggggactgggtccagcaccgcctcgaccaggcgcgcacctagaaaaattagctacggattagttcaaatcaactcgcctatagctagctgatgcaatcacacatatgcatatgccttcgtgtttgtgtaatgttccgtgtgtgtacaataattagttgcaaaatgctggattgctggtacggcgacatctgnnnnnnnnnnnnnnnnnnnnnnn

SEQ ID NO: 396057 - DNA, 283 bp, Oryza sativa
  unsure (1)..(283): unsure at all n locations
ggcacgacttctggattcctctctacccccaacaatggcctgacaccgactgccctgcatgcaacccatgcagtgttctcactacttctcagcttcgccggtggtgttgaagacgatgcctcaacggccgatgcagcgaaggtatccactaggcaggtgctaggccatgtagggcaactaaacaactttggcaggtcttccttctccatctcgacaagaagatggtaatggagtgtctatatccccggagctctcttgatagatttnatcatcatgtatcagt

SEQ ID NO: 396058 - DNA, 406 bp, Oryza sativa
ccgaaacaacacacatcgccactagctccctcgatccgattcggatcgggatccatggctaacctcgccgcctccctcctcttcctcctcgccgtcgcgtcgtccgccaccgtgccagcgcatgggcgccgcgacctcctcccgactcgcatcaagctggtgaggggagccgacgccggcgccggcgccgtggccgggggggacaagatggagtgcgtgtacacggtgtacatccggacggggtcgatctggaaggccgggacggacgcgaacatcacgctggagcttgccggcgcggacggcaacggggttggggatcacggacctgccgtcgtggggcggcctgatgggggagggccactcctacttcgagcgcggcaacctggacatcttcagcggccgcaac

SEQ ID NO: 396059 - DNA, 481 bp, Oryza sativa
  unsure (1)..(481): unsure at all n locations
gttcgatcaagctgtgttaattagcagccatggcgttggagcatctcgggaggaggaacgtggcggggtcgctgctgctgctgaacctcctcatgtacgtcttcttgctggggttcgccgggtgggcgctcaacagctccatcaagaacgccggcgccgacgtcggcgtcggcttggggggagcagccgtggtcgccgtactaccgccagagcgcgtggttcgcctcgaggttccacctcgcaacgttcgcggcgctggcgggggcgctgggcgtcgcggcgaaggcgtccgcggcgtaccacggcggccgcaccgcgttgaagctncagcttttgttccctttagtgagggttaatttcgcgcttgntaaatcatggtcatagctgttttcctgtgtnaattgttatccgttanaaatttcacacaacatacgagcngaagcataaagtntaaagcttgggtactaattagttagtaata

SEQ ID NO: 396060 - DNA, 348 bp, Oryza sativa
  unsure (1)..(348): unsure at all n locations
gatccagaagcagcaaaaaaaagagaaaaaaatcagagaaaaaaaaatgaggagcccgaggagccgtgcgctagagcgcgacgccggcgggtccgttccgagcacgtcgagctcatcccggggatgcccgacgacgtcgccgtcgactgcctggcgcgcgtcccgcacggggctcaccgggcgatgcggcgcgtgtgccgcgggttggaggagcgcggcggcgacgccgcgtttcgccatggcgcgcgccgaggcgggcgccaacgaggttttggtttacctgctccagttcgcgaaccccgcggcggccgccaccgcggttggactccantttttgttcctttaatt

SEQ ID NO: 396061 - DNA, 322 bp, Oryza sativa
  unsure (1)..(322): unsure at all n locations
agagaaagagaaagagagagaaaaccagaaaagaggaaagtgagatagctcaatttctccttccttcctctctccatctaatctacacatgcacaaatgttgcagctgatatatggcttagctagcatatgcaaagcaagccttcctgcagtctagtcacctctcaagctacatactcccagtactgcttcatctagctctctctagtagctagctctatcatcatcgatcatcctcctctcaccggccggccaacccaagaagagattattcctcttcatcttcttctncctctctggttcatcactggcttcggcggcgg

SEQ ID NO: 396062 - DNA, 353 bp, Oryza sativa
  unsure (1)..(353): unsure at all n locations
ccaaacatctccatctcaactcatctccaacaagcaaggcagtatcgagtcgagtcctcgcacaggcttggagaagaagaaggaagaatagtaccacctcggatctccaacaagtccggcgcccagttgataagggtttgcagaagcatttcgaagatgcggatgagttgcaacggttgccgggtgctgcgaagggatgcagcgaagggtgcaccatccgtccgtgcctgcagtggatcaagacccccgaggcgcaggccaacgccaccgtcttcctcgccaagttctacggccgcgcngggcttctcaacctgctcgctgccgggcctnaccacctccgncccgccgtcttc

SEQ ID NO: 396063 - DNA, 525 bp, Oryza sativa
caccagctcctgccactcaagaaccccgcagtccgttggaatagttgtggacgactcgctcccatttacatccatacagctaaggctggccgatggcactcgcatggttgcccgtttcaacatgcaccacacggtgggcgacatcaggtctttcatcgacgcctctcggcctggggctacaaggccctatcagctgcagactggtttcccgccgaagcagctggctgatccagcacagaccgtcgagcaagctggtctggcgaactctgtcatcattcagaagatgtaggcctaggggcacgtctcatatgctatctttgaaacaaggaacccggtgtccttaaattgtcgattatcatgccagatacttgtactgggaatacattctgcaatcgaaccagactgctggtttcatcgacagacagacgataacaatagccatgtcggtttttaagtggcatcagtgaagttcataatcctattaatagtaattacctgaattgcaacaaaaaaaaaaaaaaaaaa

SEQ ID NO: 396064 - DNA, 765 bp, Oryza sativa
  unsure (1)..(765): unsure at all n locations
nnnnnnnnnnnnnnnnnnnnnnnnnnnnnnnnnnttcgcaagtgtgtcacaagcaaacatccataaatcattagtcattacaatagtgcttggagtgactagggagaaaactgaactgccatgctacagatgtatcttaaggattacacaacagtcacaaagataggacacatggcacatcgcatgtataggtttaatgttctcgcagacatagttgaaaaacacaaaattctagcaaataagacaccatcaccagtccaagcctctgaaaaactgtgtcgctctgaggcccatcacactgaaaggtcttggtaaatcaaatgaggagcttctcgatagcatccttgagattctgtatcggtgtctttcagcttgactgccctcgttgctggtcactgaacaagcaatgacaggtctagtaacggccacatgcggcggccaagggcttgcttcgaagggacaaaaacatatggaacgttcttatcctccgcgagcagggggaggtggagaaggatctcgagcggctccgtgtcggccgccatcaccacgaactctgatatacccctgttcagggtcttcgtcgcttcgttggcccccttcttgagctgcttgtaattggaggcctgctggacgaggtcgaggatggtcatcgtcagctgcgcgtccgccagcgggtaggccttagggttcacgacctcctggctcattttcgcgaggtgggttggctcggcttggaggagctcgcgcgaggaggaggaggaggag

SEQ ID NO: 396065 - DNA, 406 bp, Oryza sativa
  unsure (1)..(406): unsure at all n locations
ccaagatcgagatcgccggagatgaaggcgccgccgccgccgtcgccggtggccaagagggcgcgcgtctcgccgttcgtcttcctgctcgtgctcttcctcctcctcttctccttcctctacggcgaagacctcaaggagctcctcggcagccaagctcaagcgcggccgagcctccacttcaatgccgccgccgccggtgatgggatcgagctgccggccgccacgcgcgagctgaccgaggggaggacgacgacgaggaggtggcgggggcggctgccgttcgcggcgaacgcgaacggcgaggaggaggaggaggagtgtnacgtgttctcggggaggtgggtgcgcgacgangcggcgcggcccaacccgcggtggaagcttcanctttttgttcccttta

SEQ ID NO: 396066 - DNA, 666 bp, Oryza sativa
  unsure (1)..(666): unsure at all n locations
gttctagatcgcgagcggccgccggggttcgcactggcgtcgggggtgggggactggcacgcggtgctgctggaggcgacgatgacgttcgggctcatgtacgcgtactacgcgacggtgatcgacccgaagcgcgggcacgtcgggaccatcgcgccgctcgccgtcggcttcctcctcggcgccaacatgctcgccgggggcccgttcgacggcgccgggatgaacccggcgagggtgttcggcccggcgctcgtcggctggcgctggaggcaccactgggtgtactggctcggccccttcgtcggcgccggcctcgccgggctttctctacgagtacctcgtcatcccgtcagccgacgccgccccgcacggcggcgcgcaccagccgctggcgccggaggactactagacccgccgccggcgacctccagctacaatatctattagctatgtgtgtgtggttgtttgtgagtgtgattaagtggttaataaggggtggtgtgtttgcttgccccagtgctgggatggacggtccagatcaagctcatgtacatttgttggttggttactcggatgatgatccgtatgaacagtgagctacantgtgtaatgataaataattaagtttccattattaaaagtgaaaatccagcccaaaaaaaa

SEQ ID NO: 396067 - DNA, 696 bp, Oryza sativa
  unsure (1)..(696): unsure at all n locations
ggtccntacacngggaaanncccccggtttgttcggtttggggggggaaacgaacggttttttgggggaanaaagttttgggttaataaaggnaataaggacggnattgaccggaagggggggaagttgggacattgggcccgttnccgttgggtttcttcttggggccaacatgttgccgggggcccgtttgacggcnccgggatgaacccggcgaggtgtttcggccccggcgcttgtcggcttgggcgctgggaggcaaccactgggtgtactggctcgccccntttgtcggcgccggcctcgccgggcttctntacgagtacntggtcatcccgtcagccgacgccgccccgcacggcggcgcgcaccagccgctggcgccggaggantactagacccgccgccggcgacctccagctacaatatctattagctatgtgtgtgtggttgtttgtgagtgtgattaagtggttaataaggggtggtgtgtttgcttgccccagtgctgggatggacggtccagatcagctcatgtacatttgttggttggttactcggatgatgatccgtatgaacagtgagctaccagtgtgtaatgataaataattaagtttccattaaaaaaaaaaaaaaaaaaactcgagggggggcccggtacccaattcgccctatagtgagtcgtattacaatttc

SEQ ID NO: 396068 - DNA, 336 bp, Oryza sativa
cacgcaacgggtttgttcaatcgatcggccgtcaccgcgagcgcacgatggcgagcgctcgtcgcagccgcggcgtggcggcggtggggatcgcggtgtttgtggctgtcgtggtggtggcggcgggcgccgggggcgcggcggcggtgtcgtgcggcgacgcggtgagcgcgctggcgccgtgcgggccgttcctgctgggcggcgcggcgggccgggcgatcggtgctgcggcggcgcgagggcgctgcgcgggatggcgggcacggcggaggcgcggcgcggcttgtgcaggtgcctggagcagtccgggccgtcgttcggcgtgcttcccga

SEQ ID NO: 396069 - DNA, 391 bp, Oryza sativa
  unsure (1)..(391): unsure at all n locations
agcgaagagagcaaagcccaagttggtagccatgacggagctgttcgacaccgccgtgaccagcctcctccacctgccggaggtgctcgaccgcctcggcgccgccgccggggaccgccgctcgggggcgaccacgcgcaccacgccgcgcatggacacggccagcaccgcatcagtggaatcggtggtggcgcgccagtggacatcatggagacccccggcgagtacgcgttcgtgctcgacgtccctggcctctccaagtccgacatccaggtgacgctggaggaggacagggtgctggtgatgaagagcagcaatggcgccgggaacgggaagcggaacggtagaggaggaggaaggggagttcaagtacattccgctngagcgctgg

SEQ ID NO: 396070 - DNA, 590 bp, Oryza sativa
  unsure (1)..(590): unsure at all n locations
actgaaccaatctagctcggctccatttcaagccatcataggcaccacctcagacattctactcactgcaaagccagggagccatttctctctctcaggacaatgacaagcattgggatagccaaggcagtagattctcaatcaattggtgctctgtctactaggtgaagagtgacaaataaagaatgtaaatgaccaacaccaaagcaggatctgcaagtcaactggctcatctgcatattatttgaggtgttgtcggactgcctgcgataccattcgtcaactcttttctagttgcactacctctttggttatctaagcttaagaattaatattcaaattacatctcagatgtagctgatgagattggcattgctattgtttcatattagattgttgccaaactgattaattgaacatggatgtcaatgcattgaaatccattctaccattgtatgtgtgatcatctgtgatgtgttattaggatcctactattctgatggaagcaaataatataaatgaatcagcaaacccattttagtttgccctcnnnnnnnnnnnnnnnnnnnnnnnnnnnnnnnnnnnnnnnn

SEQ ID NO: 396071 - DNA, 338 bp, Oryza sativa
caaacactgtgactttgggtgagtgagtgagtgagtgaagaggaggaagatggggaagggagggaaaggagccgaggcggcggcggcggcggtggccggagccggtgaggaggagaacatggcggcgtggctggtggcgaagaacaccctcaagatcatgcccttcaagctcccgccagttgggccttatgatgtccgtgtccggatgaaggcagtgggcatctgcggcacgacgtgcactacctcagggagatgcgcattccgattgtcgtggtgaaggagccgatggtgatcgggcacgagtgcgccggcgtgatagaggaggtcggcagcggcgt

SEQ ID NO: 396072 - DNA, 335 bp, Oryza sativa
ccgcagaagacatacacacacaaacacaagccacccttccgatttgttcatcgatcagttcgcagcgtacgtcaggctagctaactagtgtttggcaatggcgtccgggcagcagcagcagggcaggtcggagctggaccgcatggccagggagggccagaccgtcgtccccggcggcaccggcggcaagagcctcgaggcccaggagaacctcgccgaggggcgcacgcgggggggcagacgaggaaggagcagatgggggaggaagggtaccgcgagatggggcgcaagggcggcctcagcaccggcgacgagtccggcggcgagcgcgccgc

SEQ ID NO: 396073 - DNA, 253 bp, Oryza sativa
ctcatctcttcgctgctgctactcgaagcgcacatattcccggagttaaatcatcggtacaccgtctcagagcatttttctcctcacggacaagatgtgcaactccaacgtgaagtccgccggcgtcgctcagatcgacggccgcccggtgctgcagccggcggggaaccgcgtggcggcgcctgaagctgcccggccgctcaagaagtccctgcagaagtcgctctccatgccggcttcgctcgacaatgct

SEQ ID NO: 396074 - DNA, 686 bp, Oryza sativa
tgtacgtctgccagcccgcccacctcctcgacgcgctcatctgcaacgccaccgccacgccgtcctccccgttcccgctcctcgtcaccgacgcgcgcctcgacgcgctgtgcgcgcgcatcgccaagtactactcgctgaggcggttcgtctccgccaccggcgagccggcggcgaactggacgcggaggcacgacgagaggtacttccactactcgtcggggatgcaggcggtggtgatggcgctcggcgtctgcgacgaggtgagcctcttcggcttcggcaagtcgcccggcgccaagcaccattaccacaccaaccagaagaaggagctggacctgcacgactacgaggcggagtacgacttctacggcgacctccaggcgcggccggcggcggtgcccttcctcgacgacgcccacggcttcaccgtgccgccggtgaggttgcactggtgacggtgaccccgacgtgggtgtatgtgtagctgctgctgaattttggtgtaaaattgaaactgatttcatattcgatacgtagaatcccattgtaatttgtaaatcagggggaatgggaggagatacggacacaagatgtgtgtcagatttgggagctttgtaaggagaaatgtagctcaattttgttgtgaatttattcgaaccattgcagtgaaaaaaaaaaaaaaa

SEQ ID NO: 396075 - DNA, 394 bp, Oryza sativa
ccgagctccaagctgaagctgcaaatccagagcgagaggggaaggggaggggccgatccaccgaggcctctcacctccgcggggctccatggccgcctctcaccctaagccggcggaagagttcccgccaccggaggatgctgccacggccgccgccgctgccgccaccgaagaagaagaagacgagtgggatgctgatggatttgttattcctaatttgaccactcaagaagatgacgttactgagcatactgcccctaaacctaaaggatcctgaacctctgaagggagaaagaggacgaagatatacttgggacctcatggcgttcaccatctcaagcaaagcagcaggagatcaacatagtttgccgtaagcagcgattcagaacaagct

SEQ ID NO: 396076 - DNA, 330 bp, Oryza sativa
  unsure (1)..(330): unsure at all n locations
ccaccattccagtgccgatccatccgagggagagcatcctcgctgcccttctccactgtttctccatcgccggccgcgaagaagacgatggccgcaatcgttgatgagccgcggtcgtttcctcttctcttgcgttccatactctcctcaccatgccgaatatttctccttttgatttcatcctctctggtgcagccaatcgacgggaacgctgccgtgcacaccggagctctggagcgcgctctggacccggcgcagcgacatcgtcgtgtttgccatcaatctagatcaagccggagcgagccaccacgncaccagcttcacctcaac

SEQ ID NO: 396077 - DNA, 434 bp, Oryza sativa
tttttttttttttttgcaacttcctatgatatatcgatttccacaaaatacaaagatcacactggttgagttttgactcaaaaggaacagatattcacaaaatccacagcatacgtattctaaacaagcctcgttacatttgtgaagtgtactagaaggaacatactgatcccaaattggacatcctaaaaaaataccaagatacgggatgcagaggtacgccgccggagccggacgcccgggcaccggagggaagcgacagtggccgtacgatcacgcggccgatggcgccgtgacgtacttgacggtgcgggcctccgccagcgcggcgcgcagggctttcttggccgccgcctcgaccttgtcggcgtcgtcgggcggccgccaacgggttggagctccagtttttgtttccttttagtgaggggtaattt

SEQ ID NO: 396078 - DNA, 678 bp, Oryza sativa
gcgaggagagacgaggcgagaggagaggagaggcgccgccgcggcgaggagagcgagaatcggaaggcgatgggcaacgcgggagctcgccggagcaggccgccggcaataataaggaggacgcggaggcccgccgccagccgccgtccaccgtgcgattctaccccagcgccgaccagcccaaggccaggcagccgccgcccatcaagctggaggaggaggacgtgccccctccgcccgtcgccgacgaggagatggccccccgcaacctcttggcaggtttatgctcttggagcgtttattgtgttgagatgggcctgggttaagtggaaagaaagcaaggaaagagatgattcgcttgatggccgattccccggacgggtcttcttaagtttgcttccagaaagctttagtctctgctttaaatcctaagaagataaagatgttgtgcgatgatggtgcacctctctaatctatgtccatctgattagagtttttcttccccgtcattgttgccttgtgtctggattctgtatttccccatcatgcgcaagtgacttccttttccttgctgtcatgttagaacttgcaatatctttaagtgaaaggcttgtagtaaaagtaaaagacctcttttaatactaccatccatgatccaactgcaaaaaaaaaaaaaaa

SEQ ID NO: 396079 - DNA, 473 bp, Oryza sativa
  unsure (1)..(473): unsure at all n locations
cggacnngtcngngnacgcgtgggcaaagctcaagagcagacagagctgcagcagcagcagcacaaagtgtcagtgagctcaactaaactctgattaagggtgaaagcatgggtttgttatgctgcatgtcgtcgcacgccgaggtggtcgtccccaagaagcccggcgactgtgacgacgacgacgattgcagcaagcaggagtagcagaagaaggtgaagcagcaggggagcagcaaggaggaggaggggaagacgacgacgaaggcgaaggagaaggagaagaagaagatgagcaaccttgatggcgccggcctcgtgacgcctcacttccccttccatttccggcccggcctactgtaattctgtaaagatttcatcatgcagattatgtttttgtagcttctgtggcagattaaggtgatggttaatcatatggttatgcttccgtagtgtgtaaaaaaaaaaaaaaa

SEQ ID NO: 396080 - DNA, 593 bp, Oryza sativa
cccatcctcctcccgttccggccaacaccaccctctcctcccatggcctccgcctccgcctccctctcgctggcgttctcccctctcctcctccctaccccgcgaccccgaccctactcgcgacccatcaacccggggtttcctaccagccggcggcgctgccgggcgtgccggagaggtttcgacgcgttcgacgccgtgttcgtctgctacttccccgggatgggtgtctcggccgtccgcgctgctcaagtcgctggccaagagatgctccaaaggtggaagagttgtcatctttttggatcaaggacggcaaagtttggagcaacatcgcaggggaacatcctgaagttgtaactgccgatttgcctaccaggccttctctagagaaggctactgccggtagcaagtttgaaatattagagtttgttgacgagcctactttgtatcttgctgttttgcagtttcaatgatgaacttgttgaaaacaacaaattatatagacagcttgccatccatgccggcgagaatcaactcggctttgtagtttgtagatatgcaagaaattattgcaaagttaaaaaaaaaaaaaa

SEQ ID NO: 396081 - DNA, 449 bp, Oryza sativa
  unsure (1)..(449): unsure at all n locations
ctcagattttcgggcgagaagacgagtgaccaagttgggacgggagcacgagcgattggcgcagggcagattcatcagagggataaagcaagatggtggccaatggagatgccccggctagagggagtgcagcagctgctcaaagctttgcgcaggcgtagaaccaccagcagtggcaccggtggaggcggtgccagcacaatgctccagttctacaccgatgaggctgctgggcgcacgatgtccccgaactcagtcctcatcatgagcattgggttcattgccgtcgttcctcttcctgcatgttttcggcaagctttaccgcaccttcgactaggctgtcattatcatacccgcatgcgaaatttgtcaacagaggaccccgtagcctaatggaatngcaaatggctatcagagtatggaaaattttgcngttaccatcataccat

SEQ ID NO: 396082 - DNA, 541 bp, Oryza sativa
  unsure (1)..(541): unsure at all n locations
tttttttgaaattgaagcagtaataatatactactagtaatcagtagcggaagaacactcagatgagagtatctacaagcacacacccacacaaaatgaacacagatcaagcactagctagtactagtagcggcagatctggagcaaaatgagacacgaataataataataataataataataataaccaacaaatttcgctagctagcgatggcagtaataataacaataataataatggtgataaatagaaaaatagtagatctaggcgaaggcggcactagccggatctcccatcgacggagagacgggacggggctcagtggcggatggcggcgaagaggaaggcggcggcggaggcgacgagcgccgcggcgaggggcgtcgcggccgcgccggcggcggaggtggggctgggcgccggcgcgtcggccgcggagacggcggagatggcggcgaccgccaggacggcgaggatggcgaggnccntanatccttgctccggctgcccgccccagtcttctcgtccgaatcntgcacn

SEQ ID NO: 396083 - DNA, 855 bp, Oryza sativa
cggcgatggcggtggcggcggtggcgaggggggacatgagctcggacaggacggagtgcgcggaccagctggtggggctggcgccgtgcctgcagtacgtgcagggggaggcgaaggcgccggcgccggcactgctgcggggggctccggcaggtgctcgggaagagccccaagtgcctgtgcgtcctcgtcaaggacaaggacgacccaaacctcggcatcaagatcaacgccaccctcgccctcgccctcccctccgcctgcggcgccacccacgccaacgtctcccactgcccccagctccttcacattcctccgaactcgaaagacgccgccatcttcagccccggtggcgacaagggctcccctgctgctccagcgaaggacaactcgacgacgacgaccgactcgcgcgctgtgcaggcggccaacgggggcagccgctcgtcggcggcgaccgccggcgccgcgctgacggcgttgctggccggctacttcctcctgctcctgccggaattctcagctccgtcgtccttctagatcactgtctgcatcatctcgtgcgtcctctgcagctaccgatcgaaaccaagaacacgggattggatggagccagatcaattagtgggcgattatattggacaatgcctggtgaaaaactgagactcagagagtgtgatgcatccgtgcatatgttgtagtatgtgacagatagtaattcgttggcgtttgcagtgtactgtactgcactgtttgttcttttcctgctatgttctggattctggacgatgtgttttgctactcctactagcttttctatagtacatctggttactaaaaaaaaaaaaaaaaaaa

SEQ ID NO: 396084 - DNA, 716 bp, Oryza sativa
agtaagaattgcatttattggagatggaccatacaggagtgagctggagaaagatgtttgaggggatccctgccgtgttcactggaatgatgcaagccgaagagctatcacaggcatatgccagcggtgatgttttcgtgatgccctcggagtccgaaacacttggtcaagtagtcctggagtccatgtcatctggagtcccggtcgttgcagctcgtgctggtggtgttcctgatataattccagaagatccaggaagggaagaccagcttcctgttcaccccaggagacctcgaagactgtcttggcaagattcagctattgctgacggacaaggaattcagagacaacatgggggatgacggctagagccgaggatggagaagtgcgactggagagcagcttccaagaagatccgcaacgggttctacaatgctgcgatctggtacttgggggaagaagcgcgcagaattgatcaaaccgttgcagtggctggcgcagatgttcctaccagcacctgaggtcaacagaatcacacaacactgaagcctcaaggggatgcttctgcagccatgatccggtccttgtaaatttctgatctatagtgcagtgtcaataggtgagatagttcctcttttttttgtatggaattggaattgtgaatggtatggcaaagccatttgttgcctgtattgttgtaaaaaaaaaaaaaaaaa

SEQ ID NO: 396085 - DNA, 363 bp, Oryza sativa
  unsure (1)..(363): unsure at all n locations
gtgcaatgcatgtggacttataaccaatgatgttcagaacggaatcgtcgaggcaacaggtgtcgagcagcacaattctgcagtcgaggaggcagtttctgctgcaaatggccatgaatcgcagtcgggagtcgcgtgatgcttgagggttcagacttgagaaaaaggaggaggatgcgtatcaatcaacaatcaagtagtcatggtgctcaacaagttaaccggatgtatgatatgaccggctctaggattcatgtggttctgcaatgccggtctctccgagatgatatatgcttgtgggccggctttttctatgctttgtatttgagttttataagctttgcctttngcagtaggataaat

SEQ ID NO: 396086 - DNA, 321 bp, Oryza sativa
  unsure (1)..(321): unsure at all n locations
acccaccaccctcattccctcaagtcccaagatcgaacacctcgtgtccatggcggcggcgaagggcgaagtgcgcgacgggaggcggacctgaacctcccgccgggcttccgcttccaccccaccgacgaggagctggtggcgcactacctctgcccgcgcgccgcggccagcgccgccccggtccccatcatcgccgagctcgacctctaccgccacgacccatgggacctcccccaccgcgccctcttcggccgccgcgagtggtacttcttcaccccgcgcgaccgaaagtaacccaacggcttccgccccaaccgn

SEQ ID NO: 396087 - DNA, 379 bp, Oryza sativa
  unsure (1)..(379): unsure at all n locations
tacgccgccaaccccgcccgnttcaacgccganttcgccgccgccatggtgcgcatgggcgccatcaggccgctcaccggcacgcagggcgagatcaggctcaactgctccagggtcaactgatctgtatatctctacgaaatgcgtcgatctactgtacctacgtggatagaatcgaatcgaataagactagactattaataagctaataagtgattagcgatatcgcgatatgtataagtgcgcaacgtgatattgaatttatgtaagggcttgtccggtttattgccattttcaacactatcgacttttaatattattattaaattttggtnnnnnnnnnnnnnnnnnnnnnnnnnnnnnnnnnnnnnnnnnnnnn

SEQ ID NO: 396088 - DNA, 265 bp, Oryza sativa
ggtagatattaaattgttgtctgtgatagcaagtggtttgccttcacagacaacattttaatatgtgactgacttagaaattttgaaggctccaccagttcccatggacaaacccctggttctttttattgggatcttttctacagctaacaatttcaagcgcagaatggcagttcgcagacttggatgcagtatgatgctgtccgctcaggaaaggctgcagttcgattctttgttggcctgcataaaaatgaggtggtgaatg

SEQ ID NO: 396089 - DNA, 380 bp, Oryza sativa
  unsure (1)..(380): unsure at all n locations
tttttgngngtgaatggtgcacattgcatagatgtacacntnagatgcattttttttggtacattgcataattggggggacacacnataatcagctagtggttatgcctaaaccaaaattcatttgatttgacacgggaaaaactattagctacaggagggcatcatatactggtgagcctgaatcattacaaatttatatgcaaaggttcacaacttacaaggttatcagtgccttgcatatatataaacagatcagttttgatggacagtgaggctcagattcagtgtttgttcatgtactgggaggtngatcatattanttgtggtcagcgcagacctcaggttcccattctccacaacttngtttacanatagngc

SEQ ID NO: 396090 - DNA, 799 bp, Oryza sativa
  unsure (1)..(799): unsure at all n locations
nnnnnnnnnnnnnnnnnnnnnnnnnnnnnnnnnnnnnagatatangacaagcgctgcagggaatcatgacacatgcttgccatgtattgatattgcatcacgtttgagattaccacatactgtatactatcccaaaggtaaataacaggagaacaaatcaggcaaacttaaatgaactagatgttcgttcttttaaagggaagtaacaaagaagcacaagtcaggcaaacctaaatgaaatatttgaaattaaggttgttaatttacatctgctcttcttatctgcagatacattagtgagcaattcagtgaaaactgtattatacagagctggcatctacaagataaatctagtcaaacagatgattaggaaaaaaaatcaccaagggccacaagttacggctatctttaccttctacaagttgaatgtgtaatcatcggtgttctcggattggtggctgaagttgctttagccgttgaacgacctgcttcatagttggtcgtacagagagtgaatcaacagtgcacatcactgctaaatgcaatgtctctactaagtcatcatgcggacccacatcccacaggccatcaataaagaattcacgagcgcggccttgacgaagaagcatgcaagcccaagcaactatgttaaacccattaccataaggagaaaatgacggatccaaggctttcttgtctgatattaactccatcagtacaacaccatagctatacacatcggctttatctgaaacacggcatgtcatagcatattctggagcaacatatccaaaagtcc

SEQ ID NO: 396091 - DNA, 460 bp, Oryza sativa
  unsure (1)..(460): unsure at all n locations
nnnnnnnnnnnnnnnnnnnnnnnnnncaaacctgagtattggcaaaatggcaacattgaataaatgcccctaatttgcaacacaagcagcccaattatctttggacttctcaacaacatttgatgctagaagaaagaagtgaaaagagtgaatatatccataacacatagataaatataggctaaatcctgcatctgtatagtatgaccgacatcaatggaggagaaattgaacaggtcaggctgtatttcccatcatgtatcctctcactggatcacaacactctagagctcaaactcctcctcccggagtgccagccccgcagcctcctcctcatcctcatcaagagcgaaatattgggncctctctgctggcctgaacatgtagaacatgaacaggnagaatgccacagtgggnacctcctctgngggaacactcacccatctgnacttgtagttgg

SEQ ID NO: 396092 - DNA, 495 bp, Oryza sativa
  unsure (1)..(495): unsure at all n locations
gccntttgcaanagcaacaatacgancncgtganattcacaangtttgaggaattacaacctttggatgagtttgctaccccaccctcaagcccaacgcaattccaggatgccaagggcaaagaatcagaaggatcaggctcatggtattcgtgggttagaggggggcgtggtgcacagtccagtgatagtggtgatagccgtaactggaaagatgaggttgatccattccaaataccttctgactacacctgggttgatgccaacgagaagaaacggaggatgaaggcaaagaaagccaagaacaggcggggctcaactcggaaacaatcatcgaaaagcacctcgtcggaaggaggtcaccacccgatgatggatggctttgaggagtaaaaaagtttcgccacatagcaggtcacctttcattcagagatgttagatgttgatgtcagctgtgctgcgcacctgacagcatanattgataatgtgctctgga

SEQ ID NO: 396093 - DNA, 572 bp, Oryza sativa
  unsure (1)..(572): unsure at all n locations
acattaccctcttctcaatcattacagtgatgtcattcttctccaccataagcttcttgctcaacacattccttgactgggaaggtgacatttgaggccattgcactccaaaatccagcccagttaaatgaagcttcagtaagagatgccaatgccacaccaccaacaattggaacaagagacaatacaacaaaaggagtaggcatctctccgaggaaaagtgctgaaagcagaactgaaaagaaaggctccatagccttgatagtatgtgtaaatgacactgcaacctttccaaggctcatgttcgtgaaaagattgcccatggtgtggaccatagcgagaggaaggattacagcaagctgcgcaccggagatctttggtcttttaaggataccggtaatccacatgaacagagcaatgacagtgccgacagcaaactggacatttgtgatgtttatggggtatggaaaaaccttcaaaacctgcttgttgtagatgttgaagtagatgttgaagaggtaccacagcccgaagagcgcgccgagctgcnacgtcatntcccggaccgtggg

SEQ ID NO: 396094 - DNA, 658 bp, Oryza sativa
  unsure (1)..(658): unsure at all n locations
tgcactgccaggccgaggtactgagcaatactcagggggttggtttggccttatgatgccaaattcccacatggatgatacacagccacgcctgatcaagcctaaacctctggttgttgcccatggtgatgttcagaaagctaaaggtgcttcatgcaaactatttggaattcaccttgacagcccagcgaaatctgaaccttcgaaatctccatcaagtgttgtatatgatgggacgccacaaacaccaggtgctactgaatggcgccgaccagatgtaactgaagtagagaaatgttctgatccttctaaggccatgaagccacttgatactccgcaaccagactctgttcctgagaagccttcttctcagcaagcttcacgaaacatgtcgtgcaaatcacaaggtgttatcaactagaagctgcaagaaggtccacaagcaaggcattgcacttggcaggtctgtggaccttacaaagtttaatggctatgaagagttgattgctgagctggatgacatgtttgatttcaatggtgaactgaagggtcctaagaaggagtggatggttgtntacactgacaacganggtgacatgatgctagttggggatgatcctgggtttganttctgcgacatggtcacaagtctttcatc

SEQ ID NO: 396095 - DNA, 371 bp, Oryza sativa
  unsure (1)..(371): unsure at all n locations
cacatcagacagcaaggaggcagtttatgaaataatgaagaagcaagtgattgacatggctcggcagtcattccggccagagtttttgaataggatagatgagtacattgtattccagccgctggacaccacagagataaatcgcatcgtggagatccagctgaaccgagtcaagaaccggctgaggcaacagaagattcatctgcagtacacaccagaagctgtggagcatcttggctctctcggctttgaccctaactacggtgctaggcctgtgaagagggtgatccagcagatggtagagaacgagatcgncctcagtgtcctgaagggcgacttcaaagaagacgacaccgtcctcgtcgacgtna

SEQ ID NO: 396096 - DNA, 699 bp, Oryza sativa
  unsure (1)..(699): unsure at all n locations
tntttnntttttttttcaagatacttcatcgccatcatatcaagcctatgataggaaagatccacagaaaatatgctccagttgcatctcaaatcgactaaatacgagctaaactaacagccatagtgactttgctatctaatcaaagcatatgtgcgatctcttgaattctaaacactgaaaaagtgattttaaattctacaagccaatctaacaggagtcaggagtggtacagcaaccttagcagagccaatctaacaggcgtacataaaccttagcagagccaaatctagcaggagaggtacataaccttagcagattaaacttcaactcttcttttctagctgcagataatttatcttgccttgtctagtaccgaccttctgcaagcttatctaacacacacatggcagcatctgaagctgtctaccttgcatatggatgatnacgaccagaagcaccagcaccactgcnaccatagcctcttctagcaccatagagtccacccgtgccaaagccaacaccagcaccaggacctgaagaagagtcataactagggccatagctagaaccaccaaaacccccagcatcangcccatatgcaccanctaaaccaccagcataactgccancagcataaccaccaccaaagcttcctccataagtgctaccaaagcgactagnattagagagatgatt

SEQ ID NO: 396097 - DNA, 460 bp, Oryza sativa
agcaatcatacacaaaagaacatttgattcaggcagcaaaaataaccccaagtacaaccagacaagttgttaaagtatgaacccttgatgtaatcaaccagctttcaatctcatcttatttcaggtacagtcatccggctagtacagtcatccagctaattgactaacactcgaacttagtaaagtattgatctctccaattatatgcaccggcctgccatcaaatacagttgatagcgttgtctcgcagagcttcttgagttccctggttttggtaattgcggcctcttgcttaggccaggatgacgaaagtgcattttgcagctccattcgcttaactgacaaatcacctaagccttctcgtagtttcacctcatgatgcttcttgtcttctaatgttgatactaatctgtctaaaaacctttttgagttgagaatcattataaggtcaagagttttc

SEQ ID NO: 396098 - DNA, 726 bp, Oryza sativa
  unsure (1)..(726): unsure at all n locations
tgcccaccttccttcctcatccggaccgaggacncagtgctcgatcggggagagagccactagcagcagcagcgatcacaaattgtgccaattcacaaaccgccgcccccttccctttttaatagctgccttcgcctctcgtcccctctccctcatcgccttgctgtctctgcgaatcgagagagagtcagataaggtcgttaattaggtttgtcaattcggctgcttgcggcgagagaagaggaggagggattagggatggacggggcgccggtggcggagttcaggccgacgatgacgcacggcggccggtacctgctctacgacatcttcgggaacaagttcgaggtgacgaacaagtaccagccgcccatcatgcccattggccgcggcgcctacgggatcgtctgctccgtgatgaactttgagacgagggagatggtggcgataaagaagatcgccaacgcgttcaacaacgacatggacgccaagcgcacgctccgggagatcaagctcctcaggcacctcgaccacgagaacatcataggcatcagggatgtgatcccgccgccgatccctcaggcgttcaacgacgtctacatcgccacgggagctcatggacaccgacctccatcacatcatccgctccaaccaagaactgtcagaagagcactgccagtatttcctgtaccagatcctgcgggggctcaagtacatccactcggc

SEQ ID NO: 396099 - DNA, 488 bp, Oryza sativa
gaaaccaaagctgctgaaccatctaagccaaaccttgtattaaaatctgatgtttcaaaggttgaagatcaggaggtctctactgcacccacttagagttcaagaccaactcttggatgatgaaacaagagctcttccaggtggagttgacaaatcttcttgatgctgtccaagaaacagagacaaagatgatagagatgtcagcacttaatcatctcatgtcaacacatgttctacaacaagctcagcagatccagtatttatatgaccaggcagttgaagctacaaacaatgtggagcgtgggaacaaggagctatcccaggcgatccagcgcaacagcagcagtagaaccttcctcctacttttcttctttgttcttaccttttccgttctctttctggattggtacagcaaatgaagcttatgtaaacgccgtgattttttttcccattctgaaagtggatcaagttatcagtcaaaaaaaaaa

SEQ ID NO: 396100 - DNA, 457 bp, Oryza sativa
  unsure (1)..(457): unsure at all n locations
ccgagacctctcgccgtcccgccacgcgcgcgcgaagaagcaaagagaganagagaaatggccaccgctgccgccgcctcgctgcagtacgcgctgcacggcgccgcctccgcctccgccaagcccagatccgccgcgccaggcaggagcgtgcgcntggtcgcggcgaggaggtcggtgcgggcgcgcggaggggcggtggtagcgcgcgccgggattacagcgagttcggatgcgacggcggaatccaagtccggcggtcatgaggtcctgttgtttgaggcccttcgagaagcattgatagaagagatgaaagaagatcctacagtttgtgtatttggtgaagatgttggtcactatggaggttcatataaggtgaccaagggcttggctgagatgtttggagaccttcgggttctttgataccccaattgctnganaattctttcgctggcaa

SEQ ID NO: 396101 - DNA, 597 bp, Oryza sativa
aaccccatggaattcaagcgcttcatccgtagtgtatgtttccatgttgacagcgtctgctttgtaaaggcgagtcgtaggaaaatgaaagccctgtctttgattttttttttcctaagctctgatgactgacgactggtaagataaatatgaagattggacagcacagaattttatttcaacatgaatcgcagccaatttgccgttgacaactcaaccatcatataactgaaatatccgttgaatgatgatctgttgcttgcttcttcttgtagcttattaagaatagcccttagggacttgactgaagacctcagatgagaataaaccaagaaatgaatttggctgggaggttccccaatctggaccactgccaccgcaatgaaaatcgacgtgcacctgacataaatttgagcggctgtgaatcacttgaacaaacaggcgatgaatattggattggtaagctgaagcaaaccaaaaaatagaggaactccttgcttttctttccttattttctttataaaatcaaaaaagaaagcaaaaagggtgtgtcctttttacgcagtggagggaaataaacaagaaaagaaaaaaaaa

SEQ ID NO: 396102 - DNA, 499 bp, Oryza sativa
  unsure (1)..(499): unsure at all n locations
cggacgggngncgcnantaatgaaaaagggacacnanggtcgaatctttttgggctgtgacaataagcctctttccaggcaagaaataatggactctgttaacagaagtggaaaatttgacacgaagttccaaggttttactggtacagatggtccactgggtaagaagatggagaattcgagaactcgttctgagattggttgggagcccaagtatccaagcttcacagaattccttggtcttgacagttgacatgcttgtgtatgcttgcaaaaatcttcaactctaaatgaacagcaacacgttgtgaaccagttatttggttttgtttccattgcggttttttttaaaagacgtaaatactgtatatcttgttcctgctatgtgcttatatcagttagcgttctaagtctgacccgttgtacaatggttcggccagagaaatatttccacccgtgtcatgttggccctcgttctggtccgtccaacatctatttg

SEQ ID NO: 396103 - DNA, 453 bp, Oryza sativa
  unsure (1)..(453): unsure at all n locations
caaatccccaatgccatactgaaaaactgttattacaagttacaacnacnaccactgatgatgatgaagatgaagatgatgattgaccgatcgagcaagaagaggccggtagtttggccgaccttgcgacgacgatgacaacaaagatgatgatcatatagatggtggtcctgtgccacgaatcgattaattaatacttgtgtatgtgttgcccttggattgttttcagcccgttggaagctggaagggttcataaactgatagcgtattcttttttttaagatcttgtattttactgtaagaactcggtctctgtgaccaatacacatacaaaaaggatgctgtgtaattgaatgtttgttgtttcttgtttttttccctgattatttanctggccatgtcganctggttagnnnnnnnnnnnnnnnnnnnnnnnnnnnnnnnnnnnnnnnn

SEQ ID NO: 396104 - DNA, 469 bp, Oryza sativa
  unsure (1)..(469): unsure at all n locations
tgtcgtacttttgcctgggagagccttaggcatggaaaactggttgcgcatcacctttgcattggatcccccaaggctaaagcaaggattagaaagggtcaagtccttttgccggaggcntcagtcacatgctaatatgctcaatataagtgcgtcggcgaaagtggagccccatttcggaatgtcaaagagttagagcaaatacaataacaaactacaaaccagttatcaatacatatcaagaagataagagaggagagatgacaagtgagctacaaattttaaatttatagccagctatgtgtgtataagaggtgggataagataatttagttccagtagttggctatagtattaaagtttctcttgtgtaaagtagttgtacaaattctgcttgtactccgttaataaatataaaaaaaataaagagaggtttttctatttaaaaaaaaaaaaaaaaannnnnnnn

SEQ ID NO: 396105 - DNA, 464 bp, Oryza sativa
cggatcccaaggaaggccttaggacgttgattgatccaaagctaggagaagattatcctattgattccattctccaagctgacacaactcgcaaaggtgtgcacacaagaagaccccaagctgaggccttcaatgagatccgtggtcgtcgcgctgatgacgctttcatccacaagtgagttctgggacatgaacaacctgtatgagaaccaaggtttggtcaacctaatgtccgggagatagtgactttggtgccgcctgcacactgggaaaattgtacattcaggctcatctgaagtgtgtaatgacagccattacattgttttgtcatctttgttattcttttcttttttgctgttcctacttagagaccttagacatctggaaggctatatgtaagatattgacttctacattccaatggaaataaataaatattatcctgtagaaaaaaaaaaaaaaaa

SEQ ID NO: 396106 - DNA, 894 bp, Oryza sativa
  unsure (1)..(894): unsure at all n locations
aaaattcagccttggaaggaatggggatgcaatgccctttccattcttgacaccggtttgggacttngataaagcttggagatcctcctcagtgaacgggaggatgttgatccctgtaggattgggattaccggtgaatcacttggaggaatgcatgcatggtttgctgctgttgtggatacacggtatagtgttgttgttcctataattggtgttcagggatttcgatgggccatagataataacaagtggcaagctagagttgatagtatcaaacctctatttgaagaggcaagaattgatctagggaagagtgaaatagatacagaagttgtagaaaaggtgtgggacaagatagcacctggtctggactcacaatttgatgcgcccttttcactccctgtaattgcaccacggccacttctcctcctgaatggtgctgaagaccctcgatgcccagtacttggtttacaggaacctgtttccagagctgctaaggcttatgaagaagttggttctgcagataagttcatgttcatttgcagacccaggaattggccatcaaatgacagcgaacatggtgaaggaagcaagtgattggtttgatcgcttcctttagagggttatgtatatgttccgaatactcttattataccacatcgtgagggaaaggcatactctacaacaagttgtctcagtttataattgcttatattgaatatatgactggaatcgattcaatttcatcaccatctaatttgtagtctacataccctaataattgccaaaggagaaacattttgtagcatgtaggcatttcacagtttgagaatacagaagttgggaggaagattatttatctgtcaaggttctgatgagaaaaaaaaaaaaaaa

SEQ ID NO: 396107 - DNA, 563 bp, Oryza sativa
gcttcgtcagctcgggctatcggaggtcctgttccatcagtttgatgtgtctgagccttccagcgccgctggcttggctgattttataaagcacaagtttggcaagcttgacatattggtcaacaatgcaggaattttgggggttacatttgattttggcaacttagatcttaataaagcgattgagggcaagagtgcaaacgagcacgctggaatggttgatgcaacacaccgtggagactgccgagaatgcagaagaatgcttgaaaataaactatcacggcaacaaaaaaaccatacaagcactccttcctctcctccaatcatcacctgatggaagaattgtaactgtttcctctgtttttggacaactatcgtttttcagtggggagaaactcaaagaggagctcaacggtttcagcaagctaagcgaggagaggatagacgagctggcagagctgttcgtcagggacttcaaggacggagagctggagtcccggggatggccagccagagccgacgcgttcgcggcctacaagacgtccaaggcgctgcagcacgct

SEQ ID NO: 396108 - DNA, 430 bp, Oryza sativa
  unsure (1)..(430): unsure at all n locations
aaaagggggcctttctctctctcccttatccacagaagaaaaggggaccgggcggcggaggactcgacggccctcgggagaggcggcggtggcggtgggcggcggctcagcggcgcgtggcggcggcgctggtgcgaaggcgaagggacgaggtggtgcggcggcgctaggcggccagcggtggcggcgatgttgcaagtcatcgattacaagtttctgaatcgggtgtggtcttgttgaagccccatgatgtnttgccaatggagattaattgattctagaagaagacctttgaacttttgtcttgtttttcttgaagatactagagatgtttttaattgttatgtagctagaaaattagaaatctttaacattttccctgaaaatgcagtgtctcaaaccttgtagtttcccaataagttttagtttt

SEQ ID NO: 396109 - DNA, 845 bp, Oryza sativa
  unsure (1)..(845): unsure at all n locations
cttcaatgccattgccttgttcacatcattagcagtagttgtggttcagattacacttgttaggggagagactaaagcagagaggcgggtagtagagattatcaataagttgatgtggctggcttctgtgtgcactacagtggcgttcatatcatccgcttatattgtagttgggaagcacttccagtgggcggcgcttctggtgaccctaatcggcggagtgatcatggctggtgtgcttggtacaatgacctactatgtggtgagatccaagcgcacacgttcgatcaggaagaaggtgaaatctacaaggaggagtggctcaaactcatggcagcaaaactcagagttttcagactccgagatagaccggatatacgccatatgaagctcattctggttagttgatctctcagctttttggcagccataacacccgaatgtaaaaatgaaataggatgttataaacagaatgacccttgagattattattaggggttaactgtatacgttccaataagctggtgtaatctgccatttcctgttcttgaatcagcaggagctagccgacagtgctgttgtatactagtactacagatagactggttatcagaatatgcagcctccgctgtgctccatgtgcattgccttcagcttcatatcttcttttttgatactacaacaatgatgatagcagaatgatatgtatgctcctctgttctatcgttggctatcctaatcatgttctggatccagtgtctctagaagcatttatgtttttcctcttgaacacaataaccttattctgattaagatcaaannnnnnnnnnnnnnnnnnnnnnnnn

SEQ ID NO: 396110 - DNA, 637 bp, Oryza sativa
acaaaacaaaaactcccgtctcgtctccgctccttgcgcctgccccgatctccgttctcgcgagcagaatccagagcaaggggaagccgccgtcgtccgtcctgctgcatcctggaattacttgcgaatggatggcatagatatagtattttcactgctaggtttttgagtcaagcacatgtccaaggcacggaacgttttagttgccactggtttgttggcctttgctggtgctggcttagcatttccattctattttgtgaaatcaaagaacaaacccatcattgattcatcaaagcctctacctccacaggctacatttcgaggaccatatgtgaatactggatcgcgggacattggacctgattataccgactaccccaagaagtgatctatctatccaaaaatcagagggactcttcttggacagatgatattgttagattattggggacctataactttgaagttgtactgacattgttatgtgtactgtagtcaaggattggggcttccagacttttggaatggtcatgcacccacccaagcagcgcaaaaaccagcagtgaataattatttccagttgggactgtcttgtcctgtgcaagtgctcttatggagtttcaagaataatttt

SEQ ID NO: 396111 - DNA, 467 bp, Oryza sativa
  unsure (1)..(467): unsure at all n locations
agagaacaaaaaaaaaaacaacacaaaacaaaaactcccgtctcgtctccgctccttgcgcctgcgccgatctccgtctcgcgagcagaatccagagcaaggggaagccgccgtcgtccgtcctgctgcatcctggtttttnagtcaagcacatgtccaaggcacggaacgttttagttgccactggtttgttggcctttgctggtgctggcttagcatttccattctattttgtgaaatcaaagaacaaacccatcattgattcatcaaagcctctacctccacaggctacatttcgaggaccatatgtgaatactggatcgcgggacattggacctgattataccgactaccccaagaagtgatctatctatccaaaaatcagngggactcttcttnggacagatgatattgttagattattgggggcctataacttttgaagttgtactgncattgttaatgtg

SEQ ID NO: 396112 - DNA, 461 bp, Oryza sativa
  unsure (1)..(461): unsure at all n locations
gactccaagtcttccaagctgagtgtgtgtgtgaaagagagagacctacttagtacaagaatcacatctgcatatcttccctgcaaccgtgtgaagaaggatcacaactcattcttctcttctgtcagtagagagagagagagagagagagagatcaagaactagagagagaaaggtaggtagctagagagagagtaggcgatcgatggcggattgggggccggtgttcatagggctggtgctgttcatcctgctgtcgccggggctgctgttccagatcccggggaaggggaggatcgtggagttcggcaacttccagaccagcggcctctccatcctcgtccacttcatcatctacttcgcgctcatcgccatcttcctcctcgccgtcaacgtccacatgtacctcggctaagcttagctagctagttagggaggtaccatgctngctcttgcatgtt

SEQ ID NO: 396113 - DNA, 363 bp, Oryza sativa
  unsure (1)..(363): unsure at all n locations
ccaggggacaccgctcaagcccaacgtgcccatcgacgtgttcgtgttcgcgctgttcaacgaggacatgaaacccgggccgacctcggagcgtaactacggtctcttctaccccaacggctcgccggtctacgccatcaacaccggcgccggtggcgtgttcagggcggacggggccgttcgacccgtactcggcgcagatgttctcgtcggcgtccagattggcggtaaggacagcatctttgacactgctactgctagtattgccccttctgtcctcattctcttgctaattaatgatacctttgtatacaaaaacgtgcaaatcaaccatggggtaggcctggattncaaaatttggcc

SEQ ID NO: 396114 - DNA, 460 bp, Oryza sativa
  unsure (1)..(460): unsure at all n locations
gtaggaaactagtagcccatcattcattcacatcactataactgacaaaatggcaaggcctggtagtggtaacatcccaggatcagcatgcattcctcttctgattctgctgctgctgctgctgctactgcatccatcagaagctcagccttctcctggctactacccaagcaagatgttcaggtcgatggccttctatgaagggtacagcaccctgtggggcccacagcaccagaccctgtcccaggatcagaagtctctcaccctgtggatggaccgtagctcagggagcgggttcaagtcgacacggtcgtaccggaacggctacttcgggggcgtcgatcaggggtgcagccgggctacaccgccggcgttcaacacgggccttctacctgttggaacacggaggcagtaacccgggggnacacgacgagatcgacatnggaggtttttgggggac

SEQ ID NO: 396115 - DNA, 813 bp, Oryza sativa
ctgaagccagacgcgcagcgaaaaaagcaccaaaagttactagaacctgtctcaaatcgtaagaagaatagacagctggaggatgatggcttggtgattacaaaagctctgtatgggaatcgcaaaaaagttaaagagagcagcgaatcaaatgagttgaatgatgatgtggcttcgcaagtattagacgtgaccatcccactgaacttcctcgtctctgaggcaggccagctaaagcttcatgaggggatcaagaagtctggaataatgggcttctacgatccttgccctggtgatccaaagctgttacttgtagaatacacatttcatggtcagaaatacaaggtcatggtagatgattacgctgcactgttgataccacaagatattcatcaaatttgatctgccgctgatcccgaacaattttgagccccatagctctcttctcatagtttttcttcttctgatgaggcttttctgtttttcgctgtttttccctcacatggtccattttgttgtatacatgcgtggatttgttccacctagattgtagatacgcggggtgagatcccgacagtcaataagtttcagtcaatcaaaagttcgcgacattagttcaatcttcactggacgaaacatgcactgaactgataatttctttatctacgaagatgcagctgtcgcctttccacttagatcacagccaaccctctaacacatgcatctgtttttccttgtctgcgagcgtgcgacaatgtgatactctgtttttgtcatattccagttttgatccgtcaaaaaaaaaaaaaaaaa

SEQ ID NO: 396116 - DNA, 848 bp, Oryza sativa
  unsure (1)..(848): unsure at all n locations
aagagttgcagcatgctgcgtcttttgatgacgatgatgatggatcagaagatgactttaaaaatcggccaactgtactggaccaagatgatgattctnatgttagcgcggttgaggatgatgattattctaagtttgagaaagaggtggaagagactttccaaagggcgttggatggtatccatcaagataacttgatactagaaattaatgcactcaggttatcttatagccttcaacatgcagactgtgctggagctttgttccattccgttatgagaagtgcattagtggctgcacaatctactaatggtaaccttctaaagacaactgcagaagcacttggcaaatgggaaggacctactgcgaaattacaccaagtcagttgatgaggagatggaaatattattgaagttcgaggaaatgtgccaagaaaatacaaaagaattttctccactattttcnaagatcttgccttacctctatgataaggaggtagtaagtgaagacgcaattttgagatgggcggaggagaaagaaaatgccgatgaatctgataaggttttcgtcaaacaatctgaagctttcattcagtggcttaaggaagctgaagaggaagatgaagaagaggagtagagctggagcttatgcttgcattcctttgagctcttggagaaatgcagcatttgccttgtttgaatggtctgccggtgagtttgcaagcggcaagttttgaaaacctaattgtttgtacattaatttaatggcatttttgttcctaaccaatctggtaaaagaaaggagcaacattgcccnnnnnnnnnnnnnnnnnnnnnnnnnnnnnnnnn

SEQ ID NO: 396117 - DNA, 468 bp, Oryza sativa
  unsure (1)..(468): unsure at all n locations
cagacaaccaccgcaaattggagggaacggagcagaaggtagcgaaggagccaagaagtcttcagtattccttccttgcaagcatcgttaatggaggggtcaacgagtcaagaccatgtgattgggatcccggtgagcaacaccgcctatggcatagaggagccggacttcgcagcggaggagacgaccacccctgatcatgccggtttcgttgttggttccttccaattcaacaacgatgcgaatagcccgacgacgacgacgacgacaaccgatcgggcgagcaaatatggcaggaagggggacaagattgcacagggcatcaaagaacatgtgaccctcgggccgaagctatcggaaacgggtcaaggggaagctcacgnttgggcgcccggntccttcaggncggcggcgttggagaaggttttccggcantgggttctccgttgncaagaacgagaagcttct

SEQ ID NO: 396118 - DNA, 813 bp, Oryza sativa
  unsure (1)..(813): unsure at all n locations
ctaagctaataagagcaagcttagaacaagaacacatcactgtctcctagctaagctagccaattcaattcaaacacacagaaattcagacgacggcgacgacgatgtttcgccgcgccgccatggccgccgncgcaccctccgacagcgaggtgagggttcagaaggtggacaagctgggacctccgtcttcaacatccctgacaaagccccccggtgtacggcgcccggcaaaggtaacaaccctccaaaagctccagcaccaaggcgaccggcggctaccggcggcgaccatggcagcggcggccccgtcgccggcaggaagcagccgggcgtcgtgtcgatagaggacatcaacaagaggtctgaaaactacatccagggacaggaagaggttggttctttggccaaaattagtccaaattagtttcgagctcgatcatggaaattaattgaagtgttaagatccggtctgcatgatgtgatatttgcactgtattacgtacgtatatacggatgtatgcatgcataaatatggggaaaataattagcccctgatcgatgggcgcttgtgttgtaaaatatttacctgaaatatatgaatagcttgctatatgttgactgtgttttcaagagatttttaattttcagagactgaacttcataggctatagttagtgcttatataaggataaggacgactgtaaattaaattttttttgtgaggattttctagctaggttgcctactgtaagaaattgtacaattttcaatacaaacattacacattattaatcaaaaaaaaaaaaaaaa

SEQ ID NO: 396119 - DNA, 462 bp, Oryza sativa
  unsure (1)..(462): unsure at all n locations
gccgcgcgtncnancacgagcaagggagcaagcgaggagagaggagaggcttagcgagagaggtgaggagaggagaggatttggaacttttgatctttgggatcgcgagacgacggagatggccggtggcggcagggccgatgacgagcgaaggatcggggtggcgatggactactcggcgagcagcaagagggcgctggactgggccatcgccaacctgctccgccggggcgaccacctcgtcgtcctccacgtcctgcatcacggcggggaggaggccaagcacgccctgtggggcaagtccggatccccgctgatccctctctccgagttccgggatccgacggcgatgcagcagtacggcgtgcacttcgacgccaggttgttcacatgttcgacaaggcggcgggcantttgaagtttaccctaatggcgaattgtanttgggcgacgcaaggagaa

SEQ ID NO: 396120 - DNA, 485 bp, Oryza sativa
aagccgaaggaggggacgaatgtatggagagctctggagggggtggccccggttgaacccggtggtgaaggctgccgcggatgggcgccctgctgaagctggcggcggcggtcgacgtcgctggaggaagacgacgaggcgaggattgattgattgattgataacagtcgctttcgttgccggaaaacgtaatccagagggtttgattacatgctttaaatggcaaaaattagggagacgctttagaagttgattgacgtaaacgtatgtcgcattcaggttgttgagttgacggaatagggaccgatactgctgctgctatcctccctctcttgtagtagctgaaaatgattgcctagctgttggatgtggtggcctttgtttgatttatttattgtgattcttccttccttaatggaggacgctatcaacaaattaaatggaccatatatgattgatgattatctggaatggattaactccat

SEQ ID NO: 396121 - DNA, 339 bp, Oryza sativa
tccaatctttgctggatcagccaaactgtgtcgcaaaaataatctcagtaaggaacgagaagaaggtagtgttcttcgcggaacgcaccataaatccgggggaggaaattacctacgattatcacttcaaccgagaagatgaagggcaaagaatcccctgcttctgtagatcgagaggctgcaggagatatctgaactaagatagtgtacttcggtcgtatgtttgtagtgctgtttaaacattgtaatgtgcgcactgtatatatgaataaactgtagggacttaatctggcactgataatttagacatccaaacttaaatttaaaaaaaaaaaaaaa

SEQ ID NO: 396122 - DNA, 571 bp, Oryza sativa
  unsure (1)..(571): unsure at all n locations
cgcnttttcgctnttacgccagntngcgaaagggggatttgctgcaaggcgnttaagttgggtaacgccaggnttttcccagtcacgacnttntaaaacgacggccnntgagcgcgcntaatacgantcactntagggcgaattgggtaccgggccccccctcgaggtcgacccacgcgtccggaaggagaagaggttctgggtcgcctccttcctcctcgtctgggctgccgctccaggggcacatgatgtggatgcagcgccaggacgccttcaagcaaaagttcccctccaactccaaccacgacgacgacctcgccggcgccgactcctagctaggcagctactccttccattccatcccatctagggcttactgtactaccccagtagtggagctcctcccctctacagtagtacttactttcttcttcatcacttgatgggtagtagtactccgtagtagctaatgatcgtttgaaaacgaagtactacgtgtttgctgattcgcctgnctgcctaaaaaaaaaannnnnnnnnnnnnnnnnnnnnnnnnnnnnnnnnnnnnnnn

SEQ ID NO: 396123 - DNA, 751 bp, Oryza sativa
  unsure (1)..(751): unsure at all n locations
gtaaagcttggtactggtgctggtgcctgctccagagcaagatggcaagaggggctcagccatctgcatccctcctgctcttctccctggggcttgtgctcctctacttctcctcaggaagcaccattcgacttgctgagggacagaaaacttggtgcgtggcgaacgtccagcagatgacaaggttcttacggcgaatctcaactacgcctgctctcaggtgaactgtggagtgattcagcaaggtggcccgtgcttcaaccccaacaacctggtgtcgcacgccgcagtcgccatgaacctctactatgctgcccatggcaggaatgcctggaactgctactttccagaactcagctctcgtcgtgcagtctgacccaagttatggttcctgcacgtactactgattttaaaactgaggtcgaggtcgaggcagggcctacgcagctgagtttgtattaggatgtcttttactcccatgttagcngtgccgagatttcgtggcgatgccctagatcctctgatgcttagtttattgataagatgaacattgatttgctcggatcttggatgctgtttgtggcgtccattcccatcaaccttcattggatgtttggaaattcagacttgttgatccacatgcttcattgcttcctgtttcctagcatctcttgttttcagtttgatggaaaccggggattcgttgaatgaatatatgatttgtcnnnnnnnnnnnnnnnnnnnnnnnnnn

SEQ ID NO: 396124 - DNA, 671 bp, Oryza sativa
  unsure (1)..(671): unsure at all n locations
aattggttaccggnccccccctagagtcgacccaacgagtccgagaattctcccgtttggtctcgttctcgttgtctcctccgctccttgcgccgccgccaagacgagtcgcggctgaacaggggagggccgggtggcgatctccatctggcgagcagagcagcggaggggaggggatcctggttcaggggcatctcctcttttctttcccttgccgccattagcccaagcagctatctggattctggagtagttctctagcgcacgaacagcatccgtgacgaagcgcatccatggcggcagcaccgacgagagcggaggcgctgtccctcttccggtccctcctccgcacggcaaggcagttctctgactacaacatccgcgagtacgcgcgccgccgcgccgcggacgccttccgtgagaaccgtgccctcggcgatgcggttgccgcggcggcagtgttcgcggacgggaagaagcagctggaggtggcaaagcggcaggcggtggtgtactctctgtacgccccaaaggccaagagcatcatggagatgaagctgcagtgatcggtgcaactaaaactgagatgttattatgtttgctagataatttccatgacatggttgctatgagttcaataaactagtcaattccacaaaaaaaaaaaaaaa

SEQ ID NO: 396125 - DNA, 275 bp, Oryza sativa
  unsure (1)..(275): unsure at all n locations
cactgatccactccatcgccaattcgccgtatcaactcaccaactggggaaaacgccgaagtcgaggaggggaggccgcccggtccgcgcgcgatggccatggagggggtgagggtggtgacgctgcgggcggtggaggccacgcccgagtccttcgcgccgttcggccaggtcgtcgccgcctacggcaaaggcgcttcggtcccaacgatgcccagctcgacctcagccgcggcgtcccaaggttctacatcatgaggttggagaagcggncg

SEQ ID NO: 396126 - DNA, 708 bp, Oryza sativa
  unsure (1)..(708): unsure at all n locations
ancanccaagaaggttggtgatgagaaacagaancagcagccagcagggaggagggctgtatttgaaggtgagcatggatggggcaccatacctgaggaaggttgatctcaagatgtgcaagggctacagggagctgagggaggcactggatcctcctcttcaccaagtgcttctctgcaaccgcctctgacggatgcagcgatggccagttcgccattgcctacgaggacaaggacggtgacctcatgcttgttggagatgtgccctgggaaatgttcatctcttcctgcaagaagttgaggatcatgaagggctctgaagccaggtgatggtctgatggatgatcaaaggagacaaatcacaggctaggacacaccacatgagaagatggatgatgaatcagagatcatgaatcacatggcatgagatgaatgggatcaagaagggagcagaggactagaagagccctgatggcttgtgctcttcgttgctgtacagagagagtttaggcactgccttgtttcagtgtttctgaatccaagagggacaagatgtatgaactgtgtatatagtcttttaattaggctcatttcttttttcagtttgagttttgtactgtatgagcgaaggctggaaaatatgaaaaaagggagaaatttgacttaagcttggtcatttctccacaccaaagaaaaaaaaaaaaaaaa

SEQ ID NO: 396127 - DNA, 564 bp, Oryza sativa
  unsure (1)..(564): unsure at all n locations
cacattgcaaaagcatgccatgggacttatttctccaagaattgggattgacctagcagtttttgcagtttgtggaaatgtggctttcttttcaattggcatgggtccaatatgttgggtcttgtcttcagagatatttcctttgagattacgagctcaagcatcggcactaggtcaagtaggtggtagagtgagcagtggtttggtttccatgtcatttctttccatggcccgtattatatcagtggcaggaatgttctttgtctttgcggttatctcgactgtctctgtggcctttgtgtatttctgcggtgccagaaacgaaagggaaaactctgggagcagattgagatgatgtttgaaggtgggaaagaatggagagggagtgagatagagcttgaggatacacaacatttaatacagagcagcaagaagtctgtgtctctaggctgacactattagaancagtaaattcgaaatcattcgatgttcaatgatgaaccatacttatcctgcttcccatcgnctacgggattctaaaatttcaggtctgaaaatgatcag

SEQ ID NO: 396128 - DNA, 657 bp, Oryza sativa
  unsure (1)..(657): unsure at all n locations
gttgaaactggtgaagagaatgagaaggccatattcacagccgactcagcattgtatgaatacttggatgggggttggaaagaaagaggaaagggggaactaaagttgaacatcccagtatctggtggcgagaggtctcgtctcgtcatgagaaccaagggcaattacaggctagttcttaacgcaagcctttacgaggacatgtcgctgaaggacatggacaagaagggcgtgacgtttgcctgtatgaacagcatcggcgactcgcagagcgggcttgccacatttgctctgaagttcagggataccagcatcagggaggagttcaaagctgcggtggagatgcacaaggcgaaaaaggcgtccggcacactcaagacacccgagaactccccgaggcattcagatgattgaaggttgaagcccaactctcgccacaatgcaccgagtccatgaagtggaggagctgagatacgcttcttgttcttttgggggggtttatttaagtaccataccgtaccatgtcactacgctgccttaagatggtgatgcgctttcatacgggtttcctgtcgctgttttttggacagtgggtagagtcctgtgaaatttaaattaaaancctgaatcttagtaagtggggaatgagctcctatt

SEQ ID NO: 396129 - DNA, 376 bp, Oryza sativa
cgcaaagccgacgcgagagaagcggccaccgcgcgctagtagtagtagcgagccactatagatttggctcccgtataaagggtcgctgagacttgcttgtcgctggcagtggcagctgccgatccgtccgtcaaggcacagcgcaacacaggctctcgctcgtggaggcgaatggagctggacatgggagcgggaggaggcggtggagtagtgggaggtgggcgagcggaggcgcactaccgcggggtgaggaagcggccgtggggccggtacgcggcggagatccgggacccgtggaagaagacgcgggtgtggctcggcacctacgacacgcccgtcgaggccgcgctcgcctacgaccgcgccgccgtcgcgc

SEQ ID NO: 396130 - DNA, 434 bp, Oryza sativa
  unsure (1)..(434): unsure at all n locations
actagttctaggtcagatgcacccacccaccatacatagttgctgctgtcctcgcttgtttgtgcgcacagcactttcttcagaagatcagatgagagactgatgatgatcagtaaaagaaaaccaagccaatccgttaaatgtaaagcctcctttcttccttcctcctactacctttgcttctttttgagacgatgtgccctgcctgccctgcgcccttgccagtgacattcccttggtttttatgttgttgttgctgtagtagtattagacaactggtacctataggcgatgaaggtgttgtatcatatacttaagtgctacctccgttttttaatagatgacgccgttgactttttcctcacatgtttgacccttcgtcttattcaaaaaatttacgtaattataaaaaannnnnnnnnnnnnnnnnnnnn

SEQ ID NO: 396131 - DNA, 568 bp, Oryza sativa
  unsure (1)..(568): unsure at all n locations
agaaagaaggagagcaaccatgatcagtgccaagaggtcgctcaaatggcaaagaagtngcaaagaatagcagccctcgggaggaagaggatcacatggacgacacccaaagcaaccgatgaatgctgcagttctgtggcagtgaagggccattgcatcatgtacactgctgatgggcggcggtttgaggtcccgttggcgttcctcgcacgacgatcttcgcagagctcctcaggatgtctcaggaggagtttggcttcacaaccgatggagggatcacattgccttgtgatgcagaggtcatggagtatgtcctgtgcttgcttagaagaaatgcatccgaggaagttgtcagggcattcctgagcaccattgtgaaatcttgccactatggggatggctttgcacaatccttcggggtcttgtccaacaagtagcagcttctagcttctgaaagtttacgtatagctaatctttctccttttatcttcctttgaatgatgtaaatatggaaacatgatgggngtnataganattgtgattattnatatcaaaaaaaaaaaaaaaa

SEQ ID NO: 396132 - DNA, 461 bp, Oryza sativa
  unsure (1)..(461): unsure at all n locations
tcggaagcaaatcatcttcctagtgcatacaagttagctcatcatcagcactagtacagtactactagacagttgtacgtacaagtagaagtagctacccaaccttgggagagatggagattccagtgattgatctcaaggggctcgccggcggnacgnaagaaagggagcgcaccatggcccagctccacgaggcctgtaaggactggggcttcttctgggtggaaaaccatggcgtggaggcggcgttaatggaggaggtgaagagcttcgtgtaccgccattacgacgagcacctgggggaggaaattctacgcctccgacctcgccaagaacctccacctgaacaaggacgacggcgacgtcctcgtcgacggcngcgacccttcgcnacccagggccgacttgggangccacctactttcatccagcaacngccccaagaacaaccgccgccgant

SEQ ID NO: 396133 - DNA, 289 bp, Oryza sativa
  unsure (1)..(289): unsure at all n locations
cnacgccgacgaactcccactcactagtagcacttacttgtagctattgatctagagcacttaagacatggagaggcaaggcttggttcttggcctgagcctcgggctaggcttgacgacggcggcgacatggccggctgctgggttctgtctgaactccggcatggcggacaggaagtgatcaggcgtgatgatgtggttgcggcgacggcggcggaggatganaggttcgcgtgactcacccggcagcccggtgtcgagcggcangttggaagcgatggcagcggca

SEQ ID NO: 396134 - DNA, 663 bp, Oryza sativa
  unsure (1)..(663): unsure at all n locations
aggtgtanttggaccnggtaaattagttcgttgnagtgggggatggggggatacatttaaacngaacagttgacntgataagcnagttgaataacctcattaagggaccaaagtggagntccaccgcggtggcgccgtttagaattagtgaatccccngggctgcaggaattcggcacgagacacagtgtactgatcaacacttctggaagtggagcaaggttgagttacctgtgagacagtaatgaagaggaacaccatccttgctctcttcatctgggccatggctatggtgatcttcgccacggcaatgccggccaaggcaaggatggaggggatccatcctcaaggatgcagatgctgctatttcagacttaggccgatgatccagtgtgccaaggcttgctgtggctctgacgatgagaactgctgccttgtgaacaactagttcatctcgggaataaataaaccgagtcggtcttggacctttgcttaatttccttgtgtttcaacgatctcgctgaagaatgcagttatatatatgaaataaaatccagctcttgctgttcatacctaaaaaaaaaaaaaaaaaaactcgagggggggcccggtacccaattcgccctatagtgagtcgtattacaattncnnnnnnnncnnnnng

SEQ ID NO: 396135 - DNA, 310 bp, Oryza sativa
  unsure (1)..(310): unsure at all n locations
aagcgancttcgtgngaggtggaggcgtcgtgcagatcggggctgtgccgctcgccgtgggatgccgttccagccccggaggtgaggtagctcgacgtctgcttgtgttttttttttctttccccggcgcggattactgaggcgatggcggaggacggggaggagaagctgctcgcgacggtgcagcacatcgtgcagacgctggggagcagcgacaccatgacggaggacatcctcagggtcttctccaactacgacggccgcctctcgctcgacaagctctacgccgcgcgggccgcggcggccttcg

SEQ ID NO: 396136 - DNA, 220 bp, Oryza sativa
  unsure (1)..(220): unsure at all n locations
cctcaataatgtctcgctccagcctcgccatggcgctcctcctcgccgccttcgccgccgcggcgacggcgaacagcggcgcacgccggcggctagcgacttcatccgcaagtcgtgccgcgcgacgcagtacccggcgggtgtgcgtgcagagcctggcgtcgtacggcggggccggggcgccgccgccgcggagccgcgcgaacttggcgcncgccgc

SEQ ID NO: 396137 - DNA, 274 bp, Oryza sativa
cccacgcgtccggggtgggctagggcgatccggggggcgcgaccatggcttacgtcgagagaggtgttgtgaaagacaaacggacaatttggcggctaagcataatttctgacttcttcagggctattgtgaacttcatcagaatgttcttccttacaatgttctcgattgaaaaaacagacagctataggaaagggtatggctctggtaagaaatgggatggtgggcctggtgggggaggtcctggtggtggcccttatggggcggcctcacc

SEQ ID NO: 396138 - DNA, 586 bp, Oryza sativa
  unsure (1)..(586): unsure at all n locations
caaaatctccagccacaaccagaagaaagaggcaccagtctgctcaacctatacatttttagagagagaagctgcaaagggtgtgttagagagagatggagatgtgcatggatgacaagtggaagctcaccaagaagggcagccgaagttggaggagggccgggcttcgagaggcccatcccggtctgtgccagggcggctggcgagcctggtgaaggagcaaagggccaggttctacatcatgcgtcgctgcgtcaccatgctcgtctgctggcgggactagtgatcgatctcttagagctacgggcctaaacgggtcgggctggctgatgcatcaagaggtcgccttgcctagtaacaaatttattcgtttagttgatgatgtttgttcttttctttttttctgagaaagagagcgatgtgccttttcagtggccatcctgtggtagatagttgttaatttgtgtggaaagaattaaatagcttacgttagctgtttgagccatccatacagaaatgtaaactgtgacaagtgtctctttgaaagactagtacattccatggtttctaaaaataaaaanaanaa

SEQ ID NO: 396139 - DNA, 452 bp, Oryza sativa
  unsure (1)..(452): unsure at all n locations
ggggatgctcgccaccatggagatgcgcgcgcggcacgacctgctgtccaagctggtggagctggtgttccccaggaaggacaccatcacgttcgaggtggtgatgaacgaggaagccatggaccacgtcatgttggccgtggcgaggaagaaggcggccaagacgatgcagaaggaggagagggatctgcagaaatttgccggggttctgacctcggcacccgccgggaggagatgggttgcggatgagcttgcggtagtggccgagtcaaaggaggttgctggggatatgattactgaagccgtgctggaccaggtccttggtgacaaagcttttgagaatttgggaaatggttcatctcacttcatttttcagatgcaagcaacatggcttagatnacaagattagttgctctcgtgccatactacattnatttggttgggcgttacaa

SEQ ID NO: 396140 - DNA, 421 bp, Oryza sativa
  unsure (1)..(421): unsure at all n locations
ctcttctctctctcctccatttattctggctcattagctgcagccgtgcaagcgagcatcgtcctgttcctcgcgtcgggggaatcaagaatcggtaggaatcgatcgaggggttgagtggtaggtgctcctaggaggcggcaataatgctggaggggaaggcgcgggtggaggacacggacatgccggcgcggatgcaggcggcggccacgtccgcggcgtcgcgngcgctcgacctcttcgacgtcgccgactgccgcgccatcgccggacacatcaaggcggagttcgacaagaggtacggggtggggtggcaatgcgtggtgggcgcaaacttcggctgcttcttcacccacaccagcggcaccttcatctacttctccctcgagcgcctctccttcctcctcttcaaggccgccgn

SEQ ID NO: 396141 - DNA, 510 bp, Oryza sativa
  unsure (1)..(510): unsure at all n locations
caggggccttttgatatttnctctgtcggtaatgatgattcanaagccaatgtcataaagttcagcagtgatggcaggcggcttcttttaaccaccaaagctgggcgtgttcatgtgctagattcatttcatggcaataatatagcaacatacaacgtgaagccagtggtaagcaattcgacgctggaagcatcattcagccctgatggaaaccatataatatctggctctggtgatggcagtgtatatgcttggaatgttaggagtggaaaggttgctcgctggggaagcacagatagtgagccaccgctaattagatgggctccaggatctttgatgtttcttgactgcatcttcggaactgtcttgttgggtccctgatctatctaagctgggatcctttactgttagtaagtaattcgaatggtacgagttgttgtttgtgtatgctcaggcctttgttctagctgtttgcaaaatgacaatgttaggtaaaaaaaaaaaaaaaaa

SEQ ID NO: 396142 - DNA, 612 bp, Oryza sativa
tccccggcagggaccacatgcacaagatgcgcctcatcaccgaggtgatcgggacgccgacggacgacgagctggggttcatacggaacgaggacgcgaggaagtacatgaggcacctgccgcagtacccgcgccggacgttcgcgagcatgttcccgcgggtgcagcccgccgcgctcgacctcatcgagaggatgctcaccttcaacccgctgcagagaatcacagttgaggaggcgctcgatcatccttacctagagagattgcacgacatcgccgatgagcccatctgcctggagcccttctccttcgacttcgagcagaaggctctaaacgaggaccaaatgaagcagctgatcttcaacgaagcgatcgagatgaacccaaacatccggtactagattgaatcaccatggaaatgagatcccgtctatacctgctttgtacatatgatcaagattgagagccgggtagactgaacattgcatttgtttgtttgttgatgttcgaaacccacattctctgcaagttgtggctgctttgtatgatatatggtactatgttcgaataaaagggtttggaactttggattaaaaaaaaaaaaaaaaaaaa

SEQ ID NO: 396143 - DNA, 479 bp, Oryza sativa
tacaactggactggctaaaggaagactagctttgattgcaaccatagatagagcactttgctttgagtatatgcctcgggggagccttgaaaactatctttctgatgaagatgatggtcttgcctggcccatacggtacaaaattattagagggacatgcgagggtttaaaacatctccatgtggaaatgaacccacctatttaccatttggacctaaagcctgccaatattttgctagacaacaacatggtgccaaaaattgcagattttggtttgtctaggttcatcactgaagagaaaacaatgatcacaaaaaatcttgttgggactctcccatacatgccacgagaatacatagagaggaaagaaatatcaaacaagttagacatattcagcttgggcgctgtaatgctagatataattgcaggacctacaggacgcttcagaagcacgaaaatgccttccctagaatttacca

SEQ ID NO: 396144 - DNA, 496 bp, Oryza sativa
  unsure (1)..(496): unsure at all n locations
aaggacggcagcgggttcatcgagctggacgagctgcgggaggaggtgggcccaaacgagcaggccatcctggagatcctccgcgacgtcgacaccgacaaggacggccgcatcagctaccaggagttcgagctcatgatgaagtccggcgccgactggaggaacgcctccaggcacttctccagggccaacttcagcaccctcagcaggaggctctgcaaggatactcttactccctgatgatcgatgatgcccaacaatctcatcaactttgtttcatcaaggcttataaactgcacatctttcaccttcaccagacagggataactagagagagatacaagaccaacttagagaaatgtattggagtggcaacacgatgcgatgtgcgcttggattgtgaaatgagaaatggaactgaaatggggatcgtaccggttttgctactctttcggtaaatgggtatttttnttttgaaaaananancacncgtccg

SEQ ID NO: 396145 - DNA, 730 bp, Oryza sativa
  unsure (1)..(730): unsure at all n locations
gaaaatngcagactttggttggtctgtgcacaccttcaacagaagaaggacaatgtgtggaacattagnttacctgccccctgaaatggtggagaagactgaacatgactaccatgttgacatttggagcttggggatcctgtgctatgagttcctttatggagtcccacctttcgaagcaaaagaacacnccgaaacatatcgcaggattgtgaaagttgacttgaagttcccactgaaaccattcgtgtccccggctgcgaaagacctaatttcacagatgctcgtgaagaattcggcgcatcgtctgcccctccacaagctcctcgagcacccttggatagttcaaaacgctgatccctccggcgtgtacagaggctagaacaatctcttccactctcctcaattcgaggagagacctgattctttttcatcactgttgttatggcaaaacaagaaaaaagcagtagccgtactactctacctgttgtttccgatcccagtgcgcctgtgtagttacgtgacaacgtgtatgctcaagcttcagatttcctcgatgaagatttgaagctgtgtgtgtgggtttaacgcgtatgtgttttagcgtgtgttcacagcatggggttgtgatatgttttctgtgcaacgccctgtacttaatgtactaatcgtatttcttattggacatcactcgattagtctacaagatnnnnnnnnnnnnnnnnnnnnn

SEQ ID NO: 396146 - DNA, 517 bp, Oryza sativa
  unsure (1)..(517): unsure at all n locations
ggaaaccggtttgaacacaaccncggtgaagcgccangcccccggggtgcgttccaagtgcccgccgcctcggggacgggagaacccggaagcgagtccaccttcatggccacttgttgcttcccaaacctcatcaatggcttctgcttcttcttgtggatggtggccaagtctctcttgtagccaaagacagacaccaactttcagaatcttcagatagatggaacaacatgaaatgaagaaactgattctctcttagtttagcttggctagtgactagtagtgctgttcttacttttggctctcttttttgggtgtttttctgatgatggaaaaggaagaaatcctggtggtcacagtaaacactagtctgaaactgtgtagtgacgagtactagcttggttgttttttttgggtgtaattagcatgtttctcatgtgatgtttaattacgggaagtggataatggatataaggtaaactgctctccttgtctgnnnnnnnnnnnnnnnnnnnnn

SEQ ID NO: 396147 - DNA, 535 bp, Oryza sativa
  unsure (1)..(535): unsure at all n locations
gcgtccgcggacgcgtgggtttagagatattaatccacaagcccctgtgcatgttctagtcatcccaaagataagagatgggttgactggactagacaaggctgaaccaaggcatgtcgaaattctgggctatcttctatacgccgcgaaaatagtggctgagaaggaaggtatagctgaagggtaccgtgtcgtcataaacaatggacctaaaggatgtcaatcagtctatcacctgcacttgcatgtactaggtggaaggcagatgaaatggcctgctggctaattaaccaagtgggatgctttctgtactattgcctaagttctcttgtagtaagacaatatgatcggttgaagtaatacccgcattggtgaatggtgttttctatccatctgtaacgtctttgttgtcaatgataccttcacaacagagcccgtgagaatgctcaaagaatctgttagtgagattgtctggtcgttctgtaattacttgattcgancctctaaagtttacatatcgttccgccacaanatt

SEQ ID NO: 396148 - DNA, 460 bp, Oryza sativa
  unsure (1)..(460): unsure at all n locations
cttctccggcagcggcggcggcgatgggggacggccgcgtcggaggtggaacgaatcggccggcatggctgcagcaatacgaactagtgggcaagattggcgaggggacctacggcctcgtcttcctcgctcgcctcaaacaatcgcatccccacgctgccgctggcgttggccgccgtggctctcccatcgccatcaagaagttcaagcagtccaaggagggcgacggtgtctcgcccaccggcatcagagagatcatgcttctgcgtgagatcaaccacgagaatgttgtcaagctcgtcaatgttcacatcaaccacggcgacatgtncctctanctcggcttcgattacggcgagcacgatctctatgagattatcaggcatcacaagagagaagcttaacctncccataaatccctacacagtcaaatctttgctctggaactgctcaatggttn

SEQ ID NO: 396149 - DNA, 463 bp, Oryza sativa
gttcaaatgttcagccgactgtcagaagctggactggccaaaatggcttaacatcatcagagggatcgctcgtggcctttcttatctccacagagattctgggaaggacatcgtccatcgtgatctcaaaccttccaatgtcctccttattccaacttcaatgcaaagattgctgactttgatcttgcaagaccatacgaccggaacaaaagccatgagagcactcaaaagagagcaggcacccagaaaaaataccacaaggatttattggtttcactgtttctcactgaagtggatacatagctccagaactgtatgcgggaggggaatactctaccaaatcggatgtgtacagtttcggcgtgatgactctggagatcatagttggtcagagcaccagcaagttcgacaacgataactgcacgggcctcgtagaatatgcatggcaacactttgtgaggcg

SEQ ID NO: 396150 - DNA, 474 bp, Oryza sativa
  unsure (1)..(474): unsure at all n locations
ctccgtgaggccctccatggacagggtccacggcgtgctcggcagcaaggaggagctggaggagccctccacccccggcttcgtcgcggcggcggcggcccggcgttttcgccgtcggcttactctgtgaacagcgtgacgatcagcgtcatggagcctcgaccatgaatcaagaagccttttgaggtttccaagaggatttgtacaaagactgttttcagaagtttggatggatggaagcgtttgggaatgaaatcaatgtatgtatctctgacagttcggtgtggcttgccaggcagtttttgatcagtgcaatgccatttcaagcttcgaagaactagcctgtttacccttttcttctcttttcccctgtttcggtgcaatgcagataggcacaagactacagtagtaatgttctttgaaatacttggctgttacaccgtgctctttgnnnnnnnnnnnnnnnnnnnnnnn

SEQ ID NO: 396151 - DNA, 461 bp, Oryza sativa
  unsure (1)..(461): unsure at all n locations
taagttgggtaacgccagggttttcccagtcacgaggccntaaaacgacggccagtgagcgcgcgtaatacgactcactatagggcgaattgggtaccgggccccccctcgaggtcgacccacgcgtccgggcttataagcgtggagcgacagaaataaagcaacatcccttttttgaaggtgttaactgggccttgataaggtgtgcaactcctccagatattcccaagccagttgagatccctaggtcagtagcctcaaccagtcaaaaggctacaacaactgctgagaaaggttcagacaattatcttgaattcgatttcttttagtggagtcttataaaatcatttatgtgcaagttgtaaagttcttttctttttcctagaccttttctggattcttataacttgatattcagttggcctatgctcccatttctgttcttaaaaaaaaaaaaaaaa

SEQ ID NO: 396152 - DNA, 487 bp, Oryza sativa
  unsure (1)..(487): unsure at all n locations
gaagttgtatcgatgctgaaaggtgaatctaaagagatgctttccaggcttgaaaatgatgaattgttacaggccagactcgacggtgagttcccatggaatgtcaacaccagaggggagctcggactgtgtgcccaagaatgatcaagaattggcagcggcatgatggattagtaccctaggaaatgtagagtcgcattttttttgtgggattggtgcttggtctgcttggtttggcatgattcaaatgtacaggcattgtcatttgtgaaggtttctcctctttttggagagaggaaattagatgaatgatgagttagcagttatacatggtgctttttttggcaaagaattattatacatggtgctttttgtgtgcactggatagaagatccatatacttggcctgatgtttgggtatgattggtcatgttgtcatataaattattctttaatgctgnnnnnnnnnnnnnnnnnnnnnnnnnnn

SEQ ID NO: 396153 - DNA, 332 bp, Oryza sativa
gacgccctgccgcctccggtggagggcggcggccatggcgggcgcgggctggctgcggctgaagccgaatgaatgatggatcagttggctcgaaagaattgatctttcaacaaggattgatcccagtatctttaattgtttttcattttattactcatcattgattagtttattagtctagtttagcatttttgacagtgattgtgtggtggatcctgatgaatgtatcatgtggcactgttgctgtttaattaggctgctaaatgctgctactaataccctgttctcgtagttgtgctcattaaatttgggaaagattttcattgcaagcc

SEQ ID NO: 396154 - DNA, 467 bp, Oryza sativa
  unsure (1)..(467): unsure at all n locations
agagtggattagtggagttgctattacaccaaaagttgatgtttatagcttcggtatggtacttttggaaatcttatccaggaagaaggaattcatataaagttcatactgatgacaatagtgatccaagttgcctttttccctgtgcaagccattagcaagcttcatgagggagatgtccagagtttggtagacccgcagttaaatggtgacttcagtctagtagaggttgaaagagtttgcaaagttgcatgttggtgcatccaagagaatgagattgatcggccaacaatgaatgaagtggtccgggttcttgagggtttacaggagcttgatatgcctccaatgccacggctacttgcagctttagcagaatgcactgttgtggctcactgtgatgatgattcataagtacttcctagttgatgttaataatatttgtcttagnnnnnnnnnnnnnnnnnnnn

SEQ ID NO: 396155 - DNA, 710 bp, Oryza sativa
  unsure (1)..(710): unsure at all n locations
gtacaaaatacccgagtacgtcccatgtatcccaggactgcaggcaactcctttctagaatttttgttgcaaaccctgcaaagagaataccaataagggagatcaggaaccacccatggttcctgaagaacctgccaagagagctcacagaagctgcacaggcaatgtactacaagaaggataacagtgccccgacctactccgtccagtcggtcgaggagatcatgaagattgtcgaggaagcgcggacgccgcctcggtcctccacccccgtggccggctttggctggcaagaggaggatgagcaggaggacaacagcaagaagccagaggaagaacaggaggaagaggaagatgctgaggatgagtacgacaagcaggtgaaacaagtccatgccagtggtgagtttcagctcagctgagtatttctgtccagcagcacaggaagattgcaaactggagatattgtcataatgtggcagctgatggtcacactcccattctgtagtttgcagtcttgtttttcttttttcagtttcattttttcttttcttctctttgatgctgcaacagtgtaaattaccaaagtggttctgtcactgtctttgtaatgactgatttaagttagcatgcagaaacataatgtattgaataaaaccatctcattgagcatcttctttctcnnnnnnnnnnnnnnnnnnnnnnnnnnn

SEQ ID NO: 396156 - DNA, 462 bp, Oryza sativa
  unsure (1)..(462): unsure at all n locations
ataaaccctgtaaatcatcccccaacaaaatccccaaatttcggcatgggcaaccatatattcagcatcgatacaaccaggcaacttcaactcataatcatcctagagggagtcaccacaacaggcaacctgcatggcccatggcccgatggaacgcccctggggaggaacgagtgggcatccatttaccacaactgggctaccttcatctcttccaagaaaggattacgggagcatcttctagcgcggaattgtggagcagtgcgattcattgctggcgacatgaattatttgtagtttcaaactgggagttgcgttgcgttgcctcagcccgtctgagtattcttttgcagtgttgctgcacttgcattcttccattgggggtggtcctttgtcgtactcacaattatatgaaggcataatgcgatcgataattacagcnnnnnnnnnnnnnnnnnnnnn

SEQ ID NO: 396157 - DNA, 469 bp, Oryza sativa
ggacggtgacggaggcggcggtgaagcagctggaccggaacggatgcaggggaaccgggagttccttgtggaggtgctgatgctgagcctgctggcggacacccaaacctggtgacgctgctggggtactgcaccgacggcgaccaccgcatcctggtgtacgagtacatggcccgcggctccctggaggaccacctgcttgacctgccccctggcgccgcggctctggactggaccactcggatgcgcatcgcgcaggggcgccgcccgcggccttgagcacctgcacgacgcagctcgtccccccgtcatctaccgcgacttcaaggcctccaacatcctcctcgactcctccttccaggcccgcctctccgacttcggcctcgccaaggtcggccccgtcggcgacaagacccacgtctccaacccgcgtcatgggcacctaagggtaattgcgcccccgagtacg

SEQ ID NO: 396158 - DNA, 996 bp, Oryza sativa
  unsure (1)..(996): unsure at all n locations
ctcccgctccttggctactgcattgcagggaaggagaagctcctgctgtacgagtacatggagaaaggcgacctccaccggtggctgcacgagcttccagcagggcggcccgacatggaggacgacaccggcggtgacatctgggaggtggcggaggacaagcggtccatctccgactggccgacccggcaccgacatcgcgctagggatcgcccgagggctcgcgttcctgcaccaagggtgggcagggtcgggtcggccggtcgtgcacggtcatctggtcccaaccaacatcctcctcggcgaagacctagagcctcggatatccgactttcggccaccctagcgacacgacgccagagggggatgtgtacagcttcggcgtgctggtgctcgagctcataaccggccaagccggctgggacgaagcgtcagttagctgggcgcgggggatcatccgcgaccagaagggtctagacatcgtggacccgagagtgcgggacgaggcgggcggcgggccggagacgtcgacggtggagcgggagatggtggagtgcctgcgggtggggtactctgcaccgcgcagtcgccggagaagaggccgacgatgcagcaggtggtgggggtgctcaaggacatccgggtggcacctgccagcagctcatccacttgacggtggtggagcagcgccatcgtgtgtgtccgtcgcaattgggacccgccgtcgcctgagaagagattccagtgtggcagcctttctgatctggtagacaagccttggtggtcggtagtagaaacacatgtgcatgtaacaattttttctcgccggtaaaacagttggtttcagagccccttgtctctcttgtttttactttggtggatttattgcgttgggcaggaacatcaacagttttggtactgtatttaattgcaagccgccatgaggnntnccgtnnnnnnnnnnnnnnnnnnnnnnnnnnnnnnnnnnnnnnnnnn

SEQ ID NO: 396159 - DNA, 608 bp, Oryza sativa
  unsure (1)..(608): unsure at all n locations
cttcggctcctgccgttgtcgccgccggccgtaaaccacctgagatgaccagcgccgcggccgtagcacccatggccaccgtgggcaatcctcacgcccctctcggtcagtcgacttcagggaagaagctgatcttcttcgggtctgcggccgcagtggcgcccttcgacctggaggacctgctgcgtgcatccgccgaggtgcttgggaaaggcgcattcgggacgacgtacaaagctgttcttgaatccggggcgacggtggcagtgaagaggctcaaggatgtgaccctgaccgagccggagttccgtgaccggattgctgacattggcgagctgcagcacgagttcatcgttccccttcgtgcctattactacagcaaagacgagaagctgctcgtctacgacttcatgcccatgggcagcctctctgcggttttgcatgggaacagaggttctggccgtacaccgcttaactgggagacgagatcaagcattgcgctggctgcagcccgtggcgttcgagtacatttcactcaacaagntcatcagcatcccatggcaacatcaagtcatcnaatgtgcctcctggaacaagtncgtatcaag

SEQ ID NO: 396160 - DNA, 466 bp, Oryza sativa
  unsure (1)..(466): unsure at all n locations
anatccgcagcagcaggcctcaaatctcgaagcgggcgatgatcagacttctaagccagaatccgctgaggggctcaatccttttgccccttgatattgaataacatgatggaggaatcggctaactgctgtagccccacatttggttcatggatttgatgaatcctatcttcaattgagtggactactttcatcttttggcaatattgaatttaccattggtgtcaaccagatggttgtctttcgattgcgcatgatgcttggcaccctctgtgctgtggtaggtattctggtggtgtttagggatcaccaccccaagtttgtgattgctttaatcgatctgcttattctagctgatgattaggttggttctttagctatccatgtaattacaccgcaatctagtgcttggaatttcttgcctgagaatcatatttcatgagttcgctcaaaaannnannaaaaa

SEQ ID NO: 396161 - DNA, 776 bp, Oryza sativa
  unsure (1)..(776): unsure at all n locations
aatcggacgtcttctccttcggcgtcatgctgctcgagctgatcaccggccggcgaccggtcgacccaacgaactacatggaggacagcttggttgactgggcgaggcccctcctggcgcgcgccttgtcggaggacggcagtttcgacgagctgatcgaccagcgcctggagaacaagttcgaccggctggagatggagcgcatggccgcatgcgctgccgccgccgtccgccactccgccaagcgccgcccaaagatgaagcagattgtccgtgcgctggagggcgacgcgtcgctgggacgacctgaacgaaggggtgaagcccgggcagagcatgatgttcagcacggggtcggagtacgactccggcaactacgcttccgacatcaacaggttgaggaaggtggccttcgagagcagcatcgaggacagcagcgagtacgggacccactccagcgccgactcgggggagccaccccggcggcaacagcatcgctagccgtatgatcggaggcgtcgagctagacttgactatttcttcggtgcgtgagtgtggaaagtggaaactgtgtggtgttgcgagatggcgaatcatcgatgggaaccggggcgtaccgtgtatgtgggaattgggatactgtcgtgcatattgcaggccgatcgtttgacgtgactgctttgttggctgtattatcgtgtgatttaatgatgtatccgatcgatgagtaatgcgatattgcgcttatcttgcataaaaaaaaaaaaaannnnnnn

SEQ ID NO: 396162 - DNA, 887 bp, Oryza sativa
  unsure (1)..(887): unsure at all n locations
cttcacctcccagatgaatatagcaaaccactcagctggaattctcgtgttaagattgcgttaggttctgcacgggcactagagtatcttcatgaaatttgttctccttctattatccacaagaacttcaagtcatctaatatcttgctggacaccgagttcaatcctcatgtttctgatgctggacttgccagcagtgttcctgattctgaattccaggcttcagatcagggttctggatatagtgcccctgaagttgacatgactgggcagtataccctcaagagtgatgtttatagctttggagttgtcatgctggagctcttgacaggccgcaaaccatttgacagcgctagactccggacagagcagtcacttgtccggtgggcaacgccccagctgcatgacatcgatgcgttggaccggatggtcgacccagcgctcaagggcctgtaccctgccaaatccctgtcccgtttcgcagacgtcattgcgctgtgtgtccagcctgagccggagttcagaccgccgatgtctgaggtggtgcaagcgctggtccgccttgttcagagggccaacatgactaggagaatgtatcgacggcgaagagggttctcgaagaccagatgaccaggaccaggagttcgtgtaacatgttgagacagatcttgtgttgaacctgcatcctatctctctggtgactgtaatatgtttggttcctagaacctgatgcagatggggaaaggggaaaaatggagggggaaatactgaactttcaactcatcagtacatattcacaggttttgtctcgtataatgaaattacaagtttggctgcttcatgcctaatgataacaaaaaaaaaaaaaaaannnnnnnnnnnnnnnn

SEQ ID NO: 396163 - DNA, 890 bp, Oryza sativa
ggaaagcctccttggagtggtcttgaagggcctgctgcaatgtttaaggtgttgcataaagatccgtcaattccagacagtttatccccggagggaaggaatttctgagatgctgcttcagaagaaatccagctgagagaccaacagcaagcaagttgctggagcatccatttgtccacaattcgaataacttcaaccagcacagtgctttacattctcccactggacttaaatccaccgataccggtcacaatgcaagagacaaaaagtcctgtaagattgtttcatgcatgagggggaaaaatatgattacaactggtgaaacaagcagtgctagatctcccggttcattatctaatcgggtggcagtaggcttgacagccctgccaaatttggaaactcgtagcttatcccctacgccgatgagtttgaggtccagtcctggctctgcggcccatacacctagtatgcacttttctatcgcataccatcagcctagtccattgccaaggccaaatggaaaggaagcaataaatttgttcaccttgaagcatgacgagctgcctacctaagtcatcataattgaacattcgctgggtcttgtaaagtacttggcatgcgaaggacatcagcacggtacgatcgcaatagcttctgaaacctgtaatgtttgttttcaaggaaatgatggcgtttcctttgtaagatattatttagggttagctgtaggttaaactaatggccctgattgttgccaacaggtaggacactagggttgtagttgtagcttgtgttgtttttgctattgtgtaaccacaccacgatgtaatcattgttgattttttgaggcccagtaataatgataaagagttggcaaaaaaaaaaaaaaa

SEQ ID NO: 396164 - DNA, 469 bp, Oryza sativa
ggcggatcttctcgctgaaggagctacagtcagcgacgaacaatttcaactatgacaacaagcttggtgagggtgggtttggcagcgtctactggggccagctctgggatggatcacagattgcggtgaaaaggctcaagagttggagcaacaaagctgaaactgaatttgcaattgaggtggaggttttggcgacagtgagacacaagagcctgttgagcttacgtggctattgtgccgaaggcaagaacgcctgatagtctacgattatatgccaaacctgagcttgcactcccaccttcatggacagcatgcagctgaatgccatcttggttgggaacgaagaatgaagatcgctattgattctgcagaagggattgcatatcttcatcaccaagcgacaccacatatcattcatcgggatatcaagtcaagcaatgttctgttggacaagaatttccaagcacgg

SEQ ID NO: 396165 - DNA, 508 bp, Oryza sativa
cctcctgtgcctcaagaaatatgggtgaattcttccaccccttgatgttgaggggcattccactctcaaaattgtgagtaattattgatgattgttgctgttaagtttgttcaagtctgcaaatgtgggcgcactgtagattctagcggccctaatggtagacatccctgctgccgcgacaaaagaacccagcagtagagtatgtatagagactatagtcatcgaccaaaacgatgacccgaagaagaaatccagtctgtggcatctcatttttcatgttcccagtttgcctttgtaaaaccttttggattcgagccctctggaaagcagtgagagctcgtggcgttggattaagaaggatctgtgtctgactgtgtttacaagtggattggataattgttgctgcagaacatgacatcttggaagttaaaaatgttgtaatatgcaatttttttaaacttgcaattcgaatgcagtatatgaacatgatggtaaaaaaaaaaaaaaa

SEQ ID NO: 396166 - DNA, 406 bp, Oryza sativa
  unsure (1)..(406): unsure at all n locations
tggtttgctgctgtggaggaacacaagggcagaggcaacctcccaggcgatgcgcancgggtcacaccacggcagcgcgccgtaccgcttttgcaccgcagccgctcctccacggctgccatttctcccatgtactcgtacaccaggcaccccctctccacacacgctcccaggagcatcaccagatgcgggtgatgtatcttccccagaacctcaagctgcaaaattaacttcttaatactgtattacacttttgctctacatacatgcttggcatggcagttcaactatgctatgaatattaaaaataaggtgatatgatgtatgcctatcctaactgtttgttagtatgaaagcatataatttaattcgggtactagtacctctaaaaaaaaaaaaaaaaaaa

SEQ ID NO: 396167 - DNA, 462 bp, Oryza sativa
gtctgagcagaacgatgaagatatattgagcatagtacggaggcactgggaagagggagcaattgcagagatgattgatcattccttaggaagaaactacagtgagaccgaggtgctgaaatgtgtcaatattggactcttgtgcgtccagcaaaaccctgtagatcgacctacaatggcggatgtcatgattttactcaatagtgacactacttgcactatgccagctcttgcacctaggccagcatatttgatcgatgggacctctggttactcccagaccgtaacacaatggtccggcaggtagcagggggccgaagcagatctagcaccgttgttggcttgttgctgcttgctttgttttatattgtaagtgtatcagttctcaatttgtattccatgataaccaagttcaactaataaagagtaaatatataccattgaaaaaaaaaaaaaaaaaaa

SEQ ID NO: 396168 - DNA, 528 bp, Oryza sativa
  unsure (1)..(528): unsure at all n locations
tttgcccaagctcgccagccgttggcggcactcctgtgtgcaaatacgagtctggagtttagacccaagcatgagcattgtggtcaaaggcacctctcccctcttctccagcataaaccgccaccgccaccagccgttgctccctgagacctgagctccagattccaactgcttcttatgcttttacttccgagtttcaacatggatgtaaagagggatggaatttcttcatcggtccctgtcgttactgtttcatgcttgccaattggttaccatgccgtttaagtactggtcctgtgagctttacaatagatttttggtgtttacactcggagctttccttgtcattcctttcatgtgtgcttatgctgagtgctgtgctgccttcgttggtcggcaaagttgtgtttttagctgcccagcggtggtgatcaccgaataatcttgttctgagttgaactgtgacatgggaaggttctaaatctaactgttcatggcttgacnnnnnnnnnnnnnnnnnnnnnnnnn

SEQ ID NO: 396169 - DNA, 485 bp, Oryza sativa
  unsure (1)..(485): unsure at all n locations
cacggtggccgagatagcactcaattgcattgccagtgacacaagcagccggccctccattgaggacgtcctctggaacctgcagtactccatgcaggtgcaggacggttgggcaagcagcgagagcctgagcctgagcaccagatcacagggatgagtaagcacaaaaaagaggggcaatttcacttctccgggtcaagcaaaaagatgcaatttcactttcagattggttgcgattttgctgtaaaagggtgagtttgttgtgctgtttcgttccttttcctgcgattttgctgtgggagaggtgtgtgtgtgttcgtcctttttccttgtgtatagaagttctcttgtttttttcctcttgttgctcaaagttgtaacattccagctagagcaattaagaccaaaattattggaccaatattacttatggtgatctggggacagcatttacatctccaccaaacgaaaaaaaaaaaaaaaan

SEQ ID NO: 396170 - DNA, 585 bp, Oryza sativa
  unsure (1)..(585): unsure at all n locations
tgatggccttgctgaaagatggaaggngtggcagaagatagaantagtacagcaggaccgtggatcttggcctgtatcagaatggttggactgttgactcaactgagaacctccatgcggtcgagttatcagggccaaggtgatgaatgctcaccggtaactttctgctgattcttgtacatcggaagagcaattcgtactgatcaccctagtcgaatcaccatctgttcatatttgtttgatgtataatgctttttcttgctcgacgcacaaccatggacattgccatattggtgccacggaaacagcacaacccgaggaactagtgtcctgagtggttgctgcaacaatgtcccagtatgttaaacctacaatttagtaggatggaactgggtatcatttttgcctcctttgggaaggcttcagatgatgcaattgcccatggtgtacttttatttgggcatttcgttatgtctgtgtttcctgtaaaggatatatacctagttctgaatcaaatgtaccttctgcacagagatgtaatctttggtaagaatcgcttctctttttaaaaaaaaaaaaaaaaaa

SEQ ID NO: 396171 - DNA, 664 bp, Oryza sativa
  unsure (1)..(664): unsure at all n locations
ccttggttcaaaaagggttacaaacccgcctgtatttgaccgagaaatatgaaactagttttgacgatgtcgatgctgcttttggagactcccgaagaccggcatgtcaaagaagaaactgaagntcagcctaccnctatgaacgcgtttgaactcatttcactgaatcaggcactgaatctggacaatttgttcgaggcaaaaaaggagtataaaagagagacaagattcacatcacaatgtcctccaaaagaaattatcaccaagattgaagaagctgcaaagccacttggatttgatattcaaaagaaaaattacaagatgcgcatggagaacctgaaagcaggtagaaaaggcaatctcaatgttgcaactgaggttttccaagtagctccatccttacatgtggttgagctcaagaaggcaaagggggacactctggagttccaaaagttctacagaaccctgtcgacccagctcaaggacgtggtctggaagtgcgacggcgaggtcgaaggcaacggcgccgcggcgtgaacgtggtttttgccatggctttcggggcaccggttcttcgtgtacatagctgctctgccatcatcaatggggtgttcgccgtagagtagctttttgtaacaagagaaaaaggaaaaaaaaaaaaaaa

SEQ ID NO: 396172 - DNA, 367 bp, Oryza sativa
  unsure (1)..(367): unsure at all n locations
tcttgcgaagataaatattcagttgaatggaaatagagagttttcaggcctagtttctgtacattactcatgtggagataaaaggctgtatagttcagaaatcaggatagtagcagggcagagcttgagctgtggagtattcaaggatttaatgagatgagctcagatttggttccatactaggtttgtctgcatttggatttgtgatgtcgtctctttttcagcttgtcagtttgagttcatttgtgattttctttgttttctttttggtttgagttatgattagttgtttggtaggaactgttgatgtatagattcagactacatttagaaatgcatttgttgcaatgaaaaaaaaaaaaaanaa

SEQ ID NO: 396173 - DNA, 400 bp, Oryza sativa
  unsure (1)..(400): unsure at all n locations
taangtggcgaatgaaggggcacggttggaaataccagatggacctctcggaagcctgatagctgattgctgggcggaaccggataagcgtccaggttgccaggagattctcacccgcttgcttgactgcgaatacaccttatgttgagataatctgcctctggtctgtatagcggttttagaggcagcgaattggttcggcttatacatcgtttctttttcccatttctcatcattttgacatcgttgatgatgtaaattggcaccctgtactataataagcaagcctcaaagcatctttaatgttacaccattggtcgtgtgaccnttttcnnnnnnnnnnnnnnnnnnnnnnnnnnnnnnnnnnnnnnnnnnnnnnnnnnnnnnnnnnnnnnnnnnn

SEQ ID NO: 396174 - DNA, 688 bp, Oryza sativa
  unsure (1)..(688): unsure at all n locations
aantggctnnccngcacgccgttcaccgcaaaagccgacgtgtacagcttcgggctcctntcttcgagctcgtctcgggccggcggaacagcaccgcgccgtcgtcgtcgtcggagggcggccctgggatttacttcccggttcatgccgtggtcaagctaaacgaaggcgacntggccgggctggtcgacgagagggtggccaaggatgccgacccgaaggaggttgagagactctgcaaggtcgcgggctggtgcattcaagacgaggaaggcgaccggccgaccatggggctcgtcgtgcagcagctcgaaggcatcgccaacgtaatgttgccgccgatcccttcttcggcttcatatcctggcgattgagaacgaatgggtcagaggtgttccagaggatgagcgctgctcaaagagcggtagtaaaccagaaacagaagcaatagaagcaatgtagaactgaaaagaatctgggagcaccctacagctgaagtgaagatgcagcgtcagatatgaaaatgtagttgtaatgtcagcatagttgatatttcccgtgtggatgtatagccagtactgtactgcaactgttctgtaaattccttaaattccggaaacaggatcagacaagtaccttctctcgttttgttaccgccagnnnnnnnnnnnnnnnnnnnnnnnnnnnn

SEQ ID NO: 396175 - DNA, 471 bp, Oryza sativa
  unsure (1)..(471): unsure at all n locations
cggaaatgctgggatgcaaatcctgataagcgtcctgatatggatgaggtggtgcagcttctagaggctcttgacacaagcaaaggtggtggcatgataccagatggtcagtcatctggttgcttgtgcttcacaaaggctcgtggtccatagcttccttttcgtgatacagtcttcccttgaccgcgttttgcccatctacatgactgggaaaaaccatggcatatgcttctctttgccacctgtgcagtttggcgcttacaattccccatggctccttgccatctttgtacgttcgttgcagttgtcatatgggcctttgtggtcaacagcctttttctatagcggtgtgatattgtaacagtaattcttgagagagttggtgacactccgtcacatgtattatactagagggttatacacacacataccgggtgcgtgccttcttgataaaaaaaaaaaaaaaaaaan

SEQ ID NO: 396176 - DNA, 461 bp, Oryza sativa
  unsure (1)..(461): unsure at all n locations
ggtcggtcaaacatcgacaactcccttgaggaaancaaggttaatctctttggatgggcatggancctgtatgaaaaggagcaagctctagaaatcgttgncccaagaatcaaaganttcagcagggatgaanccttgagagtcatccatgttgcactcatgtgcacccagggctcaccgcaccagcgacccccgatgtcaaaggtcgtggccatgctcaccggagacgttgaggtggctgaggtgatcatgaagccgagctacatcacggagtggctgcacagggaaggggacagcagctacttcacaaactacgcaggatctgccacccccgagttcagtgggcacaagagagtgaactttcgtttatcagttagtaacttgtatattcaaagttaataatagaattacttattattctgnnnnnnnnnnnnnnnnnnnnnnnnnnnnnnnnnnnnnnn

SEQ ID NO: 396177 - DNA, 596 bp, Oryza sativa
  unsure (1)..(596): unsure at all n locations
cgcaggacgcgcgcgaaaaccgcgtcgtgctcgtcgactgggtgctcgaccggtggcgcgccggggngatcacggacacggtggacccgcgcctgcacggggattcgtcgagagcgaggcgagcctcgtgctgcggctgggcctgctgtgctcgcacccgctgcccggcgcacggccggggacgaggcagcttgtgcagtacctggaaggcgacgtgccgctgccggagctgtcgccgacgtaccagagcttcaacatgctggcgctcatgcaggaccaggggttcgacccctacgtcatgtcctacccgatgacatccaccagcgcaggcaccttctctgacctctctggaggtagatgatgacccgttcccatcagccggatgtagttaatcagtacctaactagtatcatcctgttttgtttaagatcagaactttggtgttgttatgtttatatctatgatgtaaagtggtgttacgagaatagctcagtgttcagataagagctgagaaataacagatctgaaattaaacatttcgggctttacctcccactataaattttctcctctgatctaaaaaannaaaaaaaaaa

SEQ ID NO: 396178 - DNA, 355 bp, Oryza sativa
  unsure (1)..(355): unsure at all n locations
caaagacgtatgcacgtnaaaccgtttcttcgcctgtatagcggccggcaccgtgcacacgcgcgcgccttcctcgatcgatcggtcggccgcgagctagcccggccggccatggcggcggtaccggagtggccctgcggcacggcgccgggaggccatgccggcggtcggcgtgggcacggcggattcggcggcgacgtcgccggagacgaaaaggggcgccgcgctggcgcctgcgaggtgggcttccgccacttcgacaccgcggcgctgtacggcacggaggcgccgctcggcgaggccatcgcggaggcgacccgccgcgggcctcgtcgcctcccgggaggaggtgttc

SEQ ID NO: 396179 - DNA, 684 bp, Oryza sativa
  unsure (1)..(684): unsure at all n locations
gacccgggaggcaggcgttggcgctagggctgggagccttgacgcgcgaacctcgggtctgattctcgccgttccagccgccggcgccggaagtccaggatccctggccctggttgagttggctcctttcttgccgctgccgcctgctactactctgcccaagtgtgtgtttagggcagagtgagcacgatatcttctatctgatagacaagggcgatgccttcgattacatgtgataaggttgttctggataatttatatggagaaatagccaagtctgtggtgacgattaaaagatacaaccgaactgggcttgttaactttgccaccgggtttatcatctatgcaacaaggtctgaagttctagtatgcacagatcacacagtacttaaacagggggaagacacatatgtatattacagtgatggtactgctcgtcaagcatttgaattcattaaacgcacaccatgtggacatgcaattttattagtatctgtacaacctggcgaacgcgcccagtatccggtctcattcagtacagtacaagcaaaaagagaggagatttgtatgattgcacgggtcaatcatgacggagatcctnggatttatgtccggcattgtagtnggccccgagcngcaaaataattcttgcgatcaggaagagttatcacttagtcatgagga

SEQ ID NO: 396180 - DNA, 413 bp, Oryza sativa
gcatctgaagttttggacttgcaacacactctgctttcaagttctgaactagcattctactctgttctagctgactaggtcacacatggctatcaaggatgagcagcagccactgcacatcctcttcttcccattcctcgcgcccggtcatctcatcccgatcgccgatatggccgctctgttcgccgctcgtggcgtcaggtgcaccatcctcaccacccctgtcaacgccgccgtgatccgctcggccgtggaccgtgccaacgactcgttccgtcgcaacaacggcggcctggcgatcgaactcaccgtcgtgccatttccggacgttgggctcccgccgggcttcgagagtggcacggcgcttacgacccaggacggcccgtgacaagtttcttcctttgggaattagg

SEQ ID NO: 396181 - DNA, 208 bp, Oryza sativa
  unsure (1)..(208): unsure at all n locations
atcatgagagccatcaccgcccgtggcaaagcttaaagaaccggagtgctcaccccccttctgctctgtctcaccatgaccatgtgtcatctcccagtttaagctttcttgtaggagaccttggtgtntgccgtggctctgaattctgaagtaaagatatagccatgcaggcagccaagataaggaatggctccttggaacaaccnaa

SEQ ID NO: 396182 - DNA, 550 bp, Oryza sativa
  unsure (1)..(550): unsure at all n locations
tacgggtggtgcgcctcttgtctctctgtgctgctctcactatcgatcgacctctgctgctgcctcgctgtcctctgctacgtgagctcggccggctcgggtgtcgaggacgatcgaggatggggtcgctggggcggcggccgtgggttggtgggttgacggcggcgatgatttttgctgttgctgtgtgcggtttctgcttcagtggggcgtcggcggcggcggcagcgccacgtntccggcgacaacttcgagatcaccggagccgaggatcacgtcaagacctccgccgacggccagacgtggtacctctacctcgacaacaagactggcgtcgggttccagacgaaggagaggtatctctttcgggtggttcagcatgaacctcaagctcgccggcaacgactccgccggcgtcgtcaccgcctactacatgtgctccgacgtggacgcggcgccgnaccngaacgagttggacttcgagttcctggggaaccggacgggtgaacctanatcatccagaccaacgtgtaccgnacggcgtcggcgg

SEQ ID NO: 396183 - DNA, 597 bp, Oryza sativa
  unsure (1)..(597): unsure at all n locations
cagaggtgagaatggggaactacgagttggagttcggcgtgcaatgagacaacaagctaatattccatcttcggtcatatcaagccacagtatgcatcttggtgttcttgcaactgcatggcatgcagtgaacactggaaccatgttcactgtgtactacaagccaaggactagtccatctgaatttgtggtaccacgtgatctgtacaaggaatctctgaaacgaaatcattcaatagggatgagattcaagatgacatttgaaggcgaagaggctgcagagcaaagattcactggcacaattgttggagtaggtgattctgacccatctggttgggctgactcaaaatggcgttcccttaaggtgcgatgggatgaagntgcttctgttcctcgntctgatagagtttctccttggcaaatagaacctgctaacagccctttcnctgtcaaccctcttccagcacccccgaaccaagcgggctcgtccaaatgttttagcttcctcacctgacttgtctgctgtaaacaaagaagttgcttcaaaagtcatggcaaactncgnagcaaaaatnggttcttnccaaaggggccctt

SEQ ID NO: 396184 - DNA, 617 bp, Oryza sativa
  unsure (1)..(617): unsure at all n locations
tgctgcattcgggggttggatgaatccatgggcaagtaagaaggcacatcaggttattttacatatatgatgtcctctcatctggctcatctgcatccccagtcaccttcttcttcttctgatagatttgcacttctccatcttcctcttcttcatttccttcttgttgctcctttcctcctttaatttgtccagtatagcaagaatcctgcttccccgctccatggactcatcctcgatgaaccgtatctcaggcgtgaggcgcagcttcatccgcttgcctatttggctcctgacgtacttagtcttagccttgagcccagcaatggccaccttcttccccctctcgtccccaaacacggagacatacaccttgcacacctggaggtcgttggagagctcgacgtcggcgatggtggtgagggaggagaggtactggtcggcgccgagcgcggcctcggggaggacggcgcgctggaggacggggtcgcgggtgagcatgtccgcgagctcccgctggatctgcttcgccaccatccgcacccgccgctccttcgccatgcaccgcaccacgcgcagaccgacggcgacgagggaagcggccgcaacgngtggag

SEQ ID NO: 396185 - DNA, 444 bp, Oryza sativa
  unsure (1)..(444): unsure at all n locations
acttcagctagaaatagaatctcatcgacagaccaaacaagaagttgtatgtctgaataaacgcatggacgacatgcaacaacgttttaacataatggagcatatggttatgtctcaaggtgtgcagaatatagaaacaagttcccatcatgcttctaattctcgacatgctgagagcccaaggagtccagtacttgaagagctgcatcctaatgagcctaccaataggcacttgctggaggagcctcatgctgagcctaccagtaggcacttgggataatatcctatcgggtgatgactttattatccgcaaaaaagctataacgccaagggtgccctcaagaaacacagccacaggaaggccatgaangcaccattgcttgaagggaggaaaatcttgtttnggtaaagatgtttatctnatattgctgtcttgaggatctt

SEQ ID NO: 396186 - DNA, 432 bp, Oryza sativa
  unsure (1)..(432): unsure at all n locations
atccatcgatcgattgatcaaatcttgtgtgatatagcactagtttgatgcgtgcgagatgggcgggatagctcgacgacgaggaggaggagatcaaggtggtgttgctgctgctgccggcggcgacggcgaggcggcggcgtccgggttctccagcggcgattcgtcggcgacgagacgctgcggtcgccggcttcgtcgagcctgaccgacgatggcggcgaggtgacgtcgtggacgtcggctgacggtggtggtggtggtgactactgctcgttttcgtgttcgtcggagtcggagttggagttggagtcagacgacgacgacgacgaggaggaggaggagatgatgcagctggatggttgccgggcacnccggccgccgcttccttaccgaagcttggccgcgcccttgcttggcaantttccctct

SEQ ID NO: 396187 - DNA, 429 bp, Oryza sativa
  unsure (1)..(429): unsure at all n locations
nccaagaactgtataccaccacgcatcaatcacacgccgcacgccgacgccgattggttgatttgattgattgattgggcaagaggaggaggaggaaggggattgtttgctgctgctgctgctccagagctcgccggagccgcggtggctgcagcgctcgacggcggggaagaggggtcgcgggcggcgcggctgcactcgttcttcgcctcggtgatctccgggatcttcggccagggcgaggaggaggaggaaggggagatggcgacacgcagccagaacgtcgctgccgctccgcagccgccgcagaacagaggcaatnttgccgctctgggaaagcagaaggccgtcgtggtcggcaggcccgacgcgaagaaccggcgagcccttnggagatcggcaacgtcatgaacgtccgctaccggaagg

SEQ ID NO: 396188 - DNA, 384 bp, Oryza sativa
  unsure (1)..(384): unsure at all n locations
gcgggccgccgcataccagtaccacaaaccaaacaagatcatggggagcatgagcacaccggcggcgagcgccaccacctcgaacatcgaggacaacaacaacggcgggcaagtgctcctgttgccgttcccggcggcgcagggccacaccaacccgatgctccagttcgggcgccgcctcgcgtaccacggcctccgccccaccctcgtcaccacgcagtacgtgctctccaccacgccgccaccgggggaccccttccgcgtggccgccatctccgacggcttcgacgacgccaacgggnatggccgggctcccggaccccggggagtaactccgaacctggaggctcacgggtcgccgangttggggagttnctcctttcc

SEQ ID NO: 396189 - DNA, 389 bp, Oryza sativa
aaagagtcaacctactcgatttcctgatctggttggcatgatcaaagagctgtgcagcatcgaagtatccagctttatacttgacgccgaggttgtgggaatcgataggaagaaaggaaacaaactgatgtcattccaagagctgtcttcaagagagagagggagcaagcactcctcaattgcaattcagaacataaaggtagacatttgtgtgtttgtttttgatatcatgttctgcaatggacaaagcctattgaactgctcacttcggcaaagaagaaagtacatccacgacttgttccaggagaagccaggacattttgagttagctcagcaacttactgtagaagcagatgaagcttctgtggataattctaccactttgggga

SEQ ID NO: 396190 - DNA, 350 bp, Oryza sativa
cctctctcatccatttcaattctctctcttgacacagctacaagacaagccacctcctccctccctcctctactgaaccaagaagaggagagagaaagtagaggagagggagacaagcagacagacagaattgcctgccaagaaacgagatacacacacatctagagagagaaagtagagagagatcaagaacaagaacaagatcaagaagaggagatctgtggcgatggggatgaggccgggttgggtaggcgggctggtggaggagagcttcttcgtgggttgcccagcgcacgagagccggatgaagaacgagaagaacatcttcttgccttgccttcttgcaccag

SEQ ID NO: 396191 - DNA, 336 bp, Oryza sativa
  unsure (1)..(336): unsure at all n locations
ggagcnagcattgaagcatacgtatatccatctccagaaactcgatcaagcatactagctgagacagatcgagtcacctagctatttgagcaaatgggagctgtcaatggtgtttgctacggtgttcttggcgacaacctcccgccgcggagaggttcgtgcagctgctcaagtcccaaggcatcggcgcgatgcgcatcctactacccggacaaggaggccctcgacgcgctccgggcagggcaatccgccatcatcgtcgacgtcggcgacacgggcgcggttggccaacctcgccagaaacccctccgccgccggggaacttgggtcccggga

SEQ ID NO: 396192 - DNA, 814 bp, Oryza sativa
  unsure (1)..(814): unsure at all n locations
ctgagccctctgccgtcgacgataaggagggctcacgtggttcatcccgatcaccncagttcagatcgagtggtcactgtggtcaagggatgtcgaagaagacattgttccaacttgcagagaacttggccattggaattgtggcgtacagcccgctagggagagggttcttctccagtggagctaaactggtcgatgaacttcctgacgacgatttccgcaagagcctacctagattccagccagagaacctcgagaagaacgcggcgatattccgagaaggttaatgccatggcagcgagaaagggatgcacatccgtcgcagctcgccactggccctgggtttcatccacccaagggagcgatgtctgtcccataccaggaaccacaaagatccacaacttcgaccagaatgtgggagcactgtcagtgaagctcacacctgacgagatgtctgaacttgagtcgtatgcttcagctgacgttgtgcaaggtgacaggtatcatggtacttttctgaacacctggaagaactctgaaactcctccgctgtcatcgtggagatcaggcaattaattagtcagagagattgtcatctgctgggagtttgatggagttttattgtcacaaatatagatagcttggtgtatcaatcacatgtttattatgcaaataaaagtttgtatggattgataatgttccagtgtttttgccatgtggcgcacagntgggtttgtatgatttggatgatatatagtatcttttgtaagttgggtatatgatatctattaagcataggaatatagaaaaaaaa

SEQ ID NO: 396193 - DNA, 788 bp, Oryza sativa
cctcttctcctcccctaaaatccccaattccgaccaaaccctagccccccccaaatcgcctcactccaccaccccacgcttccttcgccgctaagtatatccctcccggcgaccgcgaatcggatcttgagagtgagagagaggttgggggaggtggatgagagggcggagatgacggtgatggagctcaagaagctgccgctcgggttcaggttccaccccaccgacgaggagctcgtcaggcactacctcaaggggaagatcacggggcagatcaggagcgaggccgatgtcatccccgagatcgatgtcttgcaagtgcgagccgttgggatctccctgataagtctcttgatccgctccgatgatcccgagtggttcttctttcgcgccgaaggataagggaagtatcccaattgggaagcaaggtcgaacaagggcgacggaggccgggtactggaaggccaccgggaaggacagggtgatcaggtccaagggtgacaagaagaagcagcaagtaattggcatgaagaagacgctcgtgttccaccgggggcgtgcgccgaaggtgagcggactgggtggatcatgcatgagtaccgcaccaccgagccggagtttgagtccggtgagcagggaggttacgttctctaccggctgttccgaaagcaagaggagaaaattgagcgacccagtccggatgaagtggatagaagtggatactcacccactccttctcgttaactcctgataacatggaaccaattgaagacggaaatacaccatta

SEQ ID NO: 396194 - DNA, 554 bp, Oryza sativa
  unsure (1)..(554): unsure at all n locations
ctataattttgttgacggttcgtcggaatcatatgcagnagaaggnagcctaccaccttcaggctatttcatgggagctggatcagatcgcagtttaaagatcacggagaatgaaaggaaccccactatgcttgcaaatggatgcttgccatacaacacccaggctcatccattatctggccagattctacctaagggtgagctccctaacaatcttctggatcttcaacagctacagaacagcagcaatctgcgaagaatttcaattcccccaggggttctttcagtgcaattcaacatctgggacatttgattgcgaaatttgggtacacctgggtcttgcagaactggcctcatgctttgtccagttcaattgatagcaatggtagtgacatttctgcttttcttgctgatgtgcatgccgtttcttcaggccccgacggttgtgttcagcattccaaaacgtttcctccttcatggggacccagtaaatctaggatgctttcgggtttccaagggggcacaaaatgtttgctaatgtttgaccaaacaag

SEQ ID NO: 396195 - DNA, 418 bp, Oryza sativa
  unsure (1)..(418): unsure at all n locations
ccaattatcatgtacatgaagtgatcaaatctcacccacaagcatatctctcgcaccattccaccctatagaaacgagataacaagacgctgtttgcactagctatttgacagccgacaagaaccagttaggtaaaactcagtaggatgcaggtttgaatggctgaatgccaacctctgcaactgcaagaaggcaagaaactgcaagagctgcagccatacgatggctgcaatccttcagtgtacagaggcccaattctgctgccccggcaggccaactcggcgccgcggccgtgccgccggagatgtcgtcctcgtcggggtcagggagaagcgcgacggaggcgagagcnttgaagatccacagcgaggctgaacggcggcggcgagagagggtcaatgctcatctgacaacactt

SEQ ID NO: 396196 - DNA, 714 bp, Oryza sativa
  unsure (1)..(714): unsure at all n locations
cccacggtccggantntccgggttcttgatttcgtcctcaccacgccacgccaacggatttgcgtgcttccccgcgaaggatttccgcgcaatcgagtggagagaggggagggaagagattgattaagaggaggaggacatgggggcgttctgctccaagcagaatccgtcggggcagcagcgcactgctcagaccacagcagcagcagcaatgccgcgccgaagggaacaatcggttcgccaagttcggcgatgattaccataccctagagcaggtaactgatgctcttgcacacgctggtcttgagtcatcaaatctgaattgttgggattgatttcaaccaagtccaatgaatggacaaggcagagtttccttcaacaaccagagcctgcattctctgggccatatctcaaacccatatgagcaagccatatctatcatagggcaaactctttcacgatttgatgaggacaacctgataccatgctatggatttggtgatgctactacacatgaccagaaggtatttagcttctatcctgacaacaaaccatgtgatggttttgaacaagcacttgatcggtacagagaaattgttccacaactacggttggctggccccacttcattttgcaccgatgnattgagacagctattgggattgtgggtagtaggtngtggccagtatcatgtcctacttaattaattgcagg

SEQ ID NO: 396197 - DNA, 334 bp, Oryza sativa
  unsure (1)..(334): unsure at all n locations
ggcggcgctcctactcccagcgcggccgtcggcggcggcgccctnaccgctcttgcggcggggggcggcttctncttcctccgcgcgcgctcccactcccctccctgcggggcgcctcancggcggcgtgctgagcgctgtgcggcgccttaccgtggcggcggcgggctcgtcgtcgtcgtcgtcgggccctctctacccgacgcctccccccaccgagcaggacatcgagcgggccaagttcgagcaggttgtcaagagactgggggaaaacagcgaggtatttcaagaatttgggtactcttgggttctggtcccaattggtgtccacagt

SEQ ID NO: 396198 - DNA, 469 bp, Oryza sativa
  unsure (1)..(469): unsure at all n locations
gggcaacatcgcgagcagcggcggcgctagccaccgtccgccgccgccgcactctcgaagcctatagacacggggtgccgcccccgtactaccacagctaccctcgtccgccccccggcgccgccgccccgccgccggtgccggtgcctgcgcacgtggagcggcacagggccgtggcggtcagcgtcggcgtcaacgtcaagggggacaccctgcggctggtgcccgacgacgacgacgacgatggccgcagcctactcctcgccttctccttcgacgccgatngccccggaagcataactgtctgcttctttgcacaagaagataagtgtgccttgaagaccgcaaaggaaaatttgcttcaacctgtgaccgtgccttttaaggaaggtcgaggtcaggngttcaagcaaccaagtgggtcgggaatcgatgtctctcgttttgaggaatctgagtaactaatgtt

SEQ ID NO: 396199 - DNA, 724 bp, Oryza sativa
  unsure (1)..(724): unsure at all n locations
gaaccagggacgctgctgatagcttgaggaagcttagccggcttattgaaaaatctactgctcccaaccagttgcaacttatcgaaagccttgaatccaagctatcaccaaggcaaaaagaagctctgtattctgcatatgttcttttacncctccacgcgaacaaaattgatcaggcacatgagtttgtcagtggactacttggtatgtttcaggacagcacattccctgttttgcttcaagctgcagttcatgtgagagaaaagaaggtgcagaaagctgaagaagttcttagccagtatgctgagaagcatcctgagaattctaaaggagtcctcctttcgcttgctcagatcgctgccagtgcccaatcattttcagattgctgctgattcatggcctaaaatagttgacatccagcacaggcctgctacagtcgctacactagtagctcttaaagagcgccttggtgactctaatggtgcttcttctgtgcttgattctgctatccagtggtggaagaattccatgactgaggataacaaattagaggtgttcatgcgggaggctgctacatttaagctcaaccatgggcgtgacgaagagggcctgccaattgtatgaggatcttgtttaagagctttggaagcgcagaagcgtttgcgggggctagtagcaacttcagcgcgcaccaaccttgagaaagctgaacagtatgagagga

SEQ ID NO: 396200 - DNA, 417 bp, Oryza sativa
  unsure (1)..(417): unsure at all n locations
ctcgcaaccaaccaaaccaaccaaacccccaaccaagcgagcaagccgccttcgccgggggggcccccaccctgacggcaaccctagccctccgatcaccggcgctgagactgatcccgccgccgtaggaggaggaggaggagggtggtggtggtggtggtgatggaggggggcggcgggggcgggtcgctgccgccgttcctgagcaagacgtacgagatggtggacgacccgtcgacggacgcggtggtggggtggacgcccgccggcaccagcttcgtcgtcgccaaccagcccgagttctgccgggatctgctccccaagtacttcaagcacaacaacttctccagcttcgtgcgacaattcaacaactatggctttaggaaagtagattcagaacaattgggatttncaaat

SEQ ID NO: 396201 - DNA, 513 bp, Oryza sativa
  unsure (1)..(513): unsure at all n locations
aaaagcttctcgaacaccacacggttgggaagagagaggtgagagaggaggaggaggcggactcgccgaagccggaggttgccggaggggcgggcggcggcggcaatcgcgctcttctccttcgctgcttctccggggaaagaggcaaggttcatcaatggcaactccaaatacctattcagtccatatctcctcagaaacccacaggattgaggcctggttggcatctgatgaagctttagctaggcagttgcaagaggaggagaatgcacatgatgctattgctacaagagaatttgctggtaacgcatccttggaaccatcgtcaccagctgttgagtacagacctcccaataatgcagctcaggttgcaacggaagacaatgttgaccctgataatatgtcttacgagcaactacaagcattaggggaagcataggaaatcaatccagaggatttatctgatgacctgatatggctatttggngccttttaagaacaaatgcagcttcc

SEQ ID NO: 396202 - DNA, 794 bp, Oryza sativa
ctgcatgattgatgatggcctgctagatgaagtgtgtacatatatgatcgagaggccacttatacccaagggctgcggcaggccattggtgttcgtgaatttgatgagtttttccagattttattttgcaaggaaggaaaccggtgagataaagatggattcctgtacaactatggcaggtctccatgatgataacctgaagggcttattggatgaagcagtctcacaactaaaagcaaacactcgcagacttgttcgacgtcaaagacgaaggctgcatcggttgaataaatattttgagtggaacttgcgtcatattgatgcaacagaagctttctatggtgccactgctgactcatggaacatgaaagttgtgaaaccttgcgtggatattgttagagatttcttgtctgatgatacaattttggcaagcagagatgggttctagtgtaactggaagccctaggatgtcttcaagagagttgtggactcaatatgtttgtgaggcctgtgataaccgggtacttcggggaacgcatgagtgggagcaacacaagcaaggccgatgccaccgtaaaagagtacaacgtttgaaacagaaggctagtacagtgatatcattataggcaattagcactgtttgcactctcggtgttcatgaacctttcttcattctctgcaactgtccccatgcatcctgtttgtcaaattggctgaagactacaccattcagaaggtagcaagcagcagatatatttgttaatagtaccttgctaaaaaaaaaaaaaaaaaaa

SEQ ID NO: 396203 - DNA, 465 bp, Oryza sativa
  unsure (1)..(465): unsure at all n locations
ccccgaacagctttgccgggagaaagcgaggaaggaaggaaggagaggagggagccatggagaaggcgatcaacaggcagagggtgcttctcgcccacctggagcccgccgcgagtcccgccgccgccgcgccggccatcaccgcgagcgcgtgcgccggggggacagcgccgcgtaccaccgcggggcgtgcttcgcagacgacgtcgtcatcgtcgctgcctataggacagcaatttgcaagtccaagagaggtggtttcaaggatactcccgcagaggacctcttggttccagtattcaaggctttgatagataaaacgaagttgaaacccaagtgaaagttggtgatattgttgttggtactgttttagctcctnggtcccaaagggcaattgaatncagaatggctncattttatgcttggattcctgataccgttcctcttatgactntaacaggcaat

SEQ ID NO: 396204 - DNA, 477 bp, Oryza sativa
  unsure (1)..(477): unsure at all n locations
gccggatgctggcgcatcgcacgcacagagggagaggggggtgaggggatcacacctttctctcgctttctctctcgtttgcnagcggcggcgcgggcgctcgagctgacggtcggtagagacggcgccgggcatctggaggttaggaggctgatctagtgagattgtttttcaacggaccgcttcctgtgttgtcaagctaggatatggacaccaacaacggaaagggagttgtagcctcatggacatcatccatggtcatctttgatgctctccaatttggccaatctggtggctagtggcacaaggacatcggctggttttaagcaggtgcatctcaatgcatgtgctagagttgtgaatgaaaagttttcgacaacactcaccggggatcagattagaaatcatttgaagacatggcataagaagtttcaaaagattagtcgtcttaggaaggtgagtngagctatttnggnc

SEQ ID NO: 396205 - DNA, 421 bp, Oryza sativa
  unsure (1)..(421): unsure at all n locations
gggaagggagntngtatatgcgttggcagcgacgagcaggaacttcaagcaggcggccaagctgctgggcctggactccaagctggagaagagcttgctcatcccgttcagggagatcaaggttgaatgcacaattccgaaagatgatgggactttagcatcttatgttgggtttagggtccaacacgacaatgctaggggacctatgaagggtggaatcagataccaccatgaggttgatcctgatgaggtcaatgcgttggcacaactaaatgacatggaagacggccgtggctaatattccatatggaggagctaaaggtggaataggatgcagccctgggagatctcaagcatcttccgagctaagagcgactttacccgtgttttcacccaggaaatccacgganttgattggcat

SEQ ID NO: 396206 - DNA, 720 bp, Oryza sativa
gctgaagaggaacatccttgcaatgtcgtttgcaccgagggacacccatgaagctcaggtgcaattcgcgctggagcggggtgtgccggccatcatcggcgtgatgggaaagcaacggctgccttacccatctaggtcatttgatatggcacattgttcacgctgcttgattccttggcatgagtttgatggaatatacctagctgaagtcgacagaattctaaggcccgggggatactggattctctcgggtcctccgatcaattggaagacacactacaaggggtgggagaggactaaggaagacctcaaggaagagcaagacaatattgaggatgtcgcgaggagcctttgctggaacaaggtggttgagaagggggatctctccatctggcaaaagcctaagaaccaccttgaatgtgccaacatcaagaagaagtataagacaccccatatatgcaagagtgacaatcctgatgctgcctggtacaagcagatggaagcatgtgttactccattgcctgaagtaagcaaccagggtgagatcgcaggtggagctttggaagagatggccacagagggcattcgcggtccctccaagggtgaagaggggtatgattccagggatagatgcgagtaaatttgaggaggacaagaagttgtgggaaaagagggtggcgtcttacaagggaccttaccatagccgttggggttccgaat

SEQ ID NO: 396207 - DNA, 583 bp, Oryza sativa
  unsure (1)..(583): unsure at all n locations
ntanctataatgagaaacatcttgatgaggtttgctccataaatatagaaagattccggcgccaaaatatggggcaaagaaatcagagctctctttctcatctacttgcatcattctttcacaagtttttccgcatcgatgccctttcggataaggttatatcgacttacactggtcggttggagagaatccaggacaatccaagatggatggacaagtcatacagcttgtttgttgaagatccatttgagaaacctgataatgctgctagagcagtcggttcctttgagttccaagatattgtcaatgccttcagcaacgcgacgcaataagtttgtttctgatgcgcatgcgcttacttgaccgaaatggattattgtcactgctttgcacaacctgatgtttggatcaaaacttgggtggaagagccagtgccagccgttatacaaataccttagtgagtcctcatgacagattttnatgatatcttgactatgtggcacctaacccatacgatgatcatcatcaccagccagccagaggaggaagcaggtcaaggtcagagtccacatgggtatactac

SEQ ID NO: 396208 - DNA, 482 bp, Oryza sativa
  unsure (1)..(482): unsure at all n locations
agaccggccaccacttgcccactccctcgctactactagtactagtcctacactatacgctcccggatggcggacgccctggcatcgccaccgtcctcgccgccgacggagggacttcctcctccgcaactccgccgaccaggtgaagatcagcagcatcgaggcaagcaccgttgccctctacttctcggcctcatggtgcccaccatgcaggcgcttcacgcctaagcttattgaagcatacaatgagctggtctcccagggaaagaacttcgaggttgtctttgtttcaggggataaggatcaagaggcattcgatgcatactttgcaaagatgccatggttggcagtccctttctcggacttcgaatggccgtgccaaactcaataagcgctttaaggtgagaggcatttcacaactggtcatccttaatgcaacatctggtgaagtttatacggaagatggagttnaagttgtgact

SEQ ID NO: 396209 - DNA, 388 bp, Oryza sativa
  unsure (1)..(388): unsure at all n locations
nntcctcctcctccgccgccgccgccgtcgggaagtacacctgtgctctggttccggcgacaccgcgagcaaggagaggagaggtgggggtnagggagtaagggtgaggccggggttgggcaccaccagcaagccagccagcccccccgtccccttagatccgggccgggcgttctccggcgatctcacggccatggcgtcccgcgcctcttcgcctccctcctcaggtccaccgcggcgccgcgcaccccgtccacgcccggntgcctcttcaaccgcgccgtcgccgccgcctactcctcgtccgccccctanaacggccagggttttccacttnctcagtctgaaactgcttcacgtctggntttgttctccagtcccggcgaca

SEQ ID NO: 396210 - DNA, 645 bp, Oryza sativa
  unsure (1)..(645): unsure at all n locations
gctactataaaccgtataggaaaatctagtggtctaaatagcttcggcctgatgtggtgcaacggacttgtctgtgggccttcagtactttttctgacatatattcagggtgacctgaagaaggctatagaatttccctacctctattcccctgggtttcaggcggtgctgctattctcatgcatgctagcttttctgctaaactacactatcttctggaatacaatcctgaattctgcactcacacaatcgatgtgtggtaatttgaaggatttcttcaccgtcggaattggctgggttctgtttggtgggcttccttttgatctgcttaatgttatcgggcaaggtcttggctttcttggctctggcttgtatgcctactgcaagatcaaagggaagtagatacggatgtccagtgggggtctgaaggagagtagatattgaagtttattttggaggggccaatgtgccatactgaagtagagttcgtgctgtttgctcctgcatatgggagagaaattttgtaggttttcctgtatgtatttaacacttcagtcctcctgaatacaatttcgagtgaacagccattgttttacatttttacaaggaaatagaatataacaagatttcaaaanaaaaaaaaaa

SEQ ID NO: 396211 - DNA, 411 bp, Oryza sativa
  unsure (1)..(411): unsure at all n locations
gcaggttgaggagcactagacgctgtggagtggagggaggcggagatggcggaacagtagccaccatgagctcctcccactcccatgctcatggcggcctcctccccacctcccgccgccgctagcagcagcgggcgactcgccagggtgcgcctccacgacctggcgccctacgatggcgccgcgacccccgcctacggccgcgcgtccatgccctctccgcctccctcacccgccacggcgccgccctcctcgacctccccgacgcccacgccgccatcctccgctgcgccctccaatccgctcgcgccttcttccgcgccaacgaccaacccgccttctaactctaacgcgaaggggcagcgcaagtaaggacatccgatganggcggcggcgaacttggtcctgctt

SEQ ID NO: 396212 - DNA, 757 bp, Oryza sativa
  unsure (1)..(757): unsure at all n locations
cttgtgtattggttttggtcctaggacacgtggatgacaaagtttccaagcagttcatagtgttccagtctgttcattggagttatagggttcttgtatctncgatatgttgcagatccgaagatcttgtggacgtggtatgagccctacttgaaggatgatgaggaattctcccctggatctaatggtcgcatgacaaccatgggtgtttatntgcgtgatcttatacttggacagtactacttcgatagtcttcttccaagagttcctcttccagtaattcgtcaagtgacatccaatcttgagaagatgaagttgcccactaagctttctgggattactggagagtctaatcgtcatggatcagaagatactgcccgccggcctccttccgtgaaggcttctctgtcagtttcctttggacagcgtgctccgcatcgtgcatccacacgggagtcatctccagttcggaggacagtcacccatgatggccatcgtaaatcttcctcaccatctcgccgtagcggaanccgcgangttcctgatcgtgatcgatcaagccgtgaccgttctagtcgtgactatgaccgttcaagccatgaccgtgatcgtgaccattccagtcgtgactatgaccgtccaagccatgaccgtgaccgtgatcgtgaccgttccagtcgtgactatgaccgttcaagtcgtgaccggggatcatgatagagacatcagagactatcatcggngtgattgtgaaaca

SEQ ID NO: 396213 - DNA, 343 bp, Oryza sativa
  unsure (1)..(343): unsure at all n locations
atagctcgctcgctagccgggagacatggcgcccgcgacacaaatggcagctccaccacctcgcggcggcagttccgcgtcctgcgcaccgctcgcgtcgcaccgtcgtcgcccgacggtgtcccctcgctgcgccacgtgccgtcccgctcaccttcctggacgcgatgtggctcccgaccccgcccgtcgaccgggtcttcctctaccgcctcggcgccgcgacggacgacgtgaacgccgtcctgtcccggctggctgactcgctgtcccgggtgctccacgtcttctaaccgcttcgccggccggcttcggctnaattccggcaaatatcaaaacggta

SEQ ID NO: 396214 - DNA, 461 bp, Oryza sativa
  unsure (1)..(461): unsure at all n locations
agtcatctgacgagctgtatgaaagctcactgaaaggaacggaagaaacacctgaccttgttcatctcacgcatatgaccaacttgcaatcagcctatcatctaaggataggaattgcatccatagcctccaaaccgtacagtgactctgcgtggtacatgtggacgttatggcccttggcatggctgtcaatggtacttgcatggatttatgggtcctcagcatttgtcgttgagagaattaaactaaacaagatgaagatgcaaacatgggcattaccacgatacaacttccaatatggccttacgtgggagcgagacccactcaacgaccttaattgacaaggcaatacttggatgctgctatgaaagggggttaaagtgattagtctaggactacttgaatcaggcaaagcagctcaatggaaaccggtgaactatttangacagagtatccaaaat

SEQ ID NO: 396215 - DNA, 837 bp, Oryza sativa
  unsure (1)..(837): unsure at all n locations
gtcttctacataatggtcaggctaatgttccacttttctttggttatatttgtggatcagaagaaactgtaagcaaaatggaaaattacctacttcttgacctgactcgtaaagtatccaagttgcttggggccttagcttcgcaagaactgaatcaaggtgtttaccgtgcgggtcttgtccttgacatgaatagtgcttctcacgatttcaagtgcacaccctctacctctttagttggatatattttactcaatgattgctttacaaggttaagcatgaatctctttggatgttgggtggatggtgaagcagcaatagattccattcccttttgtcattctttggttcaagtcgcggttgctacaaacaatgaaaagctcaagcgatttattaaagatgatatgcttcctgctataatccgacgcctatatgatgatcttccatgtgcagttcaaaagaccatcagaaaagttatctcccttggatgaactcaatcaattgcaggaaagccacccaaggatctcttggttctatgtcaggagatctataaagtttacatacgatgtcagaatttggaaggtgaagaccaggatactgataacatagcatactggtttgatgattggttaacaaagcagaagaaagaactttgtgtaaaggcatcctatgctattcctgatgaatttccagctacgctgtggaattgggagtttgaagaagaatttcaaaggtatcttcctacatatcttgatgtgctgcatgaagttgatacaatggattgtcaagagtgttgttgtttngntagcgccaagatttttgngatcctgagcctgg

SEQ ID NO: 396216 - DNA, 439 bp, Oryza sativa
aaaattcctggtggaaacacgtccgtcgcccgtgacgaggtggaaacccaaaacctcgtcggcggcttccccaatcccctccctccgccgccgccgtctcggtctcgccggataaggaggaggaggagaggagatcgccggcgagtccctcccgaatgaacatactcgagaggatacgcggaggcggcgacagggcggccgtgggggaggggccgcgggagccggagccatgggtggagatttcggagtccatctctcggctctgcagcttcgacgccggcagagtctctgtaaaagttatccaagattcgagaccaatacatgataagatgatcggttctttcttgaacaaatttttttccatcaggtattccatacagtgtgaattagggttacctaacttacaaccaaattccgggggttcagaatttttttaggg

SEQ ID NO: 396217 - DNA, 507 bp, Oryza sativa
  unsure (1)..(507): unsure at all n locations
nnattctcttctcgctctcaactcgcatcgatttaatttctgttctcacctgtacatacatacatacgcacgcacgtacatacactcaatcagagagagattgttggtagctaggtagctgtggccaagaaagtgagagaattgggaggaggattggaggaagacgaaggggttgatggggatgaggcctggatgggtaggggggctcgtggaggagagcttcttcgttgggtgtcccgcccacgagagccgcaagaagaacgagaagaacatcttctgcctcggctgctgcgccacatcctgcccccactgcgccccctcccaccgccaccaccctctcctccaggttaggaggtatgtgtacaacgacgttgttcgcctggatgatctcgacaagctcatcgactgcttcttttgttcagccatacacgatcaacagcgcaaaggtgatatttcttaaggccaagcctcagtcgagccgttcaagggctttggcaacatctgntt

SEQ ID NO: 396218 - DNA, 422 bp, Oryza sativa
agctcacaggccattatcctgtcagtacttaagagagtgaagcacgcaacacacggttgctaatctccttagccctctcctccattggagctatagctagcaaacttttttttttactgagcaaattcagttagcgacgaatgaccatgaagaaggagatcattatcaggatttccgtgaaaaccgacaaatgccagaagaaggccatgaaagaggctgctacttgtcagcggggtgcagtcggtgacgctggccggcggcgaccggaaccttgctgcttggtgatcggcgagggcgtggacacgaacaagctgacccaagaagctcaagaggaaggtgggctccggttagatcgtcgagctgagggccctcggacacggttcggggcggccgccggcgaatgtttcccgggcggatgaacc

SEQ ID NO: 396219 - DNA, 632 bp, Oryza sativa
  unsure (1)..(632): unsure at all n locations
caagcctcgagacgacaagaatctcaagccaccctcccctcgccgctgcctcttccctccacccgaggggaaaaagcgagcaagcaaactgtgcggacaagcacggcaaggcaaggcaaggtgacccaccgccattggnttcttccgttttatccaggagaaaggaggaggagtactgggagataggagcaatggcggagtcgacggcggcgacggcgccaccgggggacgagccggaggtatggggaggagcaactccatcctgctccccatcctcgggatccttctcgtctacctgctgtaccggtacctccggccgcgcctccgcggcctgcggctcgaccgcctcacgtcccgcctcccggcgtgcctccgccggagcaggacggccaacaccatgactcccctacttcgcgccgatcgccgaccgcctcggcgcgctgcagccgtacctggcccccatcgccgaccgcctcggggtgggcgcgcagggcggcgtcggcgcaggggcgtacggcagggcggacgcgctcgtcaagttccccggcggggaggcgctctccgtcgccgccatcctcgaggcgccgggggaggtggtggccaagttcgtcgcacagnaccctgttaccgcg

SEQ ID NO: 396220 - DNA, 968 bp, Oryza sativa
  unsure (1)..(968): unsure at all n locations
cttcgcttcgcttccaaatcgcccgcaatttcncccccaaaaacctcccctccccccaccaccaccattaataaacccctcctcctcctcctcttcttcctcctccgcctcgccatctcaccgccaccgcctcctcactcactcacttcctgccacgtcattcgcgccatcgatcgcgtcgtcgcctcagctgcctagaggaagaggaggagtagagctcgtcgtctccgccgccgcagctggtgctcgctgttgatttatgtcgcctgctctacccccgtttctccatggttctgagctccagtcgccgccaacggtttcttcctgctcccttctcatcctcctccttcaaaattggtatacgaggggcgcaagaacacagcaaaatcccttcacgatctccagatttggatttggggtgaaatactttggctttcttcatttagactggtgacaattgaagatagcccccaaattgccttaagatttggtttggcttgagtggatcaagtacagaatccgaacttttgcaacctgacattcttctagttcacaaagtcggccagatttgagatttctctcggacatctctgtacacacaggagctctcttttgctccagttttaaacagaagttggacaaaggctctgtttctggttttttgagtttctgcgataagcttagagagcagacaacaaacttttgtcctgattcatctaaactcttacctgactgcaatcaaggccaattgtaatccaataatctctgatcttgttctggttgcacgttgagatgatggtgccctcttcacggaaagtccgtgttttctgctctgatcctgatgccactgactcctctgatgaagatgaccagaataagaaggaaaggagattttcaagggaaatactaattccaatggaaaactccaaggcatccaaacctgttaggnccttgtcaatgtggacaag

SEQ ID NO: 396221 - DNA, 503 bp, Oryza sativa
  unsure (1)..(503): unsure at all n locations
gatccatggagccggcgtcgttgttcagcttcgtgagcgcgatgataaagctggcgatgaagatcgccacggtggcgaagaaggctcgccagaaccagaccaagtgcctggagctctccgaccgcgcgcggcgagtcgccggcatcctgagcaactacaactacaagcccgcggctaccggcgaggcggcggcggcggcgacgtgggacatgctgggcagcctcaacgaggccctcgacgaggcgcacaagctcgtcgagtcctgctgcggagacggccagatgtacaggctcgtgggcagccgcgcggtggacgccaagctggacagcgtcaataacaagatcagcaactgcctcatggacctcctcgccgcccaaggcgcaggcacggcgaagaagattngatgagctgcaccttgtggttcgtggatcgncaatcaccaaccgtgcaagcaaattcgaacgccggccggtccgcgaaggataangatgaccagtcatcag

SEQ ID NO: 396222 - DNA, 389 bp, Oryza sativa
  unsure (1)..(389): unsure at all n locations
tgatttctccaacccatccaaaccaaagccgcggcggcgcgaggaggcagcgagagctagggtttggggcggcggaggggagatgtcgcggacgctggtgcagccggtggggcagaagcggctgacgaacgtggcggtggtgcggctccgtaagcacgggcagcggttcgagatcgcntgcttcccgaacaaggtgctgtcatggcggacgcgggtggagaaggacatcgacgaggtgctccaatcccacaccgtctactccaacgtctccaagggcgtcctcgccaagtccaaggacctcctcaaggccttctccaccgacgaccacaccgccatcttgcctcgagatcctcgacaagggcgagttccaggtnttcggcaaagagcgc

SEQ ID NO: 396223 - DNA, 412 bp, Oryza sativa
  unsure (1)..(412): unsure at all n locations
gaaagaaagcccaagtctgagttggaacttacttggaagggagagtagtagaggttgcgtcctactgctacttcttcctcctcgatcttcctctacttgaggagagagagagagagagagagagagagagagagagagagagagagagttagttttgggtggatttgtgatggggtcgaacgagcagatccaccgggacaagctcatcatcgacacggatcccggcatcgatgatagcatgacaatccttatggcgttcagagctccaactgtgcgagatcatagggctcacaaccatatttggcaacaccaccacaaagaattgcgactcagaatgcgctcttgctgtgttgagagagcaggacatcctgagggttccagttngcagagggcaagcgcaggagccttttca

SEQ ID NO: 396224 - DNA, 461 bp, Oryza sativa
ccaactctcccagctcgcgaggttttctagggtttaccgctcgctccccacctcttcccccacacccgccgtcttccccttccccacgcggcggcggcgtcgaccgatcggaaccgggcggggagaagaagatggtggcggccatcagggtgcccaggagccagcgcgccaagagggagctcctcaagcacgcgccgaagctcgttgagaccggcaagaagacgcttatcctccatggaaccaagaccagcgccgttcttgaactccgtgctcgcggatttgttccacctgaagcgtgacaatgccgtcaagtactccaagaaggaatgacaacatcaggccgttcgagagcggcggcggaacttctctcgagttcttctccctcaaagacggattgcagccttatagtgtattggttctcactcaaaggaagagggccaacaattttttttttggggagg

SEQ ID NO: 396225 - DNA, 330 bp, Oryza sativa
  unsure (1)..(330): unsure at all n locations
cttgcgatcaccctctcaccaccgctagagatcaccattgtgaggctccccagccggagctggaggttggagggagtggaggaatagtcttgctgccgccgtcgccattggggaagccgggtagccgaggagcacacgtcgaacacctgcgaacgtcgccgaccgctagccacctctgcttcgtccgcaccgcaccacgcgtcttcgcccttcgtcgtccgtccgttccatgaaattgtatatcggttagtcgtgaggcaacgtatgcagcttccaggaggtaaaggttgatcaagattatatcaagaataagaactttnctaagnagcn

SEQ ID NO: 396226 - DNA, 362 bp, Oryza sativa
  unsure (1)..(362): unsure at all n locations
aaacaccttgcgatcaccctctcaccaccgctacagatcaccattgtgaggctccccggccggagctggaggttggagggagtggaggaagagccgtgctgccgccgtcgccatgggggaagccgggtagccgctggacatcaagaaacgccgtcgagcaccttacgtcgccgccgtctgcccctgtcctgcaccgtgtcgagctccacttcgccgcgtttcgccatctcgccgtctcgcggtacaccctcgtgcccgtagcgtcctccatacatctaattgctagcgccggctccaaaatcggcgattagggcccatggccgtgcgncccngcgccgtttcgtcgcgagcgagcccttcgt

SEQ ID NO: 396227 - DNA, 733 bp, Oryza sativa
  unsure (1)..(733): unsure at all n locations
gtcgcctcgcctcgcctcgccttcccccgcgtggcctcgccgtcggatcgagccacgccgccgccgccgccgcgtcgcggatccccacgctcgccgagaggaggaggagcttcttgcactttgaagaaacagcaagatggcagccaatgttggggaatctacaagcagcggcaccaatggcgatgcagctggggggagctttgaatgcaatatctgctttgaattgccacaagaaccaatagttactctctgtggccacctcttctgctggccatgtatttacaggtggttgcacatccacgcacactctccagagtgcccggtgtgcaaagctgtcgttgaagaggataagctcgttcccctttatgggcgtggcaaggaccgcgtcgatccaaggtcaaagaacatacccgaggctgacattcctaaccgcccaactggccagaggctgccacagctccacaggccgatcctaacaacaattttgcccatgccaatcctaatgctaatgccaatccatggttcatggggcactggagtaccattggctaatgcacgggtgggggaattattgcattctcagcctgcgtttgggaggcctatttccctatgcttagctttccaagtggcatggatttccaagatgcaaatccttatgcaacagccttgcttgggtttcaactatggggtatggncantggtcatggattccaatggncggacataanggggt

SEQ ID NO: 396228 - DNA, 630 bp, Oryza sativa
  unsure (1)..(630): unsure at all n locations
gaaggttcctggtggtcagttngnggattcacgggttcttaaaggagttatgttcaataaagatgttgtagctcctggaaaaatgagaaggaagatagtcaacccccgcattatccttctggattgccctgttgagtacaagaaaggagaaaaccagaccaatgctgaactgatgaaggaagaagattggcaggttctgctagagatggaggaagaatacataaagaacctctgtgcgcagattttaaaattcaagcctgatttagttgtcacagagaaaggtctcagtgatcttgctatccattacctaagcaaggctggtgttagtgcaattcgtaggctaaggaagactgataccaacagggattgctaaggccttgtgggagcaagtcatagtgaccaggccagaggagcttccaagattcgggtgttgggacaagagctggcctctttgaggtcaagaagataggtgatgaattctttaccttcattgtcgactgaaagatcccaaggcatgcactgttcttttgaggggagcaagcaaggtgtcctgaatgaggtttagaggaccttcagntgcatgtctgtttcaaggacattttgaaacccaactttacctggggtggtgct

SEQ ID NO: 396229 - DNA, 1112 bp, Oryza sativa
  unsure (1)..(1112): unsure at all n locations
cggnacggtcananttacgagccatgaatcttctcaagatggacttgagtagaaaatctgatccctatgtcaagctccgtttgagtggtgagaaactgccttcaaagtcggcgcctgttaagatgagcaacctgaatcctgagtggaatgaacacttcagatttatagtcaaggatcctgaaacacaaatccttgagctccgcatgtttgattgggaaaaggtttagctttgctgttaaaatgcatgataaactgggtatgcaagtagttcccctccgcttgcttactccttatgagagtaaactgttcacacttgaccttctgaaaagcatggacccaaatgatcctcataacaagaagaacagaggaaagcttgtcgtagagctgacatttgatcccttcagagatgacagcaacagtaccattctgatgtcagatggtgaaggcaatgtcagtgtaaaaagggacgtcccacctagtggagggttgctgttggtttcagtagaaaatgcagaagacgtcgagggaaagcgtcatactaatccgtatgccgtggttcattttaggggagaaaggaaggaaacgaagataatcaagaaaacaagagatcccaagatggaacgaagagtttcagttcatggttgatgaggctcctgtggatgataagatccacatcgaagtagtaagcaaacgccgtgggctccggcttcccttccgcaattaaggaaatcattggggcatgtggatataaacctagtggacgtcgtgaacaacggacggatcaacgaaaaataccatctgatcaactcgaggaacgggatggtacacgtcgagatgaaatggagcactgtatgacaatgattcggtattctgaagagtctcacctgtatgattatacctgtcgctgtacatatacagtcgccatactccgtgtgggccatgtatgttgtaactttagccctaatcctctactctctcgctcttttcgtgatccattttgggcgctttttagcgtgctgtaacgtcaatgatagtggcgtgatcacttgcttgtaaagtcacgcggcaatgcgttcgttgatctctctttcnnnnnnnnnnnnnnnnnnnnn

SEQ ID NO: 396230 - DNA, 322 bp, Oryza sativa
  unsure (1)..(322): unsure at all n locations
cacacacaaccgctctgcacaaggggccatggacaacaagccggcgcaagaacgccgcgagacgtgggtcccgggcgccgtcatcgtcggcgcgggcccgtnggggctcgccgcggcggcgtgcctcgcggcgcgggcgcgttccggcgacggtgcttgagcggtccgactcgctggcgtccacgtggcgccaccgcatgtacgaccgcctcgctctccacctgcccaagcgctttctgcgagcttgccgctcctcccgttcccggaggagtacccgacgtacccgtccaaggaccagttcgtggcgtacatggaggcgtac

SEQ ID NO: 396231 - DNA, 443 bp, Oryza sativa
  unsure (1)..(443): unsure at all n locations
agaagaagctcaaacgcggaggccaccacgaccaccacaacaccaccacctcttctcctagtcaaacccacccttcccttgtaatcttcgcaacaacagcaggacggcaagttcgtagctttcccctccgctttatacacccgcatctccaaatctgaggagagaggggagaagataaagaaagaaaagcgcgcattttggtgtccggggaagggaaaagggcggttcttggcgtcggtggcgggttttgttttttgggggtggaagcggttggtttggggatgagcagcggccaggaagccggatcgagctccggtggatccggcgatggcggcgcggcgncgccaggaggacaccanggagcccaagtattccaagttactcagcaggagttccagnttgaagccgattcttattccaaatnggtcattcagtttcgttnt

SEQ ID NO: 396232 - DNA, 556 bp, Oryza sativa
  unsure (1)..(556): unsure at all n locations
ttgtgtaaacggcggttcacaacaatcacaaagtcgtcaaaggaggatactggtttggaactgacaaattctgtaattagggttgaagaacgtgatcaggtttatcagcctacggaagaggaaataagacgttggctagatccatacgagaatgttgtgtgcatagagtgcaatcaaggtggtgatgacagtctcatgttactatgcgatatttgtgactcctcagcacatacttactgtgttggtttgggaagagaagtacctgaaggaaattggtactgtggaggttgtagactcgatggcgaagaccattcataccataatcatgtgaatggcaattctggggatgtttggtgcaatttcaccaattggcacttttgaaaggcaggggattgatctaaatgtatctccaagggagattcctaggggaaatcattctgttgagtctcaagcttctactgcaggagcatcaactccatctggaaggcagcaaccgaacggattttagaagcgtcaatgcatgcttgntacgcagtttgcttctagncccaggcca

SEQ ID NO: 396233 - DNA, 563 bp, Oryza sativa
  unsure (1)..(563): unsure at all n locations
gcagcgaacgcacctacctaccacccaaacggcaagcggcagtgccaatggagcagcaacaggcggcgcccatgggatggaacaggaaggtggtgctgcgcgagtacatcgccggccggccgccgagggaggacgacatggtgctcgtcgacggcggcacggtggccctgcgcgtgccggacggcgccgcccccgccccggcggccctcgtgaagaatctctacctctcctgcgacccctacatgcgcggccggatgcgggacttccacggatcctacatcccgccgttcaagcccggatccgttattgaagggcttggagtggcgagagtngtggattccacccatccgggattcagcgcgggcgacattgtctccgggatgactggttgggaggaatacagtctgatcgacaggcctgaacagctgagcaagattcagcaaagtgacatacccctctcttaccatttggggcttcttggcatgctgggtttacagcttatgctggtttctattagatctnctcaccgagaagggcgagttttttttgtttcgctgcatnag

SEQ ID NO: 396234 - DNA, 370 bp, Oryza sativa
  unsure (1)..(370): unsure at all n locations
cagcagcagtaggcttaagcttggttggtcaagggcgagtggccatggaggccatggacgtcaagtacaagccgctcgtgttccccaacggcgccatcaagaaggcggcgaangctggacggatggcgcctgcggtgggcggcggcggagggggagagacggtgtaccgggagtccctcaagaaccacgcggcgagcctgggcgggcacgcgctggacgggtgcngggagttcatgccgtcgccggcggnaaacnccgccgacccgacgtcgctcaggtgcgctgcgtgctgttgccaaccgcaacttccaactgccggctgctngangggtcccccccgccgccgcngccgccgggcttgcttgctcgc

SEQ ID NO: 396235 - DNA, 327 bp, Oryza sativa
  unsure (1)..(327): unsure at all n locations
gccggggaactcgtaccggatggtgctgttggacccggcggaggggaggtggacgccgctgccggaggtgggtggagcgagtgggagcttgccgctgttctgccaggtggcggcggtggatggcggtgtggaggggaggaagcggctggtggtcgtcggcggctgggacccggagacgtgggcgccgacggactcggtgctcgtgtatgacttcctcacgggcgcgtagcgccgtggcgcggcacatgccgggcccgcnccgggtcagttcttcgcgtgcgccgccgtcggcgagaaggtgttcgtcgccggtggccacgacgagga

SEQ ID NO: 396236 - DNA, 561 bp, Oryza sativa
  unsure (1)..(561): unsure at all n locations
gcntcgagctgctctcctgggccagcgtcaaggacatctgcaaggacggcggaatcttcaagaaggtgctcgccgagggacacaagtgggagaatcccaaggacctcgacgaggtgctcgtcaagtacgaagcgaggctcgaagacggaactgtggtatcgaaatctgacggtgttgagtttgctgtcaaagatggctatttctgcccggcgctttcaaaggctgtcaagacgatgaagaagggcgagaaggtcctcctcactgtcaagccacaatatggctttggtgagcaaggcaaaccagcttctggagctgaagctgctgtgcccgccaaatgctaccctgtacgtcgatcttgaagttgctctcctggaagacggtcactctgatcggcgacgataagcgcatcctgaagaaagtcctcaaggaaggggaggggctattagcgccctaacgatggagcagtagttagagttagatttatcggcaagtttgagggacggcactttgnttttccaagaaaagggcattctggtgatgagccattttaggttaaggnca

SEQ ID NO: 396237 - DNA, 713 bp, Oryza sativa
  unsure (1)..(713): unsure at all n locations
nttttcaaagtcccnttacccgtatcagcttccaattcccnttgagccccatttggagaacctttgcatcatcaagctgtgggntacagcgaattnttgccaaaggcggcgttcaatcttggtcctgactaggggaggaacaactgctaggctggtggccaagtaccaggcnatccatgccgattctgtccgtcgtggttcctgagctgaaacagaccgactccttcgactggacctgcagcgacgaagctcctgcgcggcacagcctcatcgtcaggggagtgatcccgatgctgagtgcagccactgccaaggccttcgacaacgaagccactgaagaagctctcgggttcgccatcagcaacgccaaggcgatggggctctgcaactccggtgagtccgtcgtcgccctccaccggatcggaactgcatctgtcatcaagctcctgacagcgaactagtggcagacggcagttaatccacaccattttgctcggaggaaaatttttgctgggggattcttacttaccacgcatatctatagcttttgttgccatgatagtggcatttgcattcaggtcgccttcggtgtttgctgttcatgggttaaccattgaaacagttaaattcgttattgctaccgcagcttatttcgctgcctctgctgctactagtattaaacttgacagccgttacgtaaaaaaaaaaaaaaa

SEQ ID NO: 396238 - DNA, 395 bp, Oryza sativa
  unsure (1)..(395): unsure at all n locations
caaatccatcgaaaccagccgccaccgtccccttcggagagaaaatatcaccgtgtgccgcggctgccgctcgcctccgcctccgccgctggagcgtggctggggtgctgcgtcggcggcggcggcagggccgggtcggcggcgtggtgccacgcgacggcggccggcagcatggcagcggcgttggagctggaggctatccggtgggggaccgccaagctgcagggcgcgggcaagcggcacccaccccttcctctcgcgcgcccatcgagcgcggaagggccgagctgtcgaggcaccggcgtcaccgccggccaagtctgcgncgggccgcacctcctcccagccgtctagcgacctcaagaaatgctccatggtctgaattcataggttct

SEQ ID NO: 396239 - DNA, 348 bp, Oryza sativa
gattttggcagcttgcaaagcccaaacagaacttgtactcttctagctgctctatctgaacttctcatcaaacacactgcaaacattacggtatctcttgcgttgatgtcttggtgatcgacaggatgcaaggggaacaccatgaccatgtccctgtctacgagtcaggcaccgaggtgttccaaaagcttcaggagaaatggaattccaccaagcacaagcgataccgcgcgatgtactccagcgtcgtcggcggaatcatcctcgatccatcgatgatggtcatccccatcgacgatcacatggtccacagaggccatggggtcttcgacaacgccatgctttccg

SEQ ID NO: 396240 - DNA, 638 bp, Oryza sativa
  unsure (1)..(638): unsure at all n locations
aattgtaatacgactcactatagggcgaattgggtaccgggccccccctcgagttttttttttttttttttggtgtaaactcgtcaaatatattcataccgcaaagacataagtttaccaggttacaagcaggtatgtccattaaaagtgaggacatatgctagcatcatcacttaactaatctaccattcttattcagattgacccttcagctgaaaaaaagtagaaggatttgcaccaatctgctggctaattaaaaaaaaaggaagccagattgaagtggccttatggagagctgataagcttccagtccatattagaagtggagatcctttgtgagaccagtgaaacatctcaatatgactggttcattctgcactaacctgaccattctcgtggggatgtaacattgctacctgcattgaggcttatcaccatggcacaaaatctgcagttnggctgcattaccctggganactacctctccactcnatccgtngatacctacacctactnttcnactttttccaatggtgatatccaatgtgtcccatnaaaatccncgaccncctgtgcgagnnaaacacacttcccctttaagnctnattgccttgatgcncctaaggtgaccnntgtgt

SEQ ID NO: 396241 - DNA, 747 bp, Oryza sativa
  unsure (1)..(747): unsure at all n locations
ctaaaattataactctgatatctatatctatcttgcctacaaattataactctcgttccccaattttgtgtgtgacgttgagaagtgccgaccggcgacgacgaaaggccggcggagagagatcccctcaccaccatggggatgctggatctgatgcgcctcatgtccatccagcgccacggggaccaggagcgccgccgccgccaagcccaagctcccccccgtgatggattgattgctttacgggctaaaagaaagggctcaccctgccaacaagacggcgattctcagggtgctgctgacatagagataccaagccttccagaggacatctggcgtcttatacattccttgatgccaatgcgagatgctgcccgagctgcctgtgtgtctcgttcctttctaagtttgtggagatgccaccccaacctcaatttcagtagtgaagcatttgggttgaacaaaaatgcatgtggaaaggaagaattggctggacttttctacagcaaagtcgaccacattctcaaaaggcactcaggcatcggcgtgaaaaaacttaagattcagatatattcagattatagttgggaagggctcttcatatctcaacaattggcttcagattnctgttaaaccagggattgaagaactcataattgcactgacccagttccaggcaaagtacaattttcccatgctctcttctgtcgaatgggagtggagactcaatccnaatatcttcacctt

SEQ ID NO: 396242 - DNA, 556 bp, Oryza sativa
gggagaaggaagaggcatccgtttcgaacattgaagaatcaagtgacaagaaagctgtcactgaagaaccacgttcaagcacaggagatgatgcggtgaaagacggagcaaagcatgagacaagcgactcaagcaaggatagtgactactccatggtgtctaggcagcgaacaacgaccgaggaagaggatcttgagtgggatgagattgaggatcttggggagcatgaagagaagagagggcgcaataatgactcaagctctgctttaaaggaggaattgcggaagaggctcagtgttgctgaagatgatgaggatttgagctgggatatcgaggatgattgatgatgataaggctgaaaaaacaacgtggccaacctggtatgaagtgttgattgtatctctatacttttttgccaattacttgtgcaagatactgaaatgtggccaataaaattggtttagctgtgctggattatgttatgggatacgtttgtaaactaaacttggtgttatcaaatggcaattggctatgaaaaaaaaaaaagagaaaaaaa

SEQ ID NO: 396243 - DNA, 407 bp, Oryza sativa
ttcttccgatccaagctactctctctctcctctcctcccctcccctcaccaagcgagccttctagagagagagagcttcccccggggggatcgagctcgccggaggactccacccgccgcgcctcggctgccgggagatccccccgcccgcccgccggtccgtccaacggaattgaaaggaggtagccttcttgtcagctagtatgtatttcgaaggctatggctaccgtggaagtaccttcgagcagacatatcgctgctaccctgcgtctttcattgacaagcctcagcttgaaactggtgacaaaattattatgccaccttctgctctggatcgtctagcatctctgcatattggatatcctaatgcaatttgaagtccacaagcggcaccgaacggactttta

SEQ ID NO: 396244 - DNA, 978 bp, Oryza sativa
  unsure (1)..(978): unsure at all n locations
ggtgccaagaaggccgtccttgtcgggcactcagctggttgccttgtggcagtggaggcatactttgaggcaccagaaagggtagctgcacttgtnctggttgcaccagccatttttgtgccagttttccgcaccgtcccggtgaaggagatggttgtaggtgaccagaatggcagattaagaaggattccaatgattcaaatttgccttacaaatcccactcaataggatttggggaaaaattcctcgagctatgcttgtggattgcagggtttcttatgaatatgattagggcaataaggtggtgttgttcgatctttgtattataaatctgttgttgctgttcttcgatcatcagttggcgtgatgctggtaagattgatcatggataagtttggtatattggctgtccgcaatgcatggtatgacccaagcaaagtgacggatcatgtcattcaaggttacactaagccattaagatccagaggttgggagatggctcttttggagtacactatatccatgatcatggattctatatcatcatcgaaagtgcctgtctcagaaaggctttctgagatctcgtgcccagtgctagtggtgagtggagacactgatcgccttgttcctcgttggaataccgagcgcgtagcacgtgcgattcctggtgcaggatttgaggtgatcaagaactctgggcacttgccacaggaggaacgacccgaagaatttgtctctgttgtcgaaaggtttctgagaagagcttttgggagacccaacaacgagcaagagcaagtgttgcaagcagctgtatgatatgaaaccagtacctgtagataagcatctagtactagataaccaatacatgtttagatgcgttctgtactagttctctgtaagccgttaaattttatttgctaaaaataatatcattaagttaacatttgaatttacttttaaaannnnnnnnnnnnnnnn

SEQ ID NO: 396245 - DNA, 521 bp, Oryza sativa
  unsure (1)..(521): unsure at all n locations
tgcagatccgagaggggggcccgcggcgcgancggcgtcggcggcgangtcgcgantgtccgccatgatgctcgccatgttcgccaccatggcctccttctacgtcgccggccgtctgtggcaggatgcgcagagtagggtttacctgattaaagagctcgacaggcgaaccggccagggccattcgacgatatcggtggatgataccttgaaggttgtcgcatgcaggcagcaaggaaagaggctggcctcacttgagatggagctggctgcagcaaagcatgaaggtttcgtggggaaatatacctatgagacaaatggaactaactctagaaagaggccactgattgttattggaataatgacaagctttgggaggaaaaactaccgtgatgctgtcaggaagtcatggcttccgacaggttcaatgctgaagaaactagaagaagaaaaaggcattgtagtgcgcttcatagttggaagaagtntngacccgaggagatgcttcagncaggggattt

SEQ ID NO: 396246 - DNA, 612 bp, Oryza sativa
aggattaaaagccggcgaagtagcaagatatgcgcctgcttcgcctggccgccatggctcacctaccgcttttgctcctctccttcctcctcctcatcggcgtccatgcctccgtttccgatggctcgcctctcccacacacttacaacacttccatttgctccaaatcatacaagtgcggcggcgtcaatatctcatatcctttctatctttccaacgcaaccggcgaaacctatgattacactcagttttcttgcggctacaccgatttgaatatcacttgcagctgggacgggagtaagcagaccccttttatccaactcaacggagacaactatactatcctggagatcatctacgacagtcgcaccatcgtgctcgtagacaccgatgcgctccgggcgggcagctgccccagagtgcgccacaacatcaccttctcccaggccgatgagtggcttcagtacaccggcccccgtgacaacctcaccttcttcttcggctgcaaccttgtaccactaccaccaatggatccagggctgactcgttttgtagacaagaaccaaatcaactggcaaagacttcagcaactgggcctgacggtggagatca

SEQ ID NO: 396247 - DNA, 415 bp, Oryza sativa
  unsure (1)..(415): unsure at all n locations
aaaatgtcatcttccacctccgtcctttcccctctcctcgctcacgctcatggccgcgcctcgtcccacctcaagggcgcaacctctcatcgcttcccggctcaacctcgccggattctcggcctcctctccacgacggattctcccggcacctcgcgcgaggccggcggcggcggcggggaggaggaggacagccgcgtgcaggagctgagggtgcccggttcttggctcacccctgcaggagcagcgcaggaatccgaatggctgagggaaacactgcacaagtggctcgacgacgagtactgcccggagccagccaatgtggacatcagcaacaacgctgcgggtcattctacgagtccctgacggcgaaagagtctgacctgggagagatcttgctgaagatggtgggagn

SEQ ID NO: 396248 - DNA, 497 bp, Oryza sativa
  unsure (1)..(497): unsure at all n locations
cgcaccagtccattgccgctggtggcaatcttcttcttgttggaccaaaccctagctagcagcagcaaccatggcaaaccctaggcctccctatgtgttgctggagagagtagtgtttttcggaggacgcgagttacccgacggcacatggaaagatgccgcagataggttcatcggatggagcagagcgcggctgctgagtcggcgagaggcgatggaggcgatggaaccccatcccttcctcgccgatcctccgcaagtgagctccctgcggatgatgtcgccgacgcccgcgcacggcagagctgggatccatccgcgacggcgacatcgccagcacccacaagggcatcgtcgtcatctacgccggcttctaccgaccaggctgctccgatgacctcgggggatgctacctcctntacgacggccccaacaacggccttaacgccatcccccgttgcccgatttgcttgtttcccaacttgntaaacttgccg

SEQ ID NO: 396249 - DNA, 764 bp, Oryza sativa
  unsure (1)..(764): unsure at all n locations
ctcgtacttatgtaccccgcgcaatctcaatccagagacctgcaacaccaaacaagtcaagccgtccaccaagtcggcaatcgccatcaactcccccgtcaagggtcccctcagttaccggaaagatcagaccagcaagtccacgggatagctggctatataaggaggatgacttgaggagcatcacaagcatacgctctgaacgcccaaggaggcagagcacaggtggtgcctctgttcgggatgatgcgagcctaacaagcacaccagctctccccagctacatgcagtccacagagtctgcaagggcgaagtctcggtaccgcagtctattgactgacaggtttgaggttcctgagagagtacccctggtccattcttcaataaagaagcgcttatccttcccagtcgcagacaaaccaaatggtgagcatgcagataagctgatggaaagagggaggcgtcattcagaccctcctaaggtggatcctgcctcactgaaggatgttccggtttcataattcagtcatattatcagagcttattattgttaggttgcttttcttcctttgtgtattttctaatttagattgcattctcgagagtcgaggttgaaccctccgtgaaaatgtatgatttgtcagggttgatttgagacaattctaactgtttacaggcagtttttttcctgatgattgttgtgtgtgaagagtaagaaaaagaaaatgaagcggtggnnnnnnnnnnnnnnnnnnnnnnnnnnn

SEQ ID NO: 396250 - DNA, 369 bp, Oryza sativa
  unsure (1)..(369): unsure at all n locations
gcgcctgtaaggctgtnactganaaggtaggagtaggagaagagaagctttgggcgccgccatggatgcatacgaggcgaccaaggtggtgttctcccggatccaggcgctggaccctgaccacgccgccaagatcatgggcctcctgctcatccaggaccacggcgacaaggagatgatacgcctcgccttcggccccgaggcgctgctccacagcgtcatggcgcaggcgcgcaaggagctcgccctcctgccgccgcctcaggggtccggtcgtcgcccaccgtgccggcagcccactcgccgttcctgctgtcgaggcagaactccggccgctgccccgcgccgtcgccgtcgtcgtggggcgca

SEQ ID NO: 396251 - DNA, 738 bp, Oryza sativa
catcgttaaggtcagctgggtctagcatttgctcgccgtggctaccgcttccaaaggaatcctgcgtgggacagcaaagcccacaggtgcgtcgtgagttcacctggcccacggaagatgcacgtcgtgcttggccgccttggtggacgcggcaaggtgaagcaggaaccccctccaaaacctgctcaggtctctccacagcgcgacctgctcgtcgtcgccgtacgccagcctcagttgctccgccagctgcgcgcccatcttgactatcgacctgccttcactcccgtccggagttcttgccatccttgtcaggtttctgtagatgtctgccatggatttgcaaccagaaatggcactgctggcctctttctgcacaacctcgtagaccttgttcatgacgaggccattgtccggcaccagtgactgagtgaccaagtatgcgcagtgattggacaaggtgactgcagctatgtaatgttcccacagatcatctgcgataattgccgttttcttcacaagaggtcttgttattattccgaagctgtagatcgtccgcgccgatgcctgatcggagaggttgatctcacacaggcaggtggcgatgtgccagacgagtatcctgtgggtgtcggcctcaagctcatcccctgcccacgagatatcgctgacaatgtcctgttggttggttctaaatgcaagcggaaagtaggattccagatcaaaaaaaaaaaaaaa

SEQ ID NO: 396252 - DNA, 310 bp, Oryza sativa
  unsure (1)..(310): unsure at all n locations
aatcccccgatcctcttcctctctctcaaagcgaccgcggacggcgacagagcctggcgacggcgccctcctccccccctcccgcgcgcgcgcaggcttgtcccgcgccgctccggtcgaccaccggctccaccccgtcctcctctcctcgttgcggtggcccccttcctcggcagcggtgatgacctcctcctccatccccctcttgcggtggtcgagcagcggcggcgacgacgccctctccaagcggctgtggcggtgccctcccccancgtgagcagcggcggtggaggtgccctcctgcggcttt

SEQ ID NO: 396253 - DNA, 456 bp, Oryza sativa
  unsure (1)..(456): unsure at all n locations
cagctctctctctctctctctcgttcttgcgggcctgcgacaacggcgtttgaggaaatggcggcggcgtctgcgggtccatcggcggcgctctgagggggcggcggcggcttgaagccgacccccgccggcgcctgctggtggaggtagagggcggcggcagtgggatccgcgccggcagccggctgtgaagggaaggggcggcagttgcgggatatgcgccggcggccgtccgtgaagggaaggagcggcggcggcgggatccgcgccggcggccggctgtgaagggaaggggcgatggttgcgggatatgcgccggcggtcgtccgtaaagggaaggagcggcggccgccggctcgcggaggaaggtagttgcggttgtggatccccanaagcttcagtggacctcgacctaaacttaanccgagttcaccttngctatatgttatctttaat

SEQ ID NO: 396254 - DNA, 388 bp, Oryza sativa
  unsure (1)..(388): unsure at all n locations
atccaagcnaactttcccctcctctcctaggtttcgcctccgccgccgccgaccgccgccgccgtcgccgccgtagaccgatcgagcgggagtggggaggatgacgacgtcggagagggagccgtgcccggaccgcatcctggaacgacgtgggcggcgcgttcgcgatgggggcggtggggggcaccgcctttccacttcctcaggggcgcgtacaactcccccaacggccaccgcctctccggcggcttcccaggccgtccgcatgagcgtcccgcgcaccggnggcaattcgccgcctggggcgccttctttctccgccttcgaatgcgccatggtccacgcccgccagaaggagggacccctggaactccattcctcgccggng

SEQ ID NO: 396255 - DNA, 886 bp, Oryza sativa
  unsure (1)..(886): unsure at all n locations
gtgatgtgacaaaatacatcagtggttgcatggcttctctttctgccatgattcagcttgaacttcctcatatcaacattctttcaaagatggacctggtcgccaacaaaaaggatgtggaagagtatctgaatccagaggcgcaggttctcttgtcacagctgaaccgacagatggcacccaattttggcaagctaaacaaatcattagctgaactggttgatgattacagcatggtgaatttcatcccacttgacttaagaaaagagagcagccttcagtatgtgctgtcgcacatcgacaactgcatccagtatggggaagacgcagatgtgaaggttagggacttcgatcccgaggaggactaatccatttgatcgcgtaggagctaaaaaaaattactatcgcagcattggtactacatagtactacctccgttctattataagtgcagcatgtttttccgcgttcaactttgaccatccgtcttatttaaaatttttttgaaaaaatttaaaaacataagtcacgagtaaagtactatttatgttttatcatctcataacaacaaaaatactaattataaaaaaattttaaataagacgaacgatcaaaattgggcgcggatacttatggttgtacttataatgggacggagagagtattcaagtatgcagaaaacatcgcaggattacaatgttgtttccgtatgagtcctatctgttgatcaacaagacagaatgctataatctgcaacctcctgtaaatcaagccgtacgttctctgtgtaatcggttgactggttggcattaacaagctgctgcttgccagaaaagaaaaacatgacttttctgaatgatttgaaacaaaaaaaaaaaaaaannnn

SEQ ID NO: 396256 - DNA, 414 bp, Oryza sativa
  unsure (1)..(414): unsure at all n locations
tggaagagcaaagctgtctcacttcaccagccgctcaatcctctcccaagaatcgatcggccggccatggcggcagcagcagcgacagctccggcggcagcggtggtgcggcgaatgaagctggggtcgcaggggatggaggtgtcggcgcaggggctgggctgcatgggcatgtcggcggtgtacggggagcggaagccggagccgacatggtggcgctcgtccgccacgccgtcgccgcgggcgtcaccttcctcgacacctccgacgtctacgggccgcacaccaacgaggtgctcgtcggcaaggcggtggcggcggcggcggcgacggaggaggaggtgcaggtgcaggtggccaccaagttcggcatcacgacggcgtgggaggtncgcggcgacccggcgtacgtnc

SEQ ID NO: 396257 - DNA, 775 bp, Oryza sativa
  unsure (1)..(775): unsure at all n locations
caagaatagggttccaccgccgccgccgccgctcgccggagagagagagatgaagagcttcccggttgccggaggcagcagcgtctccctcggcctcttctccgacgtctccaacagctgggagctcctcgagctgatgcagtcagggaagctggagccggaggtcgcattcctcaacgcatcactggtgccggatgtgttcccggttctcgcggcggcgcacaaggcggtggtgtcgcaggggagggagtctctgaccacaagaactctgcattcggagctcgtctataactactccgggtctaagcatataacggagtcttttgaaacgatgcggaatctccgacgacacgagttatatccttgcagctcgttttgatgcttcgaatgaggagataaaagctttggagaagctcaatctgtggcactgaggattgatctagcggaactggaaacaagagcaaaccagccacagatcctgaagcattataaaataactccccaggaactatcaatatctacactgcccgatgcaattgtatgcaggattgctgctcgagatgccctttgagtgacatcacggatcaagattgaaatctgggaggcctggtggttttttgcacatgatgatgtggtaccggtatgtttgttactgtatgatgatggttgctagtactactggactactggtgcctngggttcacgtgctgctgggacangttgcagctgtcgtttctttccaagagaaaaacatggacagagaagctggtaacct

SEQ ID NO: 396258 - DNA, 319 bp, Oryza sativa
  unsure (1)..(319): unsure at all n locations
caatccaatccaatccgattcanaagtagagcgagcggcggctgcggcgatggcggtggcggcggtgcgggcggcggcggcggacgcggcggtgttacgttcctgtgggtgctgtgcgtntcgacgctgggggcctgaggtcggcggtgacgtcgtacctccgcatccacgaggggatccactacgcgctcctcgtcaccgtctccctcctctccgtgctcctcttcgccttcaacctcctctgcaacgccctcggggcgcnaactttcaaccccaccgccctcgccgncttccacgccgncggcctctccttcccccg

SEQ ID NO: 396259 - DNA, 356 bp, Oryza sativa
  unsure (1)..(356): unsure at all n locations
agatgaacgacgtgctcgcggcgccgctgcggttccgatcgccgctgtcgctcccgttcgcnagcatcagcaaggggaacgtgtgcttcgccggcgacggctccacccgacgacgccggacctggcgcagggcgcgtgcacggcgctggaggacgccgtcgtcctggcgaggtgcctcggcgaggcgctgctgctccgtaccggcgactgcgccgccgaggagagtcaccgggtcgtcgaggccgcgctgcgccggtacgcggacgcccggcggtggaggagtgcgcantgaaccggtgcgtcgtacgcggtggggttcgtgcagcagagcgaccaacccgccgtgggtttcctgc

SEQ ID NO: 396260 - DNA, 457 bp, Oryza sativa
agaaaaaaaaaaaaactaaaatctcatcggagatggcgagaggcggcggcgtcgcggtggccatggccgtcgcggtggcggcggttgtcctcctgctccaccctgccgcttctgcgcggcggcggggccgaagaaggtggcgacggccgcgaggaaggaggacatcccctacatccggtgccaggtctgcgagcggatcgcgcgggagatctcggcgcaggtggcgaagaagcagcaggcgctcccggcaacgaagaaggtgccggagatcgagatcatcgagatcgcggagaatgtgtgcaacctgaagaagcaggaggcagactggatgctcaagatcgatatcgtagagaaaggcgataagttcgagcttcgtttagcaaagatgaggaagggcactgtaattcaggattcaaaaaccatttagcgtgcatgtcaggaggttatggggtattct

SEQ ID NO: 396261 - DNA, 339 bp, Oryza sativa
  unsure (1)..(339): unsure at all n locations
cggacgtgtcttcnagtccattctcgcatcaaccaagagacgccacgagcgcgaagaatcacacgaagcgttcgtcaagcaagaacagagtttgtttgtcccgcgatggcgcaggagagcctgaggctggtgtcgcacccgatcgcggcgcacgaggggcggctgccgcggcactacacgctggaggggcagggcgcgaagaaggacatctcgccgccggtggagtggtacggggtgcccgacgggacgcggtcgctggcgctggtggtgcacgacgtcgacggcccggacccggacggacccatcgtgccgtgnacgaactgggtcgtcggcaacatt

SEQ ID NO: 396262 - DNA, 426 bp, Oryza sativa
  unsure (1)..(426): unsure at all n locations
cagcttaaagccacgcacccaccaccaacccagtacgaacatacaccatccttctcccctcttctcttctcttcacgcctccctcctctcctcttccctctccggcgacctcctcctccggcgtccagctcggccgcagcggcgcggcgacgacgaagccggccacaccgccgccattctcatggcagacaagatctccacggttgtgctcaacgttgacctcgaatgcgatcgatgctacaagaagatcagaagagtcctttgcaggatccaagataaggcgaacatcaagacgatctcgtacgacgagaagaacaatgcggtgatggtgtcggggccgttcgacgccgacaaggtgtgcaagaagctgtgctgcaaggccggcagatcatcaaggacatgnaggtcaagggcaaggaggacaag

SEQ ID NO: 396263 - DNA, 388 bp, Oryza sativa
gcgcgacacaatcagttcaccaccgcagccacccctagctaaatccctcggcggcgggggaggtggcggcgtgcgtgggcatctcggcgggggtcgtacgctcatgtcggcgctggtttggctctgcgtattggttttaagtggatttcctgtgcacaatgtcatcgattcttcgatccattcagctgaggaacagtatatggagtagcttccctgtcagatttcttaagcaacaagccggattatcaactgtagaattgcttgatcctagaagctgtgggaaacgacatttcacaacacaagtacaggaacatgggaaggaagttgcggcggcagcaactattctagtttttgatcttgagactactggctatttccataaggatca

SEQ ID NO: 396264 - DNA, 488 bp, Oryza sativa
  unsure (1)..(488): unsure at all n locations
tcctccaccgccacccccaccgccgcagcatcgccgacgagctagcccgccgccgctcgagcgcaagttgaggagaggagggatggatcggtaccagagggtggagaagccgagggaggaggcgcccatcaaggagaacgagatccgcatcaccacgcaggggaggatgcgcaactacatcacctacgcgaccaccttgctccaggataaaggttccgatgaagttgtattcaaggcaatggggagggcaatcaacaaaactgtgatgattgcagagctgatcaagagaagaattgttggtctncaccaaaacaccaccactggatctacttgatatcactgatatgtgggagccactggaggaaggcttgcttccacttgaggacaacaaggcatgtatctatgataactattaccctttcaaaagaaggagcttgacacatcctccatcgggtattaatttccgttgccttctgatagggtaagcc

SEQ ID NO: 396265 - DNA, 499 bp, Oryza sativa
tgattgccagcttctcacatgtggaatggaagaagtcattcggtgttgggatgttgaatctggcaaatgtcttcatgtttatgaaaagtctggcattggtctgatctcatgtggttggtttccagatggaaagcatatattgtctggtctaactgatcataacttttgcttgtgggatttagatggtaaagaagtagattgttggaaaggccagagatcatctaaaacatctgattttgccgtatcaaacgatggcaagcttataataagcatgaatagagagtccaccattcgtttatttgatcgggagacaaaacaggagagattgattgaggggggacaatacaatcacatcattttctctttcagaagatggtgatttcttgcttgtaaaccttataagtgagggcgattccatttgtgggaccataagggaattgccccattcgagttaacccggtatgctggtcataagcgcacccggtttgtgataaggcct

SEQ ID NO: 396266 - DNA, 333 bp, Oryza sativa
  unsure (1)..(333): unsure at all n locations
agccagctcaatcaatcatcgagcnagctgagctagtatagtgccatattgcacgtactcgttgtctgtccgatcatccttttttttttcttgtgggggtctgtccgatcatccttgcgtggctaggcaggtagagtagctacctgctcggctgctcgcgttccagccagggtccgggcttcggatatcctcggagtccgacaccaaatcaatggcgtaccagggcatcgaccttctctcgacgaaagccgcangnttgaccacggcgagaattcatcgtacttcgacgggtggaaggcctacgacacgaacccgttngacctgcggcacaat

SEQ ID NO: 396267 - DNA, 603 bp, Oryza sativa
  unsure (1)..(603): unsure at all n locations
gtcgagtcgatcgaacagcacagcaagtgagcagtgacaatggcgtctctggccgtcgtggtggtggtggtggcggtggtgtgcgccgccggtgtggcgggccggtgacaagttcgacgacgtggtggagccgagctgggccaacgaccacgtcgtgtaacgagggcgacctcctcaagctccgcctcgacagctcgtccggcggcgggttcgcgtcgaagagcaagttcctgtacggcaaggcgaccgccgacctgaagctcgtggcgggggattccgccggagttgtcacttgctttctatctgtcgtccggcggggacaagcacaacgagttcgactttcgagttcctgggcaacgtcaccggcgagccgtacctggtgcagaccaacctgtacatcgacggcgttggcaaaccgggagcagcgcatcgacctgtggttcgaccncaccgccgacttccacacctacgccgtgctctggaaccccagccaggtcgtcttcctcgtcgacgcaacnccatncgcgtttacgagaacaagaaccgtcaacgccgccgttaagggccaccaacggcaaggngccgcggcaatngaaccagaaa

SEQ ID NO: 396268 - DNA, 476 bp, Oryza sativa
tcgctctcgccatctgctgcttgccaccaccacatcgtcgccggcgggagagtggcctggagagatcgtcggcgatggcgggggaggggaggaagctgcgggtgtacgggatggcgctgtcggcgaacgtggtgcgggtggcgacggtgctgaacgagaagggcctcgacttcgacctcgtccccgtcgacctccgcaccgccgcccacaagcaaccccacttcctcgccctcaaccctttcggccagatccccgtgctgcaggatggagacgaatccttgtacgagtcccgcgcgataaaccggtacatcgcgaccaagtacaaggcggagggcgccgaccttctgccggcggaggcgtcgccggcgaactggaggtgtggctggaggtggagtcgcaccacttctacccggccatctccggcctcgtcttccagtctcatcaagccccttcttcggcgggcgccacggacaagg

SEQ ID NO: 396269 - DNA, 403 bp, Oryza sativa
  unsure (1)..(403): unsure at all n locations
gaggagaaggaacacttcgccggcgacgngccggcggcggcatggccttctggcaggcgcgggacttcctcttctgcggcgtgtgcggcaccctcctcaaattcgactccgtccgctccgcctcctgccccctctgcggcttcaagcgcaaggccaaagatatcgaagggaaggagacgcggtacacggtcacggctgaggatattagaagagagctaaaacttgatccatatgtgattcttgaaacaacacttgaaggaggaagacgtaattgtcgaaagagctacaagtaaataaagagtgtgaaaaatgcaaaaatccttgaacttcagtattacaccaagcagttacggtcagcagatnaggggcaaacttttttctataagtncgcaacttcaggcat

SEQ ID NO: 396270 - DNA, 674 bp, Oryza sativa
  unsure (1)..(674): unsure at all n locations
ctcgttcccaaaccctgcatccttctctttcacacaagcctctctctcgccggcttcggcgcccgtctcctcctcctcctcttcgtctagccttgtggcggcgtgcggtgcggtgcggtgaggaaaggagggagctttgaaggtcgggggagggcggaggagatgtctgaggtgtccgttatggccgaggtggaggagacggcggcggcggcgccgctggccctgccgccgggcgttcaggttccaccccaccgacgaggagatcgtctcgcactacctcacccccaaggccctcaaccaccgcttctcctccggcgtcatcggcgacgtcgacctcaacaagtggcgagccatggcacctcccagccatggcgaagatgggggagaaggagtggtacttcttcttgccacaagggaccgcaagttacccgaccgggacgaggacgaaccgggcgacggagagcggctactggaaggccaccggcaaggacaaggagatcttccgcgggaggggcatcctcgtcggcatgaagaagtcgcncgtcttctacctcggccgcgcgccccgtggcgagaagaccggctgggtgatgtacgagttccgcctcgagggcaagctccccagccaagctncccgcgctccggccaaggaccagtgggcggtgtgcaaggtg

SEQ ID NO: 396271 - DNA, 479 bp, Oryza sativa
  unsure (1)..(479): unsure at all n locations
cacaccaaaacttcgaggcccccgtcgcggcaccctcctccgccgccggatctccaccggagtacggcgccggccaccccctcctcccccggatcttcaccgccgtggagcggtacaggtgaagtactgaggtgatgactacatcagagtcagtacaagaaaccttgggattggatttccctcatcctagcaaacctcgggtcctccttgctgcctctggaagcgtcgctgctataaaatttgagagcctttgccgtagcttctcggaatgggcagaagtcagagccgtcgccaccaaggcttcattacattttattgatagaacgtctctgcctagcaatattattctttacactgatgatgatgaatggtctacctgggaagaagataggggatggaagttttggcacattgaactgcgaaaatgggcagatatcatggtgattncgccattatcagctataccctaggtaagnatg

SEQ ID NO: 396272 - DNA, 510 bp, Oryza sativa
  unsure (1)..(510): unsure at all n locations
cggacggnggcggcgaagtggctgtggccttcgagccgcgcacgctggaggaggccctcnttccgcgcgtgggtgcggtgttcgactctgtggacgaggccttctcgctctacaagacctacgcctaccgcacaggcttccacgcggtgcgccggacctgccacaactacgaggggctccgctaccgctctacctttacctgcactcatggtggcaaggcccgggctgacgccagcccgtctnatggctcaggcgcccgcttacccactccgcagcagcaaagcgtgcggccaacgcccagggagaagagggctcgtcgcggtgcggctgagaagacaggatgcaaaggcgatgtttgatcaatccgtgacaggcgggcggattgataagtggaaggtggagttcgtttantttgggcataaccatncgtgtacacctgacantggttagggtnttttaagggtttaaagggaaatgcctnacttaagcttaagaggaaggccaagattt

SEQ ID NO: 396273 - DNA, 359 bp, Oryza sativa
  unsure (1)..(359): unsure at all n locations
atttaatagaactttacaaattgagtgttatagtgagatggcatcggagatgagcaagaacgtgaaggtcaccgatgatcaagaggttacatcacaggagcgtgaccaaagtggtggtacaaaagtaggtggggaggaggaaattgctccactggcgcggcagtcgtcaatcctctccctcaccttggaagagctacaaaactccttgtgtgagccaggacgcaactttggttccatgaacatggacgagtttgtggctaacatatggaatgctgaagaattccaggctaccaccggaggttgcaagggtgccatntgaggaagccaaaggtgggtagacagtggaagcgggaagcgna

SEQ ID NO: 396274 - DNA, 439 bp, Oryza sativa
  unsure (1)..(439): unsure at all n locations
tgttgagcgaataatttgctcctagacctttgctgcttctcccctgtcgataaagccgaccacactgctcgcgtccccccgcgccgttcttttcggagattccgctcgcgcgcgccgccgccgccgcagccgcccgccggggagcccgggacgaggatggaggtcgtcgtggcgaggcagccgaaganatgaagcagataaacctcttctactgctccgagtgcgaggagctcgcgctcaaggtcgccgctagctccgacaccatccatctccagtccatcaactggaggagcttcgacgacgggttccccaacctgttcatcaacaacgcgcacgacatccgggggcagcacgtggcgttcctggcgtcgttcagctcgccgtcggtcatcttcgagcagatctccgtcatcttcgcgctgcccaagcttgttcatcg

SEQ ID NO: 396275 - DNA, 675 bp, Oryza sativa
  unsure (1)..(675): unsure at all n locations
gatcgaggaggggatggggatccggttcgtggtgatggtgaacaagcaggggcagacgcgggtggcgcaatactacgagcacctctccgtcgacgagcgccgcgccctcgagggcgagatcgtccgcaagtgcctcgcccgcaccgaccaccagtgttctttcgtggagcaccgcaactacaaggtggtgtaccggcgctacgcctccctcttcttcctagtcggcgtcgacaacgatgagaatgagttagctatccttgaattcattcatcttttggttgaaactatggaccgtcactttggcaatgtgtgtgagctcgacattatgttccatctggaggaaggtgcactttcatgcttggaaggagattggtggatgaattggttggcaattgtcggaaacttggttaaacaggacacttcttgggcaccaatccacctgatgggagaaaaacttcttagaaaaatggctatccaacaggggagtgcctcatactgttctggctttatcgccancggcctctgtgcttctatagattttncatctcaatgtgtaaccatcaacgattttccatgtgcatagactattaaacttgacctgataggaaataatgaggnatatgacagatgaagtctctgtnctttaaaaagagagaaaaaaaaggggcggggccg

SEQ ID NO: 396276 - DNA, 1243 bp, Oryza sativa
  unsure (1)..(1243): unsure at all n locations
gngtcggcgaggaagtggggcgtcgaggtccccgccgacgggtcgcggctgcacgagacgctcgacagggagtccggcatcgagggcagccgcaagctggagcacaccgggcagttcgcgtgcctcgacagggcggcggtggagacgccggaggacaggtcggcggcgaacgcgtcggcgtggcggctgtgcacggtgacgcaggtggaggagctgaagagcgtggtgcggctgctgccgatctgggcgagcgggatcgtgttcgcgacggtgtacgggcagatgagcaccatgttcgtcctccaggggaacacgctcgacgccagcatggggccgcacttctccatcccggcggcgtcgctctccatcttcgacaccctcagcgtcatcgtctgggtgccggtgtacgaccgcctcatcgtgccggcggtgcgcgccgtgtacggggcgcccacgcgggttcacccagctgcagcggatgggcatcggcctcgtcatctccgtcttctcnatgctcgccgccgggtgctcnacgtcgtcaggctgcgcgccatcgnttcgccaagggctcttacggcgacaaggacgtcgtgcccatctccatcttctggcaggtgccgcagtacttcatcatcggcgccgccgaaggtgttcacgttcgtcgggcagctggagttcttctacgaccaggctcccgacgccatgcgcagcatgtgctccggcctgtcgctcaccaccgtcgcgctaggcaactacctcagcacgctgctcgtgaccatcgttacccatgtcaccacccggaacggcgccgtcgggtggatcccggacaaccttcaaccgcggccacctcgactacttcttctggctgctcgccgtgctcagcctcatcaacttcggcgtctacctcgtcatcgccagctggtacacctacaagaagacggcggattcaccggacgacaaggccgagcacgccggagcaaactgagccacgaggtgaagctgattatgacatacaagggggaattgaactgaattgtggcgtgtgaatgtcagaatgtgtggggttctaaacaagttcttgggagataaaatggaaaggaaattagtgtcgtttgtgaccttcaaatatgttatagtgttcattgcattatgtctggtaggaaaaaatgaagaagaataggaggatatagtagtttaaaaatataaatgtgatgtttagttttctagaaaaaaaaaaaaaaaa

SEQ ID NO: 396277 - DNA, 461 bp, Oryza sativa
  unsure (1)..(461): unsure at all n locations
cggacggcntngccatctttgctcttccaggtttcagcatccaaggagcagcagcttgcttgctcttcccaaaaggaggaagagtcgaagagtgcgagaggcccgagcgcaanctgaagcctcaaaggcaaatcctcccccacagactaccacaagctgaagctcgagcgagctttctaatgtctggatatgggtatggggacattcacaactgatgaaagcgacaaacatgaagagagctacctgtcgttggggtttgacagtatcacagtcaaaggaaaaacaacacttgaataccccaaggttctgttgcttctggcggcttatcttgatagatcagttcagaagaatgaagacttactagattcccataaggtaaagggttcaaagcaccatctttcatggtcaaagggtccagatcttagtntaagcttttgcaaggggattttcaagtctccaag

SEQ ID NO: 396278 - DNA, 414 bp, Oryza sativa
  unsure (1)..(414): unsure at all n locations
ccagattcccctatcaaacaagcccaatcctcctcccgccacgtcgaagcagccgaaaccntcgccggagaaaccgaagccgaagccgcacgtncggcgancggccggagcggagagccttcagcgctcgacggcttcagagaagcggcaggcgaagacggacaagaacctgcggttcctgctgcagaaggtgctgaagcagagcgacgtcgggagcctcggccgcatcgtgctccccaaaaaggaagcagaggttcacctgccggagcttgaagacgagggatggtgtctccatccccatggaagacatcgggacgtctcaggtgtggaacatgcggtaccggttttgtgcccaacaacaaaaagcaggatgtatcttcttcgaaaacacaggtgatttttttcgtcaaaacg

SEQ ID NO: 396279 - DNA, 393 bp, Oryza sativa
caaaaatcccccacctcccaatcccccaaacccctcctccacctccacctccgccatgggcagcttcgcctcccccctcgacgccgcccccgcccctcccaccgcgaagccctcccctccgccggcgccggcgccgccaaacgggctggtgacccaggaggagctgaagcgggtggcggcgcaccgggccgtggagatggtggagcccgggatgacgctgggcctcggcacgggctccaccgcggcccacgcgctggaccgcctcggcgacctcctccggtccggggagctcgccgcggtggccggcgttccgaccttcgctcaagacggaggcgcacgcgccaaggttggggatccgaatcttccgctcggggaagcgggcgggatcgattt

SEQ ID NO: 396280 - DNA, 568 bp, Oryza sativa
  unsure (1)..(568): unsure at all n locations
cacagcaacacaagcagaagcacagtagaacgcctaggaaatactacgtcgatggcgaggtgggccattgcgatccacggcggcgccggggtggacccgaacctgccggagcacaggcaggaggaggcgaaggcgtgctggcgcggtgcctgcaggtgggcgtggacgcgctgcgctccggcgcggcggcgctggacgtcgtggaggccgtggtgcgggagctggagagcgaccccttcttcaactccgggaggggctccgcgctcacccgcctcggcaccgtcgagatggaggccagcatcatggacggccgcggccgccgctgcgcgccgtctccggcgtctccaccgtcaagaaccncgtctccttcgcccgcctcgtcatggacaagtcccnncactcntacctcgccttcgacggcgcngagcagttcgcgcgcgaccagggtctagaggtcgtcgacaacagctacttcatcaccgaggacaacgtcggcatgttgaagctcgncaagnaggtcaacagcatcttgtttgactaccgtatcccgntgtccgggtcggagagt

SEQ ID NO: 396281 - DNA, 454 bp, Oryza sativa
  unsure (1)..(454): unsure at all n locations
ctcttcatgaggggccatgtggaggaagcaatcggccgtgtcaatctgatggtggaaaatggatgcttgcctgatctagataagttgctgattgccctctgcgagaatgacaaagtgatggaggcacataagttggctgattttgcattggacagggactttgatgtcagcttctcaacctatgacagagtcttggaggccctgtacactgaggagaagacattgcctgcatactccatgctttgcaagatcaagaacaaaggaggtgtcgtggatcaaaagggttgcgatgccctgatggacagcttaaaagctggagggtactcaaagcaagcagacattttgtctaggatattggcagagaatgcatcatcaacatccangaggggcaaacgggtttccatgggttcgtcggtttatccattcatgagaagatagtactatcttccttttg

SEQ ID NO: 396282 - DNA, 616 bp, Oryza sativa
  unsure (1)..(616): unsure at all n locations
gtggcagcagaggacgctgcgggaggtgtgccggcgggagggggtgcagctgtgcgggtactcgccgctgggggccaaaggncaccccgtgggggcagcgccgccgtgcatggactccggcgtcctgcaggagatcgccggacccaagggcaagacgcttgctcagatttgtttgaggtggttgtacgagcaaggtgatgttttattggtgaagacatataatgagaagagaatgaaggaaaatctggacattttcaactgggagctcacagatgaagagagggagaggatcagtcagctgccccaactgaggggcctgcctggattggaattcatctctgaccatgggccttacaaatcagttgaagatttgtgggatggtgacgtctagcaagctacttagatacagtggagtatatatctaaataatcatgatggatcatgatgtggatctatcttaattatgtgcggcaggcatgggcacggcaccattcccgtacacgttctgcgatcaattaatgtatggaccatacatgtatattaattgctgtatacctatccacttatttaaaacacgtcganangttnangnnnnnnnnnnnnnnnnnnnnnnnnn

SEQ ID NO: 396283 - DNA, 388 bp, Oryza sativa
  unsure (1)..(388): unsure at all n locations
aattcacncctcctaacaagcgaacaaaagcttcactgcccccttgtctgcaatggcgtctcgagctttcccacgagctccccgccgctgctgctcgccctaggggccccgacgctccagcggtaaaccctacctcctcctcctcctccgtcgccgggatggggtccacctcctcgccgtccccgccgccgccgccgatgatcgggagggccgggaacctcaccgtcttcatcacgccgccgtcgccgggagcacgcgcgctcctcgcgcccgtccgagtcccctcggtcgggcttctcgaccccggcgacggacccgcgcacggccgctcgacgtcgacgacgtcttcggttccttngccgaagaagnagagggtggcagccggcgg

SEQ ID NO: 396284 - DNA, 411 bp, Oryza sativa
  unsure (1)..(411): unsure at all n locations
gcagcttaatttcagcttactgatcagtgatcactgagctagctgagacaagtttttgagtatggcagcgaaggcatctgcagtgttcgtcctgctggtggtggtgctcgcggtggccggccgatgcggggagcggaggcgccgacgtgcacgccgacgctgctgacgccgtgcgcgccggcgatcgtggggaactcgccgccgacggtggccttggcgtggaagctagaaggcgcacccggcgagctgcttctgccagtacaagaaggacccgaacatgaagaagtacgtcaactcgcccaacggcaagaaggttttggccaccttaagtttcccttgcccaaatcntaagaacctggtattggtcacaaangacttgtcatcaatacagtagcacaccaattggaatat

SEQ ID NO: 396285 - DNA, 283 bp, Oryza sativa
  unsure (1)..(283): unsure at all n locations
cagaaaaccgtacttccaaaataagcaagcnaaacctccggaaccagtgttcggcccaaggcccatctntcctctacgtccggcggcggcgcatcccggcctcgcgctccggcggcggcggccagtntgaggcgganggcaccgcggcacgggagggcagggcgcanggcgacggcgaggaagccaaccgggcgcggcanaagggagaccgcgtcttgtctgcacggctccattagcggctggaggtgggactngagccgggagacccaactagcgtccaccg

SEQ ID NO: 396286 - DNA, 500 bp, Oryza sativa
  unsure (1)..(500): unsure at all n locations
antacccggacaggctcaaggtgtggtacgtcatcgaccagttgaaccgcccggaggaaggttggaattacggcgtcgggttcgtcacggaggaggtgctgcgggagcacgtgccggagggcggcgacgaacacgctcgcgctcgcctgcgggccgccgccgatgatcaagttcgccgtctcgccgaacctggagaagatgaagtacgacatggccaattctttcatcgtgttctaaactcctactactaaattatacgcaccgcattaattattttggtatacgtacgacgatgtatatacgtgtcgtgccaattagaaacgaaatgctgcatgcatgcgtatgcaagatgagagaaaaaaaaacaatatctaagttgtagtagtgtactcttgataatatcctagagtacatactgcatacatagggccatgatttccctttctaagaggctangggtgattccttcctgnatactagtggttgtaattaccataact

SEQ ID NO: 396287 - DNA, 448 bp, Oryza sativa
  unsure (1)..(448): unsure at all n locations
caacgancggagcaagtccacacccacacacgcaccagcaccagcccaactcactcctcctcccccagattccgccgctccctccccctcgccgcgcgggccgccgcgccgggntggccaccagcaacgtcgagctcgccgtcgcccaggccggcggatganagccagtnaaccatgggaggattttnctgttgcctctgcactgacgatttcnaggagtacgctcatccaaataaccctatctataggcaaggtgtatgcctaaggaattttttccacaacttttttggcggggtatactgccacattccagaggctcgaatctagacctagcaacccagctcaaggggctgctccattggcatccactaatccaagtaccaatataactggncaattcattatccgaaacttatcaccttgtgtccagaccttccaccgtatgata

SEQ ID NO: 396288 - DNA, 680 bp, Oryza sativa
attgatttggtgagtacagcatgcctaaagaaaaaggaggtgcaaacaaaaagctcaaagcggaaaagaaattggcttgataagatgcacaagtccacagagaaaggaagtaagaagggaggtaagaaaaaggaaaaaggatcaaaggaacaaggaactataaagaagggagggaaaaaaaaggaaaaagaagcaacggtacaagacagtgcagcggtgcaaaatatttatcctaatacttctttgcccatggaagaattgtctgaaccatacatggccatcaataccttctctcagatattgacggggccaattacagatgatgttttggctgatttctagtagcatggacagttgctgcaatctgaaatataacagattgtttagggggatagcttttgcttttgtcgaagtgtaaagttcagggaattgcagaattgcatttctgaatagcagagcattttgtgcatctctgaacttgcaacattcagaattaccttttattcaattccaaacaatttacaacacaatgacaatcacaagttacagtcttgctagctctagcacaaatgtcacttcacaagcaagacaaccttcctctgttactcactgaaaatttcagacatagcacacgatgaataaaacacactggaaatttcagataaaaaaaaaaaaaaaaa

SEQ ID NO: 396289 - DNA, 421 bp, Oryza sativa
  unsure (1)..(421): unsure at all n locations
cccacggtccggaggcggtcgcgtctaggaggcccgcgcgaccggtacagaggatgccggagcggtngttgcgggtggtggtggttccgggaagggggcgaagaggaagggatctcgtgggagagtcagagccgagagggccaggaaatggcggcgatctctccaatttggcctcctttcgaagcggaaggagaaaacatcatctcgtttacttcactatgtgttacataagcaactgttgagtaaacacaaaggttctaccctgcgtacacagaaagaaccctcagcacagaagagtaaacacaaaggttctaccctgcgtacacagaaagaactctcagcacagaagaagtttcaaaatacacatgattgcatgtcaactcatgaaaacaacctgaataagcagtacatcagaggaatg

SEQ ID NO: 396290 - DNA, 692 bp, Oryza sativa
  unsure (1)..(692): unsure at all n locations
aacctaaccctgcagccgcgatcgctggcagcaanangagaggagtgggcatggcttcgtttgcgcgatctttcttgggctgcggcggcaaggcaggacgcgcgggctcgccgtccccgcactcatttcttccgaggtccgcggcggcattctcagccagcgcaagcagnctcctgggtntcacgaggcagggagcggatntncccacaaggatccgtatcctcccctatctgaggcggccaccaagctaaatgcactgctggatgaaatttaaggggaagaagctcaattcccgtcccattggtaatggtggggcaaaaccatttcaaactttgaaattgttcggagaagaggttcactttcaaaaacatcgggtcgatcattgggccattacccgccgttcttctttggtggctaacttcactggctattgtatggaagaggagaaaaccaggaaaaaaaggcaatctttagtgaattaagaagcccgcctgtagaggacatatgtaaggtgtcccatgtgtgcaaatgtggaagtctctatctaatctagatctccctttggatatgttaactgcactgtttgtttccattcaactatgctgatatctgttacattgtgatctggaggcagcattagagttgtacatttttattnnnnnnnnnnnnnnnnnnnnnnnnnnnnnnnnnnn

SEQ ID NO: 396291 - DNA, 303 bp, Oryza sativa
  unsure (1)..(303): unsure at all n locations
attattgcccctcccaattattaccgaccacacacctcgtcggtgtgttcgagaacacgccgtccgcggccggaactcctcctcggagcgctccctgccctgagtccggtaggtggccatgacgaagatgtcattctccagcagcgccctcgtcctcgtgctgccgtccgtcgtgtccggcaccaccggctcgcaggtgagggcgccggcgttggcgcgggcgaagggctcggagccggcggggtcgaggacggcctcgtggaggagggaccaggcgcggacgagctcgtcctggtggtgctn

SEQ ID NO: 396292 - DNA, 459 bp, Oryza sativa
  unsure (1)..(459): unsure at all n locations
aagtcgcaactatttattctgaccatatcattgcgaccttgagacagacagatcggtagatactggttctgtgcgtggttggaagcaggagaacacacaaaagccatggcgagatcggcgtcagggaggagtttgctggtgatcttgctcgccgtcagtctcctcctcgtcgcctcctctgacgcagctcgtttcacaagaagtaacaggatggcgatgatggtggtggaggctccggcgcgtccgggtgttggtgtttcaggttcagcagaggatgacgtgagcacaagcgatgcaatcgtgggagatgtttggaaggatggcgctgcagacgactgattaccccccctcaggcccaaacgatcgccacactcccaaggcacccggcacatgatgacgccgcaaaagccaagaccaccaaagntttctaagctgaatcaggacgcaccatgtacagnt

SEQ ID NO: 396293 - DNA, 576 bp, Oryza sativa
  unsure (1)..(576): unsure at all n locations
ctgctcgcgctccncgccgccgccgccgccgcccttcttcccctccgcagtgggcncgccggtggccggcggcggtggncctttcgctggtcgacgtggaatgtatcgttggccaggccccaggacatagcaagccaatctaagggtttatttgggggagctttaaattttgagaagcagctgtttggtagccagcttctgagaatctggaaaagctctgaaacctagcttttatatctcctggctttttagttcatttttcagaatcttagactgtttggggcagcttctagcagaagcagcttttaggaaaagctgcagctgggacaaactctcccaaacagggcctaagtagcacatagatcacatctattttaaattcttctgaaacttgttgatgtgtgtccattgccaaagactggagatataatctattttcattattaaaaaaatagcacatagctagaaattcatgcccaaaagtttgtattcgagtctatgtaaatttgctccaaaggtatntgaaactgttgaataaagatnntttntggggggttttannaaaaaaaaaaaaaa

SEQ ID NO: 396294 - DNA, 689 bp, Oryza sativa
  unsure (1)..(689): unsure at all n locations
anctatatttcactnttgtacaaggggaagccnnttattggcatcattgancanccaatcttgagagaaagatgggttggggttgatgggcttatnacaaccttaaatggacaagnnatatctnttcgccctngcaatgtcctggcacaagcttacttatatacaacaagtccacatttcatttgcaggagaagctgaagatgcatttattcgtgtacgggataaggtcaaagtcccactgtatggttgcgattgctatgcctatgctcttcttgcctctggttttgtagatcttgtcgttgaatcaggattgaagccatatgattttctctcattggtaccagtcattgaaggagctcgaggttcaataacagattggaaaggaaacaagctccattggcctgtctctgcggaatcacggcctgaaagtttcaatgtggtggcatctggagacgcccgtgtccacaagcaggcccttgatgcgttgcaatggcactagtctgcaaaacacatccaagtttggtctctaaacaaacatgaatgtgttattcatgtgtccaataaacagtgtattttgtatgcttgcgccgtgagcgactagttattcaaattgcactgccactaataaaatcaatttgatggttattcggctgnnnnnnnnnnnnnnnnnnnnnnnnnnnnnnnnnnnn

SEQ ID NO: 396295 - DNA, 402 bp, Oryza sativa
  unsure (1)..(402): unsure at all n locations
gncggaaatccgccgaccttgcgcctctgtccgcctccgccgctgccctccgccacctcgggggaagggaaccgtccgggccgccgccggggttgtcggtgaggggggctcgctccagtcccccacaatcccaccgttccccctccgtcgtcgagatcttcccgactactacgagcggaggcccggcgcgcgcgccaaattgccgccgaggaggaagaagggcgtcgccgccaagcagaagccgccggagccacccgccgccgacgcgccgctgcgggaccggctgaggtggctcaacgaccaggaatatgaacatcggagttcttgccattaaagctattcaagcaagcttgagattnagatttactttctcggttgcgttttggttnaatctaaattttc

SEQ ID NO: 396296 - DNA, 575 bp, Oryza sativa
  unsure (1)..(575): unsure at all n locations
ggcagcagggatgagcagccgcgacgccattgtagatcatactcctcaatccatgcatccctccggcttggagcaggatgaacgggggctctcttctccttccatggatgagggcgctctcttcgctacgcgagcacttccatccgcctatctgaggaaaaccaaggttccaagttcttcgatggtatggatgatgatggaaacacgaggagcaatggcggcagggataatggccggctgtatacaaggaatcaagaaccagctagaaggccgctgccgccaatggcccagcaatatgatccagaccagagctggaagcaagaacaatctgcgatgaggcagtcgagaccacaggaactgagcaatgggcagacgagagagcaattcatcgcggcgatgcttgcaaggccctcaaacccagagtccggtcctgggcgacctcaaccgaggactaagcagcatcaagatgcctcgccagctcaaggcagatcgcaacctatgccatctgataaatcggcgagccatcacgatgaaaattcagttcggggcaaagttaggacttcgccgangaattc

SEQ ID NO: 396297 - DNA, 668 bp, Oryza sativa
  unsure (1)..(668): unsure at all n locations
cccacggtccgctagccgccgccactcgccgtcgtcgacatcgtctccgctcctgagctccagatccagaggcctctcccgcctccaggctcgccggccgcccgcccgccttcgctgccgatggggagcgaagccactcaggggaagaaggaggaggaggaattcagtacggggccgctgtccgtgctgatgatgagcgtgaagaacaacacccaggtgcttatcaattgccggaacaacaagaagttgcttggtcgtgtgagggcatttgatcgccattgcaacatggttcttgagaatgttagggagatgtggactgaggtaccaaagactggtaaaggcaagaagaaggctcttccagtgaacaaggacaggttcattagcaagatgttcctacgtggggattcggtcatcattgtgctcaggaacccgaaatgagttatatggtcttgtatccaggattgtctctttgctacgtcgctcttagtaatgtccaaacgcctttggctaagattgaccagaatcagctatatttgatggttcagtgttgtagttggagttgttatggattatgaacgtctcttgtatctaagttgcatcgttagcatctgtttgaatcatcaatatattagctgaagacaatttggnactgcaaaaaaaaaaaaaaa

SEQ ID NO: 396298 - DNA, 963 bp, Oryza sativa
  unsure (1)..(963): unsure at all n locations
gattactagggagcgaatgttcgctccattgctgttcccaaaccctccaaagtccaaacccctctcctcctcctctccaacgccataaaccacagagagggggagaagaagtggaagcgtgaccgccgcagccgcacgcgatgcagcagcagccgatgccgatgcccgcgcaggcgccgccgacggccggaatcaccaccgagcagatccaaaagtatctggatgaaaacaagcagcttattttggctattttggaaaatcagaatctgggaaagttggcagaatgtgctcagtatcaagcgcagttcagaagaatctcttgtacttggctgcaattgctgatactcaaccgcagaccactataagccgtccccagatggtgccgcatggtgcatcgccggggttaggggggcaatacatgtcgcaggtgccaatgttcccccccaggacccctctaacgccccagcagatgcaggagcagcagctgcagcaacagcaagcccagctgctctcgttcggcggtcagatggttatgaggcctggcgttgtgaatggcattcctcagcttctgcaaggcgaaatgcaccgcggacagatcaccagaacgctggcggggccaccttcggagcttccgagagccacaggagcaccggcaccgaaaatgacggtggaacgacttcggcgatcaatcctaagggtaagttggccttttcaggtcgcgacgaaaaacaaaaaaaaaaacatgtaggcaacgaactgaattggaaaaaggggatcattcctgtgcccttgaaaacggttaaattggccgtgattttcgccttgattgatggtcaagtggtttttaaaattacctgtgtttttgagactttcagtctggtacaaacgtagattgctgcaaggatttgtgctttggttttgactcagnnnnnnnnnnnnnnnnnnnnnnnnnnnnnnnnnnnn

SEQ ID NO: 396299 - DNA, 470 bp, Oryza sativa
  unsure (1)..(470): unsure at all n locations
cgctancacagatccgctcctggctcctgcaaggctgcaacctgcaaccccaacaccccttcgagaatcgtcgtgcgcgcagttcctcacaccatgtagcagaaggaagatggatgctaacagacgccaaggtggaattcagcaattattggctgcagagcaagaagctcaacagattgttaatgctgctaggagcggcaaaagaggaggctgagagagaaatagctgagtaccgtgctcagatggaagctgagttccagaggaaggttgcggagagtagcggtgattctggtgcaaacgtaaaacggcttgagcaagaaactgacacggaaattgcgcacttaaggagcagcttcaatgtttcccctgaagtgatccaatgcttcttaggcatgtaaccnccgtaagactgttaaagtttgcgtcctnccgccaattaagcaggnttggctcaattgtgtctacctttt

SEQ ID NO: 396300 - DNA, 833 bp, Oryza sativa
  unsure (1)..(833): unsure at all n locations
cttctctcttctctcttctccacatcaccacagccacaccacactagctagtgttcatcatcatcatcatcatcatcatcatcttcttcttcttcttcttcttcttcctcgcttcgttttgctagctcgatcgtgtctagctggtcgtcgtcgtcgtcgtcgtcttcgccatggccggctgtttgcagacgagaagcaggaggaggaggaggcggccatggtggtggctggtggtagcggcgctgctgctgctgctgctgcaggcgtcgagctgcgaggcgacgcgaggcatgcagccgttcaaggggaggccgctggagagaggcgtctccaacaacttcttcgggttcttgccccgtggccccgngccgccgtccggcccgtcccggcagcacaacgccattgngagccgaggaccaaggcaacccatgaattcgatanatgtagagagagagagagagagagagagagagagagagagagagagagagagagagagagagagagagatcagagttgcatagatatcatcgaaattaatcttcttggttaattaattgtagctagcactagcagtagcacatgtagtagtagtagtagtacgtagcagtacgcagtatatacacttcggcaagaagaagaagaagaagaagaagccgcaggtatagtacagtaggatcaaggatgatgtacatgaagaagcttttttttcttttccttttttttgggtagggctctctgtcaaatgtgttggctgttcatggcattctcttctcttttggnnnnnnnnnnnnnnnnnnnnnnnnnnnnnnnnnnnnnnnnnnnnnnnnnnn

SEQ ID NO: 396301 - DNA, 585 bp, Oryza sativa
  unsure (1)..(585): unsure at all n locations
aaagaaaatcccccgatccccttctctctcccgcggccggcggcgcgagcttcggcggcggcgganggcgtctctnctgctggagctgctctnagctgcttgcttgcttgcacattgctggttgtcgccgatgaagctgcttcagcgcgtcaaccccacggcagcggcgtcgctcacggcgctcgcctccgtcgtgctgctcacggcgtcggcaagccgcccttcgttcctccggaggttcgagcccagcatcgcgtcgctgccgagggccgcccggcgcgccgcgcgcgggaacttgcgacatcttccgcggcgagtgggtgcccgccaccgncgccgacgacgggcggcgccgtactacacgaacgccacctgcggggagatccaggagcaccagaactgcatgaagtacggccgccccgacctcggcttcctccggtggcggtggcgcccggagcgttgcgaagcttcccgcggttcgacggggcggcgtttnctggacctncttaaggggaaagtccattgcgttcgtcggcgaattggttttcaggaaccatatgaagtttttcctgttgnctccttttc

SEQ ID NO: 396302 - DNA, 463 bp, Oryza sativa
  unsure (1)..(463): unsure at all n locations
nttttggncgnagggnaagatgtcgaagaagaacaacctcgccaagcgacagaagcagcacgagttcgacctccaaagggaaaaggaggcgaaggagaaactggccaagaagctgcaggccaagaaatccaagatgaagatagatggtgatgtgaaaaggaagggtggcaaatttaaggttggcaagaaaaaggtgaagacaaaactttcagccttaacaaaagccaaagctgcgcaanatgggaaggtcgacaagtaactggggagttttacttcctacaatctgtgttccattgctaaactgtgctccagtgttgatatagttttgatggaagagaacaagttctatgctcagatgagtgcatttgctcttggtcaagtgaccatattccatctagccttcgagtctactcagttggagcttgttactcttttctataccttggttttaggagtacctttt

SEQ ID NO: 396303 - DNA, 908 bp, Oryza sativa
aagacaccccccaatttgacatttagaagaaaggacaagggtggcatcaattttacatcaactgtgacgaacacaaacttggatcttgaaacagtaaaagcaatctgcagtgagtacaggatacacaatgctgatgtctcccttagatatgatgcaacagccagatgatctcatagatgtgattgagggaagccagaatttacatgccttgcatctatgttgttaataagattgatcagataacacttgaagagctggaaatcttggataaacttccccactactgcccaattagtgctcatcttgagtggaatctcgatggtcttctagagatgatctggggaatacctgggatttggttaggatatacacaaaaccgaaaggtttaaacccagattatgaggaccctgtaatcgtatcctctaagaggaaaacagtggaagacttctgcaacagaatccacaaggacatggtgaaacaatttaaatatgcattggtgtggggttctagcgtgaagcataagcctcagagagttggcaaggaacatgagcttgaggatgaggacgttgtccagatcatcaagaaagtttaggtatattgtagtggtcacgttctgcaaacctggaaggaggtatgagctatgagaattttgagaagcagtcacttttactgcgtgttattttgctagctatgatgcccatagatgattggctgttcccatgaacgtttcaatgcaatcaaaatgtagacggacagattttccttctgtcaagttagccttgtaattgtgatctttgtctgatcttcctgttgctatatatatggtgagtcaccgatgaacacagcagttgaacacatggaaagatgctttgcttatcttcagaaagatgaaaaaaaaaaaaaaaaaa

SEQ ID NO: 396304 - DNA, 329 bp, Oryza sativa
  unsure (1)..(329): unsure at all n locations
gctcacctcagttgattctagcttagcaacacacaagcacacagctagctagctcagctctctgtgcttctctagctaagctaatcgttttcaggcgaaggaagcacacacatctccatttgtgcatcagatcaccggccaggtcgtcggcgagaatgcagtacggagcggcggccgagcaggcgtgggtacatgccggcggcggcgcagcacacgatcgggtggaagagcgcggtggcaggtggtggagcggctggcgtccggagagcgcggtggtggtgttcagcgtgacagctgctgcatgtgccacgccgtnaagcgcctcttct

SEQ ID NO: 396305 - DNA, 639 bp, Oryza sativa
atgaaaggataatatggttaggagatctcaattataggatcaacttatcatatgaaaaaacacatgaattcatatccatgaaggactggaatggtttgttccagaatgaccagctaaaacgagaatttaagaaagggcatttatttgatgggtggactgaaggagttatcagctttcccccgacatacaagtacaaggtttaactcagggacattacacgagtgatggacccaaaatctggaaggagaacacctgcctggtgtgaccgaattctttcctttggcaagggaatgaggctgcaggcctacaggacagttgatatcaggctatcccgatcaccgcccttgtgacagctgtgtacacttccgatgttgaggttttctgtcccaaaaagttgcagagagctcttaccttcaccgatgcagaggttgaggaccaattctcatttgaggaagagagcacttctggaatctttagcttttgactaggatgagcaccaagtacatcggggaatttatgtaatgaattgcgatgcttttctgaagtctccgaggaattattgttctcacatttcatccgctatttccagtatccatcctactcgcaattagcatcggccatcatgtaaaaaaaaaaaaa

SEQ ID NO: 396306 - DNA, 496 bp, Oryza sativa
  unsure (1)..(496): unsure at all n locations
ctcttctctttctgcctgagctgcatccccagttggcgaacatgaaagacaagtttcaccgttctggactttgcttggaagttcccatgtatattgacgacggcgagtattttggggatgaaaccggtacccagctgaaatgtcgtcatggcctccgcccgaagagaagaactgcatgggaatggaaggacaccggaagaaggtttcttggttgcccactggaggaagaggaccagtgcgacgctttgttttgggttgacgaagaatggcaaccaagaatacaaaaggcatttgagatgctctggcttgcattggaccatgcaagtacacgcaaccctaccaaggcgcagtaccaatggtcaaattttgtagacagaacaatagtcgaggaagacaaaattaagttagaatttcagatggcttcacagatctcggcaatcgaagcaaaacataagaagagagtttcnggggttaaaaagggancagaagaccttaa

SEQ ID NO: 396307 - DNA, 542 bp, Oryza sativa
  unsure (1)..(542): unsure at all n locations
gttattncaaatgatcgattatnagatgttgttgatgaaaacacgcctntgcaagatgcgtttcttcttgcagatgatgttcttcgtcaaggtgtccaaggaatatcagatattattacaatacctggacttgtcaatgttgattttgctgatgtgaaagctgttatgaaaaactctggaactgcaatgcttggtgttggtgtttcttccagcaaaaatcgggcccaagaagctgcagagcaggcaacacttgctccgttaatcgggtcgtctattgaggcggctactggtgttgtgtacaatatcactggtgggaagggacataaccttgcaagaagtaaacaaagtctctcagattgtgacaagcttggccgatccttctgcaaatataattttcggggctgttgttgatgaccggtacactggtgagattcatgtnacgatcattgccacaggggtttccacaatcctttcagaagtcccttttggccgatcccaaggggtgcaagaataatggaggccaaagaaaaggcagcgaacct

SEQ ID NO: 396308 - DNA, 871 bp, Oryza sativa
agccgccatacccgcgccgcaagtgccgctgccccttccaaatccggccacccctttccatctccggccaaattgtttgaggggaaatgatcccccggatctcctcttccttttcctttttggaactatcgcaaatttctatggaaatagcccggattcgaattcgattcttcccctctaaccctaaatcttccatctcgccgggctcgccgtgggcctagccgccgcgctttgccgtataaaatgacccccgggacctcgtccattcgccaccatcctcgccttggcttgccgtagctggtagagccgcctccgccctagctcgtgcgccgccgccgttgccgcgtgtccaaccgtgccgcgccaccactctagtcgccgtcgtcgctcggggttgccgttcgccggagcggcaaaggtcatcgccgtcatcgtcccaccctccgttttcaccgaagaccgctggaccgccgtcgtcgccaccgccacctcgacccgaagaccatcgccgttgacccgaagaccatcgccacctcgacctcgccaccgtcgccatctgtcatcgttcgtgtggagattatgggtaccccatacccacacggcatggttattagactggttataggagataacttatatctatggaatatgtaacggatcatgacttgggtattacgtttccctgctatattatggaacggcctaaagtcctggtttgataagattgtaaagtagatttaggaaaccgactaccgtgttggttaaggtttctatcttataatccgccccccatcctatataaggtgggcaggaggctctaagggcatgagacaatagtatcgtcagactaactacaccggtatcaatccaa

SEQ ID NO: 396309 - DNA, 1080 bp, Oryza sativa
  unsure (1)..(1080): unsure at all n locations
atcccaagtgtggcaaggcaatcggtgcacttaagggtcacttggattactctttcgcatctncctggcatcctgatggcaatatcttggctaccggcagtcaagatacaacctgtcggctgtgggacattagaaacctatcagagtctgtggctgtacttgccggaaggatgggctcgatacgttgcatcaagttctcttcagacggccggttcttggctactgcagaacctgtggatttcgtccatatctacgattcatatgcagactatggcagatctcacgagattgacttgtttggagagattgctgggatttgtcaattcagcccagacgccgaggccttgtacgttggcatagcagatccaacatacggtggcctcatagagttcaacaggaggcaccaacatcattatttgaactgccatgtggtgatcgccatttgttaagcgaaatgtgccgtctttgctgaggcttcagcagtccccccgattaatgtgctgccataacttgcaccaacttgtggaaggcgcacctaatagtgaaaagctcattaaaggaaattttgctgctttagtttttagctgcagcaccctgaagctcatgaatggccccgaactgtaaaattctgtcccttttgtctaaaatgtcacttaggaactgatggaggtagatatatatgtatagccgtcctatttcatttttctccaaatcgatgtacatatagttgtggtatcccggttctttgcaacgcaacgagcattggcaacaaaatagcaaggataaattatgccagaagtggatggttcggcacatccggaagaagattttagctcaatgatcatatgtgttccactcggttgttcggctctcgtttatacaagaacagggaatttcccagcagcgaccttttcagtccttgggacacgtagaaattgctngtcggtggctcggagccgttctctctttatcaaaccgaacatgcttggaattctctattatcataattttgcaatatccatttatagatattgaaatcnnnnnnnnnnnnnnnnnnnnnnnnnnnnnnnnnnnnnnnnn

SEQ ID NO: 396310 - DNA, 399 bp, Oryza sativa
ccactactcagtcctcacctcggtagctaatactactttactttattactgtcgttttggtttgcttagcagaatatggttggcgtgagcgagttcgtcggcggcctgctcaactccgccaagagcgcggtggcggccgtggcctccaccgtggcggcggcggccaagccgggcctcgccgcgggggtcggcttcgtgaaggagcagggcgtggggaagtcggcgctggccgtcggcggggccgccgtggccgcctacttcctctggcccacggcggcagtcggcggcgccatcatgaacgcgccgggcgccgccggctacgtcatctcccgcgcggcgttcctggcgaaccccaagctctacttccacctcctgcgcacggtgggcgccaagccggcc

SEQ ID NO: 396311 - DNA, 404 bp, Oryza sativa
  unsure (1)..(404): unsure at all n locations
ggactacggatcattatattaagacattacaagcctcagaatatgagaaagaaactgaggcaatggacaacaagtgtgttctttacctttgccatcatattccaatatgtgaaaagataaatgttacatgtaacaatcgtgctacagttcaatgacacagctacacctgcaaactgtgatttgctcatttgtcgaaaaatcatctttacaacaactctacggaaccagcctcgtagtagtacccgtgggaagcacaatcaaagaggttataccaaacacttcgcaagcagcaccanccaaagtttcgtcagaattcagatagagaggcgttcatcaatatttcatatttccattcaaggctcatcccattgtctgtatttccagggtggcgtgacgggtccgga

SEQ ID NO: 396312 - DNA, 470 bp, Oryza sativa
  unsure (1)..(470): unsure at all n locations
ttctcccttgtctgatcttttctttcttgcaagctgagctcccagctcacttcttcccatcaaatctcctccaaacactttggatccatccctgcatgtcacaccactaaacccccatcactctaagctcctcatccatccgaaaatctcccacatgcatggattcgtgagagagatcgagaagaaggaagaacaagcaacttgcagcctatgaggttacagcagcagggagaacttatttccattgatttatgagtttccctctccatccatggctcccctatgaggttctccattgtgttggtcatctctagtgcattccataggtcatcgattcaagattttggaggcaagtgggtagctgcaactcgtccctctccattcgcaggacaaccctgaggattcttcggtttaatctcttgattcggggattccggggggnacgggccatatcccangggggtagtgct

SEQ ID NO: 396313 - DNA, 712 bp, Oryza sativa
  unsure (1)..(712): unsure at all n locations
ggtggcattagaaagncctgccatgganctttgccagntggataaaagatccacaggctgtaaacgcgccnccgtaaacaaatgctcccaaggtccaaatgccagaagctcatggctgtccactccttgggctacactgaattcttccccggtgctcgtaatcgggagcgagtgtgaccgagccaagccattccctgatccttacctcaaggctcttgagcttattggtgcatcacctgatcacacattcatttttgaggactccgcgtccgtggattcgagccggtgtagctgccaaatgttcctgtagttggtctgacaactaggaatccagagaaagttctgccaagatgccaggagccaagcttgctgataaaagatttcccggacccaaagctactgtccatacttgaagagatagaacctacggttgccgccgtcgagcaagtctgattttttgcagatggagcaattggaattctggagtactagatggagcattttttgcagatggaacatgaatactggaataattatacatctgtctatcctaacaaaataaagctgatttctagatggggccggggtcagcacacgtcttaggacttttgagtttgtcaattgaccatcatctgtgcatgtgacttgctgtaaaaactcctgtaaaaaactcccagtatgcatattgccgaaaataaaaaaaaaaaaaaaa

SEQ ID NO: 396314 - DNA, 485 bp, Oryza sativa
  unsure (1)..(485): unsure at all n locations
gaccacgaccgggttgaggagattcctgacaacttcccctttaaaattagtgatgaaaagggctttaattcaattactctcacaagaacttaccagggtgagaatattgaggttctagtttccatgcccagtcttgtgactggcgatgaacctgaccgtgagaatgaggctgatgaggacagaaacgaggatgatcaggaggatgaaactcagaaggccccaaaatctagcattcctctaactgtcaccatctcgaagggagaagagggaccaagccttgaattcatctgcactgcctatcctgatgagatcctcatcgatgccttgtctgtgatgccatcagagagtngggaagatgaaatgatcacgtatgaggggcctgatttcaatgaccttgatgaaaacctncaaagggcattccacaagtacctggngatgcgcgggattnggccattggccacaaatttctacanggttcatgttca

SEQ ID NO: 396315 - DNA, 489 bp, Oryza sativa
  unsure (1)..(489): unsure at all n locations
gacgatgcccactccacatactatttcgggtacttccccttttccacgcaacagcagcaccgcgncggagatgatcgtgacggagcaggagcacctgcagccgcggcaccggagtctaggaagagggaccggccgccgccaacgccgccgtcgggtaacatcaaggcggcgccgnccccatcnccggaggggaggtggccatggccagtaatgaggaggcgcgggacgaagacgtggacaggttctacgcgctgctcgacgaggtcagggagatgagggagctgtggcgacggaacggtgattgtgtcgcgaccaagcggacgagcgtggatggtggccagaagaagcaggatcgccagcagctgtggcggccgacgtttttaatggaggacttcgcgttcgatttgaagggaagccaagtagtccaaccggagangaaggtggcagcgtgnctaatcttcgatcttagttttnaatgtaattttttct

SEQ ID NO: 396316 - DNA, 350 bp, Oryza sativa
  unsure (1)..(350): unsure at all n locations
ggctgatgatggtggcggcgatgactaaccattcactaccacatagaggtatgtagaagagcaacatttgtttaggtggacttggatgctggaccccagccacagccagggcctttagttgagccttcgaattacaaattcagtgccgtgattctttgctatttcgggtgcgagaggtggctgaatgcctgagttcatagttgcaggcatagctacatcttatgttttaagttatgtatgtatacaaagccccttgcaccaaaagagctgaaaactgctcaactggctttaatttgtctgcggctataattttgcacggcagttgtgcatattgttccaaaaaaaaaaan

SEQ ID NO: 396317 - DNA, 461 bp, Oryza sativa
  unsure (1)..(461): unsure at all n locations
atcaagaactctgctccaaggtcggcggcggcgctctccctagctagccgctccttctcctctgtcgccggcgggcctccgaccaccgcaggctccgtcccgccgcctcccagggtagtcatggcgagattgatgtcgtccgccctcatcaggggtctcgtgagatcgagctgctcgccgaccgtagctgctgtggcccaaccaactatccatcagtttaggaactactcatcaggacttggtggcgattctactgcaactggggactcaagttcaacacgagttgctgctgatcctgatacacatcaagatttccagcctacaaccaaaagttccaacatggtctttttgatgacatttgtttctcaggatatcaaggaggaccccagtcctgatctacatgaaggggtaatcctgatgctcctaaggtgtggggttaaatgcgttgggaattagnggtc

SEQ ID NO: 396318 - DNA, 365 bp, Oryza sativa
  unsure (1)..(365): unsure at all n locations
cgcgtacaaaatcgcagtcgtgctcgtntcatcccgctgtatataagcaggcgactcctgtgtacccgcgcacacgcaaaccatttgcatttgagccttttgcttgccttctctcctgtcctgactgcagcgagagatcagtagggagagggcaatggcattgacggtgcggctgcacacggcggtggcggcggtggccgtggccgtggtggtggcgatggggatggcggcggcgcagatgtcgccggcgggggcgccgggcccggcgggcgggtatcagcccggcgtgcatggacgcggtgctcaacatgtcggacttcctgacgtacgtaatgaacgggaagcacngcgcggaaacccgacga

SEQ ID NO: 396319 - DNA, 757 bp, Oryza sativa
  unsure (1)..(757): unsure at all n locations
atccatccatccatccatcgtctcatcctaccacagatcacacacacaccaagaacacctagcggcgagctcttcgccctcgcggccgttcttggctttgtctggctcggtttgcttctgcttttgctcctgcatgcgccgcgcaatggagaggaggcctcgtgacctcgtcgccgtcctggctctgtcctgcctcctcctcctcctcccactgctcgtctcctcggtgcccatgtcgagaagcctgcacttgagcagccagcagcagcaacacccgccgtctctgaacctctctccagatgagatggcggcggcggcggcggcgagagggctcggcaggaggccggcggcgaggatggacgtggaggtgaacgactaccccgggtcaggacccaacaaccgccatgaccctcccaaaggtcctgggagagcatgaattcagtcaagctgaagctgctgctgctgctgctgctggaacagcttgtagtagtttcatatccctgctagctattagcaaattcacataattaatccagcgtctaattacataagtcgagaggctgtatgtgtgatttggggtgtaattagtagagagcagatagctagcaagttacaactgcagatcgaattgagaaaatattcagggatgaagactgtaaagcttttgctagcttgggcctcctctttgcagcagtagtatagtaagtaaactagtaaattaattnnnnnnnnnnnnnnnnnnnnnnnnnnnnnnnnn

SEQ ID NO: 396320 - DNA, 970 bp, Oryza sativa
  unsure (1)..(970): unsure at all n locations
ctgtttcttgccagaggaactaggacagtagactggccatggtagccatccagattccagtctacttttttcaagagacaattgtagtgtggagaaggcaattgacgtgatgccccggccaaaatttacatcggtttagattacagggaaaggttagccagatataagacaatacatggtgagattttttttttctttttagttcactgatagcaggttagcagcaatgccaagatgagagacttgattccctgaaactgaacattatctcctgatttagagtcagttaatggttagctattgctgtaatcccctctttgtattgaatacaacagcatgccccaaagcataagcaagccgctctgaaaagggccaaactgcaagcgttctgncatgcctccaaaaccagaatctgcatatccaaatggtgcccagaccaagccaccagttaggttgacaactggtgcactcctctgaccataactgaactcgagtagatgatatcatgatattgctgattaaaaacagtggcactctcaattgtggctaggaacaataaaggttggcggatgggagcaggaccactggatgtgtttcgtgtggactccggccccacgctcgccctccctcctgcactttcctctcctcctctcctctctggcggcagaaacagctcaggatggcgcggctcgaggcgacgacagtagagcggtggggctgcacgcgtctacaagttatgaaatggccgtatctttttttaaggaaagcaagaaaggtccattcaaagaaacaaaatatcattttcatgctaattagagtttatgtttttggggagtttaattatttattttcaatagcaatgttaaatcatagttggatgtgcaacatgtaggcgaggtatcgtgagtcttgtggtagatacatatatatttaagggttaatttaatacatgccaaaaaaaaaaaaaaaa

SEQ ID NO: 396321 - DNA, 774 bp, Oryza sativa
  unsure (1)..(774): unsure at all n locations
gagaaacacgttttggaatcaggatcaattgatactgttgggacagttggtattctgcagctacatccaggagcaatcaatagcatcccaagtaaatcgcatgtggaaattgatgtgagagacattgatgagaagaggaggaataatgtcattgagaaggttcaccaatccgcaattgagatatcaaagaaccgtggcgtgctattatcagagttccaagatcataaatcaggatccacctgctctatctgacaaatcagtcatccagcgcaatggaatttgctgcaaaacagttgaacctcgaatataagctgatgattagcagagcttatcatgattcactcttcatggccagaatatcaccaatgggtatgatcttcattccatgttacaaaggttacagccacaagcccgaagaatatgcgtcaccagaggacatggcgaacggtgtgaaggtgcttgcccttggcaatggccagattatccctgcagtgagcttagacatggaggaaggaaggaatcaatgagttcagatcacccaacaccttcgtgttcctgcaatggaaacacgatgtacagcaattcctcgcgtggcaaaacaaagccatggtgattcttcaggaataataaattaataacatttggaagccatggtgattcttcaggaataatagattgataacatttggatgggcagcagaaaactagtccgtatgttttcagcgagggaataaataaataaatttctgatggcnnnnnnnnnnnnnnnnnnnn

SEQ ID NO: 396322 - DNA, 628 bp, Oryza sativa
  unsure (1)..(628): unsure at all n locations
tcgagtcgacccacgcntcccggtctggagaggtttgccgtcaacgatggaaacgagatggtccgctatttaggtggccacaaggagaagcccttcattgaacaagtggaagtgttgtcgaagcgctactgcccagaaatggttgactatagggaaggggaagcgtaggaaatgtcatccaccaaaaccttcccaatccgttgaaaggatagcaatagccgtcttagttacatctcgcctcgttcaaaggatagcattagccgtcttacatctcgcctgttgttgaaatgtgttctgtggcctgtacaaaatgtttggcttttggaatgcatggcactgatgtttagccgcccaatgcacttgggaattgtttggataggccatctatgtgcacacgggcgacgacactcatccagcaaccagggcaccccctaccccctctccccgggccatggtaagcatggctgtggcgtccaatcatcttcgtatggaaagtgctgaacattacgatttaaactatgatggatggagtcatgaaccctgtaatttcgtcacaccacaggtgcattctttgttgatctgcctgcttttgtgatcttccgttttctttttcaaaaaaaaaaaaaaa

SEQ ID NO: 396323 - DNA, 411 bp, Oryza sativa
  unsure (1)..(411): unsure at all n locations
ctagatgatcctatgcgtatttagtactgttgtgtgctaacaataagtcaagttggagaaaacttgctcggatatggtttcttggttgatgccatgtgtaggtgagtgttgatgcctcgggagagcgttgcccggtgatgatcgggagtcaaattgggagaaaatgatgtccgtatgatcaagatatcatgcgggatacttagactaaagatcaatgcacgtggttagtgaagattccatatagcatacgattgagatattgtgtgcatatggaatgcagagtctgttgatgatattccctagaggcaatcatagagatgattgtatcacatactatgtttacatatttatccgacattgttccttgaaatagataattcgttattggttnnnnnnnnnnnnnnnnnnnnn

SEQ ID NO: 396324 - DNA, 319 bp, Oryza sativa
  unsure (1)..(319): unsure at all n locations
cgcgtaccccaccaaacgcccccgcgcgcgtccctccgccaccaccccgacgacctcctcaggagatcagcagatggtgacggtggcggagaggttcccgcgggaggtgagctcggaggcggtgttccggtgcgtgcggctggggccggtcgaccaggccgaggcggaggtcgcgtaccaaacggccgtcagcatcggcggccacgtnttcaagggcatcctgcacgacgtcggccccgaagccctggcggtcgccggcggggcggcgccagcaagtaccacttccgnntcaccggcgacgggtnctcgccgagcaccg

SEQ ID NO: 396325 - DNA, 382 bp, Oryza sativa
  unsure (1)..(382): unsure at all n locations
ctcactctccaccaccaaactctcctcctctcttgcaacatcaaactcatccatccatccatcgatctgagaaatccagctttccagttcttggatctccatcgaccatggtgaggccgccgtgctgcgacaaggacggcgtcaagaagggcccgtggacgccggaggaggacctcgtcctcgtctcctacgtccaggagcacggccccggcaactggcgcgccgtcccgaccggaacagggctgatgcggtgcagcaagagctgtaggctccggtggaccaactacctgaggcccgggatcaagcggggaaacttcaccgaccaggaggagaagctcatcgtccacctccaggcgctnctcggcaaccgctgggcggccat

SEQ ID NO: 396326 - DNA, 448 bp, Oryza sativa
  unsure (1)..(448): unsure at all n locations
gtaaaagaaaaagaaaaatctcccgtctcgttctcgtcgtctcctccgctccgctcgttgcgccgccgccaagacgagcaggggagggccgggcggcgatctccatccggcgagcagcggaggggaggggatcctgatggatgccgcagctcttcagtatgagaaccagaagctggtgcagcaattggaggcacagaagtccaaaatgcgtgcattggaaggcaagttcaaggagctgagggatgagcaatgttcttacgacaatacattgatttgtttgaataaaatgtggaatcagctgattgatgatttagtgctgctttggggttcgagctggtggggattttaaacggtttgtcaaagcgctttgatcatgtagagatgtcagaagaatctctttgggtcatgtccttctgagggngatatttcctcttcaagactcttgaat

SEQ ID NO: 396327 - DNA, 981 bp, Oryza sativa
  unsure (1)..(981): unsure at all n locations
atatcaataactgcctcctcattactgcatatagcagaatatccgagaacttcatctgatgctgagatcatcttcatgggtagagaatcagaatctttattgaatgaaatgcaacgccatcatggatacatccactgaggaatgaggtggaggagacatgaacaagcagtggattgagcaatgacagtaagccatagaccataggagtcggcgcctcggcggcggctggaccatagagtctgtggcacaactggaggagtttgaggtgatgataaagctagaagaacagctccaccagatgagtcatctatcatggatgtctcacgtctgtgggttcattgctaagataatggtactaaacatgggtagctttactgacctttaactttatatgncctacaagcaaatgattattactggctgatgggaaatgcggctctatctaaagaatgtggncattgactgtcctgagtttccagagctaacagtncctcatcaacccatcttaaattcaagtcttatacaacttttgatgttaaaggccatgctcagacaaggagncattactgatcctgtcagtaacggtgttggcaatgcacatgtgtattctgaagagggccatatcgtcaaccatgttgccaatgttaatgctgattctccagagggccatgtctgggatcgggaggcgacagactctcatcccatcgtccatggttctgtcagtgccgtgcagatctggagcagaccatgcttgctagtcgtaggtgcactcgctgtcttttgtgattatactagtatattctagtaacctgtatcttttatttcttcctgaaccctgatgttattctgttttctgtcaccctggagtatactgtattgctgatctacatactagttgcttctacttgggagcaatacatatgctcggtttatcgtttcctgattaatggattatctcattaccccaaaaaaaaaaaaaaa

SEQ ID NO: 396328 - DNA, 525 bp, Oryza sativa
  unsure (1)..(525): unsure at all n locations
tnctnatctggaactagcagagttggatgtcaagaaagcactggagattgatcctgacaacagggatgtgaagatggtgtataagacattgaaggagaagatcaaggagtacaacaagagagacgccaagttctacggcaacatgttcgcgaaatggaggaagctggaacacatggagaacaagaaggtgcctgggaagcaggaggcacagcctatggccattgacagtgccgcttgaggattagctctgctttcttttttctgaacctggttactgctagtactactgtctctactggttgtatgagtatgaaatatgaatggaaaatggtagttaatttgccctttgcttgatagttgcagtctttgcaactctgcacccatatgtgctcagctttgtacgagaagtggttgccgtcatttgaagatgtgatgctgtgattgtattgtggtgttagaagagcaaaaatgccataacgacactttggactgcgctnnnnnnnnnnnnnnnnnnnnnnnnnnnnn

SEQ ID NO: 396329 - DNA, 573 bp, Oryza sativa
  unsure (1)..(573): unsure at all n locations
aggagaggtgcgctattcctcccttaatttcattcctgtttcttagatacattctcgatcggtattatataatattttttttcattttatatcgtagaagtatgaacaaagtagagatacagatgtaattcataccaaagaaagaacttgtgttacacatgcagatttacgatatgaactggctagctaggagtagtagtagtacgggttcttccacgctgaacttccctttatatggtactcctactttattcttcaggtagacaaaatttcaaatttaagccgccgccaaaatataaatttgttatgcatatgccgccgctgtcatgtctctgcttttattatctttggaacttggaagttcaccgtgtataaaatcttggttctacaaacatgcacgctgttgtgccaccgtgacaacaggcaggtgacccttgcgctgcagacattcgatcgcctcatgcaagctcttcctcagtggagtaaactccaaacccaaatccctgagcctctgggtcgagacctggccggtttaccatctgagtcccttatccttacacctgnaaaatggna

SEQ ID NO: 396330 - DNA, 1342 bp, Oryza sativa
  unsure (1)..(1342): unsure at all n locations
gcggacgntgggcntttcactttactctctctctctctctctctctctctctctctctgctccagacggagnaacggcggcggacgtgctcctctcctcccccgatcgccggcgagcgggttcgccgggggcggcgacgcggccggctcatcccaccggngcccccacctcgcggcccgattcgaaattttnaaggtggcactttcagattgcctatnctagttcatttcacgctgcatatccaaaatggtgaagctgacaataatagcacgtgttactgatgaccttccgttagtggagggattagatgatggtcgggatctgaaggatgctgacttctacaagcagcaagctaaacttgttcgttcaagaacttatcgaaagggcaacatgaagcatcaaggatgtcaattgagactgggccgtaaccttttccattacatcattgagggccgtgtgtgctatttgacaatgtgtgaccactcttatccgaagaaacttgctttccagtacttagaagatctcaaaaatgaatttgagagggtcaatggcaaccaaattgaaactgctgcaagaccatatgcttttattaagttcggcccttatttgcaagtatgcccctgttgccattgtgattgggatagtactgatgctcttttgggtcaagaacaagatatggtgactgagagtaacagtcaggcctcctgttacggtgctggaacttgagttctccgtgcaccccgaatcgattctggctcaacagatgcttcaatggcttatcccgcatctgcccattcaagcgagtagtagtgtagctcttcttccgtgctttttttttttttgcctattcctcccaacaaagatcatccaaactaaacccattgtagtataaaccctcgtcattgacccagactatcctgatggatgaagaagtccttgagttcttcgagcaccgctttctggctttgctgtgtagagtcggcttttcgacctccgaaatggtatatgttctttgcaagctcaccatgtaagaattgatgtttcaggctgatggatggacaaggctcataccatccaaagctgcatggaatgtcttgtgactcagacgttttagctgcaatcgaatacgtccggttatgctgctggacaaaggtcattctcattgccagattatcagcttctgtagtcagagattttggcatgcagtgcaacaacttgagatagaacaacgttaagtatgaagggcctatttgtcttgagctcaaatgctatgctaaatatgatattttttacatgcaacaacttgagattatcttgatgtagaaaaaaaaaaaaaaaaaaa

SEQ ID NO: 396331 - DNA, 555 bp, Oryza sativa
  unsure (1)..(555): unsure at all n locations
ganngcctncgcaaaccctcgtnctntctccggccaggccagccatnnggcgttcgctgcttctccgcnccgtncggcgagacctcggtctcctctagggaccttgaccgcgaacgtccagtcaaagtgtgctgcaaatgtgtgttcatcatgggctggttttgcaagaactttcagtgcaaaagcaactggaaatgaggttattggaattgatttaggaacaactaactcatgtgtttcagttatggaaggaaagaacccaaaagtaatagagaattcagaaggaaccaggacaacaccgtcagtagttgcttttcaatcagaagggagagctacttgttgggaacaccagccaagcgtcaagcagtgaccaacccacagaacactttctttgggtacaaagcgtctgatagggcggcgcttttgatgacccgcaaacttcagaaagagattaaaatggtaccatataaaatttttgaaggctccttaattggtgattctttggcttagngacaacagatngcaagcagttcttacccgagccagnttggtgcc

SEQ ID NO: 396332 - DNA, 347 bp, Oryza sativa
  unsure (1)..(347): unsure at all n locations
aagaaaaccctcgccaccacgccgcccccccccccggggcggcggcgcccngcgcctggtaccaagatcccgcagccactgcgccgccggccgccgcgctcgtggcccacgcactagtccctcccggagtcgtaggctgcgggttacgccccccgccccgccgcccggccgctctctccgggtggggtggtgggtggcaaggggctgcgccgccatcccatcaccaaccaagcaagccggccggggaacggggagcaaccatgtcgctcctacnacgggtggggaggaggttcctcgccggcgacatcctgtcgtcggagggcttcgccgcatgccgtcggccgcct

SEQ ID NO: 396333 - DNA, 876 bp, Oryza sativa
agcacggtggccttcggattcagtcgagaggatagcggaacaagcgggaggagtctccgtcgaggccaccgaatttacccccatgccacttcttccaacacaccggagaggagagggaggagccggcgcaagccaacggccaccatcacgagctcaggttgctgtagccagccatcacgcgcactgttgccttatgtgcaccgttgaggagaagggtaggtacacgtcatgcaggggacttctacaccaccactgcccattcactagatctggtgctcaacattttttttctgatatgtttggttttttcttgttcatgttgttctttcccttttgacgcatgcaaatgatctgtgtaattgattttaattggaggaatgatggaatttgttcgtttgtgtcaaaatttgtgatttggtttatatgatttgtgctattgaagaacaatttgggattcatgaagaataatttaggattattttgtcattttctttactgcaagcataggctcaagacgagctgactttttttttggaatcgtgcaactaatcggtaccggttctcaattcggcaccgatgagccttctgatcagtgccgcctctgtgatgccggttggaaaatacagcatatatgtaggtttccatgcggcacccattagattttgtgtagtagtgacatttgaatgggctttatcgccctaaattgatgccctttttgacccaatttggttggaaaatagtgtggccttggaaggtcacaattatgtcgttgcattaagcactgacgctcttgtcccggttatgatttgcacctttttctttttaataaaaaggattaaaatccgatctttacatccaaaaaaaaaaaaaaaaaaa

SEQ ID NO: 396334 - DNA, 398 bp, Oryza sativa
agagcacaacactacagggacacccaaaaacggaaaaacccaatcagatcacttcacccacagcacacggcaaaatttctccatcgatcgatcgatcctttgcaattgcaagagcggcaggcatgtcgagcaccaataccacaagcaacgaccccaagacgaccaaggatgaattagctccgccggcaccgacggcagcggagatgggaggcggcaaggacgcggtgacgaagacggtgcagacggtggaggtgaaggagtcggtggggcaggagccggtgctcaagcccaccaaggtggtgcaccagattccccgccgaccaggccaaggacgcgcccaagcaggattaatccagtctgcatcttacttgcaacttttacttagttcttagtacctt

SEQ ID NO: 396335 - DNA, 362 bp, Oryza sativa
  unsure (1)..(362): unsure at all n locations
ccccattggtccgaacagctaccgctagcacacaaaagtacagaattccaaaccaaatcctgtaccaaaacaggaagggcgcaggcatgcctcttcttatcgtgcagcccgtacccatttcgacaggtcctattgcctgcgctagaccgcgcgtcctgcagcagcggcgcacgatgacgacggccaccttttcgacgatctcgtgctcggctacggcggcgacgacaagacgagcgccgacgccgacgatccagcgaggaagctcgagtggctcaggtcgcaggtcatcggcgcggacgggagttcgcgtcgccgttcgggacccgccgcgtcacgtacgccgatcanaacgcgtccggccg

SEQ ID NO: 396336 - DNA, 557 bp, Oryza sativa
  unsure (1)..(557): unsure at all n locations
cggacggccggggatcggttgggttcgaatacccaacctctaaatcctgggcccgccactggatcataatccaacggccaggtccaggtgactgaaatgtgcctagcgaatcctaacatattcgttctttggccccggcgatgagtagcaagtttattactctctccgtttcaggttataaaacattttgactttggtcaaagacaaactgtttcaagtttaactaagttagtttcatcaaatcaataattgaatatatttttataataaatttatcttggggtgaaaatggtactacctttttctacaaacttgatccggacttaaaacaatttgcctttaaccaaagncaccaaagncaaaacggcttataacctaaacggggggagggaggacatgccaggtgttgggattccctgnggntaattaaaggcatcatcagtaaatctatatattttcatatatatcccaacatttttcctttatcaggtctcacatactngggatcaggggttgtgggcgggtaccctccttggccgggatcaggtaataggaag

SEQ ID NO: 396337 - DNA, 811 bp, Oryza sativa
  unsure (1)..(811): unsure at all n locations
cggacctggnccnatcaccagctgagctgcgaggaagagagagtgcgagagtgcgcggcagggcaggtgtagtgtcagtcactgggtgtgcgcttgcttgcttggattgaggatgacgtcatcgatgtcgccggcgccggcgccgggtaacgcgcaggtgatggaggacatggagaaggggaaggagctggcggcgcactgcaggggctcctccgcgactcgccggaggccggccgcttcgtcgaccagattctccacaccttctcccgggcgatgcgggcgctcgacaaggcggcggtctccgccgccggcaggagaagggtcggaggtgcagagcgaggtcacctgcgggggcggggccagcgccggcgggaagaggaaagcccccgccgccgaccggaaggccaactgccgcaggaggacgcagcaatcgtccgggaattcggtggtcgtcaagaacctcgacgacggccaggcatggcgcaagttacgggcagaaggagatccaaaactccaagcacccaaaggcctacttccggtgcacgcacaagtacgaccagctgtgcacggcgcacggcatggtgcagcgctgcgacgacgacccggcgagctacaggggtcacctacattcggcgagcacacctgccgggacccggccaccggccccatcatcgcggcgccagtagacgctgccgcggcgccgacgaccagcacgatcaccacggtcaccgcgccgggcccgctgctgcagccgctcaaggtggagggcggcgtcggctcgtccgaccaggaggaggtgctgagcagcctn

SEQ ID NO: 396338 - DNA, 426 bp, Oryza sativa
gggcggctctcctcgctcatcacgcagaaggtgcgggcgcacagcggcaaccggggaaaccagtgggacctcatggcgcattacctccagattctggagctggaggagccgatcccccggatgaaggtgattcacgttgccgggaccaaaggaaagggttcaacatgcacattcacagaggcaatcctgcgatcatgtggtttcagcacagggctgttcacctcaccacatttgatggatgtcagggagcgattccggctaaatggggtggatatttccgaagaaaagttttttgaaatacttctggtggtgctggaataacctcaaggaggaagactgatgatgctattcccatgccaacctacttcagattccttgcattgttagcattcaagatatcctcagctgaacaggttgatgtagctg

SEQ ID NO: 396339 - DNA, 264 bp, Oryza sativa
  unsure (1)..(264): unsure at all n locations
cgaacccaaccccaacaacactcttccgctcccaccccccgcacactccccgtatttnggaacacgtccccgacggcccgactgcngcacgcggcgaggaggccgcggtaattacgggcttagtccgagggggagaacgcaaaaanaccaggagaagacgaccagggagcgcacggcaccgcctcccccccacctcgccgccggggtncttccngcngccgnctgccattgggagacgtgggctggaganaggcgggagagcgc

SEQ ID NO: 396340 - DNA, 462 bp, Oryza sativa
  unsure (1)..(462): unsure at all n locations
gtcggcgcgaggaggagcggcgagcgatttcgaggcagcggcgaggaggaggaggagtccccgggaaggcaccggcgcaacggttcccctccccaagaagaggcacggcggaggcggtgtggtagaagaggcggcgcggcctcctcctcgcctcccacgccgccgcggcgcggcctcctccctgtcgaccgcgccgctgatcctgaccccaccggcgccgccgcagtcagctccgtcatcaatcgacgcggcggcggatggatccgcctttcccgacggcgggggcggcgagggcggcgggaacagacggcggcgaggacgaagcgggtgcgggacagtggactcttgtgtgattcctctttgtgttcttgtgtgattcctctcctctttgtgttcttgggtgattcatcttgtgttcttgtgtgnnnnnnnnnnnnnnnnnnnnnnnnnnnnnnnnnnnnn

SEQ ID NO: 396341 - DNA, 1153 bp, Oryza sativa
  unsure (1)..(1153): unsure at all n locations
cgagtccactttctcaagcgctaatctaatctacttggggcagtggtaacagggggaggccaacgcgggggaaacagctgacgcgctccgctccgttccgctgccgccgttggccggccgggcggtcgctgttgctgacttgaccagagacgagcagcaagggggcagttggattggattagagggtgcttttatatagaggagcacgaggaggaggaggaggagggccatcaagcatatccatctccgattcacagattctttctggagatccatcatccagcgagaggagagcgngagggagaggaagagggaaagccgccaccgccatgttggggcatctggttgggctggtgaaggtgcgggtggtgaggggcgtcaacctcgccgtccgcgacctccgctccagcgacccctacgtcatcgtccgcatgggcaagcagaagttgaagacacgagtcataaaaaagactaccaatccggagtggaacggtgaactcaccctctcgattgaagatccagcagttcctgttagactggaagtgtatgacaaagacacattcatcgatgatgcaatgggcaatgcggactggacatccgcccattggtggaggttgtcaagatgaagattgagggtgttgctgacaacacggttgtgaagaaagtggtacccaatagacagaactgcctagctgaagagagcacgatatatatctctgaggggaaggtgaagcaagacgtggttctcagactaagggatgtggaatgcggggaaattgagctccagcttcagtgggtcgacatcccaggttctaagggtgtatgaactctgtactctgcctattgcttacagtcttgcatagctcgcaagtccaactctaagtttatcagtggacaatcaaataagcaacagcttatattgatggagattcttttactgtccttgaggaggcagatacctcccagtgcctcctcaatgggctgtaaaatcattcttatgttggacacagcaagtgtctcgaagatcccccactaggtgtttggggcagagcaaagttgtacaaatatgtctgcaaagtatagtttggtgttaccctgtctgtagaaaaataatcagtgggcaggggttgtaactattganactttgtctgtc

SEQ ID NO: 396342 - DNA, 461 bp, Oryza sativa
  unsure (1)..(461): unsure at all n locations
gacaagtcgcccagcgcaccacgctcggtcccgaccgggtggtccgtggnggtnagcgtggcggcgctggcgttggcgtggggaagnaggagaggaagacggttgcnagggaggctgctgccaagaggatccaggagcagcagcagcagcaacggcagcagcctgcatcggtccaggaagccccggcttctagagcgcccattgatgccagggagttgccatgggatggcgtnccgaacttggcacggttgccgtcgcagaaatccgggatgggtgtggcgaaagcagcgccgccaaggtttcagaagtaaactcaatttttggggagggctagtactttttggctttnggaaagcagttgaagttctagacacactttggtagtagcattgcaaattttgattttaaatagtggatttgatcaggactncaacaaagggaacaaatatcnttttagcatt

SEQ ID NO: 396343 - DNA, 471 bp, Oryza sativa
  unsure (1)..(471): unsure at all n locations
cgatgagaacgagaggcgggccttcctggtttggcggaggaatctcgcaagattggaagaaaatgacaagcttgtgcttacaccctttgagaagaacattgacatctggagacagctttggagagtccttgaacgtagtnntnctgctggtgatggtagtcgatgctcgagatcccttattctaccgctgtcctgatctcgaggtatatgcaaaagaaattgatgaacacaagaggacaatgattcttgtcaacaaggctgatctgttaccaatgaatatcaggaaaaaatgggcagactattttaaggcacatgatattctctatgttttctggtccgctaaagctgctactgccacattagaaggcaaaatattaagtgggatactctgaacaagattctgctttcacttggatttgggacaccaaggtatatggcagggatgaactcttaaagaaattgcaacctgan

SEQ ID NO: 396344 - DNA, 465 bp, Oryza sativa
  unsure (1)..(465): unsure at all n locations
cgacctcccaaaaccatttccgcatcttctcttctccccctgattccgttccgtttctctttcctccccctcaccgactcgccgtcgccgttcgtcgtcgtcgccacggtcgccggcggagagaggcctcgtctcgccgccaatggcctcctccgtccccaacggacacggcgccgccaccgccaccggcgaaggagggacgccaccgccgccgccgccgtcctcctcatcctcgctggtgttcctcgggacgggctgctccagcgccgtgcccaacgcgcggtgcctgatccagccccccgacccgccctgcgccgtctgcttccagtccctctccgtgggccccgagctaaaacctaactacaggtgcaatacttctcttctgattgactattgccaagatgaaaatgcacacaaatatattctaattgatgttnggaagacattcgagacaagtntaaggtg

SEQ ID NO: 396345 - DNA, 479 bp, Oryza sativa
cttctcaaccacgtctcctcctctccgacgcagcaaggaggagatcccctgcggcggcgccgtcgagccggtgggggaagggagagcttgaggcggaggcggaggcagagcgtgactccgaaccaccaccatggggacctctgcgcaggagccaaatctctggaagcaaatcgacgacgccgagcactatctggtcagcggattgttcgagcaggccgtatccactgccttatctgtatccagtcaagtacattcggctgccatggagaattcatgcgaccatgatgagcttctggaaatgcttgaattagctgggatggtacttgttcaggcgcttaaagaacttaagaggacatctgagatgtttatccagctcaagacaatctacggttcagtggcatcaataccattgcaaattttcattacaggggctacgatgcacatggcaaggaggatctggatcttgatcttagaccaat

SEQ ID NO: 396346 - DNA, 425 bp, Oryza sativa
  unsure (1)..(425): unsure at all n locations
ggnaaggctcttcttaaggtgcctccaactatcaggtttgtattagatggagaaatgccaccttatttacttgcaaaggatctgattttacaaattattggtgagatttctgtatctggcgcaacatacaaatccatggagtttgttggatcaactgtggaaagtctaaatatggaagagcgaatgacactgtgcaacatggttattgaagctggtggcaagaatggtgttgtgcctgccgatcaaactacatttaactatcttgagggcaagacatcagttgaatacgagcctgtctatagtgatgctcaggccagatttgttagtgactaccggtttgatgtatccaaattggagccagttattgccaagccacattcacctgacaaccgtgctctagcaagagagtccaagatgtcaagatt

SEQ ID NO: 396347 - DNA, 542 bp, Oryza sativa
  unsure (1)..(542): unsure at all n locations
gtccccttcttctcctcctctctctctctccgacacgcccctttaactcgctcccgattccaaaaaattccgccatagattaaagcgagaaaccccaagcaaccaccaccaccacgacccggagtcctcccggatcgatcagtccaaccctgcgaatcaaatcccaagccttctcgacgctggcctcgatcgattgggaggccgcgtctgcgtccccttctctttccggaggaagctggtggcttgctgtgcggcggtggcatcgtcggttggaggcgcgggggagcactcgtcgcgtcccgggggagatcgaatctagcggcggacgggcaatgcggttggtttccggggtgatttgaggcgggaggctgggatctgggtctggaagggaggtggggagctctgtcggtggggtggggggtggggggagttggtggcgagtcgaccgcgtgctcgggtttgtgagtgagtatggagcgcgtaattggggcaagtttaagctcgngaagaagtcgtgagtggatccttcggggagnctatct

SEQ ID NO: 396348 - DNA, 426 bp, Oryza sativa
  unsure (1)..(426): unsure at all n locations
ttnttttcagtgggaaaaacacagtaacttgtttcaaacaagatctctacagaatacaaacaagttctctacagaaagatcacattattgtacaaaatgcaacagcatacagaaaacggcatcgtgtggagagctacagcaaacacactgaaaaacatcactgaaaagtgctatgttgacatgggctaatcggtgtccgtacgccggcggctagctcagagctcgtcgaccgtgcggggcttttgcttgccgtcgacgtggcggtggtgatgcttcttctccttgccgtgatcggcggcgtcgtcggcgcgttgaacgcgttcctacacctcctccaccttcttcttcgncttcttcttcancttcttggtacccctcgttcggcttcttcctnggcggcttcggcgtttccacggggggtcttcg

SEQ ID NO: 396349 - DNA, 426 bp, Oryza sativa
  unsure (1)..(426): unsure at all n locations
cttacagtnaggagatatgaagcggcgaaaaattcacaaatcgacagcaagccgggggctcagatccggcgtgcaatccccaaaaatccagggaagagagcagcgagtcggagcggcgcctcctcctccgatggcccccgcttcggcagattcacctgttaccacggggaggaggagaagcgatggcaccctccggccaacgaaatcctccggtccatacagaagctgtacgacgaggcggcgcggcggctgcccttggacgagatcccggagctcgccgaccccgtcagcaacatcatcctcaacgccatggcccactctccgggtcaaccgcccttcaacttcaagaccaccaccgccgttccccggaagaggaccgagagctacaggagtggtggggntaatttatcactttttaacggctat

SEQ ID NO: 396350 - DNA, 351 bp, Oryza sativa
  unsure (1)..(351): unsure at all n locations
caaacacaccaagctcagacaagagaagagaagagaagccaagaaatcatcatcatctcacgcattttttgctcgaattccagctcgattgagcatcatgggttacaacgagctgattccggggttgccggaggaggtggcgagggagtgcctcatccgggtggggttcgaccagctgccggcggtgcgccgcatctcgcgccagtggaaggcggaggtggagtcgccggcgtacaaccgcctgaggaaggcggagggcctgggcgcgcccggcgctcgcnctggtgcaggcgcggcgtgantcgccgaggcgggcccggcggcggacaagcagtcgtcggccggcggtgt

SEQ ID NO: 396351 - DNA, 436 bp, Oryza sativa
  unsure (1)..(436): unsure at all n locations
ccttttcccgccccaccccgcccgcgcgtacctacgcatttngtcgaacacatcgcctgcgtcccccatcgccaccacctggcccgatccagcccggcgatctgcggcgggatggagggcgacgacttcttgccggagggcggcaagctccccgagctcaagctagatgcgaggcaagcgcagggcttcatctctttcttcaagaaactgccgcaggattcgagggctattcgtctcttcgatcggcgggattattacactgctcatggagagaatgccacattcattgcaaaaatatactatcacacaatgtctgccttacgccaattaggtagcaactctgatggactctcaagtgtcagtgtgtgcaagactantgtttgagaccatnggccgaaaccttttgnttagagaggacagaccgtacattggaact

SEQ ID NO: 396352 - DNA, 454 bp, Oryza sativa
  unsure (1)..(454): unsure at all n locations
cggacntggcntntntctactagggtctcttctaccagcgattcttcccctcccaccgtccaagcagggccggcgagatgtcctcccccgacgaggacccgccgacggagcccgagcggtggagggatctggacatgctcctctcccgccccggcaacctcgtccacgccgacttcaaccccagccccgggctgcgggactcgctggggagcctcgtggaggtgctggtggtgggcgcgggcgggctggggtgcgagctcctcaaggacctggcgctctccggattcaagaacatccacgtcatcgacatggacaacatcgacgtcttcaacctcaaccgccagttcctcttcaagggttcaagatgttgggaagtccaaggctgaagttgcttcaaagagggttatggagcgagttagtggagttaacaatnttccacaatttctttagggtt

SEQ ID NO: 396353 - DNA, 449 bp, Oryza sativa
  unsure (1)..(449): unsure at all n locations
cgccgttcgtggcgtcgcggggacggaccgggtgagccgctccaacccgggcgcgtggctcatcctccgccccgccggcgacgggtcgtgggagccatggggccgcctcgagtgctggcgagagcgcggcggcgcgggcgcctccaacagcctcggctaccgcttcgacctcctcctcccgggcgtcgaccacgccgtccccttggcggagtcctccatcgccgcttccaagggcggcaagttcgccatcgacctcacctcgatgcagccccagagccggggcggcacgccggggtgcagcccgcggggcagcggcgacttcagccagtggccgctcgccagctacagtaccgcggcttcgtgatgtcctcctccgtccngggcgaggggcggtgcagcaagcccacggtggaggtcgngtcccgcancngntgcgccgaggaccggcc

SEQ ID NO: 396354 - DNA, 395 bp, Oryza sativa
  unsure (1)..(395): unsure at all n locations
gagagagagagagagagagagagagagaggtttttcccttcctagggctttgtgtagcgganagcagcggggcggcctcctccgccctagccctcgccctggtccgtccggcgtggcgcgcgctctcgccacctggtgttttcttgggggcggttcgccggttgcctccgcctggggacagcggcgcggcgaggcgaggctgagggggtggcgccgccgcgatgaacgtccctatagtcgatcctttgcagggggatttccctgagacgattgaggagttcttgcagtatgggagtatgaaatgcatagcattcaaccgcagaggaactctccttgctgctggatgtgcaaatggtacctgtgttatctgggactttgaaacaagggggattgca

SEQ ID NO: 396355 - DNA, 452 bp, Oryza sativa
  unsure (1)..(452): unsure at all n locations
ggagattgatgcttttgatcttgagggaaacactgagggcaaaattcgggctactgaagaggttgacaagctcaaggaacagagggctgaagagcaggcaaagcatctacttgaagcttttaataaggaccgtgtctcactaatgacttcactccaaactgcttatcaatcaattccaccaccacctgttgctgctgctccagatgcacgcacacaagaaatgattgatgaaaaactcaaaaaggcagaagaactaggtgagaatggaatgatcgatgaagctcagaaacttttggatgaagcagaagctctaaagaagcttggtgctcggccacagcctgtttccggactctgcaaagatgtcaactcacgttcagattactgatcaaaagttgcgcctgtgttacatatgtngagcattcttgagcgtatatnacagtgacccgcgtttt

SEQ ID NO: 396356 - DNA, 693 bp, Oryza sativa
  unsure (1)..(693): unsure at all n locations
gaaaaagctccatccggatacaaataaaggtgattctgatgcagagaggaagtttcaagaggttcagcgagcttatgagactttgaaggatgatcagaagagatcattatatgatcaggttggccctgatcagtatgagaaagcttccgctggaggaggacctggtggtgcatatgaagggggttttggcaatccgtttgaggatatttttggtggaggtggcggcggcggtggaatgaatgatttctttagaaacatattcagagagagagaatttagcgggcatgatgccaaggttgcacttgaaatatcatttatggaagcagttcaggggtgcacaaagacgatcaattttcagactgctgttacatgtgacacctgcaagggagctggcgtaccccctggaaccaaacctgaaacttgcctagcctgcaggggttcaggatttatcttcatgcaaactggtcccttcaggatgcaatcaacatgcacacagtgtggtggtagtgggaagactgtgaaggaattctgcaagtcatgcaaaggaaggaaagttgtgccaggaccaaaaaccatccgactcaacatagtgcctggtacggatgatggtgacgttataaagttggttagtcaggtggagcagatccagatggtggtagncctggtgatctttatgtaactctgaaggtcgtg

SEQ ID NO: 396357 - DNA, 359 bp, Oryza sativa
  unsure (1)..(359): unsure at all n locations
gaagatagctaaacggtgtgacaagcaaggtaatagaaaggcgcgatcatggcgagtgccaaggcgatggcgcaggatgagcatcactttgttctgaagagtggtcatgccatccctgcagttgggttaggcacttggagggccggctcagatactgctcactccgttcagacagccatcactgaggctggatacaggcatgtagatacggctgctcaatatggaatacaacaggaggtcggcaaagggcttaaagctgcgatggaagctggaatcaacaggaaagatttgtttgtgacgtcaaaaatatggtgcacaaacttggctcctgagagagttcgaccagcattaaagaacan

SEQ ID NO: 396358 - DNA, 447 bp, Oryza sativa
ccggaaagtagattttgtacattaaatctacttttctgaactagttactattttgctttcaacatacggttaaatttgtataaaaaagcatggagaacatacaagttctcagatttctgaattctgaacatgcacagaactgaacatgctccgtgctaactaataaaagatcatctttaactaaatttgacaactaaatttggtaagtgctaccgtcatgtaatgaattggatgctatgaaggggtttagtcctgttgcactgtgcactctttaagaaaaaggaatcggatcctctggcttcggccttccctaacgttactctgcagtcaccctgatctgccatccagcagcaatccaacgactcgctcccagatgccttgcgtggtactcctgcctccttgctcggcgctggctcggcttgctcacggtttttttgacagaagtcg

SEQ ID NO: 396359 - DNA, 471 bp, Oryza sativa
cgccgccctgcgccgaccagcgcaccggcagcggcgccggcgtcctgctgcttccgcccgcatcctcgccggtaagaggcagaatcacttcgttaggcaaggatgagcaaaggcccagctccgttcctcaacattgggaagagagcaaaagatcttttgtacaaggactacaattttgaccaaaagttttctttaacgacaactagcaattctggtttgggtctaacagccaccggtgtgaagatagacgaactctttcatcggtgacatacagacacaacataaaagtgggcaaaaccacttgttgatgtcaagattcgatagttgaatctaggagtgtcaaccacagtcactgtttgatggaagcccttactcggtcttgaggctttcttttagctttcaggggttcctggttcaaaagtcccgggaagcttggattttgcaataccttcatgaccattttggactgaa

SEQ ID NO: 396360 - DNA, 407 bp, Oryza sativa
  unsure (1)..(407): unsure at all n locations
aaaagtgctctctctcaaatttaactccctccccaatttcttctccatctctttagatctctcccctcttcgatcaaattaagcctctcagtctcatcagatcgagctcaaccaagggtcgatccaagcaagaatgagcagcgacggcgcctctggaagcattggaatgaagcacgacgacggcgatcaccggccgagcaccggagcgtcgtcgcggcggtgccccagctgcggccacgaccctgactgcaacaagccgttcgacatggttgggatgcctgccggcgtcaggttcgatccgacggaccaggagctgattgagcacctggaggccaaggtgaaggatggcggctcaacatcgcancctctcatcgatgagttcatacacaccattcaaaggggaagat

SEQ ID NO: 396361 - DNA, 469 bp, Oryza sativa
  unsure (1)..(469): unsure at all n locations
ccctcactagcagtatacaagtggagacaagggggaagagcatgggcaaagagattgattccataagcaaaggtttagggaccatgataccaatcattgtcaaggaagggaaaaaaaggccagaggctcctatgcaaactgcaaagctggcctcagagagtggatcataatcaggcagcatataccaatatatccaagttggacagactacaagaatgatagtagtcaacttgataacttaaagggcaaactgaagggaaaattctccattgatatccacagcgatcctgtaatagctgcaatggaagacatcctaaggtgtggacncgccatatgaggtataggctcaaaaagaagtactttgatggggtacctgctaatcaagtgaggactacatcgcccttgaagtgtatgacccgtgagcaatggacaaatttggtggatatgtggtcaagccngagcacaaggt

SEQ ID NO: 396362 - DNA, 1020 bp, Oryza sativa
  unsure (1)..(1020): unsure at all n locations
gctccaatcccaatctccgatctcccgccgccgccgctgaagaactgaacaatctacttctagtatctcaagagaattctgagatcaagcctgccatggccgcagcgccgccgctcgccgcggggctccggcccgccatggcggcggcacaggcgccggtcgtcgccgcggcgtggggcgtgggcgctaggaggggggcggccttgtcgtcgtcggctcggtgtagggcgcttcggttgtcgagaggaggaggaggagggcgagatgggtgggtgcctcctcccgtggtggggaggatgccgccgcggacgctctccgtcangtgcgccgccagcaatgggaggattacacaacaagagttcactgagatggcatggcaatcgattgtttcgtcgcctgaagtagcgaaagagagtaaacaccagattgtggagactgaacatctgatgtaatcattgctgggagcaaaggaatgggctcgcccgtcgaatcttttctaaagctgggagttgataatacaaggcttcttgatgccacagagaagttcatccagcggcagcctaaggtgttggggtgaagatcctggttccatgttgggacgtgacttggaagctctgatacaaagagcacgagactttaaaaaagagtatggtgattcatttgtttcggttgagcatctggtccttggttttgcggaggataaacgattttggaagacagctgttcaaggatttccagattaccgtacagtccttgaaaactgccattgaatcaataagagggaaacaaaatgtgattgatcaagatcctgagggaaaatatgaagctttggacaagtatggcaaggacctcacagccatggcacgtcaggggaaacttgacccggttataggaagagatgatgaaattcgtagatgcattcaaattttatctcggagaacaaagataatccagttttgattggtgaacctggtgtngggaaaactgctatagctgaagggctttctcagaggatagtnc

SEQ ID NO: 396363 - DNA, 394 bp, Oryza sativa
  unsure (1)..(394): unsure at all n locations
agcacccagagccgccggcgcngtncngancggcgactcggaaaggggatctccggcgacgtctcgcggatctccggttgcgcttcttggcgacatggcgaagggatccaagaagaagaagggatccagtgcgacgaggaatccggcggccgagctcaccgacgacctcatcgtggagatcctctcccgcctccccgccaagtcggtccgccgatgcaggcgcgtatgcaggcggtggcgccgctcatctccgatccccatcaccgcaagaagctcccccaaaccctcgncggcttcttccacctcagcgtgaacgaatcacgctttcccgtggaagcacgccatttcgtcaatgtctncgggatagggggacgcctgcctcacgtctgcccat

SEQ ID NO: 396364 - DNA, 378 bp, Oryza sativa
  unsure (1)..(378): unsure at all n locations
aaaaatcgcacagagcaaaacacgacgagaacgaacgcaacgcacacttacacatacacacacgctgctagtgctagctaagattccgacgagagaacgtccgtgatggcgtcgatgagaactgcggcggcggcggcgatgctggcctgcatcgccgtcgttctggcgagcacggcggcggacggcgcgctgctcccgtggttcggcggcggcggcgcgcgggacgaggcggtgccgtagttggggctcctggcggcggccgacccgttccggttcctggagcacgtgccgttcgggttcgaccgcgacgacgtggcgatgctgtcgatggcgcgggtggactggcgtgagaccggcgacgngtacgaggtcgtggtt

SEQ ID NO: 396365 - DNA, 739 bp, Oryza sativa
  unsure (1)..(739): unsure at all n locations
cctcgagccaagaaaccatcaagctagcgaggccacctcaccggccgccatggagatcccgccgctctaacggcggcgcgttcttgctcgtcgtcggagctagagatcgatcgaccaagctagcgtttcttcgattagatatagtcatatctatataggtagaaggatgggtgtgcacttgctgaagaggcagcagtcatcggcgtcggcggggggctcgtcggcggggggagggatgccgccgaagggtgcatggcggtgagggtggtggggcccggcggcgtgggcggcggcggaggaggagcggagggagagaggttcgtggtgccggtgggttatctgaagcacccgctgttcgtggggctcctcaaggaggccgaggaggagttcgggttcgagcagaagggcgccatcaccatcccctgcggcgtcgaccacttccgccgcgtccaggggcatcatccaccaccagaagcaccaccacgggcggctcccatgggcgccggcggcccggcccgggcgggcctcctctccgggccacggctcgtcgggacaccacaacaacttccacatcgccgcctgcttcagggccttgattgagatgatcatcagatgatgatgcatgggtgtttctttggctanctttctctctctcttagatcgatggattaataatactttaggggttttaaattttccttttgggtaggaatttaggtcaatggtttgttaatgaatg

SEQ ID NO: 396366 - DNA, 538 bp, Oryza sativa
cagccatggagacggcgggaggggacgccgcgccgccgccgcagcagcagcgtcggaacaaatcctcggcggccaacaaggggaagaagggcggcgcttccggcggcggaggcggcgggaggtggccaccggtcaagccgaagaaggatctccaggtcaatcgcctcaagggcacccacctcctcaccgtgccaaacttcttcacttccgctgaggcgaaggcctttgtcgacattgctgagaatattggcttcacgcaccagggcagcctcggacccctgaagggtgaagcttatagagataatgaccggatatctgtgacagatcctttgcttgctcagaccatttgggaatctgggataaacaaaatatttgaggacatcagcatctctggcaaagtagcaaccagcttgaatccaaatatcaggttctacaggtacactgaaggtcagcgattcggtaggcatattgatgagagtgtcgaccttggagatggttcaagaacattgtatactttgctaatatacctctctggcaa

SEQ ID NO: 396367 - DNA, 486 bp, Oryza sativa
  unsure (1)..(486): unsure at all n locations
nnnnnnnnnnnnnnnntttttttttttggagtgctacagtacagtgtcgacactgcttttcttttaaggctagacctggtgcatgcatgtatttcatcgagaatacaatcgggggttttctttaccacaaaaaagttggggctaatcatgtagaagggggtgaagggttatggacagcaaagtagggttagctgattacattgacaggtaaacctacaggtaataacaaaagaggatttaacctaaactagatgcaactttgtgggtgacttctactggcgtgcaacaaaagctcagtgtccgccaagatcacatgggtggggtgacgcacgtgccgtgccgccgtggcgcgccagagcggccgagaggttgggggaagacgacgacgacgacgaggagcttggccacgcgcgacgggggccaggcttggctctcaggacaacaggacatggagcgaggcgttttttgtggccgggaaaaccggca

SEQ ID NO: 396368 - DNA, 561 bp, Oryza sativa
  unsure (1)..(561): unsure at all n locations
gaattcaagtttaatgaacgaggataagagatgccgccccattctttttcattctaatgggccagatgctggaaatcaggaaccatttcccatcaacggcatatgtatccatatgccactggaagatggagcaattgcaacaggggatccctttggaaatgaagaggacaacaatcagaacgagaggacagcaggagaagagttatgaccattgctttggagtcgccgataaatcttaactgcctagagaagagttttcccttcccaaagtgtatagaagtgagaaagattggttagctgcgaaagtttgtggtgtggcatggcgcatctactagtttttttttgtggccaacgatgtcgccccctgaggaccaaaaaagtgccttggagttgagagttgggagtctgctaggtctctctctccatgtcttcctttcaagtttcaaccccctctgtacagatagatgtcgggagttgataattggtcgcatttgatttggtntaaaaagagagtggtaccggtcaaactgtacagttttaaacattttaaaaaaaaaaaaa

SEQ ID NO: 396369 - DNA, 480 bp, Oryza sativa
  unsure (1)..(480): unsure at all n locations
cttcacaactctgggaaggaaaggaacgagttatacatacaattcattgatgacgtcatttgtcaagaaagggtatttgaaacaggtatgggcaattcttcatgagagaggtggacagctctgccccaatgatatagctacatacaatctgatcattcaaggccttggtcagatgggaaaagcagaggttgctggctcgattattagtgaactgtcaaagaaaggtgtttacatggacatcgtcatgtataacacattgatcaatcaattggggaaggccgggaaggttgacgaagcaaactctttgcttgagcagataattgggaggggcataaaaccagatgttgtcacttttaataccttgatcaatattaatgcaaaagctggtagatttaaggaagctgacaagtatttcagggagatgattgcagaaggattgctccgactatgccacggnacatattgggttccctgataagg

SEQ ID NO: 396370 - DNA, 323 bp, Oryza sativa
  unsure (1)..(323): unsure at all n locations
ngagcgtgnancngnttgcngtatggctccagtcatccaagtacgaaggggataaagggactcatcactccacccagctggagagaaaaaaaaatctcagctaggcaagatcgttccagattgaattcgttcggtggagggcgatatattttttttcggcaaggatcgccattctcaccggtcgttcaaattcttctcctgcgttaagtggctgtgtgtgctctgttcgtcatcttcctctgctactcaattgcattggttggttggttaagacatgaatccattgcgcgtcatcgtgaaagaggnggagctcgactttcgcc

SEQ ID NO: 396371 - DNA, 465 bp, Oryza sativa
  unsure (1)..(465): unsure at all n locations
gaggctgcaaggatatggcatgcatgcaggcctttcacctcagcgccaacacagaccagaaaacagaaattttgatgatacttttggtccacgttatgctcatggatatcaaggtggtggtagaggagtcgcgaggttccgggatggttctccaccatatggaagaggaggcagatcatatgggaggggctctggtgctcctggaaaggagttcattaatattgatggagaatatgttcacaggaatgatccaaatctgtcgccaagagaaggcgattggatatgccagaatcccaactgtggaaatcttaattttgctcggcgaactcactgtaccaactgcaacaagtatcgctattcacgagaagtatgtgagcctggccacagtcctcacagagattacgtcaatcctccacgtggacctgcaaggaatctttgtccaagtgatcgggccctccaagngag

SEQ ID NO: 396372 - DNA, 537 bp, Oryza sativa
  unsure (1)..(537): unsure at all n locations
gacgagtgagaggaggagagcggccatggcggggcggagtggcggcggcggcggcgggagctccgggaagagcgggacggggaggatggtgtcgctgcaggagttcgtctcgtccatggcgcctctcatagacctggagaaggcggcggagatatcggcggagtcggcgacgagctcgaagaccctcgagaggaggggttgcgtcatggccaacctcaagtgcaccgacgcccagacggggctgatggggaagacgctcctggagttccaacccaacaagggcgacgtgcttccacctcacaagtttggaacacacgatgtggttgctctgaagccaaataaggcagatgctggatctgctgctcttgggcaaggtgtagtttatcgcttgaaggattcttccattactgttgcctttgatgacattcctgaagatggattaaatagccctctccgcctttgaaaagctttcaaaatgagggtgacataccccaggatgaaggntgcactaagttcaacttagttaaaggcattaaa

SEQ ID NO: 396373 - DNA, 437 bp, Oryza sativa
  unsure (1)..(437): unsure at all n locations
aaatgcatatgcaccccccctccctaatcaaatccttaataccactgttcatcatttattacagggaataattgtctcctacaaactnctccatatattaatcccccccctgtcctctcaccttctccatcccctccatttcacaccaataaccacctgtgcagctagctaagctgtgctgctgtgctctctctctctctcacacacacaagcaatcttagctaagctatagctgcagctgaagcaaagcaaagggaagaggagaggaaggagatggagctggatgagcaggcgttcttggaggagctcttctcgctgaggagggacgcgtgggagtacaatnccatgggggacttcttctcgncggcgtgcgccgccatggacggcttccaagaacggcaccagttcaccaccacggtcagcgtcctncccacctt

SEQ ID NO: 396374 - DNA, 455 bp, Oryza sativa
  unsure (1)..(455): unsure at all n locations
caagccgaacgcaatctgctcgttcgttcctcgcttctgggactacggaactcggaattgaggcatcctgcgcaacttgatacaagtttcaatcaagagattcaagatacaggcatcgaattaccattaccaatgaaaggagccgcaagtttgtggtggaaaatgcaaccaggcaaatcaaacctgtcaatggacttccgaggttgatgacaattactactcctcagaagcatggcaaggaaaataattccaatgattcagtgctcacagaggatgaaaacatcgagccacttgttgcttttagcaggccacctcctttgccaccagttcttggccccttgatcatgctctcacttttcaatatgtcaagcggcggggatgaaaacaaaaattaagccggaatctgaatgaaatatgtggnttatctccgaccgcataccgtctccagagggttt

SEQ ID NO: 396375 - DNA, 404 bp, Oryza sativa
cgtctcgtctcgttccactgcttcaccgcgagcgaaaggggagagttggggttttgcgagcgagatcgagcgatggcgacggggagcggacagcggcggcggcggcggcggatgcggaggagaaggagagcggcacaggatgatcaccctgacgagcaacgagggcaaggcattcgttgtgacggaggcgtcggcgaggcagtccgcgaccatcaggagcatggtcgacgacggcggctgcgtcgacaagggcttcccgctccccaacgtcgactccaagaccctcgcgagggtgatccagtactgcgacgagcacggcaacaaggagccccacaccgtcgacgagagagcggcgctcgccaagttcgacagggacttcatcgccgagctggacgccgacaagg

SEQ ID NO: 396376 - DNA, 927 bp, Oryza sativa
  unsure (1)..(927): unsure at all n locations
aacctgtgatgcagacctgctggagtgtattgatgtatacaagtcatcaagtaatcaaacagttagaatattggttaatcctagcattcaaccgttgctcaatgcttccttcggtcaaactggtctgtcttgacagtggtgttgcagcactgaaaacaatcatctcattgctccttcaggtaaagaatgcctgacgctgcctttggttgtaagtcaagatggcgtatgcaggcttcagatttggatacttgggctgaggtgcaaattaatggacagctgcctgttgatgttgcagttgaaccgtgctgtgttcttgaattggaaatgaagtaattgttgatgttccctgtcggtgcttggtattgatttgcatgctgaaggttcatgcagtgggagtccacggggataggaagatgggagctgtatgccttttgttcagtttcataaccataggaactttgtgtaggcagactaaactagtgtacataattgtaggtgagtaggtcagaggatgaaaataattggcatttgtcgaaatgaagctttgggatagatttagcagtcagttacagttcaaaagtttgtagctcttttggggtttcatctgactcaatagttctcaagtgttcacttcaaggtttcagcatttgaaagcctgcctcaggttacccgttacagcgtgtctgttcagccttcatgggagcatttttgcaattctgaaatgtcttcccaccagtaagcgaaaggggtcacaagaaagcagttgcagtgctggcaatgaacaagatcatcatccaaagtcgagatgaatctgttgnttttaagatcagtggtagcattattggttaataccatgttanttatatggtggagtaagttcgatggttgcncgtggaaaaccngcccttttaccggggngaagatttt

SEQ ID NO: 396377 - DNA, 571 bp, Oryza sativa
  unsure (1)..(571): unsure at all n locations
nnnnnnnnnnnnnnnnnnnnnnnnnnggacaaaaaaaatatatcattgtctgttttaacgagttcctctcattccaaagatgacatagtcatcctctacaaaaattttaaacaaaaatataattgaactcatgtgaccaatatattttccatccatgaagaacgataagttccaaaaataaccaagttgtcctaatgagaaaatcaggcactgacagctttcaatccagcatctgaagtggatggtgctggcgtaacaccaccggtagttgggcaatccaaccatgactttgaatgcatcataaattccccattgagctccagtaaggggtaccgatcatgacaatacgtggggggcagtccacggagtgaatggaccccagagaccaagcttcttaacagcatcacccacttgtaggcacccttgggcattgttcaggaaagagactagattatctgccgggtgagaaacaatagcaccagaagacaccggcaatgtaaccaccagcaaagctgataccccaactgggaatgatttgctacactctggacttcgggacaggaacagcatg

SEQ ID NO: 396378 - DNA, 449 bp, Oryza sativa
  unsure (1)..(449): unsure at all n locations
gccaaccaccatgccgccgccgtcgccgcacccacctcaccgcaacggcaaccacgtcccggcgccctccggcgagtcgttcgccaagttcttcgagtgctggatctccgagcagtcccgcgacctcgccgcgctccgctccgccgcgtcggggcgacgaaccccgcggcgccgcccgacgacgccgagctccaccgcctcgtcaaccgggtcctcggccactacgagcactactaccggaccaagtccgccgccgcctccaccgacgtgctccgcatgttctccccgtcgtggacctccaccaccgagaacctctacctctggtgcggcggatggcgccccactgccgcgctccacctgctctactccaagtccggcgcgcagtccgagacccagctcccngtgttcctcgccggcggtggcctcggggcgggcgacctcggcgacct

SEQ ID NO: 396379 - DNA, 523 bp, Oryza sativa
  unsure (1)..(523): unsure at all n locations
ctgttatactggaataaaattaaggtacacaactttgttattgtttcgttaaatacttgcagatttcagagttcatcacaagctttcatttctttactatatataatcttgcagttgcagacaggacacatgactttgatcatggtttagcatcagctgtctgggaatctttgaaattcctaaagctaaatatataggacactcgtgtcctatatatgctagcagttgaaatgcttcacaaacatagtctacaagtatctgttgttgattagcgcagtgaatattgtcgtagccacaaaactgcacaacgattttacttggttttagttttccttattgcttttgcttaatataagaggttacgccatattacaaatagtaactgttagctttaaatctttttggtttacctaatgattcaactggaggaaaagttcaagctagctactgcagataaatcagtttgctttaaataccttgatcagncgtaagtggataaccagttntgcttgggtatggttaa

SEQ ID NO: 396380 - DNA, 412 bp, Oryza sativa
  unsure (1)..(412): unsure at all n locations
cggacgtgncngnnacgcgtgggcaagcgacgagattttcgcccccgcttcggattaaaaccctagccggctaaacctgctccgctcccccccgccgccgccgggccgccgccaccaccactgccggagagagagagagctgcctgggaggagcagcctcggtgcgcgcgcgcggttanatcccctctctccactctccgtcgccgccgccgncgcagccatgatctgcgcaatctccggcgaggtgccggatgagccggtggtgtcgaagaagtccgggcttctcttcgagcggcggctcgtcgagcgctacatcgaggaccatgggaagtgcccagtcaccaaggaggaggtcaccatggaccgacatcgtggcgggtgaagacaacaaggtttntgaagccagacaatt

SEQ ID NO: 396381 - DNA, 376 bp, Oryza sativa
  unsure (1)..(376): unsure at all n locations
caaatccgatgaggagaagtaactgaaagggagaggtggaacctgagggaaacttctctctcagcatggggtccatattcccctcctcaccgctgctcctttcttcggcatggtcggcgatgtcgtagccgccggatccggctatctctatcgagtccagtcgctttttggcgaggcgctgccgcgaccgccgccggatcggggtcgtccatcgccgtcgcgagcgccgtgtggctctcacgtcgttgggggctgccgaagccgagcggggaagcacgttcgcnatctccggttagttgaagaggacgggggttgcgcggcccttgatggcacggcggtggcaaacgtgcagaccagangcgcganttcttgcgca

SEQ ID NO: 396382 - DNA, 518 bp, Oryza sativa
  unsure (1)..(518): unsure at all n locations
agcaaggcaagcaaccacaaattcgaagcaaaattcaagcctacacgccaggtttttcgtcgagaggttgttcgatctcgtcgtcttcgtcggcggtgatggacaaggtgctggcattctcgatcctgagcgcgtcgccggcggacattgccgccggtggctaactgggctcggctgtcgtggcggaggaaggcggatgaccaggcggtggatggccggaggcagccgtcggagcagcagcagcgcggggaggggagctcgccgtcgcagagggaagagcggcggcggccacgcgaagcgccgcccctgccaccgcggttcgccccggagttcgacgggatcgactgcttcgagaccatcgtgatgcattagccattgcgaaatcatcattattactacacgagaggatttgatctgacacggggtactaatttggtgtttttttaaaaaaatttcacacgaacatgtatacgatgattactagtcccctnnnnnnnnnnnnnnnnnnnnnnnnnnnn

SEQ ID NO: 396383 - DNA, 748 bp, Oryza sativa
  unsure (1)..(748): unsure at all n locations
cttgggggctgtgctcnctacagagctcagnacaatgccaacaaacttgctccgctgggacttgcccaggctttgcttgctggtgctgacatgatgaagttgggatatgtgtcacgtgtgcacccccgtgatcactacaccatgccatactcactgttatgggatacaagccaagggattttgctacacagatcaacctcaacacatcaaacatgtggggaattgtcaagtcgatcgtggacatctgcatgaagtttgaggagggaaagtatgtgcttgtaaaagatccagcgaagccacaagtgaggatctatgaggtgccttctgatgcatttgagaatgactatgtggaagagccacttccggaggaggaacaggttcggccgccatcagatgatgttgatgctaccgcggaggaaatggatgcagcggcagaggctgaggcgaacaatgcagcagcttctgcaggtggtgagggcgagaagagcgcagaagctgctgccgcttgaagggctcctcttcaggttgccagctagatcctttttggtttaattatctgtttttatggtttacatttaagagttgaactgcctgttatcgatacagtggtcttgtttggtcgatgataaaactgttctgtttttcatcttaaagatgctaagttgcccgctcaatgactatgttggtactcctagtttgatatcacttctggctgtttattgaccatgttactaaaaaaaaaaaaaaa

SEQ ID NO: 396384 - DNA, 322 bp, Oryza sativa
  unsure (1)..(322): unsure at all n locations
ggacggggaaaaagatctcccgtctcgtcgtctcctccgctccctgcggcaagacgagccgcggctgaacaggggaggggcgccgatctccatccagcgagcagagcagcggaggggatcctgatctgtggtgggagaagctcttctcttaatttcagagtatacaagtaacagtttgttgtttgttccccccaaaaaagtttgggggggttcaactgaacccaccctccatgtcccaagttggatccgcccctgcaatctttgctcctgctcaggaccaactggttgctgatcgattgcggaagtaaggatggacgtggan

SEQ ID NO: 396385 - DNA, 481 bp, Oryza sativa
  unsure (1)..(481): unsure at all n locations
aattcggcacgagnnnnnnngccgaataccacctgctccattaccacacgctgctttctttctcttcttcttcctcatcgcgtcacctcctctagttcgcaactcgcatctgctttcttttgagttggtgttcgtagtaagaggaggaagctgaagatgagcgatcccaagtacgcgtacccttacccggcgcagggctactaccagggcccgtaccaggggcctccggtgatggcgccgccgcagtacgccgcgccgccgcccaggggaagcctaagtttcctcgaaggctgtttggctgcgctttgttgctgctgcttgatcgacgagtgctgctgcgacccgtcgattatattcgtcagctaaggatgcatccatcgatcgacctggctttggcctcaggtcgcaatctatttgtacagacacggcagaacggtttaatcctcaagtcctcatcaaggatgcagtattaatctgcttc

SEQ ID NO: 396386 - DNA, 472 bp, Oryza sativa
gaacccgacctggaaaccttggaggaggcgagcggcccggttcgcccatcgagcgtgacgacctcgaacccgaccctttccccactctccctcacctcgcctacacaacacgaaaacaggtgagatttctgatcgcgaaacagcgcgagcgagcgcgcggagggagcttctggaaagggcaactcagcgcagtacgggtgtagaagccgcgaatgttgagatgcgggtgggattcgcggagggtttcgaacacacgcgtaaccagcgtcgtcttccccacgccctgcgagagcggcggcggcggcggcggccgtgaggcggttgacgaaggaaggagaaagggtttagcggttggggtttgcgggatggggattccttaccggcgggccggtgacgaggaggcacctcgacggcgcggcggccatctggtcggtcgtggcagccggccgcggcgaggggcgggtcaccggcg

SEQ ID NO: 396387 - DNA, 775 bp, Oryza sativa
tagcgtggtcgcggccgaggtagaagccacagccgctctatctccagaagcagaagccgcattcgctcgatctccagaagcagaagccgcagttatagcagaagcaggagtccaagatctaggtctgcttctcggtctcactcacctgtgaaagaaagatctaggtcggcttcacagtctcgctcacctgtgaaggaaagatcaccatcaagatccccaccccctgctacttctcctcctcgtgaaaagtcagcaagcaagagccctgtcaagagcagaagtttatcccgatccccatctcctgtgaaatctgagtgaagatggatgcacttgaagcctgccagaaactatttcatgatttgtggagctgagtttcggaaggcagtagattgtggattatgggtttatctgtttctgcgttaccattgttggttacttttcagaagagagccgtgttatttcactgttgcttggtcatgtcgtaatatctgtcagaaacattggcttacatgcttagcgtttaactgccattcccaatctatcagacctcgtagcacatggtgctcgaacttatgctatacatacagcacttttgactctgcttattctaaagttaatattttagtactggaggagcctttgcgcctaatattgcttttacttagttttaaagctggcttggactgccggcggcgtcaaacaactttgtaccgaacttagggggcccgtcccattgcattgagtgattaccgccctgcgcgtttcagagatggaa

SEQ ID NO: 396388 - DNA, 498 bp, Oryza sativa
  unsure (1)..(498): unsure at all n locations
atttcgcagcttctcgtgatgggggcagaagaggggagcaatccgcccgccgcccgccgccgcagggggctcccgccgcgaggccgcagccgataactccggcggagttcctctcctggaagcagcggaaggatgcagaggaagctgcaaggaaagctgaagcagcacagaagcgagaggcagatatagcttcaggagcagtacaaatgaatgggcgagagctgttcaagcatgaaccctgggtctttgacaatagtatctactaagacgaatgaactccgagaaattcacaaccatatgtgctatatcttcaattgtgaagttcaacagagtagtctgcatgcagaggtagtagatattgttagcttaagtgtatttcatattgttaagcattgcactttaagctaagcatacgatttcgttgtctgtgttaccgacttgtgaattcatatgattcatatctttatgacctctnnnnnnnnnnnnnnnnnnnnnnnn

SEQ ID NO: 396389 - DNA, 772 bp, Oryza sativa
tgcgccatctcgcggctgaacaggggaggggcgccgatttctccatctggcgagcagagcagggggaggggaggggatccctgagatggcgagcacagcatgctttgtgattgtgagtaaaaatgatatcccaatctacgaggctgaagttgggtctgctcccaagagagaagatcaagcttatcagcaccagttcatattgcacgctgcattagatgttgttcaggaccttgcatgggctacaaacacaatgtttctgaagtcagtagacagatttgatgatcttgtggtgtctgtttatgtaactgctggtcatactagatttatgttacttcatgactcaaggagcgaggatggaataaaaaggttcttccaggaggttcacggactctacatcaagatcttcctcaatccactctacctacctggttctcgcatcacatcctctcattttgatactaaggtcagggctcttgcaaggaaatacctgtagcatataaccaggtgaagactctgtaagctccacaccgccctgtattctagtgagtagcacttgccttgtactagttcttctacaattgaatgaacgtagatcctgagactagcctagcagtaccatttactattgaatgaacatagatcctctaatgatcttgtactagaaaagtgctctgtttgtcttttccggagttagtagacgcccattccttgcctgtactgtacttctacccagagattatatgtactagtagtataaaaaaaaaaaaaaaaa

SEQ ID NO: 396390 - DNA, 743 bp, Oryza sativa
  unsure (1)..(743): unsure at all n locations
ggcacgagattattcaaagagtttgaggataagatggtttcagagtgcacagaactaatggaagctgagaacccaactgacgtggatgaattttctaaaatggaaaataagagtgttaagttggacgatccacctggtgagggacctgttctaaggtgggagtcacgtattgtctttgctcctggaggtgatgcatggcatcccaaaaacaggaaagttaaactcagtgtgactgtcaaagagctgggactttcacgacatgccttccgacgtttacgtgaggttgttgggaataggtacaattctggaaaagatgaactcacaataactagtgaaaggtttgagcatcgggaagagaacaggaaagattgcttgaggacattgtatgctgtagtagaagatgcaaccaaggccaataagttggctgatgatgctagaaatgcatatgttaaaaacagacttaaggccaatgctcaattcatggaaaggttgaaggtgaagacacagaaattgagggtagctgcataaggggctcctggagctacacgctctggaacaattcctctttcatgatatcagtacggtcattttgcaacaaaggatgcggcagtgagacgtagaacgggagcaaaaatgttttgttgtaatttacatgtgttgccttgtttggacggcctgttaggtttatctttagctgaagctacactttttgnnnnnnnnnnnnnnnnnnnnnnnnnnnnnnn

SEQ ID NO: 396391 - DNA, 639 bp, Oryza sativa
  unsure (1)..(639): unsure at all n locations
ggactcncngngntntttcgtcgtccgttttgcctccgtctccgtctccgtctccgccgctcgccgaggcgggaaaaataagcgttgaatcatgggcaagaggaagtccaaagcaaaaccacctcccaagaagagaatggacaagcttgatactgtcttttgctgtccattttgcaaccacggaagtagtgttgagtgtcgcattgatctaaagaacttaatcggcgaggcctcatgcagaatttgtttggaaacttttagcacatctgttaatgctctgactgaacccatcgacatatacagcgaatggatcgacgaatgcgagcgcgtgaacaaccctgaggaggacaacgccaaccactatgaagatgacaatgccagccgctaccgctacgacgaagaagaatagtggtccgttggcgcttgttccataaaacgagttgcctgaatgctgtgcaaaacagtgttgatgtagagtgatgtggtactgttacccgtgtcagtgaaccttaccttacaatggggcatacctggtagtctaaatagcatctagggtagtgcacacagttttagctttgtgaagttgggatagtgggtggcatcagctattcaacttgtcctgtacattttaancatgcc

SEQ ID NO: 396392 - DNA, 458 bp, Oryza sativa
  unsure (1)..(458): unsure at all n locations
aatccaagcacccggttgagctgccgttttctgtgatctccgttgctcaatctagtccgtcgtacggcatcgccatgggcgccgccgacaagggcaccggcgtgcagttcgaggacttcctgccgtcgatggcgaggaagctgggcgtggaggggctgatcgaggagctctgcaaggggttcgagctgctcatggaccccggcgccggcaagatcaccttccggagcctgaagaggaacgcggcgatgctagggctcggcgagctccgggacgacgagctgtcggagatgatgagggaaggggacctcgacggggacggcgcgctggaccagatggagttctncgtcctcatggtcaagacttagccccgagcttaatgcaaggatgaatcgcataagggggttncagtttttgacataatctnattcggtgctttttaagctaattggaattcaaca

SEQ ID NO: 396393 - DNA, 466 bp, Oryza sativa
  unsure (1)..(466): unsure at all n locations
nnnnnnnnnnnnnnnnnnnnnnnnnnnnnnnnnnnataaccaataggccacagaactcattataacagcatgtgttaccacaaaattggcactattattgacaaataatatagcacaattcaagttacacatacctataaggctataacactgcagcggtgatccatagaaaaacacatgagaaaaataaaaagaagaaaccaactcagaaccaggatgaggcttgctcataggccggtgctgggcagtgatgccatgaacgcactgtacgccgaatccagatcgaagttgagctgccttgcctgttgctcggtgagctcatccccggcccccatcttatttagcttggcggagccactcgttcancttgaccttnccttcgaggtccggcggcaggacggggcccagntttcccatgggaggtcgagaggtcgtggagcaagggggcgggaccttggtcgttggg

SEQ ID NO: 396394 - DNA, 954 bp, Oryza sativa
  unsure (1)..(954): unsure at all n locations
acctagtctacaagttcgctatcaacaggcgatatgtcaccctatttctgttgctgttcaacgacgtccttaaataggagtacttgtgctacaagcctaacccagagatagcaccacaaatacctctcttttctttaggtgtttacttcgacagcttcaccaccttcgtttacccattgccatggcggctgagaagcgaaccattgggctcggcatggactactcgccgtcgagcaaggccgcggcgaagtgggcggtggataacctggtgaaggccggcgaccggatcatcctcgtccatgtccttcccaaaggagcagatgccagccacaaggagctctggaagagcaccggctcacctttgattcctctgctggagtttatggagatgaacgtgcaggcgaggtatgggatcaaccccgataaggaggtactggagatcctgcaagcttgaatccaagtccaagcaggttgaagtacttgcaaaagtttacttggggtgatgcaagggagaaactcttttaggcagtagacgatctcaaggtgaatacctttgttcttggttgcaggggactaggacccttgaaaagggccctacttggaagtgttagcaactatgttgtcaacaatgcaacctgcccggttactgtggtgcgtgcaccaaccgtgtcaaatgcctgattctatgctacatgggactgctggaaattggaatgctgggcttgttttgctgttcatccatcttttagcagagaaccttcatctgagttggtgccattgcaaggattggtctctggctcctgcacttagcttttccatgctattggaatgttattaagttgaatcttcggtgtatttccttctgttacttcctatgtatagttcattactactgtttaatggtgaatgttaaagattgccnnnnnnnnnnnnnnnnnnnnnnnnnnnnnnnnn

SEQ ID NO: 396395 - DNA, 546 bp, Oryza sativa
  unsure (1)..(546): unsure at all n locations
ctattgtacggtcaagggcaacattgattagtgggaggcttctttcttcagctgatgctttcacgacaatagatcgaaactgtgttgcaaatctgcttctagctatagacaaattattgaagatggaagaaagtcaaaatacagatgaaactgagagtgcattggaggccttaggcctgattggtacaacatctgctggagcatgtttgttgctcacagattcatcaaatgctgccagacatgtggtagaggcatcctttggtcggcagggtagaggtaaacagctggctgctttgcatgcatttggaaagcatatctggtggttgatcggcaggaagaccaaataaaactggataatcaagcggaagaacgcctgaagcgttttgtctataccacagcaagaaacagtccaaacctgncaccttcggctcttccttctgtcggtgttacancaagatccagccataaggatacctggtccagagtaatatctggccttgttgccagagaatngtgcctaatgggaatttgttaaaagttngacat

SEQ ID NO: 396396 - DNA, 469 bp, Oryza sativa
  unsure (1)..(469): unsure at all n locations
ncttctccaccggagctgctttagggcgacggcgagatcgattcgacgggaagccagccatgggaggggggtccatccgcgcggcggcgaaggcccagtggatcgggggctaccgctccgcctcggccgtgcgccgcgccgtcctcccggcctccccggcgccccagacagccccatcggcggcgggcgagggccgcaagcggcgttccacctacgcggcgatcgacgactgggtcatcccggaccgcgagttgttcggccccgtgcccacccacgaggaggccatggccgncaccctcgacctcaaggagtncttccagtttgctaagtctgctnaattggagctctccctcttgtgaccttgatgtcctacaaagggtcttgttcattcggaatcatctnagggtcttattcattcaaaaattttnagcatgaggataaccatgaaatttnattgtttcctntggag

SEQ ID NO: 396397 - DNA, 451 bp, Oryza sativa
  unsure (1)..(451): unsure at all n locations
aagaaacagggatggtgtcacatggcataggcaagaagagtctttcttcttcctcctactcgccgccgtcttcgtcgtcgtcgccgcctcggtcttcatagctcggctgcaatggtaaggtttgccaagacggctccgcggcggcgtctccggctaatctccggtcactctggccttccccgtggcgccgccgccgcctcgcgccgtgagtgaggtgtgtggtgctgtggggcatgcgatctcctccgccgtcttcctcctcgtctcgccgtcgctgctccggagagtctctcccgtagacaacggctaaaaaggtctcagaaacttactgaaatttgggaacgaaattcgtctgaacagaagaaaattcgaagggatttggcgnaattttgagtaggtcaagatgaccaggatgaggtgcatcccgggtctgctcgccggnaggaaggaa

SEQ ID NO: 396398 - DNA, 460 bp, Oryza sativa
  unsure (1)..(460): unsure at all n locations
aagagctccaccgcaatgcaaccaatcccttgtctctccgtcgaggatcagtaatgcttcacgacgattgcatcggtgagggactctcaagccccatagctgctcaaattcttgatttctgcgatgacggcctaggtgatgatctcttcgctgcagtggccactacctccgagcaatttgcagcctcttccgaggatggttcatcgtcgtccacagccacacctcccctctgcagcaacagcaatgacatcacagctgttgcagacacagctttctccccattactctccttcgactccaccctctcagccttccttgagcaagagcaaaaaccctgaccaggacaccaaagctacttccctccattgcatgaaacctttactgnaccagcatactatccagctggcacgaggcacatagacaattaagcnaatatggttccagagataagtggacaatg

SEQ ID NO: 396399 - DNA, 364 bp, Oryza sativa
  unsure (1)..(364): unsure at all n locations
gcgagactcagtggagggagaagaccatcaccaccatgggcgccagctgnagcctcgtgccgctcctcgactacttcgcgcgccgggagttcgccgccgccggcctcagccccggcgccgtcacgctgccgtacccgggcgacggcggcgaggcgacctgcaccgtccactactgggcctccacgggggagccgctgctgccgccgctgctgctcgtgcatgggttcggcccacgggccacctggcagtggcgctgccaggtgggcccactgtcccggcatttccacctcatcgtgcccganctcatcggcttcggcggcagctcgttcgggcggcgactccgccgcttcgccgccgttcggga

SEQ ID NO: 396400 - DNA, 790 bp, Oryza sativa
  unsure (1)..(790): unsure at all n locations
tttttttttaggaaacatacgttacagggaggggaaacaacttaactggaccaatatatgtccaaaataaatgaatattttgacattacagggagtggaaaaaagggggaaacaacttaattggaccaatatatgtccaaaataaatgaaaattttgacattacagggagtggaaataaaaaacatgagaaacgccgttgccggggatcgaacccgggacaccggcgtgacaggcgggaatactcaccactatactacaacgaccttcttgttagcaatccatagctcagctatcactttaccatcgtaatcaagttccatttcaaagataagcacattcgcaacggttcgatcccttatattttcaggtcaaattagccggcacaaatataaattcactacactgaaaccagtttttttgaacaatatactggacctgctcttgttattctctcttcacagttcacagctttatggacgtactactacttgctgtaggagagttcacatgtctgaacacctaaaaaaactactagtcccgtcctatagggattttgggtggatgtttagatttattgtactaagatatgtcatatctatttaaaatcccttatattataggatggagtgagtagtacagtaaattnntctccnccgngcnacnatcaattgagggacaatatcaatatacaactgtcttgaatttacagggcgaaaaaacantctccatgctgcaatntgaccaggcaaatatgatgatatatgtgttccattggctgaaaactgacag

SEQ ID NO: 396401 - DNA, 522 bp, Oryza sativa
  unsure (1)..(522): unsure at all n locations
caaagccctcgccgaccggcgcgtgcccgccacttccctcaaggtcaccgtcgtggcggatcccacctcgccattcaccccggcgatgacacaatcgctcgcggccacatgcgagcggctcaagaagctcgcgcanaagccgggatagacttccgcttcagggcagtcagctgccgagcaccggagatcgaggcatccaagctagggtgcgagccgggagaggcgctggccgtgaacctcgccttcacgctgtcgcgcgtgcccgacgagagcgtgtcgccggcgaacccgcgcgacgagctactccggcgcgtgcgcgcgcttgggcccgcgggtcgtgaccctggtggagcaggagctgaacacgaacacggcgccgatggcggcgcgcttctccgacgcgagcgcgcacnacggcgccgtgctggagtcgctggacgcgaccctgggccgggacagcgcggacagaacccgggccgaggcggccctggcgagcaaggtggccaacgcggtgggccggga

SEQ ID NO: 396402 - DNA, 359 bp, Oryza sativa
  unsure (1)..(359): unsure at all n locations
cnggtaagaaagctctctcctgaatcacctctcttccccgcgatctctcctacttttcctctccggagaaagctacgtgcgccacccccaccaccccgccccgccgtcgtcgaggcgctggcgccgtcgggctggacatggccggagcgccgtgcctcctgcgcgtgctagccgtctcctcctgcctctgcctcctcgccgacgccgcgcgcctcctggcggcgggccggcggaggaagccgacgcgctgctcaagctcaaggccggcatcgtggacggcggcggcgcgctggacaactgggccgccggacgagcccctgcgaatggcggaactcggcgttggccggcgttgttttcag

SEQ ID NO: 396403 - DNA, 720 bp, Oryza sativa
  unsure (1)..(720): unsure at all n locations
caatggcctccttgtnatccttcctgctcgccacggcaatggccgcattgttggtcatcggctcgtacgccactgagctcaccttcaaagtcggtccaggctctagcaccactagcctgaacctcatcaccaatgtcgccatctctnaggtggaggtaaaggagaagggcaccggttgactggacggggctcaaggagtcatcggctaacacctggacgctcaaaaccggggcaaaactcaagggccccttctccgtccgcttccttgtcaagaatggcggctaccgcgtcgtcgacgatgtcatccctgaagccttcaaggtcgggctccgtctataagcagtggcatccagctcaagtaacggtacactttgtgctcttgcattggatcgcatggaaatttgttgatctcttaaaataattctttttttaaaaaagagagatcgagtctgcctgtgcgcaagccaataattattttttatggtccttcccgcatattgttgtgaagctatatatgtgcacatgattttgaatacgttgtttatgtaggacttatggtaaaaaggtatattatttggtcagccttcaccgagacggttgtttacatttgatttttccaatgttttaatacatatgtatatctagatcaatgatgttcatctatcatttttacatgtaaaaaaaatcctgtaaaattcgcattaaaaaaaaaaaaaaaaa

SEQ ID NO: 396404 - DNA, 483 bp, Oryza sativa
ccaaaaaggaacaattgccgaaacgacgaggagtagaacgggtgagaagaggacttgagtcaacatcaaccgccagatcccgatcggatggcgcgggtcgcagccagctgtgttgccctgctggcacaaaggagaggattgtccgcggcgataaccgcggcggaaggttccgccaagaccatcgacgacaaggcggtgaagctcggcacggcggcgaaggacgtcgcgacggcgacggcgaccacgacggaggagaagacggcgttctgggagccggacccggacaccggctactaccggccggtgaccggcaccaaggaggtggacgccgccgacctccgcgccgagatgctgaagcagaggatgctccatgactgatgcagaatggggggtttacccgtcctttgagattcgtgccgacggtatgcgtatgtatgggccgttggatgcgaccccggttcgtctgtgaaaaaaaaaaaaaaa

SEQ ID NO: 396405 - DNA, 498 bp, Oryza sativa
ctccttactctacctcgacttgcaaccgaccaatggtcgccgtttgttgggacatccatacccatgcattcttggatacgctcttctctcctccgtcttgctcgtcctcctggcgctctccatcatcacactagtgccacgcatgccatcaccgcagtcgttcttccgatctccaccgcctcgcctgatcaacagtagggttcctcatccatccgatgccagcgattgtattttctccgacggtaaatgggtgagggacgccgcggccgtgactgcttaccgggaggactgcccgtttcttgaccctggtttccagtgcatcagcaacggccggagcaactcgtctttccgctactggcgatggcagcctcatggctgcaagctccccgaagttcaatgcaactgatatgctggagaggagccggaacggtaagaatcgtgttcgccggcgactcgatcggccgtaaccagtggggagtccatggtgtgcatgctcgc

SEQ ID NO: 396406 - DNA, 475 bp, Oryza sativa
acttaattgcacgaagaacaccatggcacaacgtgtccaagaagaagatgagcagatgacgagcaccgatgacttgatccaagctcagatcgagctctaccaccactgcttcgccttcatcaagtccacggcactttgggccgccaccgacctgcgcattgccgatgccatccaccgcaatggcggcgctgccaccttatccgacctcgccctcaacgtcgggctgcacccgaccaagctctcccacctccggcggctcatgcgcgtgctcaccgtcactggcatattcgctgtcgaagacgcaatggtgaggccatgtacacactcacccgagtctctcgcctcctcctcaacggcgatggcgagggaacgcacgccctgtcccatttggcgcgtgtgttagccaacccgctcgccgtggtcttctcattttcagcattcacgagtggttcaccaccgaagaaggcaaccaaca

SEQ ID NO: 396407 - DNA, 643 bp, Oryza sativa
  unsure (1)..(643): unsure at all n locations
nnnnnnnttttttttttttttttaatgaatttaaacacatacatatatctagattcattaacatataaatgaacgtgggcaatgctagaaagttttacattataaaacggaggaagtagaactcatacgcgcacacgtgtatgaaaaagaaaaaaaaacaataatcttcttacgattatacgttagttggttgatctttatttgttggacatgtgacacgtccaagtacttaattaatcgtactcaccactcacacacactaattaaatctcgatgcaaattgtgcgtttccgtcgatgattaatttctgtcgatcgatcgatcacgcgagcaatggaggaatgctctgctcgttcctgaagaagtcggtgggatccaccttggccttcgtcctggcgagcctctcgaagttgcccttgaagtacttctcgccccacaccttgccgacctggtagcaggagacgttggcgccggcctcgacggcgttgacgccgaggtcgaggtccctgtagttgacgtacgcctgcctcgggttcttggtgacgtacggctccatgaacgcgtagaagtccctgatccattgatcggggcttcgcgggcgggcctggcgaccaaaagtgatgactggatttttnaaaatccc

SEQ ID NO: 396408 - DNA, 567 bp, Oryza sativa
  unsure (1)..(567): unsure at all n locations
gcttgaggagatttgaggcaagctgccctcagctcttgcaacctttccttccttctattctatggctatggccctatttatgtttggctgctcctgaatctcctcctattgcccttctgtctcacatccctgtctcataattaaagtcataattaaggagcttctctaaggtgattgggacttgttgcagggatcaggaggaaaacaacaaggataacttaaattttggattaacaacaagaggaagtggatcaaccagacaagaggaaaacgtgcaaacaagacaggcttgcaacatcaccttgagtccaaagccaagaaagatggggctgtcaatctcatacccaccagacgactacctgccagcaatggaggacaacatgggcaggctgttcatccgggtccctcagcttcgacgacgacatggaggccgccgccgatgactcgccgtcgacatcaccgatgccatcaccgtcggcgacattgctgccggcattcggntncggggggaagctgatcatagnggggctccctgagcttcaagggaagagaggctnacccggttca

SEQ ID NO: 396409 - DNA, 459 bp, Oryza sativa
cgccgcgctcgagctcctcgcctccgcgcaggccatcgggctaacgccacgctccaacgcggtcaccggctcatctcctccctcgggtccgcaaggcgcgtcgcgaggctgaggctctgttcctcgagttcttccttgccggggagatcaagccacggacgcgtgcctacaacgcgctgctgaaagggtatgtgaagattgggtcactcaagaatgccgagcaagtgctcgacgaaatgtcgcaatgcggagttgcgcctgatgaggccacgtacagcctactcgtggatgcctatacgagggctgggcgatgggagagcgcaaggatacttcttaaggagatggaggccgatggagtcaaaccaagctcatatgtgttcagccggatccttgcaggtttccgtgataggggggattgcaaaaggcattttcggtctcccgagattcatgcaatggggg

SEQ ID NO: 396410 - DNA, 392 bp, Oryza sativa
  unsure (1)..(392): unsure at all n locations
ctcgtntgcactcgtcgctgctcgtcccctacttctcgtggaagtacagccaccggcgccaccactccaacaccgggtcgctggagcgcgacgaggtgttcgtcccgaagcagaagtcggcgatggcgtggtacaccccgtacgtgtaccacaacccgatcggccggctggtgcacatcttcgtgcagctcaccctcgggtggccgctgtacctggcgttcaacgtgtccggccgcccgtacccgcgcttcggtgccacttcgacccctacggcccgatctacaacgaccgggagcgcgtccagatcttcatctccgacgtcggcgtcgtgtccgnggggctcgcctgttcaagctgtcgtcggcgttcgggttcttgtgggtggtgcgcgt

SEQ ID NO: 396411 - DNA, 372 bp, Oryza sativa
  unsure (1)..(372): unsure at all n locations
agcaaccaagcaagcggcacagagcgcgagtcatgcgacccacaccgcccaaatcctcggaacgcaaagctccccgctactactctactctcctactagtcgtctactactcggccaggtgaggtgcccaaccaccgccgtggtagcgagcgcgcgacatggcggcggcggaggtgaggcaccggacggtggaggtggcaagcggggtgcgcctgcacgtggcggaggcgggcccggaggacgggcccgcgtcgactgctcgtccacggcttcccggagctctggtactcgtggcgccaccagatgcgcgcccgcgccgcgcggggtttccgcgccgtggcgccgacctccgcggctacggcnactccaacg

SEQ ID NO: 396412 - DNA, 639 bp, Oryza sativa
  unsure (1)..(639): unsure at all n locations
aaacacgccggcgtngcccaagctgccgaaggggccgagcgtgtgancnnagttcatcaaccattggaggtcgttccgctggaacctnacggcgagcgcggcggntgccaanccgcaggttnctaccactacgggcagatcaacatcacgtgtaccatcaagctctgcaccagcaaggggaaggtggacggcaaggagcggttcgccctcaacggcgtgtcgcacgtcgacgacgcccagacgccgctcaagctcgccgagtacttcaacgcctcctccggggtgttcgagtacaacctcatcggcgacgtgccgccggccaccaccgtcccgcagaagctcgcgcccaacgtcatctccgccgagttccgcaccttcatcgaggtcgtcttcgagaaccccgagaagagcatcgactccttccacatcaacggctacgccttcttcgccgccggcatggggccggggatatggacgccggagttcaggaagacgtacaacctgctggacacggtgagccggcacacgattcaggtgtacccgaggtcgtggacggcggtgatgctnacgttcgacaacgcggggattttggacatnaggttccacatntgggagaggtacttactngggggcgaaatt

SEQ ID NO: 396413 - DNA, 632 bp, Oryza sativa
  unsure (1)..(632): unsure at all n locations
ctcttcacgccacacttggccgccgcgtccatatcttctttgttcgtctgctgctgctgctgctgctttcacacttctcctttctgctctgggcgcggcgcgagctcgaatccatggaggccgagtcgagaaagctccttttggctctggccgtctcgctctgctgcttcgtcgccgcgtcgagagcgcaatcgtacatcggggtgaactacggcgaggtggcggacaacctgccggcgccggaggagacggcgaagtgctcaagtcgacgaccatctccaaggtcaggctgtacggcgttgatccggggatcatgcgcgcgctcgccggcacgggcatctcgctcgtggttggcgtggccaacggcgacatcccctcgctcgccgccgaccccgccgccgcgtcccggtggctcgccgccaacgtgctcccgttcgtgccggcgtcgaccatctccgtcgtggccgtcgggaacgangtcctcgagtccggggacgcctccctcgccgccgcgctcctccccgccatgcanaacctccgcgccgccgccgccgcggccggcgacggggccgccgggatcaattctccaccgtgaacccatggccgtgctcgcgcantccgacccgccgtcc

SEQ ID NO: 396414 - DNA, 597 bp, Oryza sativa
  unsure (1)..(597): unsure at all n locations
gcttatnagtgagtttcgacttccatacaaagcattgccacactcggaatttnaggctgtcaaagacaagttgagccaagttgcacgcaccattggtcaatctgcagctgttgaatctgtgttcttcaaggtgccttttgaagaagttccagatcttgttgccagccgccgagtatttctttcaaaaggatatgcttatgttgcnatgagtcaggttgtttcgcttgtggttacccaattccgctgcaatatctcgaaggcacttgttttaacaaatagaaaatggacggccaccattaaggaccaagaaaaggataggttgactcctattgtcgaagcattgagtaatgcatattttggacctgattactctcagccaaaggatgctgttgagattcctctggagggtattgaccacctggctaaaacttctttccctcttggtatgcgccacatgctagagaagttgagagaaaaccatcatctgaagcatgggggcagaatgcagtttggtcttttccttnaagggagctggnactaaagttggaagatgctctagcattttggagggcagagntttctcagaangttggctct

SEQ ID NO: 396415 - DNA, 360 bp, Oryza sativa
  unsure (1)..(360): unsure at all n locations
cccgatccggcaacaacaacgtacgtaacctcctctntntntctctctctctctccccttccagccgcgcgcgcgcacgcacgccgccgtcgtgacgtcgccgtcgcggtcgccgccatggatccgacgccgcagtcgcacccgatcctggcgtacgtgctgtcgcggctcccgtcgctgctgccggtgtcgccgtcgctgtccaccccgcgcgcgcggaaacatcgagcagccgtccccgcgggcgccgtcgggcgcgcggaagtttcgacctcgtcagccgcatgccggggctccgccacccgtccgtcctctccgccatgangcgcgccgtcgccgacgtctcctcggcgcgcgacg

SEQ ID NO: 396416 - DNA, 615 bp, Oryza sativa
  unsure (1)..(615): unsure at all n locations
ctttctcggcgaggattggctgtgtgattagaggtaatttaatcgcgatagattggtttaactctaatccgggagtttgcttggcctagggtttggtggatttgcgtccctgtgagaatttccatatccaatcggaatggggccaaagagagcgaagtctatgccaagtcgtaatcgtgctgggaatggatgacaaagaatcacacagtcacgagctagaatgatatgcgctttttagtccatcaagaagaagtgattggtttgtgatcggtgctcgcatcgtcgccatgggaagtgcttgctctaggaagagaggccagctgcttgttgatgaggaagatctctacagtgcaaggttctccaagagcagcagcttcaagtggctactgcacaccttgccccgcagcggctctgatgtacacaggaagggtgcagggaccagtgcctgtncggtgcccatcgctaatggagctctgtgtggccaaagtccgcgaggatattgggaagtattctgatttctcgctgctgcctagagatcttagtcagcaggtatttaatnaactngtggagtggaacattctcactgaagagttgcttggagcttttcgtgattgt

SEQ ID NO: 396417 - DNA, 384 bp, Oryza sativa
  unsure (1)..(384): unsure at all n locations
tccttcgtgggcgacctcgacttcggccagagctcgcgcttctcctccatggacttctgcgacacctcgacatgtcgtcgctctccgccagcccacgggagagcagctcgcctctctccgccccgcagcgcgaggtggaggtggagatgcggcggctgaggctggagctgaagcagacgatggacatgtacaacgcggcgtgccgggagngatcaacgcgaanagtcggaccaaggagctgcagctgctgaagctggaggaggcgcggcggctggaggaggcgcggcacgggatggaggcggcgctggcgatggcggagatggagaagaccaagtnccgcgcggccattgaagcggccgaagcggcgaagacttggccgacttt

SEQ ID NO: 396418 - DNA, 436 bp, Oryza sativa
  unsure (1)..(436): unsure at all n locations
ggcaaggcggcgcacctcgtcgacagcaccaacaacgtcggccacttccagcaggtgctcaccgccatcggcaacttctgcatcatctccatcggcgccggcatggcggtcgaggtgctcgtcatgtacccgatccagcaccgcgcctaccgcgacggcatcgacaacctcctcgtcctcctcatcggcggcatccccatcgccatgcccaccgtgctctccgtcaccatggccatcggttcccaccggctgtcgcagcagggcgccatcaccaagattatganggccatcgaggagatggncggcatggacgtgctctgcagcgacaagaccggaacgntcacggtcaacangntcaccgtcgacaagaccctcatcgagggtgtgcttccaaagggcgtcgacaaggacaatggtcctcctttaaggcgcaagg

SEQ ID NO: 396419 - DNA, 640 bp, Oryza sativa
  unsure (1)..(640): unsure at all n locations
cgcacaagggaaaccctcgccgccgccgccgtcggggatgacgtccgtgcgcgccgtggggtccacgctgccgtcgatccgcgcggcggcggactggcccggcaggagctgctgcggcgggagctggtggagtgccagctggtggcgggcatctggtgccacgggttcacggtgtcgcagctgcggacatccgcgccagcctgccgccgacggcgaggctggttgtggcgaagaactcggacgtggcggcggcggtggccgggacgcggtgggaggcggtgcggccgttcgcgcgggggatgaacgcgtggctgttcgtccgctccgacgagatcccgccggcgctgcggccgtaccgcgacttccagaaggagtggaagctgcagctcaacgacttcactggcgccgtcttcgagggccgcctctacagccccgacgacttcgcgcantccgagtccatgcccaccagggtccagtcctaccagtacctcgtcggcttgcctccagattgcccgccgtctccgtcctcgccgcgctccggcttcgccaaggaggcattggcgacggccggcccgccgacgagccggttcaaaggcaacggggganaatnttaacgattctctttcaatttttttttcct

SEQ ID NO: 396420 - DNA, 602 bp, Oryza sativa
gtcatgataagccccatggcagttcacctaaacccaaaattgttcgaggatccacttaaatttgatccatggaggtggagggaggagaagagaagctcgatgctgaaaaattacatgccatttggaggaggcgtcaggctgtgtctcggggcagagtttagcaagcttttcattgcactcttcctccacatcttggtgaccgagtatagttggacggagattgaaggaggggaagtactgcgcatatcagagatcatgttccctcaaggctatcacatccaactagttcctcagacttaatatacctattggatattccactgttgtaataataaagaaattgtgaacccaataacttgttgcgtatgatatctatattgtaactatgaaataaacagctcgtgtgtcttcagtttcagactgtgtcaaaaagtattattggaacaaagggtggaaaatctaaggcatctgaagctagagcacctcctttatctagcattcggaccctatgcaactatgcagcccttggttattaatgtactacctccgttttttaatagatgacgctgttgactttttcgcacaaaaaaaaaaaaaaaaaa

SEQ ID NO: 396421 - DNA, 587 bp, Oryza sativa
  unsure (1)..(587): unsure at all n locations
cggacntggtngncgcgtctctcggttctgtgaattgtgagagattgcctccgcttccgttgctattttatcgtcttcaattttcttcccccccttggagagataaggccgtggcatcattgccgccatcaccaatcccatcatcacctctcctcatccagaggcagaggaggcattttctgttcgtcttcttgacccttcttctgcttcctttataagattgcaatgtcgtcgccggacaaggtggtggccaggacgggccgcctcaggcagcgctacgacaacgagtaccgcctcgtcgcaggctgcgtgccgtaccgggtgaagaaagacgaggccaaccctcgcatcctcggcgacgttccgggccaggtggaggtgctcatggtctccacccccaaccgcgccgacatggtcttccccaagggtggatgggaggacgacgaggaggtgtacgaggcggcgtcccgcgaggccatggaggaggccggcgtcaagggcatcgtcaataggactaccttgggacactnggtgttcaagagcaagagcagcagacagagcagccaaggggagnttcaaggctacat

SEQ ID NO: 396422 - DNA, 813 bp, Oryza sativa
  unsure (1)..(813): unsure at all n locations
tgataataaaaacaagggcagatacaagagagaaggtagacgatagaagaggcagagagaagggaagatcgaagagagggaatcgaaatctctatctggaaaggccattggaatcctttgctggctccaactccagatagaaaaataagcggagaggaggcctaatttcttccagctagcgcatgcggntatccgctcctcttcctccgaacaatccgccggctccccctttctcgctgctgtttttttagctcgtgcctgtctggtccggccagccctgcgttcccgtttctaaattaatttttttcccccttcttctctcttcctctttcctctgctgtaaagaggaagggaaagaggggaagagcacgccgtggaggaggaggaacgggagcaatccttggagagagtaccatagcgctctccccctccttcctcgtatcggtccgttcgtgaggagagcgccgccgctcgccagattgggcatgtcggccttgtaccttgctcgcggtgcttccaaggtggtcaggagaatcacctcggagacgtcggtcgagctcaagattctcactgagaaatggcaactcctactcgcgggcctcgtcttccagtacattcatggtttggctgctcgtggggtccattatctgcaccggccagggcctaccctccaagatcttggattcatgattctttcccgagctttgggaaagaaaggggctacaatcagtgagacgctgtttactttcatcttcctctcctttgttctgtggacaatttaatcctttaatccttaaaccaagggttttanat

SEQ ID NO: 396423 - DNA, 528 bp, Oryza sativa
  unsure (1)..(528): unsure at all n locations
gcgatggggggctcgtacgagctcgtcaggacggacgacgcggcggggcacgtcttggatctggaggccggacgctgcgccgccgtatacccaaagggcggcngcggcggcggcggcatcgctccaccaccggtgccgtctccgccttcgtctccggcgtcggcgcggcgccgctcgtctcgctcgacgtgttccgagggatcaccgtactgcttatgatcctcgtggacgatgctggcgcgtttcttccagcaattaatcactcgccatgggacggtgtaaccctggctgatttcgtcatgccctttttccttttcattgttggagtcgctctagctctagcgtacaagagagtgccaaacaaattggaggcaaccagaaaagcatttctccgtgcaactgaagctgttttgtgttggtcttgttcttcaaggtggattttttcatggtgttcgtagtctaactttcggaattgatatggaaaaaatacggtttaatgggtatactacagggaattccaatngttta

SEQ ID NO: 396424 - DNA, 494 bp, Oryza sativa
gactagttctagatcgcgagcggccgacctcttcttccctttcctctcctccgccgccgctcccccgactccggcgagcccccttccccccacccatcggcgcggaggacgttgccgggatgagcgtctccccttcaaccggacgcgatctcccggggcgctcccgtatgcccttgcgctgctagagatccgggctcttctcggatctcaggagtacaagatatagtgtaccagctctctctcattcaacatgtggagttttgcgtcaaacgccatagctggaagcataaggaaaaaagcacagccctcaaaatgcagtcaatccaatcctgattgctctgatgatgatgtttcttcatgtgcaagtagagaggaaggccttgaatgtccaatatgttgggaatcctttcaaccttgttgaggaatgttccctatgtcttgtggtgcggtcatacaatgtgcaagaattgcatctttgggtcttcaaatgggct

SEQ ID NO: 396425 - DNA, 1311 bp, Oryza sativa
ggcctcgacacgtcggcgaacggcgccggcgggtgccgccacgtcctgaagctgagcgtgatggacacgctccaggactactacatggtcggcacgtacgacgacgcggcagacgccttctcgccggcggagctgagcgcggcgacgactgccggagctggcggcggctggactacgggcacgtgtacgcgtccaagtcgttcttcgacgtgcgcaagaaccggcgcgttctgtgggcgtgggcgaacgagtccgacagccaggccgacgacgtcgcccgcggctggtccggcgtgcagacattcccgaggaagatgtggctagccaaggaccggcaagcagctgctgcagtggccgatcgaggagatcaagacgctgaggaggaagcgcgccggtctctggcaaggcaccaggctaggcgccggcgcggtgcaggagatcgtcggcgtggcgagctcgcaggcggacgtggaggtggtgttcaagattccgagcctggaggaggccgagagggtggacgaccccaaccggctgctggatccccagaagctgtgcggttgagaagggcgccgccgtgcgggcggcgtcggcccgttcgggctcctcgtaatggcctccggcgacctgcacgagcacaccgccgtcttcttcagggtgttcaggcaccatgacaagtacaagcttcttatgtgcaccgacttgacaaagtcgtcgacaagagcaggggtgtacaagccggcttacggcggattcgtggacatggacatcgacgatcacaaaaccatatcgctgagaacgttgattgaccattcggtggtggagagcttcggcggcggcgggcgggcgtgcatcacggcgcgggtttacccggagcacgtggcgacgagcagcagccatttgtacgtgttcaacaacgggagcgacgccgttaaggtggccaagctggaggcgtgggacctggcgacggcgaccgtcaacgttgttgttggagaccaccacggccttgttgcgccggcgttggagttggagccgacacgcacgacgcagtgatctgaggcctgaagcggctggccggcactggcacagttggttcgatagtttgatggcatcgtgcagccgattggttgtgtggtgatttgttcgattgttgtgaacagggtgtatgatctgtgacagaaagaagagcacaaaagaaatcattcgatagtatacgtcacgtgctttatatgttttgctcttttgttatagtacgtattccctgcgtttcatctataaattgttcggcttttctcttaaaaaaaaaaaaaaaaa

SEQ ID NO: 396426 - DNA, 310 bp, Oryza sativa
  unsure (1)..(310): unsure at all n locations
gtttactctcccccactctctcctctctcccagtctctctttctctctccctcctcaaccggatgccgttctctctccacctctcgtcgtctctctgcccctgctcgcgcggatccgctgccggcgatgacgggatgggccgagccttcaagccatcgtttctgctcgcgtgatccgccgtcgacggcaacgggaggggcggatccggcgactcttcccctcccgcacggataccgtccactcttcggccccctctcacgtggatccaccgtcggcggcgacggtaggggcagatccggcgacctctttn

SEQ ID NO: 396427 - DNA, 461 bp, Oryza sativa
  unsure (1)..(461): unsure at all n locations
gacaattaacatcactaggagagaaatcaagaaacaagctagccagcaatggtgtctctccgcgcggccatcgtcctcgtcgtcgccgcctcgtcggtcgccgtcgccttctctcatgcggaagggaacgaggggccggacttcacctacatcgaaggcgccatggacgggccgtcgaactgggggaagctgagcccggagtacaggatgtgcggcgaggggaggtcgcagtcgcccgattcgacatcaacaccaagaccgtcgtcccgcgctcggacctcgacacgctggaccgcaactacaacgccgtgaacgccaccatcgtcaacaacggcaaggacatcaccatgaagttccacggcgaggtcggccaggtgatcatcgccgggaagccgtacaggttccaggcgatcantggcangcgccgtcggagaaancatcaacggcaagcgtttccgttc

SEQ ID NO: 396428 - DNA, 853 bp, Oryza sativa
  unsure (1)..(853): unsure at all n locations
cacatctcgcgtcgcgtganacgcactcctcacgcacgggagcagcagcgatgggttctcctcctccccatcgcctgcncctcctnctcgcggtcgccgccgtgctccaccgctcggcngcggcggcggagggggtcatccggctgccgagggggagggcgtgtgcggcgccgacggaccccgcggcgtacgaccggccggtgatcggcatcgtgtcgcacccgggggacggcgcgggcgggagggtcagcaacggcacggccgcctcctacatcgccgcctcctacgtcaagttcgtcgagtccgccggggcgcgcgtcgtcccgctcatctacaacgagcccgaggagcgcctcctcgagaaactgagtttggttaacggtgttctgtttactggtggttcggtgaagagtggcccatattttgagaccataaagaaagtgtttcagtatgtcttggacaagaatgatgcagggattccatttccactttttgcacagtgtcttggttttgagcttgtaagcatgattgtcagcaaggacaataatatcttggagtcattcagtgccacaaatcaagcatctactcttcaatttcccaattactcttcacttgagggatcagtatttgaaagatttgatcctgatctcatcaagaaactaagcaccagttgtcttgttgatgcaaaaccacaaatatggtatatcacccccaganattgcgaaaaaatgtttgccttatcaatttccttccagaatcctgacacctcnccttgaatgaaatggnaaggtctatntnnccacccgtgcaagcaacaattcctatcccntgcccnccgtggtcccgaaaaacg

SEQ ID NO: 396429 - DNA, 517 bp, Oryza sativa
  unsure (1)..(517): unsure at all n locations
ctcgcggcgtcggactcctcgaacctcgggtttcttcttctcttctcgcctcgcctccgtttcgatttggggagagagagatagagaggcgatcgcatcgaggaggcgcaaaaaccctagaaggcgaaccttccggaagcttctggaagggaggatgcagggcgccaacatgctcctggacgagcccgtccgcctcacctccgtcctcacccccgtcaagcccaaagtattcccatcactcaccaagattgttgggacccttgggcccaactcacactccgtcgaggttattcaagaatgcctcactgctgggatggcagtcgcacggtttgatttctcatggatggatgcttcatatcatcaggagacccttaacaatctgaggaaagctgcacaaaatgtcaataagctgtgccctgtaatgctggatacactggggccagaatttaagggtcacaatttaaatggggggaccattgagttgaaagttgggaatcaaggtancctaaaaccagtt

SEQ ID NO: 396430 - DNA, 444 bp, Oryza sativa
  unsure (1)..(444): unsure at all n locations
atttatctccccctctccgtctcgccgtctctcagctctctctgctactcctcctagctgcatgctaagctaaatcttctgttggattgcctagctttgctgctttgcttgcttgctgtggtgtggtgtggtgtgaattttgttgattggtcggagcttggggttgtgtatggtggtggtggtgtggtagctagtagctgctagtgctagatggtcgcaggggcgttggggtacatggcgagaccggcggacggcggcagggcggcggactcgtcaccagggatttcctcggcggctgcgtcgcgccgacgacgccagggacgccgccgccgccgnacagcaactgcaagcacgactccgtgtccggcaagctgtccctgcagaacagacgtgcccggcgacncacagacctcaactcttcccgtcccggcgccgcgcgtccgc

SEQ ID NO: 396431 - DNA, 432 bp, Oryza sativa
  unsure (1)..(432): unsure at all n locations
aaaaagcaaaaaagccccccgcgtcgctttcgcgtcgggtggctcgggggcgaaaaaccctagccgcccgcgccttctctccctccctccccccacctcgctgtcgctggagcccgccggcgggaagcgcaggcgggcagggaaggcggtacgaggccttcttctcttcgtagcgtctccctcctcggcgcgaaggacgaagacgacgaagctctccaccggcgtggtccgtggcagctacggcggcgaggtggggaggagacagcggattcggagcccccatggccggatccggccctcccttgcctggatctgcgcggcggcggcgcgaggaggcctngggcggcgcgacggaatgcggtcgtgatggcggccancgcaaaggcggcgaggttgcggccgntaaggttaaggccgcccagaaagggcgcg

SEQ ID NO: 396432 - DNA, 465 bp, Oryza sativa
  unsure (1)..(465): unsure at all n locations
gtgcagcatgacagattcccgtggcncgatgaaaggcggcatcaggtatcaccctgaggttgacncagatgaagtgaatgcacttgctcagctgatgacatggaagactgctgttgctgctgtgccttatggtggagcaaagggaggcattgggtgcactcctggtgaactgagtagaagtgaacttgagcgtttaacgcgcgtgtttacccagaaaattcatgacctcattgggatcaatacagatgttccagcccctgacatgggaacaaatgcacagaccatggcatggatactagatgaatactcaaagttccatggccactccccagctgtttgtcacgggaaagccaattgatcttggggggatccttagggaagagatgctgcgacttgccgcggtgttatgtatgctacttaggctttatttgactgaatacagcggtcaattttaaggtccaacct

SEQ ID NO: 396433 - DNA, 918 bp, Oryza sativa
  unsure (1)..(918): unsure at all n locations
atggagtctttcaaccacctctcattggataggaggtgattcatngaacagtcaangaaaagtctgttcaagcagggaggagggatnttcaaataattgatgtacgggaattccaattaacagaagtgagcaggacggagttcatgaantccatcggcctttatctttnttctatggagttgcaactgttcctgaatttccggaatcgatctgtagcagtttggaatttccgaggtgaactagttaacatcatttgaggaccacctgttgtggcacccagactgcaataccaataacatatacataacaagtgaccaagatctaattatttcttactgcaaagctgattccaacgattcatcttcagaagaaaatgctggctcaataaacatcagcaacatactgactgggaaatgcttggccaaaattaaggccagcgatttgtgcaagcagaagaaagcctggaagttccagagtacagccttggaggccctcgaggacatcacagcgctgtactatgacgagagcgtgacgagatctacactggaaaccggcaagcccccgtccatgtgtggccgaattgaccgtgaaatactgctttttgcccaacaaggtgttggtcatctgtaattgaattgatttaccgactgcctcaggtggtgccggccacgaagaggtctgtgttgagggtgattcatatttatttcggcgaatactggtctcctaccattctaagccccccacatttgttgtagaattaacaattgttgttagtttcacatagactgtagcattggggagatgttgatgatacctttcggcttagtttcatgtcagttcttaaacctgtacggctgtaatgtaccttcatggtagcctctatgctatctgatgaaatagtgatatctctttctgctg

SEQ ID NO: 396434 - DNA, 459 bp, Oryza sativa
  unsure (1)..(459): unsure at all n locations
agcacaaccctgtgtaccccaagttctcgtccttcttcaagagggtgacgattgcgctcgacccgtcgctgtacccggagaacccgctgatcatttgggagaatgcgcggtcggccgccccacaggaagggttcgaggtgaagaggaaaggggataaggagttctccgcgaatatccggctggagatgaactataaccctgagaagttcaagctctcgcagcctctgatggaggtgctcggggttgaggtggacactcgttcgagggtgattgctgccctctggcagtacatcaaagcgaagaagctgcagaatccaaccgatccttcgttctttatgtgtgatccacagttgaagaaggtctttggggaggataagctgangttttccgatgctaatcgcagaagatatcacagcatctctctcctccgcggccatcaanttggagcataagattaag

SEQ ID NO: 396435 - DNA, 594 bp, Oryza sativa
  unsure (1)..(594): unsure at all n locations
aaatccgcacggctcccgtcntctcctctcctctcctctcaaaaccctccacggcggcggcggcgggactccctctctggcgaggcctcgtcctcttcctccgtgagaaaatatggatgggaacatcgagaatcctgcggaggacatgagtgggattgccagtaatcttgataatgaggagcaggcgattcctctcagtgatgtgcctgagcagtacaaggaagatccagaaaatacatatgacgaagaaaccaaagactcaagctatgaagaatcagggatcccatacaatgaagatcaggtgaacataaatgatggaaatgtggggcatcagcatgaagaggaccaagctatcccctcagaagaagggcatgcctatggtggagaagctcagggagagcagcaggccaatgcagtaactgatgagaagaaatggccaggttggcctggagaaagtgtgttccgtatacttgttccagcccaaaaagtgggcgctgtcattggccgaaaaggggagtttatcaagaaaatgtgtgangagtccagagctcgcataaaggtgctttntggaccaccaggggtaccagattagag

SEQ ID NO: 396436 - DNA, 517 bp, Oryza sativa
gcggatgcgaaggggaaggggaaggagaaggtggtggtggcggaggaggattctgcggtggcggcgggctccgggggaagcggaggcgggaggaggacgttggtggcgtacccggcgcgggttgcggggtacaaggacgtggtggcggacgcggcggtcttcaggagggcgctcgaggggttgcacgcccagatggggacaaagctcaaggtgccaattattggtggaaaagaccttgatcttcatcagctgtttaaggaggtcacttcacgaggtggcattgataaggtgaagtccgataatagatggagggaagtaacagcatcatttattttccctgctactgcgacaaatgcttcttttatgttgaagaaatactacatgtcactattataccattttgagaggctatacttgtttgaggcacaaggctggtatcaagaacctgcattccagaagcatttcctgtatagaaatgaaagctgaaggccaagcttcccggaaaaggaaagaggaa

SEQ ID NO: 396437 - DNA, 481 bp, Oryza sativa
  unsure (1)..(481): unsure at all n locations
caaaaaccccactggaaaccccaacaacaaacccagtcagtcgcccactgaaatgatccgcncgctccgtgccacctcctccccccgaacgccaaccccaaccccaaccctccccacctcccgccgnccacgcccgcngcctcctcctcccgccccatccactgcagggggacgacagggtttgggctgccacctccgttgccgcgccaccctcgccgccgcaaccaacgcgccgatggggcaactgcagcagcagcaccaggagcagccgctgaggaaggatctgtacccgcaaaccgagccctacgatttcgggttcctcaaggtctccggcgtccacaccatctactacgagcagtccgggaacccccagggccatcctgttgtgttcctccatggcggccctggagctggcacgtcgcccgggaatcggaggttctttgatccggagttcttcaggatcgttttgttcgatcagaga

SEQ ID NO: 396438 - DNA, 616 bp, Oryza sativa
  unsure (1)..(616): unsure at all n locations
ggcnttntnttacagactgcacttaaattatcagctggtgatgatcatgaattgaattatataatatcaattcttcttggttttgatgaggatgacactgcacagaaaaaagatcgtagtgaacaaaagaatgaaattattgctttacttgaagatactgcttacagccatctcttggaggtcatcgtggaggttncccctgaggaactgcgcaacaatatgctgacaggtactcttaagggtgcactatttgcgatctcatctcaccactgtggtaactatgtgggtgcaagccttggtagcatcagctaaaacctcagaccagatggagcaaatttgggatgaacttgggttccagaatccaacccagttgcttgaactagggaaagcgggggttgtagcttctatcttagcggcatgccaaaggtcgaaacaaaacgccttgagagttcccaagttctttctgcagcattangttcaaattctgaatcttctgatagcattnttgcacatatgctttttcttgagaactacctccaccagaaatcatcttgggaatggcctcttggtgcaaaagatgagtgtcctggggtgcctgatgctgcaatcaattctg

SEQ ID NO: 396439 - DNA, 433 bp, Oryza sativa
  unsure (1)..(433): unsure at all n locations
ggttcgtgggggattcgctgaaccgcaaccagtgggagtcgatggtgtgcctggtccagtccgtgatccccaagggcaagaagacgctcaccaagttcgtcaacggcggcaacagcaacatcttctacgcacacgagtacaacgcgacggtggagttctactgggcgccgttcctggtggagtcgaactcggacaacccgcaggtgcacagcgtccccgaccgcgtcatccagtggcactccatcgccaagcacgcgcacaacttggctcggcgtcgactacctcatcttcaacacctacatctggtggctcaacaccctcgacatgaaagtcctgaaggggtcgttcgaccagggtgcgacggatacgtggaggtggaccggcccgtggcgtacaaggangtgctcaagacgtgggcgaattgggtcgaccg

SEQ ID NO: 396440 - DNA, 410 bp, Oryza sativa
  unsure (1)..(410): unsure at all n locations
ttccatctccgcagcttgctccggccgccaattacaagcgccccacacccagctgcttcgccttcacgtccacttcaccggagttgccatttccaatcccaaaccaaaggacttcattggattgcgaggggagtggagttgctgtgctgctgctgccgctgccgtcttcgacggtgagaagccaagaaagaggcggaccatgaacacgcccaactcgtggctgttcgcagacaactccaagtacagcacgcgggcgcggctgctgttcatggggctctccttctccatcggcatcctctccttcctcgtctacctcgccatcttggtacaccttgcacccgccggccgccggagccgtcactccgcggcgggggcttcggcgtccgcggatcaggangcgccgaggggaa

SEQ ID NO: 396441 - DNA, 647 bp, Oryza sativa
  unsure (1)..(647): unsure at all n locations
cttagcttagctgttgttgttgcagtccagtcagagagcagagggcactgcaccgagaggatcgagcttccaagaacaagtgaagctagcatngggtggtggctcggaggtggcctgccggtcatcgccatgctggctctcaacgtcgtcgcggcggtgttggtgtcgctcgtcaaggtcgccatggacggcggcctcaaccctctcgtcctcgtcactcttcagcagctcacggccgccatcttcctcggcccaattncctacttcaaagagaggaagtccaggccaaagctcacactggagatcttcacttatctcttcgtcagtgctgcgctcgggtaccaattcaattcatacgaattttgcctctagtttaattttcttcttcttttgctcttgaagaaaaaacaaattcatctcccggcgaaaaaacaaattcatggctttactaagttgttcttctctcttgttcttgcagggcagctctaaggcagtacatgatcttcgttgctttgagatacaccacggcgaccttcgtcacnggccttctccaatatcgctcctgtnctcacattcttgcttgccatcctaacacggtaggttcttgattggaagacccaataaattctgaattatggcacaccagg

SEQ ID NO: 396442 - DNA, 752 bp, Oryza sativa
  unsure (1)..(752): unsure at all n locations
cggcggtcaaaagcttccccccgcgacgaccccctccaccttcccccaaccgccctcgtagtctccgcgcgcaggcagcagagtcgccttcccctcctccggtcgatgcgacggagctgaatcggccaggatcccgaggaggaggaggagcggacggcccgcatgagcctcgctggctccgccctggaggcggccctgcaggcggtggggcgcggcctcgacgccgccggtgaccaccggctgctctactgcaagggcactgggaggctcctgatgctggacgagtcccgcgcgcgggaccttgaccatcaacggcggcgtcctccgcggggtgccccccgacgtcgtggtggaggagggccacggcatccttcgagcgcatccgccaggtacccgggacccccaaccgatgagcccgtcgtctgcagcttcccgaagatggctgagtgcttcaacaggaaggcgggcttgctggaaacaacagttaccgctgggttccttcaactctctcttcagctttactggttcttggaagaatgatgaagcggcgacgaaatccctcgcgattgatggctacnccgtgcctctgtttaaagttaagataacgaatggtgaattgtttctgcatgagagcgttaaacgcgcaattccacatagttgggattcttcagcattggctaggtcagtagtttatcgggaantatgggtanccatattattacttctgttacgggtggtgggaaaggatgaag

SEQ ID NO: 396443 - DNA, 370 bp, Oryza sativa
gtctcccgccgccgccgccgctgttcactccgcaccaactccgacgatcccccggcgagctctcgacgatggcgacggcggcgacggcgtcggctacggcggccacccgcttcacgcggctggcgggggtcgggctccggcgcacggcccgcctccccacggccgtgcggttccagcgccgggtgctcgccaccaccgcgctcctcaggaccgccgagctccggcccaaggagcagggcctgcccgagacgctcgactaccgcgtgttcctcgtcgacggcgggggccgcaaggtgtcgccgtggcacgacgtgcaccttgcgcgcaggcgacggggtgttccacttcgtagtggagatccccaaggaga

SEQ ID NO: 396444 - DNA, 465 bp, Oryza sativa
  unsure (1)..(465): unsure at all n locations
gcgtcgtccccttcgcggacctccccttcgtgggcgcgctccattgctctctcccctcccacccaatcctattatgacattacgatgcctatccccattgccttcctcttcctcctccccctcctcctcgcngcctcctcccatgccaccgcctcctcccatgccaccgcctccgtcgtcccacaacctcgagggttctatataaactgtggatcggagaaggaggagcagatagggagcatcaagtggatacaggatgaggggttcatcgccgtcggcaacatgtccgccgtcgacaagccgaacatcctgccgctgctcgccaccgtgcgctacttccccgacgcgacggcgaggaagtactgctaacagctccccgtcgtcaaggggtcgcggtaactcgtccggacgaactaattctaaggcgggttcgacggcggggaagttccgccggtgttcgacaag

SEQ ID NO: 396445 - DNA, 556 bp, Oryza sativa
  unsure (1)..(556): unsure at all n locations
ctcgaaatctctcatgttgttgtgttgaaggcggcgaagggggaaactttggtggtggtggtggccggagaggaggatggcggcacggcagtgacggcggcgggtacgacaaggccgggatggactccggcaagtacgtgcagtacacgccggatcaggtggaggcgctggagcgggtgtacgccgagtgccccaagcccagcttctgtcgccgccagcagtcgccaacatcgagcccaagcagaagatccaaggtctggttcccaaaacagaaggtgagcaaaagcatgcagggatatactatcaaactggtttgccttctgtgtgtctggctgtgaaatgttctggacaaattggttgacaatggagcaatagcaatagtagtgttcaattgtttgccttggttgtgcatactctgcttcaactatatttaggaattgcaagtctatgtatttatttgttttgcttcctttcttgcataatggaacaacctttatataatcaaggaagtatactgtnnnnnnnnnnnnnnnnnnnnnnnnnnnnnnnnnnnnnn

SEQ ID NO: 396446 - DNA, 608 bp, Oryza sativa
  unsure (1)..(608): unsure at all n locations
gaccactgctcatcaccccgttgctctcgcgccgccctccccgccgagccaaaaagccttcctcctcgaaatagcacacctctcgccgccgctggtgcgtgcgtgcgtcgacgcgcgcgatcgatcgatgcctgtgtccctccggcgcgtccacccacgccagccggcgagcctcgtcggcgagtttcgggggcgctgattagatttgcccggtctcgatcgattgatcggtctcgccttcccgccgcgcgatggatccgcgggggaagggcagcatcacgtcgcatgcgtcggacaagtcgtcgcggtcgggctcgttcgacttcgagcacgaccaggacccggaccgcgaccgccgccacgacgacgcccaccgccgcgaggtcgtcgtcaagatcgagcccgaggcccacgtgccggtggacctccacgccggcggcagcacgccgccaacgcgccgggcgttggcggcgttgcggttggggggcgtggtcccggggtncgggtcggttttcgagcgcgtcgtncttggccaggcggttgggggcaacggcgaattcgtttnagttttaaagaacccgaccgccgaatttgnccgggttttccgg

SEQ ID NO: 396447 - DNA, 1056 bp, Oryza sativa
  unsure (1)..(1056): unsure at all n locations
ggccatgtggtttggttttgtttagcatcccgtctctctcctcctctgtttccatcatcatcatcatccagaggccaccaaccctcctcgattattcagagcagccaattagtcttggcgtcttgacgtgttcggagaatttcctctcatttatatgcagtagttagacatgctctggagaagcaaagcgaggtaggaagagggatttggtcgaattttacgtacttagccgtgggcgaggcgtttacagggttgcttcggctcggggtgggttgggttgggttgggttcgatggagaagtggagcagggggctctcctgccgggccgccatctgcggcatcgtcgtcctgctctgcgccaccgcgttctcctgctccctcgccgccgaattccgcaaagtcaaggagaaggacatgaagctggacggtagcctctgctccctgcccaagagctccgccttcgaattgggcgtcgcggccatcgcgttcctctccgtggcgcactggtgggcaccacggcggcggcgaccaccatgtgcgccgcgtccaagcgcacaagtcgtccaccaccaggcgccgcgcggcgtccgtcgccatcctcgtcctctcatgggtgagcttcgcgctggccgtcgtcctgcaancgaccgcggcgagcatgaaccacgggcagcggtacggccggggctggatggacggcgactgctacgtcgccaggaacggcgtgttcggcggggccgccgcgctggttcgttcgtcacggcgctcctcatcctcggcctcacctccaccancaaatcatcctcatgcgccacctcggcagcatccgccacaacgacaatccgtctcgacgcggcggccacggacgccgagcaggcgagcgggcgatcgaagcagtgacccgccggcctggccgggggcggaacacgcggggcgggacgggccaaccggaggagaggcgggtggacggtgctccgcgctgttcgtcccgcaaaggccaagcggcgtggggggcaatctccgctttctggcaaaaggccaacggtggtgattggt

SEQ ID NO: 396448 - DNA, 635 bp, Oryza sativa
  unsure (1)..(635): unsure at all n locations
tttttttttttttttaaacaagcaccatatttcattagctttttatttactgcaggaggcaaaagcataaggaatttgaccggagacatttacatcgcccaacgaactccaaaaaagaattgaaagaacgaacatacattcggcctctacaggacactagatctacacaaaaaacagatcacgtagtgagctacaatttttttttcatcattcatcaaatttaccgtgtaattttacatgtaatcgtagttgcatcttcatcaccatatattatatcaatctccctgagcttcttcttcatttggatcccatggagacggcgaccaagaaaaggtcatgtttctcactggaggaacatgtgagaagctctcagtacgccatggcggtttgcccgctgtggaagctctgggtgtagttgaacgtggccgccggcttgcactgggccgacgccgacgccgccgccgccgccctgtgcgtggtgggcagcgagtgcgaggtgacgagccgccggacgccggagcgcatcttgtagaggatgtggccccagctgcccntgctgccgcggccgagggcggccacctcctcctcgttcatctcgaggtcggtggcgaacccgggcttctttggacattatc

SEQ ID NO: 396449 - DNA, 389 bp, Oryza sativa
  unsure (1)..(389): unsure at all n locations
gcgcacttgagctccacttcctctcgcgggaggcgtcacgngnagccacagccaacagcaatgggggccggatgggaggagtacaagccgtgcgcggcgaatggtggcggcgcagtgcatctacgcggcgctggcgctctgggccaaggccgtgttcaccgggggcatgagcaccatggtcttcgtcgtctaccgccaggccatcgccaccgtcttcctcgtccccatagccatcattgccaacagaaggaagaagaaggagacgaggctaggaatgacgggcttctccttgatcttcgtggcttctcctttttggggcaacgggtaaaaccaatacgtgtactaccagggcctgcatctnggatcgtcgtcnatggcacggccatgaa

SEQ ID NO: 396450 - DNA, 563 bp, Oryza sativa
  unsure (1)..(563): unsure at all n locations
ccgctacgccttcgacgccaaggtgacggcgcaggacctggccgacacgtacaaccctccgttcagaagctgcgtcgaggacggcggggccagcggcatcatgtgctcctacaaccgcgtcaatggcgtgccaacttgtgccgattacaacctcctctccaaaactgcaagggtgagattggaggttttacggatatatcacctcagattgtgatgctgtgtccatcatccatgatgtccaaggatatgccaagacagcggaagatgcagttgcagatgtcctcaaggctgggaatggacgtgaactgcggcagtacgtgcaggaacatggtctatctgcaatccagcaagggaagatcacagaacaagacatcaacagagccctccacaacctcttcgctgtcaggatgaggctggggctcttcaacggcaatccaaagtacaaccgctacggtaacattggcccagaccaggtgtgcacgcaggagcaccaaaacctttgcccttgaagcagcacaacattggcgttgtcctacttgaagaacgacgccatgctntcccct

SEQ ID NO: 396451 - DNA, 521 bp, Oryza sativa
  unsure (1)..(521): unsure at all n locations
gagggactgttcatacttccggaagtcttcagtaagggaaacaccacctggtatgtagagatcttataacttgaacttgttattacaccactgctgagcgctgttctaactcccgccccccaccccgtccgatattcctccagttgttttgcctggtgaaataaatagcgcagaagtaatttggttggaggaattggaggaccatcaacctccagagggctttgttgtcgcgagaggtttgtataaaggccctgtaataaggagatagttaggttcgaagcacgtctgtccacgaatcacgaaccagttgacgatgcagctaggttcctagctaagtatctgtggcatgttggggttagtatcagagcaatgcatcgttgagtcactccatctgcaacctgcgaatttactccggacaatggcaatgcaaagtgatctggtgaagatttaactgccaggttacaaaacaagaacgaaaaacttttatggttgacnnnnnnnnnnnnnnnnnnnnnnnnnnn

SEQ ID NO: 396452 - DNA, 619 bp, Oryza sativa
  unsure (1)..(619): unsure at all n locations
caagcctcgattgaacaacttacaatgaatcacgatgcagaacttaagtcagtccgggaggataaagcgaatctagaatgtcaactcttacaatgcacagagaaacttgaacggctacaatccatcttaaaccgcgaaccgccattcacctgtcctatatttctgcatgtcatggaggatccttacattacagcggatggacacacctacgacggtgaggcgatcagggcatggctcgacgctgggcatgacacatctccagttaccaacttgcctcttgaacacatggaactcattcccaatcgcgcactccgttctgctattgtgtggtggcacgaacagcagaacgcggcacgcgaacaccgcgacatgggcgtgaactacaactcggcgtttcatattgtaaaattcttaattgttgcctgtacttttgaacaattttttggctgtctgtagttacttgttagccatgtttataacacacaggttgaaattgtaggctgttagtatgccttntacacacaggtcgatataattcatgccagaatgcaacataaacacagcattcagtaaaacagctcttaatcnnnnnnnnnnnnnnnnnnnnnnnnnnnnnnnn

SEQ ID NO: 396453 - DNA, 447 bp, Oryza sativa
  unsure (1)..(447): unsure at all n locations
cttttatcgatctggaaactggaatatattatatatatagagagagagagagaggggcaaacaagaagaaaagaagatgaagatggtggtgatggtgaggcagcggcagaaaggcagccggtgatggtggtggtgatggtgtgctgggcgctgctggcgacggcggcgcgcggaaactgccgcgacgagtgcctcgccgggtgccaaggttgggccatcatctgccacctctcctgcaacagcgcctgcctcggcgaagtcggcatctccgccatgagcaccgccacaccacagtccatcacggttcaggatcagcagcatccatcacagcagcagcaacaagcacaactattcggctctccgtgctcaagggtctcgaccctgacaaaatctgaaacgaattgttttnttgctaccattcattttaaatcccatatacatacactg

SEQ ID NO: 396454 - DNA, 525 bp, Oryza sativa
  unsure (1)..(525): unsure at all n locations
cgattcttaatttctctcttcatcatctcgctatatacgtgcaatggcggtggcgcaggtgagcaggacggccgtggtggcgctggtcctcgtcgccgtggtggtggcggcggcgtacgtgccggcggcgaccgcgtacggctgcttcgacgactgctacgagcgctgcgccaacgggaagacggacgacgcctgcaactccatgtgcaagcaggcttgcagcggcgccggcggggccccgcgaaggcgcccgacgaggcttgatcgccgacgacgagcgccgccgcgccgccgtccatcgatctccatatccgcccgtagccgccggctatatatacactcgattatttgtttgtttgttgttaattcaagtttgattgatttaaccgtcgagtatctaaattaagtttgttttgtttgtttaatttatgcaagcttggtgtactctttcagcgattgtaatcttgtgtgataattaagtgaatttgttcnnnnnnnnnnnnnnnnnnnnnnnnnnnnnnnnnn

SEQ ID NO: 396455 - DNA, 373 bp, Oryza sativa
  unsure (1)..(373): unsure at all n locations
ccccggcggtggtggcgttcgcggtggcggtggcggtggcggcgctggcggcgttctgcgggacggacccgctgcggacggggagcatggtggacttcccgggcttcgtcccccacgtcgtcgagctccccgacgcgtcggagatgccgccccacgcggacacccgcgagcgcctccgcggcgcggagaatccggttccgcggcgaggtgcagggccccgagagcgtcgctttcgacccgctcggccggggaccctacaccggcgtcgcgacggccgcgtcgttcgtttggacggcgcccgttggtctaatttggggaattcttcccgaanttgaccgccgagtttttngggcaaaaagggtttgccgtttga

SEQ ID NO: 396456 - DNA, 814 bp, Oryza sativa
  unsure (1)..(814): unsure at all n locations
gaccccacaatcgtcccacaccaagctcacaagtcccaaccgtcgcttggcgatcggacggcgtggntccaatccaacgagaccctcccccaaccnttgtccgccgcgtntttcgccgtcggtcgcatcgcacccccgcnaatccccccccacaggccaacagcaaagcagaggcgaagggaagaagaagaagaagaagcggcggcggcggcggccatggcgtggcgtgcgaacctctcccggggcgtgaaggagatccgcttcctcttctgccaatcctcccccgccagcgcccccgcgagggaagttcgtgaagaagaactacggcgacatcaaggcgcgcaacccgtccctccccgtcctcatccgcgagtgctccggcgtcgagccccagctgtggggcgcgctacgatatgggcgttgagaggtgcgtgcgcttggatggcctgacagaagcacaaattgacagtaagctggaggagcttgccaaggctggggggtcgcttaaacctaaataatgtttgcttagccaacctgttcagctttaattatttccaaataagagaaacgcatgcggaggttgttctttcatatgatctaagtactatgacatgtcaaattaagcgctgatctttacaacctactgctaggaatgctactgttttctcttgctcttcgttacttcgtatattgtcctccagtatgtgatgtaagaatggcagcgattctatggnctatttttctgtaactggtaaagacatcagaaagaaaaacatataagcacatgttcttgatgaaaaaaaaaaaaaaaagg

SEQ ID NO: 396457 - DNA, 458 bp, Oryza sativa
  unsure (1)..(458): unsure at all n locations
gagatccttgacagtgcagtgccaagactcgggggggcaattttgctccctcttcccgctcgtgcccaggccggggccttgcttgctagctagctttgaagccagccagcaacgccgccgccgcagattgaaggggagcggtgcagcgatgccgtcgtccatgttctacgtccacgaggcggacgtcgcccaaatccaccacttcctcgaggagtgctccctctgcggcaagtccctctccggtgacatcttcatgtacaggggagacacgccgttctgcagcgaggagtgcaggcagcagcagatcgaggtggacagggcgaagacccggcggaagaagcgtgcggcggcgacgggttggtcggtgcggaaggagcaccggaaccacaacaacaacaacggaaccaccaccagaagcanaagccggggccggcattgacggnaaccgtggggaacgg

SEQ ID NO: 396458 - DNA, 465 bp, Oryza sativa
  unsure (1)..(465): unsure at all n locations
gggattcaatactagtgccaaatttgatcatcaacacaaagacaaatcgatcaaaatggagacatcacgcaagttcttcccaacaattgtagttctcctcctgctcgttgtcaccacagctgcacaggcaagggagtgcgagacgccaagcaacgagttcaaggggatctgcatgatggtggccaactgcgccaacgtgtgcctgactgagggcttctccggaggcaaagtncagcggcttccggcgccgctgcgtggttgtaccaaggattgctagtcaagtggttaatccaaataactgcgcaaaattgcaacctatctatcttgcatgcttcaatgaataaaccttctctctaatagagccagaaggttttcattcatctcggctacaaatactacctgtaacaattttctgtttcatgtaatcttttcttctaatttttgtggtttgagtattaattgnat

SEQ ID NO: 396459 - DNA, 581 bp, Oryza sativa
  unsure (1)..(581): unsure at all n locations
ctgaaagttttcatgtggtcgcatacgnttttggaatcaagcacaatattttgagacgtttgacgtcatatggatgccaagataactgttgttccagccaattggcctgcttctgagncccataattatgctgttggcccagagtcacttcccagaagggggtgaaagtaacacatattcaatcctcaacgataatagctgtgcccggccttcagtaccctaagatgaaacttttgtctcttcagtaccatcccagagtcctcacccgggccgcatgattctgacttggcttttggtgaatttatagagatgatgaagancaacagattgtgaggcgcaaatataagatacaagggtttggttcttgaaccgggaggtgagaggttctatttcagatttctgatgagagccacaagagtcaaaataatctgttgtacctgtagcttttctttccttattataagctccgacaagcttgaatgcgagggtcaaggactcgagaataagttgctttgtgactgaatcagcctatgcaaaaatattttactcctcaaaaaaaaaaaaaaaannnnnnnnnnnnn

SEQ ID NO: 396460 - DNA, 634 bp, Oryza sativa
  unsure (1)..(634): unsure at all n locations
gttccagccaattggcctgcttctgaggtacttaacttgaagcctgatggtgtgttttttagcaatggtcctggagatccagctgcagttccatatgctgtgaagacagtacaagaaataatagggaaggttcctgtgtttggcatctgtatgggccaccaattgattgggcaagctcttggtgggaagacatttaaaatgaagtttggtcatcatggaggaaatcatcctgtttgtgaccttcgaagtggacgtgtcgacataagtgcacaaaaccataattatgctgttgacccagagtcacttccagaaggggtgaaagtaacacatatcaatctcaacgataatagctgtgccggccttcagtaccctaagatgaaacttttgtctcttcagtaccatccagagtcctcacccgggccgcatgattctgacttggcttttggtgaatttatagagatgatgaagaacaacagattgtgaggcgcaaatataagatacaagggtttggttcttgaccgggaggtgagaggttctatttcagatttctgatgagagccacaagagtcaaataatctgtngacctgtagctttccttccctatatagcnccgacagctgaatgcgagggcaag

SEQ ID NO: 396461 - DNA, 423 bp, Oryza sativa
ggccggccggtcccggtcccttggtggtggtcctcctcctaagcctgcgccggcgcaagggcaagcaccctgggcggccccacgtgccccccgccgccaccaccatgtccatccaagtcgacgacgacggaggcggaggagggtccggcggcaagtccaaggtgaccaaggtgatcatgaactggtaccgccctgccaagtcctcctcgtggcgccgcttccgctgctcccagcgcgcctgcatggacctcccctacaacaactgcgagagccccgaccagaacaacttctgcacctactaccaggtgatgaaggacttgaccatcaacagcggcatttacggccaggagaaggcaacgttggcgttttcgacggaaccatgaagaagtaacttggcttgtaataggttgttcaacttttgag

SEQ ID NO: 396462 - DNA, 717 bp, Oryza sativa
ggaagagcagctctacaggtggctccgggctgcagagctgacttgtgatcgagcggctcttcttgtagtgcaggaccccaagaggttgtgatatctgtgctgatgaaactggccggagggtgccggtcgcttgcggaccagctgaacgtggacgccttcctggagcaagctcgctcctacgacaaagctgcgtcaaaccccgtcggctggtacatccggtcacgccaaacaaacatcttcttactccagctgctgctttaacttgctgctactgcttggtgagattaatttggtgtttgtcatatgcatatgtgtgtgtggtgcaggaacgctcagacgagagagctgtcgcatcctctgccggtgatgcgagcccgcgagatcgacgagtggtccaggagccgagagtacaagacggtgcagcagaaggtcattcagctccagctcaatgatcacgatgcaagctagctaagctgcaggctggaccggcctgatcaactcacttcactgtacaagtagaagtagaaatggaatctagctgtatatgtttgtacatggatggaacggaaccgaactgttggaggtcagattgtattctagtgaagaatatgcacaccacagatatacaagaaaatgcaaagatatattgagtctttaataagaaaaataaactaactgctatacacatctacgatattataaaaaaaaaaaaaaaaa

SEQ ID NO: 396463 - DNA, 578 bp, Oryza sativa
  unsure (1)..(578): unsure at all n locations
ggtggctcccgggctgcaganctgacttgtgatcgagcggctcttcttgtngtccaggcccccaaggttgtgatatctntgctgatgaaactggccggngggtgcccgtcgcttgcggaccagctgaacgtggacgccttcctggagcaagctcgctcctacgacaaagctgcgtcaaaccccgtcggctggtacatccggaacgctcagacgagagagctgtcgcatccctctgccggtgatgcgagcccgcgagatcgacgagtggtccaggagccgagagtacaagacggtgcagcagaaggtcattcagctccagctcaatgatcacgatgcaagctagctaagctgcaggctggaccggcctgatcaactcacttcactgtacaagtagaagtagaaatggaatctagctgtatatgtttgtacatggatggaacggaaccgaactgttggaggtcagattgtattctagtgaagaatatgcacaccacagatatacaagaaaatgcaaagatatattgattctttaataagaaaaataaactaactgctaaaaaaaaaaaaaaaaaaannnn

SEQ ID NO: 396464 - DNA, 443 bp, Oryza sativa
catattctcagtcgtgattacatgacactgaagctttgggatattaacatgaactctggtccagttgcaacattccaggttcatgagtatttaaggcccaagctatgtgatttatatgaaaatgattccatttttgataagtttgagtgctgtcaaagcggagatggattgcgagtagcaactggttcttacagcaacatttttcgtgtgtttggttgtggcactggtagcaatgaggcaacgacacttgaagcaactcgaaaccctactaggaggcaacttcagaatcccacaaggcctgctagatctctaagcactctgacaagagttgttagacgaggtgctgaaagcgggaaataagaggccaatgggaattcctacgatctgagcacaaagttgctccatctcgcatggcacccatccgaaaattttaattgcttgtg

SEQ ID NO: 396465 - DNA, 313 bp, Oryza sativa
  unsure (1)..(313): unsure at all n locations
ttgtgggcctacctagagcagtgagcacacacgctcacctcctcactctccgatccatggcgccctcccccttgtcgctctaaaccctaatccgaaccgagcaatcaaaccaaaatcgaacgaattcgaggacgagggtggggagccctcgaatccggcaatggatcgcccgcgctcctccaagcgcgcctaccactacgaccaggactcgccgccgccccgctccaagccacgcttcgaccgccgcggcgtccccaaccntaacaacagntaccaccgccgcggccnccctggtggnggcggcggcgaccgc

SEQ ID NO: 396466 - DNA, 538 bp, Oryza sativa
  unsure (1)..(538): unsure at all n locations
cacaaacaacgcaggcgacagggagagcacgagtttttccgtttccttttttcgtacgtccccccgtttattcttcttgctcggtttactttctctttcgaggaataaaattgggcttcaagatcgacggcttcaattacctgatgtcgtcacaccggaacgaggatgaaaacacagcaaggagaaagattggccagcgagatgcatggaatgcatacaaaagctcgagatgccctctcgaatcgtcgttgcatgtagtaggagtattgattctacctgatcgtcaattaatttatcccccagttaataagtccttcaaaccaattgattgttctgtgtctataatatatatgtacatgagtatctcctctcgattgttttgatgtaatttttgggtaatttctatcctcgattttgttcggtacttcacctttgtaagctgttgttccgatagatgaaaatcacagtagtatatgagacatatggatggtgcaattcagngtaccttttgaattcgatcagattttgcaattttcag

SEQ ID NO: 396467 - DNA, 877 bp, Oryza sativa
  unsure (1)..(877): unsure at all n locations
caaatatgcaatccctgcccccaagagtgagtgcagcaaaccactgcagctcggtgtgagctttgcaggtggttacattgcaggggtgttctgtgcaatagtttcacaccctgcggacaatcttgtgtctttcctcaacaatgccaagggcgcaacagttggcgatgctgtgaataagcttggtatgtggggtctatttacgcgtggactccctttgcgtatcgtgatgatcggtactctcactggagcgcagtggcggactctatgacgctttcaaagtgatggttggactgccaactactggtggagttggctccaacaccagcccaagtgatggttggactgccaactacttggtggagttgctccaacaaccagccattgggtgaagagcagctgaagggcctggatggctttgattctatacttccgaacttctaacaattccgtgccaacttggatgatggcgaaataggttcttagtttagaaacaaaaaggattttgttgacgaatgcttatagtccattaattcaatcgctgctaaaaaaaactgagataagcatgctcagggcttacaaattataagggtattgcggtacagagtttaggatagtagtatagatggccattcgatgaatgatgcttgcgtgaatgaccgtggcatccttcaatttttgtaggtctattttttttattgcagtagaaatgttgattacgccttgggccttggctctatcttttgctggccggttgttatcgttgtaactctccgcggtagatcgttcttttcttcagatgtcaataatgcaatctgtgtagtgttccattcaatataccnctgtntnntnnnnnnnnnnnnnnnnnnnnnnnnnnnnn

SEQ ID NO: 396468 - DNA, 315 bp, Oryza sativa
  unsure (1)..(315): unsure at all n locations
cgacgnncngngnacgcgtgggctcgcgcgctgcagcagcacagcggttgcgcgtcatggcgttccactaccaggaccacgcgctggcgatggacgccgcggctgcggccgagagacgggcggccaccaccaccctgggttcgtcggggcgggaggagttgtggggggaggaggaggaggagggtgggagcgggagaaggccgccatcgcggcgcacccgctgtacgagcggctgctggaggcgcacgtcgcgtgcctccgcgtcgccacccccgtcgaccagctgccccgcatcgacgcgcagatttcggcgcg

SEQ ID NO: 396469 - DNA, 590 bp, Oryza sativa
ttccctttccatttctcccttttcctacctcgcctcgccgcccgcaccgagcaaactcaaaccctcgccgcaagaaagaaaaacaaatcgagagaaaaaaccctcgctgctcgccgccccaagcgaagcagccatggtggtgtacacgcaggagcacgtgtaccggcacccgtgggaccgcgtcacggcggcggcgtggcggaagttcaccgacccggcgtcgcgcacggcgctctcccacgtcgccgacgtccacaccctccaccgccgcgtcgacccggaggcggggcggctgcaggctgcgcgctccatcacggtgcgctccccgccgctccccttcatccttccgccgcctcctccccgccgcggcgtcgtccccgtccggcgcggcggctctgccactgcgttcgagacctcgcttcgtcgacggcgccgcgccgcgcccatggacgtcgtcgtccgcaacgtctccctccgcggcctcatcgaggtcgaggaagcggtccaccttaccggccgcacccggagcggcccgaggagtggacgcaatttcaggcaggagaccacgatccggtgccgaacgctcttgg

SEQ ID NO: 396470 - DNA, 466 bp, Oryza sativa
  unsure (1)..(466): unsure at all n locations
cgattgacgacgacatccagggccctcgcgctggtgctcctctcgtcttgctgcctcctcgtcgccgtcgacgcggcctacgccaagaagccgaatctgtccaagaatgacttcctctcctgcctagccgccggcatccccgcccggcagctgtacgccaagggctcgccgtcgtacgctccgtgctgacgtccaccatccggaacctcaggtacttgtcgtccaagacgtgcaacccgctgtacatcgtcacaccgaccgacgtgaagcacatccagggggccgtctcctgcggccgccaccgcggtggagctccagctttggtccctttagtgagggttaattgcgcgttggcgtaatcatggtcatagctgtttcctgtgtgaattgttatccgctcacaatttccacacaacattacgagccggaagcataaagtgtaaagctggggtggctnaattgagtg

SEQ ID NO: 396471 - DNA, 914 bp, Oryza sativa
  unsure (1)..(914): unsure at all n locations
ggacggcggagnannggtgggtcggacgngtgggcggacggtgggcggacggtgggtgagagcgcaatctatgggtgacatgtcatctctggatttcatgcgttctaggaaagtttttgaaatcaacccagagcatgagatcatcaagggcttgaatgctgcctgcagagccaaccctgatgacccagaagctctaaaggctgtagatatcctgtttgaaacttctatgatctctagtggctttacacctgacaaccctgccgagctaagtgggaagatatatgagatgatgagcacagctatggccagcaagtgggcctcgcacgctcaacccgctgagatgaacctgcagcgagactcacctgtcagctctgagccgattgaagccgaggtgattgagccggagttgtggacgatagccagaagaaataagggaatcgtcgagttttccctcaagttctataaaccttaggttctttttcggatccatttcatacgattatgccgtcctcccagaatattgtagcttaattttgttgccgaaacgctgagatttttttttttcagtttggttgagcggccagtgcaatgagctgtgtgttaaaccaataggattgtgttatgttaggaataatggtttctttgctaggaacaattactttgaaacaaaaaaaaaaaaaaaaaactcgagggggggcccggtacccaattccccctatagtgagtcntattacaattcactggccgtccgttttacaacgtcntgactgggaaaaccctggcgttncccaacttaatcgccttgcaacacatccccctttcncccagctggcgtttttatccaaaaaaggccccccccgatcncccttccccncnatttgcccccccctnaaatngcgaatnggcaaattttn

SEQ ID NO: 396472 - DNA, 463 bp, Oryza sativa
  unsure (1)..(463): unsure at all n locations
cccttcccgaaaatatctcgcngtcgttgcgcgcggtagctagctagctagctgcgccatcgacgacgaatctccatccatggaggcggcggctgcgctgacgacgacgaccggcgcccagtacagctgctgcttcggtctcgcgcatggcggcgccgcacaacggaggaggaggacggcggcgggtttcggggcggcgaggtggtcgggggagcggctgcgggcgctgccgccgcaggtgagcgagttcctcagccccgagcagctggtccccggctcgccggccgacaccggcgacgtctcctccctcatcccaatcagtgctctgatgctgttcttctacttcgtgtccaactgggtggtgcctgagttaatcatgaaggatttgcaggagcccaaaaaggctgaagaatcagaagaagctgcctcttcaccggcagcaaccatgtcggtcgcggcgacg

SEQ ID NO: 396473 - DNA, 459 bp, Oryza sativa
  unsure (1)..(459): unsure at all n locations
ctcctgtggatatagtgtcgcaactggtggtccattggcttgggggctttgctacaaccatgaattgagcccaagccaaagctattgtgacaacagcaacgaattgtatccttgtgttgaaggagtcgagtattatggtcgaggcgctcttcctgtttactggaactacaactatggtattatcggtcagggtatcaaacaggatctgttgaaccacccagagttatttggaacaagaattgcgaccctagcatttggaagcagcaatctggaggtggatgactccaatgaagaggaagcaaccatcagcccatgatgtattcgttggcaactggaaaccaaccaagaatgacactttgtccaagaggtatcctggctttggtgctacaatgaacatcctgtatggcgatctcatctgtggtcaaggctccatcgataagatgnacgtcattgtatccc

SEQ ID NO: 396474 - DNA, 491 bp, Oryza sativa
  unsure (1)..(491): unsure at all n locations
gtaagggcaagcagcctganatacagatcagaaatccgagcaaagcacacaggaacaagnaatctaaagtaagaacatctcctggaaagggtggacggggcggcattcttggcgatggacctcctcaatatgcacaagctcaagtcactggcaaatttcgtcacagcaaaacttccatggccagcctaccatctctggcttcaagtgctgagcgagaaagacgccctgtcggtccattgaggagagttaagatatcagcaggatgcacctggcatgcaatctaacatggatggtatcagagagcgggcaaattggttggctcaagagaggatgcatggtaacagcatgaattcgattgacgatggcacggaatctcaggaaaggaggcagccaatggagcncagacagatattgatgatcaaccgcacgatcaacgatgatatggattcctttcaatcgggagccatgaatctgaccagactcgtgttagc

SEQ ID NO: 396475 - DNA, 431 bp, Oryza sativa
  unsure (1)..(431): unsure at all n locations
gatgcccttntaaaaacnngtggtatggccctnccangnanttccacttttnatggaactcacaggcctccccagttctcggtaacaacattgtcgcggaagctattggggattggtatttcgagagaagctatgaagtgaaagaaatcgactgcgantatccgtgtaaccccacatgtngcagccagctgcctaaatgattttacattgggctggacccagactaccacccttccctgaatatttatgcaggcttatttgatgaagcagcagctgcagatcatctttcaccatttgttctgtgaacaactaatagccatgctttgctgataatctgacgcctgtaataagtcaaacagtggccatctcgggtgaaaaggaattactacgaatacttcatatttcagtacatcggctgcatattcttctgc

SEQ ID NO: 396476 - DNA, 319 bp, Oryza sativa
gtgaatatatatatatatatattcactaggaccccttattacaattatttatgcggagaggggccaaaccgccagaggaagcgaagcagcgggcgccttatttggcgcttgtggctaatgcctctttcaggcatccaggcgccggagcccagccacactggttttcgacgtggttgacgcactctttaatgtgacctgggaagtgactcgctatgtaaattaatattgctttgctcagatggccaaagataaatttctcttcatcgttggcgcgatcacctgtaccaccagtcccacgggcgctgctccagcggcagac

SEQ ID NO: 396477 - DNA, 622 bp, Oryza sativa
  unsure (1)..(622): unsure at all n locations
ngagcgcggaanccggaactggaccgaccgacgacgacgacgaccaccgcgcgaacagagactgctgccggtgntgaaggaggtggagccgncgtgcctgtgcgacggctgctccgccttccgccattcctcgtgaagccgcagcacaagtacaccgtcaaggtcggcgacantgcaagtacacctaccactgcggcggctactagctaattaagctagcgaatgtaccatgcattactgagcttaagctgcgtgttttcttcaggattagcactggtaagtgtgattaagaagagcagtattatggtattttgctgtgtgttaattaattaccaccagtcgcttaacacttcgtttttatagtatatatagagagatatatacatattgtaatactggtgtgtatgttcttgtgtttgcttggctgatcttgggctagctatggaagtttgtgtactagttccttgtaatgtttaatttctaagaacactgtgtactcaagcgtacgtgtgcatgcattggggttggagaactaaccattgcattgcaaactggagcttctgtaccacgtgccatatatnnnnnnnnnnnnnnnnnnnnnnnnnnnnnnnnnnnnnnnnnn

SEQ ID NO: 396478 - DNA, 558 bp, Oryza sativa
  unsure (1)..(558): unsure at all n locations
cggacggggncncngcccggcgattacagcgcactttctcttcaccgccgagggcatccatcaccgtagcttctcttccaccaccaccaccaccaccaccgccgcctgagaccagtccgccgaacacttcgacacccgcgccgcctgctccagatgtgccagagaacagttcgccgccggattatgatctctgctcagacaggtgctccttaggtgatatgcttgaagcgtcctatgatcctgtagagttcgtgcgcnactttccagcagttatgttcagcangccgaagaacgcccctgacactttgtacgatagatgggttttcaaaggctggttccaaatctgctataagagacattttgagcaaactagaggatcatcacatagccggtctggagtttgaagatattaatactgagaccatgacaatagcttgcnatattgattcaagcgagttntatcccnggttcaattttcatgggaagaccaggaacattacttttgaaggacagnnnnnnnnnnnnnnnnnnnnnnnnnnnnnnnnnnnnnnnnnnnnn

SEQ ID NO: 396479 - DNA, 430 bp, Oryza sativa
  unsure (1)..(430): unsure at all n locations
catcgatcagtcacagtgacgcagtgagcactagcttccactgctcgcatcgcttgtcatcatcatcagttcatcaccaatggccaccgtcgaggtccaagcagtcgccgccgcgcctagtctggcggcggaggaggctccggccgtggtggaggctgtccaggaccaggagccggtcgtcgccgccgttgaggaagaagaagccaccgccgccgccgctgcgcttgcggctgcgcaggtcgaagagacaaagccggcagatgatcaggctgcggctgctccggcggagacctgtggctgaggccgaggcagaggccaaaaaggcagagcctgcaagccgccgaggaggccgagccggagggnaagacggcgccgcgncggcgattcgcgaggccnaggcaggtaaggcgaaanaaccggagccaaagca

SEQ ID NO: 396480 - DNA, 524 bp, Oryza sativa
  unsure (1)..(524): unsure at all n locations
gtgccccaagcgtgaagtgaaacggtttgctgatctaagttctaatgagactagtgacttatgggttaccgcaaaggaagttggtgtacggcttgagcagtaccacaaagcgtcttcacttacatttgctattcaggatggtccacaagctggtcaaactgttccacatgtccacatccatgtcatccctagaaagaaaggagattttgagaaaaatgatgagatatatgatgcgattgatgtcaaagagagggaattgaaggagaaacttgatctggacatagagagaaaagatagaaccatggaagaaatggctcatgaggccaatgagtaccgtgctctcttctcttagatgtaatttttgcgataactttcttgtaaacctgtctctaaattgcacttactcttctccagaaattatttttgtaactgtttgtcatccatcatgggaattcaagtcttcgaatgatattatgaaattatctaatttggtacgatnnnnnnnnnnnnnnnnnnnnnnnnnn

SEQ ID NO: 396481 - DNA, 715 bp, Oryza sativa
  unsure (1)..(715): unsure at all n locations
nnnnnnnnnnnnnnnnnnnnnatccataaaaggccccagtgaacatatattacattaaggcaggaaaatcctttagctatatgctgctgtaaaatggaataacttagatacgaacaacataggtgtagggatgtacaaggcgccaccacagaacgacacatcctattctctcccgtccatcggacctgctctatcaaaaggccgatctcatagcaccacgagctgcctcacgtttcatctcagcagccttcccacttccacggaaatacatgtatacttgctggatgacaacaacgctgagtagtgattcaaggcagaacagtccaaatccaatgaagtaaaatatccccacaatagcattgtttcctatgacatcaatagccggcaaaatcccagccagagactttcctttgaaaggaaatgggggagccacagcagaccagatgcagatcagtatatggatcaagtaaaacaggaaaaaccatccaaacttcaaagcactctcagtcctcatcgcattgtaaagggggcgataccataacacataggctccaggtacaccagatataaagtagataatggctagcaaccagatcataacacctgcccctttaatccatgctgctgtagttgcaattatgttccagaaaagacatgccgccaatcccaacaatgaagaaaatgcaaggtattgcatcctttgtaggtggattgg

SEQ ID NO: 396482 - DNA, 519 bp, Oryza sativa
  unsure (1)..(519): unsure at all n locations
ttcgttttcgttttctttcccctttttctgtcggttaattcggcgacgtctgatccnccatgagagcnagcagtttgttcactcagttccccttcgtctgatactgatccctcctcactctctgctcgatttctcatcgtctctgtaagcaagatccgatccccggaggccaaaacccctcccgaatcgcgtggttcttgtttgttctaatcatccttcgattgggttgggttgagcaatcgattgcgttgttgttcttgctgatccgaagatccaaaggaggaggaggagcttgaggttgaaatttctcgccggagatgagcgctgccgcacgccgcctcgccgtacgtgtgtcgctgctgctgctgctctccatcccggcggtgttcctcctcgcgccgcgcctcctcccgcccaagacgctcccctccatccccgacgccgacgagaccgacgacctcgccctcttccgccgcgccgtcctcctctccgccgccccggactcctcctccgcctccg

SEQ ID NO: 396483 - DNA, 577 bp, Oryza sativa
  unsure (1)..(577): unsure at all n locations
cccagtacttccttgctgaggcgntgcataacttcaatggtaccacagaaaaggagttgagtttaattgttggtgattatgtcgttgttcgtcagattgctccgaatggttgggccgaaggagaatgcaagggggtggcaggatggttcccggctgcctacgtggagaggcgtgaaaatatcccgccaaacaaagtcttcccgcaagcataaaccgccaaatgctagttgaaaatctagatttgcgctgctaaaatctgtaatttggtttgggactgccatgatttttggtccttttggagttgtttaggccgtatgactggtatgttctttgttctaccttgtacatgttttagtaacttgtgatcagtatacatgttttcctggcagcagattagacagtagactaaaagctttggccattcatgatgatgcctttcgaatgtaaagttatttatgtaccaaattctttcgctaatgatgtgcttattgattgatgattcccttccgtaaaaaaaaaaaaaaaaannnnnnnnnnnnnnnnnnnnnnnnnnnnnnnnnnnnnnnnnnnnnnnnnn

SEQ ID NO: 396484 - DNA, 723 bp, Oryza sativa
  unsure (1)..(723): unsure at all n locations
ttaatatatctcctcatttttcgctgtcattatccgtatcctttgtccgctagctgctaccactagtcactagtgggcttgcgttgcgttgcgtgcttgtgacttgtgagagccgagannagngctacaagtgggcgtagaggagtcggttccatgtgtccggcacgccggngattgcaccagtggatgcagtcggtgtagcgctgcggatcggtcttctcctcgtcggtgacngagtgccccgccggtctcggtgtagacggagacgtggggcgtcgacgcggtgctccgtgagctgggtgatgttgagcagcgtgacgggggtcctcatcctgcccagcacgtcggacatcacctccatcatccgacggtcggagccgctgcctcggtagccccgctgcgtgatcggccacgtctcgttgtagcacctgattcctccttcccttccccagtcctcgctcctcatgtgcgtggtggagatggacatgaagaagacgcgggtggtggcgggatcgacgttggagtcgacccagttggcccacgtcttgaggcccagccggtacgccacccaggcgtccagctcctcgtacccatcgtccccgaacgatccccacaccgatttgatcctgtagccggtcatccaccagacgtagctgtcgaagacgaggatgtcggcgcggcgccagtgcttgccgtgctcctcgatggcgtcgacgtgcagga

SEQ ID NO: 396485 - DNA, 477 bp, Oryza sativa
  unsure (1)..(477): unsure at all n locations
ctccaggaattattatattccctgaaagcagaagtgtagatcaaatttaatggcacaagttctccttcagtatcaatctgatcaaatagcggggaatatgatggcatgcagggatcatccgatgaaagcctgtacaaagttatccagtatagaaaaagaaaaaagagaatcagcaaacttagctcttccttagttgtgactcgttaaatttgctcttggtcttctgatatagtacatggttcattcatttaaattggaggaattgaaatgcatgggtggatggaattaagtagcagtcgtaaaagaaggccaaacatatagtcttggtgactgctcgttgtgatattggtgttgcctgtccaacttgaactgatttttaaatggagatatcaactgatttaacttggtagctcgattcccagatggtggaatcgcaattgctcccatttcnnnnnnnnnnnnnnnnnnnnnnnnnnn

SEQ ID NO: 396486 - DNA, 467 bp, Oryza sativa
caaatctggtgaagaggttgggaggaagaagaacggctgctgatgagagtcgcattggagtcaaaaccaaccgtctctttctctcctctgactttcccccactctcctcctcttcttcttcttcctcctgtgatgccatcctcctctttcggcgcctcacaatcttgcgatccagctcatgtggcggacggaatgagagggaatttcccgttcttgcgctcctggatttcttgcccagaggaggagtcttgactcttgcgagcgtgttcgttcttggtgattagattcatgctgcctcgttgcaaggtggtgtgagttgttttcctgggattcttgaagttgttcaatgccctgcaggaagaaggggttcattttctgattcccgtcgacggcggaagatgagaggttactaactgctttcttccatttcttggtggtgtccgttctgctccacgtccatggcggcc

SEQ ID NO: 396487 - DNA, 1034 bp, Oryza sativa
atccttttcttctttccatcatcttatgctcatggatctttgttgtagtgtcctggaaaaagctcaattgcatgaggcgaaggcttccacctggacctccaaggtggccaatctttggtaaccttctccagttgagccctcttccccacaaagacttcgctcgattctgcaccaagtatggccccctggtctatcttcgtcttggaaccatcgatgccatcaccactgatgaccctgaagtcatccgtgagatactcatccggcaagatgaggtatttgcttcacggcctcggaccttggccgctgttcaccttgcctatgggtgcggtgatgtggcccttgctccgctggggccgaacctggaagaggatgaggagggtttgcatggagcacttgctgacaaccaagcggcttgaatcttttgctgctcaccgagcactggaggctgagcacctctgtcagtttgtgtgggctaaagcccagtcagggaaacctgtgaatctcagagaggttcttggggccttctcgatgaacaacgtgacaaggatgttgctagggaaacagtactttggtctgcagtcagcaggccctggtgaagcaatggagttcatgcacatcacccatgaactgttctggctgctgggcctgatctatcttggggactacttgccagcctggaggtggcttgatccatatgggtgtgagaagaagatgagggaggttgagaagaaggtggacggctttccaccagaagattatttgatgagcacaggaaggctagggaggccaagaagagtgcatcccttgatgatgttaacaaagaggacatggactttgttgatgtactgctttctttgcccggcgagaacggaaaagagcacatggacgacgtcgagatcaaagctttgatgcaggacatgattgctgctgccaccgacacatcatcggtgaccaacgagtgggtgatggcggaggtgatcaagaacccccgggtgtccgcaagatccaggaggagctcgacggcgtcgtcggcc

SEQ ID NO: 396488 - DNA, 468 bp, Oryza sativa
atagctagctagagcatgcagctactagctagcaagcttaattagcagccacacattagagtcacaaagtgagagagaaggaggagcttcacaagctcgatcgagagagcaaactaagcaagcagccatggctctcctcctctctcgtcgtggccatgggcaagcctcggctcgtacaagtatgtgttgtacggggcggtggtgtggaaggtggcggaggagtggaggcagcaaggggcggcgccggtggggtcgtggtggctccacctgctgctgctgttcgccgcccgcgggcttcacctaccagttctggttctcctacggcaacatgctcttcttcacccgccgccgccggtcgtccccgacttccgtggactttccgccaggtcgacgccgaatgggacttggataactttctgctgctgcagacgttgataggggcaacgtttggtggggagcccgcgttgc

SEQ ID NO: 396489 - DNA, 729 bp, Oryza sativa
  unsure (1)..(729): unsure at all n locations
cgcagagnacgcagccgcacccgcagacgccgttctacgagctcgtcaagggaaactccggcatcgagaaggtccttctccgcggcacgcgggcttctccgctgaggtctatctttatggagctcaagtaacctcatggaagaatgaccatgcggaggagttgctttttgtcagcagtaaggctattttcaaacctccaaaagccattcgtggtgggatacccatttgcttcccccaatttggaacacatggaaatcttgaacaacatggatttgcaaggaaccgattatggactattgatgataatccaccacctttaccagtaaaccctgctattaaatcttttgttgatctgattctgaggccttctgacgaggatttaaagatctggcctcacagttttgagttccgcttgagagttgctcttggtcctaatggggatttgagtctcacttctcgaattaggaataccaacactgatggaagatctttctcttacacatttgcatatcacacatacttctctgtctctgacatcagtgaagtgcgtgttgaagggctggaaacaatggactaccttgacaatttgaagggaaaggagcgttttacagagcaaggggatgctattgtatttgaatcagagattgataaggnataccttgctgcaccttcaaaaattgcaattattgatcatgaaaagaaaaggacatttgtcttgacaaaagaagg

SEQ ID NO: 396490 - DNA, 462 bp, Oryza sativa
  unsure (1)..(462): unsure at all n locations
cggagcgcgggttgaagggctgtccaggaggttgggaggggtgagaattccagcttacaaggtgaagtggtggtgcgcgatgtcagtcaagacctggagaagcagaatactgtcgtttccgatgcgtccaacgaccccgagaggttgagagaggaacaagcggccgtcaaggcacaagctgccttccgaggctatctggcacgtcgggcattccgtgcgttgaaaggaatcataagactccaagccctgattcgtgggcatctcgtaaggaggcaagccgttgcaactcttcgtgcaacatggttgattgtgaagtttcaagctctagtccgtggtaggaatgtcaagactttctactaataccattcaaagtcaacttggaagctttgttcaaacaacagtcggggagtggttaagcgggattcatnggaaggngaaattttcttcaaatgcatttgctcc

SEQ ID NO: 396491 - DNA, 437 bp, Oryza sativa
ggtggatgatgctgtcggataaaacaaagagagctctgtatgaccaaaaaaggaaactaatggttctgaaacggaatacatctcaaacaaataaagcaagtgcagctcctggtgcatccaatggcttttataattttgcagccaatgctgcggcttccaaggtgacaagaggaaacaagcaaaaggcaggaccagcaacatcttcagtgcgccacggcccaccccctcccgctgccccctccccgtcaggctcctgcttccacctccagcaaagccacctacatttttggacctcatgcaacaaatgcaagatgaattatggaatacctcgaaagtgtatcttaaaatcacaatcttctctgccctacctgccgtgagccattcctaggcacaagaggtaccaatggccacccaccgagagtgttcatgctgtacat

SEQ ID NO: 396492 - DNA, 801 bp, Oryza sativa
agaacttctggaactcttacatcaagaagaagcttcgccagcgcggcatcgatccggccacccacaagccgctcaagtggtccgattacgtgttcgacggctacaaccaccagctacctccgtacaacccatggcggcatctatggcggcggcgacagcaaggacacggcggtgcacttcgacgcccacgccctcggcaactggtgctagcagctacccctccgtaaaaaaaaaaaacaattctagctacaaacctggacatatgcgtgtctagattcatagctaaagtttgtttttttatgggacagagtagtaccatctagctaagctcgaatccaccccaaattaggcgcaacgagaccgacggcgagcgatgagccatagcaatgatcagccgatcaattagtaggcgccataattgcatgcaagcatgctgctacgtataaatgtacgtatactacgggtccaagttttccaacgtgtatacgcgcgtgtgaattaattaagtcggcgcgtacgtaattaagatcatagctgatgtttggtgagaggtttttgggttgtcaaaagattttttttttttttggtttagtttctttcatttctcttctctcctttgatcgatcgatcgagagatatcgatggatcgggcattagtttgctgcttttgagtgacatgattgtgatgataattaaagtctttaatctcgatcgccggtacacgtacaacatgtaaagttcttcatatgatgatatatataaatatatatatagacattgatgctaaaaaaaaaaaaaaaa

SEQ ID NO: 396493 - DNA, 518 bp, Oryza sativa
  unsure (1)..(518): unsure at all n locations
gcgatttgcgcgagggtggcgcgcggtggccggtgggcgtgccgggccgaggtactagcacagtacagcagtgcactgctgcccgatcgaagcggccgtcgcgcatggggccgtttcattattgcgatgcgggccgggagcacagtggcagtgtggactgttgccgcgcccgcgcgganatcgggtggaggcgcgcgtgatgatggcctacttgggcttgcttgggctctggaatttgcgcggccctaccacgaggagcggtggcattggggttgtacggcgcgtgcttcaaaagggaagcgagaaggggagcacgaggcagttgcttcgctgcacgtgtccaggcaatctgttgatatgttttggttcttcctccttgtccatttggatttggatcttcgaaatcccatttgtatctttgtgagaaatgatagtcgttataggccatttatgttaaatttcagcattattcttaccgggcttcnnnnnnnnnnnnnnnnnnnnnnnnnnnnnnnnnn

SEQ ID NO: 396494 - DNA, 822 bp, Oryza sativa
  unsure (1)..(822): unsure at all n locations
gggacagaggaactaccagaagaatggctagtagattgttcaccacaagagagtgagcctcaatgcccgcctgaagatatgtccgttcatttgagtagtcctgctgtggccatggaagaagccaatctttccgtgcacaaaaattcttcgtctcgggagcagggcaacacagtccagaagaacactgtgcaagctcgaccaacacctctgaaagctggaaaaaatattattagagcaagaaaggtgaaaacatcagtcgtctatcctttcgagcttatcaagccatgcggttttcatggtgatgtcacattgcatgatatcaatcagaggatccacgccccgcccccatacaagataaagcacaagatcgacgaggagcagctctcctatcagacttcagctatttccgggaagcctgtagtccacaagacaaagattcatacagaaggaggaaagggcagtatcacaatcacaagaactagaggttaattaggtcaatggtatgcatatatggtgccaatatggtccttgtaccatgcatttctgatatattgggttgtgtcaatgttttgtggccaaggaaatgcatgcccttgttggaatattgttagccatttttttttcactttatttcttccattgtccccccttcggaacttctttgcctgtacttgcttggttagtgtgagatagtatgataatagagtgttgtaggcaggggtgtggcagtngcaaagtgtgccngctttttttgggtccttggttgaagggggaaagttgatgtaatcagataagtcagtaattgtggacaattggtttggg

SEQ ID NO: 396495 - DNA, 381 bp, Oryza sativa
  unsure (1)..(381): unsure at all n locations
aagagatgcaaaggttttgaagctttaatgccaccctttctgtcccttaaaaagcttacctcgctcgcccattctacttccattctcttcacaccatcacatgtagtgcgtgtactcctagagcttagctagagctagcttcctctcgttgatagcttgatacatctctctcgattcgtagagagtttggttggttgatagctagctcgacggcgcggccatggcggcggcgtctcatgcgccgaggtcggtggtggtgagttcgtcgtcgcctgcgggggcgattgcnacggccggctgcgtggtggacacgaacacgacgttcgtncaggccgacccggcgacgttccgggcgctcgttcagaagctgangggcgcttc

SEQ ID NO: 396496 - DNA, 378 bp, Oryza sativa
  unsure (1)..(378): unsure at all n locations
nnnnnnnnnnnnnnnnnnnncnagaaaatttttagcattggcccatttggagcaacaattagaactttgcacacattacaaataggaccaacataaacattgaacacagataccaacttcattacaaatagccccaacatcaacattaacattgaacacagaaaccaacttcaccgatgatcccaaacttgtgagccagtgttgccatcacctccacnggcagcagctgccatggcccgccgagctcgacatcgacgatgttgccgaagtcctttgctaacaacatcgatcctctgaaacacctgcccgagggtgatggggagagctagcaactgttgtngtggcgataaatgtcgaccatcggactccaggggatcc

SEQ ID NO: 396497 - DNA, 478 bp, Oryza sativa
  unsure (1)..(478): unsure at all n locations
cggacgtgtcnggncaacggccttgttggcgactggccgccgccgcccttcggcgccngggcgncagcggggggtggctaatgagggctccgctgggcggccagcatatgcggggtgcgggggccgcagtccgtagaagcgcgggaaggctgcgactgggtaagccaggcgcgtggagcggtggaggcaagcggcggccggtgggggaggcggctgcgtgcgctcggtgtctgcgtcgcatcgagcattcgagctggtggaaggagcctatcgaggagctgagcaagcgagctgtggttcccgattactgatttcctggtggctgaaaatcagcgacggaaggtatctcaaaagagatttgaatagctattttaacccttgggtgatgtgccaccaaccccaactacttgtggcaatggaattgttgcggtggaagaggctggtgaacaggtagaagaggtggaagtacaattgggtt

SEQ ID NO: 396498 - DNA, 506 bp, Oryza sativa
  unsure (1)..(506): unsure at all n locations
ctccgctcctttgcgccgccgccaacacacagggcagggcgcgccgatctccatctggcgagcagagaaggggaggggaggggaggggatcctgtttgggggttcaactgaaccaccatgtcccaagttggatccgcccctgctttcaggactgggtcacctaagaagcatgaactgaagtccaaacagaagcttgagaagaagctcagcttctacacaaaagtgaaagatgcagtaacctccctaaatgctacaaagactatctgcaagaaatctaaacagaggagccgccagaagaaacttgaaagcatatgatctctcaatgctctctgagttccttcctgaaacagatgcctcaaatcttgcacaccgaggcaaaacttgaacttgcaaatcgaggcaagcctttagtgcaacggggaggcttgcccaacttgaatgctgggcttgaccaatccgcagtttccagntcgacccgtttncggcgatccattaagcacctnttt

SEQ ID NO: 396499 - DNA, 356 bp, Oryza sativa
  unsure (1)..(356): unsure at all n locations
tgcatattgaatcagagatgatagagtggacctgtgagaactgttccaaggttgcccagaaggcaagcactataagtggtaaagacggtgaacagatgatggcaagtaccaatgtgaataggacggtttatggagaccaggctgaacagtcagacaggtaaacatgccaaagggagctatctagcgatttgatcagactttctgtagaatgcagttcttcaagtagccagccacatggttctggtgtacaaaatcatgatatgcctgcagtggacataaaaactttgtggagagacttcaaggcgatgtagctctggttgaaaaagactcgtcctnttgcagcatagccaattaaa

SEQ ID NO: 396500 - DNA, 410 bp, Oryza sativa
  unsure (1)..(410): unsure at all n locations
gagagcagagcatatgcagagcaggggaaggggcgaaggtatctccttccctgcagctgcttccatcaatacaatacaactagtgatttcgttgcagtgatcctttctgtcgatggcgcacagcaggggcagggggcgggtactactacagtggcgatgatgagccggaacccgagctactactactccggcgagggtgagctgagcctggcggtgcagcggcaggactcgctgtacagggacgcgagccgcgccgggcagcatgagcaggcgcatggcgaggggtgggcgcgcacgctgcgtctggccttccagtgcttcggcgtcctctacggcgacatcggcaccttcccactctacgtttacttcaccaactttcgacggnggcaatccgcaacaaccgacgacct

SEQ ID NO: 396501 - DNA, 678 bp, Oryza sativa
  unsure (1)..(678): unsure at all n locations
cggacgggtcatggaaagtcagtggaactactggatgtctccattcaggaggaactctgtcgtgactataatatcaccagtggtttcattgtgagtcaggtgctcgttgattctactgctgaaaagcttggtattagacgaggggacgtgattgattttcaggatattgattgttctactttatcccagttagaagaccacctcctttctcttggttggggatacctgaaagggatgcatttgacagtcgatctgaaggttgaagttcataatctcttcgactcatatagggaaagtattactttccctgtacagttcactgatgcttctaagcaggtaaactagagttgaagaggtgctgcaagggattgaagttgcctagagtaatatgactgaccaaggggagggatgtctacttgtgccttttggataatctggcaacctcattgtgcttttgggacaatttggcacgtcttaccagcgatgcaacctcattcctctaaatggttgtgctgatatagttttggatgagattttgtaaagatagtgttactgcgcctcttacgctcttaacagaaaaccatgcccctccgtatatatagcaaggtcagattagcgccatnnnnnnnnnnnnnnnnnnnnnnnnnnnnnnnnnnnnnnnnnnnnnnnnnnnnnnnn

SEQ ID NO: 396502 - DNA, 330 bp, Oryza sativa
aatctctctccctcctctctctctattgtccatcaatggagatgatgatgccatgatcaaatgatgagagaagaagaggagtagagagggagggggtggggaggagagagagacgaaggaggaggatcgatgtacaagaaccagctgcaggagctggcgcagaggagctgcttcagcctgccgtcgtacgtgtgcacgagggaagggcccgaccacgcgccgcggttcaaggccaccgtcaccttcaatggcgagaccttcgacggggccatccaacttgcaccacgctccggcaggcccgagcacggccgccgccgaggtcggccttgg

SEQ ID NO: 396503 - DNA, 391 bp, Oryza sativa
  unsure (1)..(391): unsure at all n locations
cacgcgcgcgcgcacatcatgcctgtagcctccgtcgtgctcctcctccacctcctctccatggcggcggcggctacggcggcgctggccatggaccccgccgagagggagacgctgctgctcgtcatggaggccgtctcctccgaccgcgagtggcgctccgtcggccctgacccgtgcggctccccgtggcccggcctcgagtgcaagcctgtgccggccgccgggaacgtgtcgtcggcggcggcgaggctgcacgtaacgcggcttggactttcggggtggcgccgaacccgacgtgcaaggacggcgcggcgttnccgaacctcgcgttcggcttgccgaaacttcagtcgctgttcctcgtcgacttctttaaagaacccggcgg

SEQ ID NO: 396504 - DNA, 455 bp, Oryza sativa
  unsure (1)..(455): unsure at all n locations
cggacgggccggggtacgcgtgggtgcagactgtgagagagtagggcatttgtcaggagaataaataaacaaggtgtctatatcttcagctgatttttattaaagtatatatgatggttgtggttttaattacatttattctaccacaataagtccagtgaatcacatattgcttgtttgaggacaactgtttgatcttgcacgaatctaatctgttgaactagctggagattcagttgtatattttggaatcgcatattccttatctacagttctacacatttgcgcttgaggcgtgatagttatattttctaacctgtgggatgactatgtatgtgcctggaagactggaccttattccatcgtaccaaagaccaaggaagcagctgatttatagttttgacaacttcgcagttagcaataagcccccttgggnctaggttgctccgcatttt

SEQ ID NO: 396505 - DNA, 436 bp, Oryza sativa
  unsure (1)..(436): unsure at all n locations
cggacgtgtcngtgngaaatgaagtccaccacccacctactcgccggcggggtcggcggcggctccgtcgcgccaccaacggctgccacggcgccgacgctggccatggaagtaggggatccctctggcgccctcgtcggcggggccggcggcgccggagccggaggaggagacggggatgcccgcgacggctcctccggttggttgctctcggcgaccgcatggccgccgtccggcgccgaatcgtcgcatctatatccggagaatccgggcccctctcttcctccgacatccactccgtctcctccgagatctcctccgntgcccacctcgtcgtcctcaacgccgnctccctcctctcttccaccgtcgctccatcccggttcacctncgctccgctactaacgtccaggagntcccccgtggtggtcttcgt

SEQ ID NO: 396506 - DNA, 830 bp, Oryza sativa
  unsure (1)..(830): unsure at all n locations
cgactccccgcgaccggagaaggagagagagagagagagagagagtgggggcatccagatcggcggcgatggcggcggtggcagcgatggtggtggtggtggcgctgctgctgggcggcggcgcggtggaggcggtgtggctcgacctgccgccgacggggaccaagtgcgtgtccgaggagatccagcccaacgtggtggtgctcgcggactacgccctcatgtacgagtcccaccccaccgcgcaccccactgtggccgtcaaggttacctcaccatatggtaatactgtacatcacaatgagaatgccacaacgggtcagtttgcgtttacaacttcagaagctggaaattaccttgcgtgcttctggctagacagtccggagaaaggatcaggagtatccctaaatcttgattggaagatagggattgcggcaaaggattgggacactgttgctaagaaggaaaaaattgagggtgtagaactagaactcaggaaacttgaagctgcggtggaatccattcatcacaatctattatatctcaaagcaagggaagcggagatgcggacagtgagtgagaaaacaaattctagggtttgcatggtttagcatcctgtcactgggagtctgcatcgtggtgtccgttttgcagttgtggcatcttcaagggttcttccggaagaagaagctcatctaaaccgatccttgtttgatatgtgtctccagtgttacttccttaggaaaaagggagagtttttgtcatgttatttcgaacagctcatgtanggtcaaatacagttggttaaactctatacatgattcaatana

SEQ ID NO: 396507 - DNA, 733 bp, Oryza sativa
  unsure (1)..(733): unsure at all n locations
gatccatccatccccactccctcagaaaccatcgacgttaccccaaaaatcgcctctgctccctccgctcccagaaattgacgncaccaatttcttccccctattcggattccggtcatggagatgctactgccaccaccgatgaactnctcctcccagtcgcggcgaatcaagcgaccccgatgaaaaatcgagctccccggcgacggatcgacctgccacgatggcggattgagcggcctcacctctcctcaccggatccagccagtgtcgtggccatcttcgagctcgagctgcatgcctccgtgcgacagcggcggtggatcggacaagggtgacgcggatctgtcggcntccaccccagatgagcgattttccactctaccggattgagtgtatatttggctttgtcttttatctgactggatttctcttctttttcttcttaattaggattcaattgttcttaccataaagatgtttttaggcccgatttggttaggttttgggggaattttgggttaaactctatcggttttctataggagagacggggatagattcggtcggtttctttaggagggacggacagaggaagtgcggagggcggaggggatcgtgaacaaaggggacgctccaccaaaatgtcttaaaagatccctccattgtaagtcatttttaccatttctagagataaaatattttaataaaaaatgaaaaaaaaaaaaaaaaa

SEQ ID NO: 396508 - DNA, 556 bp, Oryza sativa
  unsure (1)..(556): unsure at all n locations
gtcgcagtcgtctccggcgagaaatcggctgcgccccgtctctctctctctcgaacgcttccatggcgcgcttcctcctcctcctcgtcgccgtcgccgctgccgccgccgtgctttcgcagctgggcgacgcggcgccgtcgacggccgaggtgttctggcgcgccgtgctgccggaatccccgttgccggacgccttcctccgcctcctccgccctgacaccagcttcgtcgtcggcaaagcggaggcggccggtggcgcggcgcggaccggattccccttcgattacactgactacaggggatctgattctccgacgacggcgagtggtttggacctcgccggtgacttcggcgagccggcgcctttcggctacgactacagtggcacagggcgaagggggcggcggcggcgcggncgcagagtgnagagcaggttcttgccgtcgangcgggcttcaactacgacaaatacgtcggcgcgaggaagctccgcgggcggcagcagcancgccggcggagagaatgatgacgaacctttcgggtacgactacaa

SEQ ID NO: 396509 - DNA, 441 bp, Oryza sativa
atttctcttccctcttttgtggcgtaatagaaagaaaatctcccgtctccttgcgccgccaagacgagtcgcggctgaacagggcggcgatctccatcgggcgagcagagcaggggataggatcatgatgtttgacgatcaagacctgggtttctttgccaatttcctgggaatcttcatatttgttttggtcatggcataccactttgtgatggcagacgtgaagtatgaagggaactagtgtggttgaagcgaaggcatgataaggatccatggatccattttggcacattacttgttagattatgctagagattgctaagcatttgttgaaagtttaccatgaaatctggggagtgtcacctgatttgcactgatggatgtggtacttatagcatttcgacttccgtaattgtttaattagctaccaaaaaaaaaaaa

SEQ ID NO: 396510 - DNA, 462 bp, Oryza sativa
  unsure (1)..(462): unsure at all n locations
gcaaaatcccccgtgctagggtttccgcaaccgcctccgctgctacccacccaacctgcattgcgacangacgcggcgggccatggcgacggcggcgaagggcggagagaagccggcgctgaggaagccggtgttcgtcaaggtggaccagctcaagccgggcacctgcggccacaccctcaccgtcaaggtcgtcagcgctaaccccgttcctgcccgtggccgtgccggagggggcggcccggccgtcggatctcgccccgcgcgcatcgccgagtgcctcgtcggcgacgagaccggggtcatcgtcttcaccgcccgcaacgagcaagtggacatgctgatgccaggaaatacagcaatcttgcggaatgcgagaatcgatatgttcaagggccaatgagggttgctgtcgacaagtggggacgtgtggaggtaaaaagctgcagtttcgccgtgaag

SEQ ID NO: 396511 - DNA, 316 bp, Oryza sativa
  unsure (1)..(316): unsure at all n locations
tgtttatncctctccctcaacgttgccggccgatccaccacatcgtcgacggcctatccacaacatcgtcgccggccttctttttccctcgagttgccggccagatccacgatgccatcaccacggaggtcctcctagagggcgaagacgtggaggcggcggtggtattcggaggcgagcagcttgaggcggagagagtggtcggagacggtggaggccgagcgagccacggatggattcgcatcgctcgccatctccttctctccatctcgcctccctcccgtggtagatccggcatcgatgggggcgtcggtgg

SEQ ID NO: 396512 - DNA, 579 bp, Oryza sativa
cccggtgtccagcaagagatccatcaagccgtcgcgatgacgacgaggccttctgttttttccaccgttgtcgcggcgatcgccatcgccgcgcttgctgagcagcctcctcctcctgcaggctaccccggccgcggccagcgcgagggcctcgaagaaggcttcgtgcgacctgatgcagctgagcccgtgcgtcagcgcgtttctccggtgtggggcagggctcgccatcgtccgcgtgctgctccaagctcaaggcgcagggctccagctgcctgtgcctctacaaggacgaccccaaagtgaagcgcattgtcagctccaatcgcaccaagagggtcttcaccgcgtgcaaggtgcccgcgccgaactgctaagcctttgcatttgaccattgttcagtgaggcagaaaacctgtcaccgctcgcagtacttctctcgagaaaattagcagtaataaactcagttgagtgcataacaatcttggcatgtactgtgcatacagtgtacttcaagctacccaaactccgaagcagttctgtcttccatactgacaagtgacaaaaaaaaaaaaaaaa

SEQ ID NO: 396513 - DNA, 510 bp, Oryza sativa
  unsure (1)..(510): unsure at all n locations
cgagaggagacgtggctgcgggggcggcgcctggtgtatggtgtgactcggatacaatggcgacaggacgctctctcctctggcagctgtctccttcggtggccaccttctcccaccggtgagttcctcaccttcccctctcccctcctcttctagggttaggatttctcggacgcgcgcgctgctgctgcggcggtgatggcgcatggcgatggcaggtgtggtgagggacaccggcgcatcacaccctctcgccatggccgttgaagcttcgccgctgctgcaaggagaagcaggaggacacggtttcttgatgtgttcttgatttctgccactgtttcttttatcttttagttcatgttctaggttaatgttgtagaataaacatatcacagctacaccacgtgcacatcatttgtccccctcccccatcttatggtcctacatacacattgactatttctacaatatatttatcgttttattnnnnnnnnnnnnnnnnnnnnnnnn

SEQ ID NO: 396514 - DNA, 797 bp, Oryza sativa
  unsure (1)..(797): unsure at all n locations
cgacactntcaccgtcctccactgcaagcgcgccggcagggaggacaggggaaggaccatgatcctgcagaacaacgggtacgacgcgtcgggctcgttcatggtctactcccagatcgacagcgagctgatgaacaccatggtcctgagccccagcgacctgccgnccgggcggggcgggccgtccctctaccccaccggcttctcccttctccctgacgtcgaggctgcccaggacagcagcggcatcgccttcggcgaggttgggggaactctcatgaccatgggcttccagattccggtgaagctcgccagtggggatcgcatgtattcccggtctgcggcatcggcaatcaggctcatgactgacaccattgccctcgtcaagaagacgctgatgaacgagcattctggtatctacggggttagcccgttccacccctagattcagaaaaacaccagagggagaaaagggaggtccgtgtgcagataaaaatcaagaacatgcgaaggggattcatcggctccgatcaccctgcatctcccagaatttgctgaattaattagaactttaaggttgtgttaacaacctgtaataatgtttttaaggccaaacttatatcgtgtctttgctgtaataatgtagtatgcgcctgatggatgtcgactgccgtgtaccgatgcagtnttnttcgcagagacgcggatacatttgctatcgtatggatgctcctttagaacctatgttgcctcttaatttctatgggtgctattttagaaaaaaaaaaaaaaaaaaa

SEQ ID NO: 396515 - DNA, 622 bp, Oryza sativa
  unsure (1)..(622): unsure at all n locations
gtcatttactgggacggcgcccgggtgctcggcgtcctcgccatgtctcgagccatcggggatgggtaccttaagccgtacgtgacgtcggagccggaggtgaccgtgacggagcgcaccgacgacgatgagtgcctgatcctggccagcgacgggctatgggacgtcgtgaccaacgagatggcgtgtgaggtcgtgagggcgtgcttccacaacaacggtccgccggcaccggccgcgcggccgagcggcgtgccctcctcggccgaggcggcggaaaccgagaacggaggagccgcatcggtgaaggggataagcaaggcggagtcctccgacaaggcgtgntccgacgcggccatgctgctgacgaagttggcctggcncggcggagcgcggacaatgtcagcgtcgtcgtngtagatctccgccggggattgtgattctgtggcgcaatattctatgctccatgattgctttctttcttcttcttttttttattctaagttaatttttcccttcaaatttcttccttatttctctgtttagttttagttttactactagctcctaccnagataaatgaatataatngccttttttttcgcaaaaaanaananaaaaa

SEQ ID NO: 396516 - DNA, 365 bp, Oryza sativa
  unsure (1)..(365): unsure at all n locations
gtcaagtcctcagctctcgtttggcatccaaagaagaattaggtgttattactagggtttagagaggtgttgattactagggtttagagagggaaaggaagggaagggctatggcggcgccgtggtgggactcggagtacaaggaccgctcctcgctggagtaccgcgtgtacgtcggcaacctgccctactccgtcgacgagcaaaccctcatggactacttcgccgactacggcgccatcagtgccgagatcgcttgggacagtgagatggggangccacgcggggttcgggttcgtcaacttcgaggacaacgantcgggtgaacgccgccatccanggcatgaacgggccangacatcggc

SEQ ID NO: 396517 - DNA, 778 bp, Oryza sativa
  unsure (1)..(778): unsure at all n locations
ggaattgtatttgcaagagggcctgctgttgctgtgttgattcttttggagtctaaagggcaaacttacgctgttcttacagaacaggttagagtccctgttgggaaaatttatattggaactacctgctgggatgctagacgatgaaaagggagattttgttggcactgcagtccgtgaggttgaagaagaaactggaattaagctaaatttagaggatatgattgaccttactgcattgctgaaccctgacactggatgcagaatgcttccttcaccgggtggctgcgacgaagagattgggcttgttcctgtacagaggccacgccgaccgaggacacccttagggctctccaagggaaggagactgggctgcgcgaccatggcgagctgatcaagctgcgggtggtgccgtacagccagctgtggcgcgccaccgccgacgccaaggcgctcagcgccatcgccctgtacgagatggccaagagggaaggcctcctgacacnctctccgacgacctctcgccgccgtggcagctcgtcgtcggccaacttgtaagagccagtcagctatagctagctagccgtgtgctttgtcagaacagctaatgagcagagcgagccaattactgtggagtgtgtgccttaatacaacagcaagatcgacctgtgtaaatgactaattgcatgcattttgatgtagaatatgagaaattaataaagcgtatgtaaacaccgtcagtcacgcggcnnnnnnnnnnnnnnnnnnnnnnnnnnnn

SEQ ID NO: 396518 - DNA, 343 bp, Oryza sativa
ccacgcgtccgcacactgcaagtcacgctcaccctgtcacactcactccagtgtagtgtaccgcagcgcgagctttgcagggagcaatggcgatggcggtgcgggtcgcggcggggctcgtcgtcgcgctgctgctcgcgggcgacgcgtcggcggcgaccctggcgctgtacaaccggtgcgcggagacggtgtggccgggcatccagccgagcgccggcaaggagctgctcgcgcgcggcgggttccaagctggcgcccaaccgcgccacctccatccgcctccccgccggctggtccggccgcgtctggggccgccagggctgcagcttctgacgccggg

SEQ ID NO: 396519 - DNA, 322 bp, Oryza sativa
ccgtactgtatagcagagcagcagcctccgggcagacgagagccaaaggctttgctcttggcggctagggttttgtgtgccaaaccctaatccccttccttgcatcaatctcatggcggcgatttcgtcggggatggtggcttgaaaggtctgtgtgttcttgtttgggattgaggaatagagaggagctaagtggtgtggcggcgcggagaaatggggtccaagaaccagttcgatctcctcgtcgacgtcgacaacgatgacccctcccacctcatcgccgccgccgagaagaagctgcggcggcggcgcaccgggtgga

SEQ ID NO: 396520 - DNA, 783 bp, Oryza sativa
  unsure (1)..(783): unsure at all n locations
tactcactcattagcaccccaggtttacactttatgcttccggctcgtatgttgtgtggaattgtgaccggataacaatttcacacaggaaacagctatgaccatgattacgccaagcgcgcaattaaccctcactaaagggaacaaaagctggagctccaccgcgntggcggccgcctcgtggccgcagccttgcgacgctgcttcagggttctgcgggagcaagtgcgcggtncggtgcgggagggggagggggcgggggagcggntgcctgaggtcgtgcgggctgtgctgcgaggagtgcaactgcgtgcccacggggagtgggtcgacgcgcgacgagtgcccctgctacccgcgacatgctcaccgccggccccaggaagaggcccaagtgcccctgaatcctccccatccatctccatctcatcgattaccatcaacttcatctcattttcttgtacttgaaattagctactagtacgtggttgtgtatacgtcgcaggtgtgtatgtatgtatgtatatatatgcgtatgttgtcatgctgcgtagttatagttagtagtcctacctactccagtacgtacgtgttgatgcctgttaatatggctgtatggctagctaagctgtgtgcctgtgtcgatttgtaaagttgtactagtaggtagttgtactacttgcagcgcacgtactgtttgtttgtctgttgttaaatttcgtgttaactatgaacaggggatatgccgtatgcgctttacctgaggaaaaaaaaaaaaaaaaa

SEQ ID NO: 396521 - DNA, 433 bp, Oryza sativa
  unsure (1)..(433): unsure at all n locations
aagtgtcgccggagcggctggtgttctcgagcaggtggacgacggcggcgtaccaggtgagcttcgagaatcgccagcgtgcggcgccggcgccggcgccgcggcgagcaaggggtacgtgcacggcgccgtcacctggtccgacggcgcgcactccgtccggacgccgttcgcggttaatgtcatctgattggtgtctctctctctctctctctctatctctctatctctctctttttttttttcatttttcattttatttttgattgctgaattccattttttttcttgccttttgtgagtgtatggttttagggtcagtcttggatctcgaagtatggtgttgagtgtccttcctttttttggaaaagcaaggaataattcagattttgagtgtnnnnnnnnnnnnnnnnnnnnnnnnnnnnnnnnnnnn

SEQ ID NO: 396522 - DNA, 740 bp, Oryza sativa
  unsure (1)..(740): unsure at all n locations
ngttttcccagtcacgacgttttaaaacgacggcccgtgagcacgcttaatacgactccactatagggcgaattgggtaccgggccccccctcgaggtccaccggtggcagtagcaaagtagcagcctcatcactcatcagtgagcgcagttcgagtcgccggtacagatggctccgtctcgtcgcatggtcgcgtccgccttcctcctcctggccatcctcgtcgccacagagatggggacgaccaaggtggcggaggcgaggcactgcctgtcgcagagccacaggttcaagggcatgtgcgtgagcagcaacaactgcgccaacgtgtgcaggacggagagcttccccgacggcgagtgcaagtcgcacggcctcgagcgcaagtgcttctgcaagaaggtctgctagtgcatgctagccccgctgtctctgcagtcgcattgctcgtcggctgtgtatctgcagagattgtagtcgcgtgttctcctttgtctgttgttcatgacgagcttctgttcttggcttacaggctagttgagttgctttcgattatccttgcttagaataagtaataagtacgcgctggatacatgctccagcttagttagttgttgggtatttgcaagctgctgtcatgtaaggttccacatttcagcattaatgaattggcatacgtgatgaaaaaaagtgattaaaaannnnnnnnnnnnnnnnnnnnnnnnnnnnnnnnnnnnnnn

SEQ ID NO: 396523 - DNA, 251 bp, Oryza sativa
  unsure (1)..(251): unsure at all n locations
catttctctcgctctctcctcgtctttctccgtctctctctatcgccggccatatccaccactgctccaggctctttcccttacctgctgcagttcggtgatgagcgtattggggcagcgcgcccctctgctgctccgctggccccttggagctcgagtccgcaccgatcccttcgtctctccgcccccctcgcgcggatncgccgtcgggccctggattccaccgtctcttccacccttctctngcgcan

SEQ ID NO: 396524 - DNA, 440 bp, Oryza sativa
  unsure (1)..(440): unsure at all n locations
gacggtcnatgacgcttcgccgcagcgcttctcaccatgtccgagaacgcgccgctcaccggcgcacagggggaggtcagaaaagactgcaggtccgtcaactctagctaagctcgactagctagtagtacacatatacatacatatatgatcgatgtaaaaataattgaggtacgttctatgagatcgatcggtctgtgaactaatcgatcggcggcctctatctgttggcatcgactcctccattggatctttgtatttttctcaacttgtatgtacgtacgtatgtatgtggggttccgtcgagtcgtgtgtgtccgtgaccgtaactggactcaattattatggagtaacataatatatattgtatgcgtggcgttccatcgttnnnnnnnnnnnnnnnnnnnnnnnnnnnnnnnnnnnnnnnnnnnnnnnnnnnn

SEQ ID NO: 396525 - DNA, 493 bp, Oryza sativa
  unsure (1)..(493): unsure at all n locations
acggactggtcgcacgcgccgttcttggccacttcccgcgacttccgccttncgaagggttgcgcgtgggcggcgaacgccacggactccggacgccggcgagntggcgcgntgccacggggagctcgtggggcaaggaggggaggtactggtggaaggagaaggacatggaggagctcaccgtgcaccagaaccaccagctcgtgtgggcgcgcgcgcaccacctcgtctacgactactgcgtcgacaccgaccgcttccccgtccagccgccggagtgcgccggacggtgaccgtcgatctcgtcgccggttaggatggatcgatggatggaactgctggtttctttcttggttagcaaatcaaatggcaggtagtttatctcagatgaacttaggtgatggtagttcatcgtaattctgtgtctctgtgggggtgtatctgtaaaaaattgttactcggcttccactgcnnnnnnnnnnnnnnnnnnnnn

SEQ ID NO: 396526 - DNA, 341 bp, Oryza sativa
  unsure (1)..(341): unsure at all n locations
acgaggtgtgacagccatgacgagatcatgcttcctgatagtgctcctgctcgccgttgccatgggtggtagcaagctctcgctcgccgccggnaatgcggcgttggcggcatcccgaccaccctcggccgcgagctcagggagctcatctccaaggccagcgacttcctcggcgcngcgccgcgggngcccggagcggacgggtggcacgccgccgcggccaccggcgacggcgccgacgcgatcagggcgtccctgaggagcacggcgagggggaggccggcgaggaagtccgccgcgaactgcatccccgccgacatgtgccggaagaagaaggtgct

SEQ ID NO: 396527 - DNA, 454 bp, Oryza sativa
atgcgatataatcatacagagatcagctatagcgatggcatacattgtacatacaccagcagaggtcgagatcgagtaggttttagttgagatcgattgaggctgagcatcgtctatggcgccgccggcggcgagacacggactgggggccgatcatcgtggcggtgatcctgttcgtggtgctgtcgccggggctgctgttccagctgccggcgagggcgagggtggtggagttcggcaacatggcaaccagcgccatcgccatcctcgtccacgccgtcatcttcttctgcctcctcaccatcttcgtcggtcgccatcgggtccaacggttttacgcccgcctaaattacttaatttacttgaaacttcttacttctttcccgttctggcctgcttgtttggcaattcttgcgagtagcattaagcaggaacaggatgtgcatgcgtatat

SEQ ID NO: 396528 - DNA, 498 bp, Oryza sativa
  unsure (1)..(498): unsure at all n locations
nnnnnnttttttttttcagcaaaacaatcaatcaaacagtaatcgataattgtacctagcaagcaaaacacggattaatttcctcaccatcttcggtgtaaagactcaaccattacaatattacatcgactcttttaattaagtcttgataattaactagcagtacagtatatgttacaaccatagcaacgacgacgcatcgagattaactgagctaattaacccatgacgaagatgaactcgaccaagattccaagaacaaaagcttaattagttataggaggagtagatgtttaattggcgggggcgacgcggttgacgagggcgagggcgttgctggtgacctgggcgacctcgacgatcttaccgcggatggcggaccgggtggcggcgtcgacgccgcgggagaggccgtcgaggcaggtgttctcgtcggtgagggcggcgctgcaccaggtctggacgttgctcaggtgccacttgaaccccggcgagccg

SEQ ID NO: 396529 - DNA, 533 bp, Oryza sativa
  unsure (1)..(533): unsure at all n locations
gaattccttagagtggagaagtacctgagtgtgaagaggatggagctgcagccggagctctcactagggccgacgtggccggcgccaggcttcgtctcctccaccaccaagagcaccaagagctcatcgtcggagtcagacggcagctccaggaagaagaggaagcacttcacctgggaggagcccgtgtcgcacgccaacctggagctccagctcaatgaccccctgcccctcgactgggagcagtgccttgacctgcaatctggaaggatgtattacctgaacaggaagaccttgaagaaaagctggatcaggcccaaggagcagagctgtggaacctggagctcaacatctcgacttacccagccaaccgtcgtcgtcggtccccaccattatcgattggaggaagcaccggagctgctgctacttccagttgctgttgctgttgttgcagaggagacaaagaagggtggcaccatcgtcanctctggacctngaggcaacatngtggccgtgccttgtgtcaattgcca

SEQ ID NO: 396530 - DNA, 427 bp, Oryza sativa
  unsure (1)..(427): unsure at all n locations
agaggggagaggagagggagcggcgaatcgaagcgaaaacgcagcagcagcagcaactcgcgctgttcatttattcgcaccaaaccgaaaggcgagacgaggcgaggcgaggcgcggtggcagaggcagccaaaccaactgacggacgcgagcgaacgangaagttcttgaagttgaagcagccgcctcgctcgcctcgcggccctcgcttgcctaatcaggaggggggctatctctttctctctcttttttcctttcctttcctgcgtccttgggatccgcccgtgcgatctcgccgtgggttgagcgccgccgtccatccgttcccatggatccccgcagtcgcgcggatcgcgccgaagtagggaaggaagaagggaagggaagggggaagcgggttcccggagagaggcgtcttcttgagcaa

SEQ ID NO: 396531 - DNA, 708 bp, Oryza sativa
  unsure (1)..(708): unsure at all n locations
cgcgtggggcgcgaggcagacggcagcggcgaagaccgccgggtgcggagtcgccgcgtcgcctgtcgacatgaaccctgcggcgtggcctcccttgcagaagcagcagcacgcgccggcacccggagtcgggggtggcggcggcggcggcatgcgcgccgtgttcctcaccccgcccggcgccaagcgcgagcgcaacggcaccggcgtcttcctccctcgcccggccggcgcaccggcggagcccaagagaaagacaggctgctcgactgttcttgtccccgcccgtgtcgtgcaagcgctcaatctcaacctcgacgacctcggcgcccagcctcgctaccccggcggtttcgttctcgatcacgacgctttgattaaccggagcaacgccatgctggccagccagaagcggcgcgcgtctccagccgtgccgtcgccggcgccggcgcctgcgctctgccacagttcgtgaacttttttgtgtcggccggagcagacgaaggatgatgcaccaagattccggcggcccccttcttggcttttgcgtcaaagtttaatcatattaattaaagttaagtaacagtactttcgtcctgttaaggtggtagtatttaagccaaaagagggtagttaggaaggcagtagttatcatcaagcgttaggtttgtttggtttgattggtgatatattgggttttttngtggt

SEQ ID NO: 396532 - DNA, 547 bp, Oryza sativa
gcctcactctcacaactcatactcctccttctgaacctatcttgtttgtcctctggaagttgagtagaggaagagaggaacagacaacagaaacaagcaagcatcttggtggttgttttggatacatatacaagggtgcaagtgcaagaattggtgatctgaatcctgaatcaaagttgagggaatcactaggatcaatcaatcaattccaagaggcttagctgaagcagatgatgaggatggacaagcttgtgaggcaatgtgacatggaggtgatgaagatggccatgctcaagcatgaggagaccttcaggcagcagggttcatgagctgcatcgcctgtaccgaattcagaggcagctgatgagcgacctgaccatggccgagctgagctccggccaccgccgccggcagcctcgccggagcagcaagcaacctcgccgcgcgctgaacctgcagctccccgccgacgagtacatcgtcagcgccgacgccgccgacgacaacgacgacacggccgagctggacctcactctcgccgtcggcg

SEQ ID NO: 396533 - DNA, 330 bp, Oryza sativa
  unsure (1)..(330): unsure at all n locations
cagaacacaacacaacccaagcagagcattagttgatcgagcactcgagcagctagcttagcttagcaatggcggggagcagcagcgtcggcgccgtccaccgcgcgggcctcgccgtggggctcctcctgctcgccgccgggcccgccgcgtgccacggcgcgaggnccgtccccggcgagccggagccggcgacataccggccgcagaacgtgtacggattcngcggcttctaccctggccccaacaatcaactgggtgttccccggccccaacggcgtcacgcgcatgtcggctttcggcgggatgccggggttcctcctcctccgt

SEQ ID NO: 396534 - DNA, 429 bp, Oryza sativa
  unsure (1)..(429): unsure at all n locations
ctccacttcactgtgctgctgtgcgtggaggaggaggaggagatggcggactgggcgccggtggtggtgggggtggtgctgtncgtgctgctctcgccggggctgctggtggagctccccggcacgcaccgccacgtcgacttcggcagcttccgcaccaacggcaaggccatcttcgtccacaccctcatcttcttcgccgccttcgccatcctcaccctcgccctccacctccacatctacaccggctagtcacctactactcttctccaatttccatccatctctctcaattccctccccccttcaatttcacttcgtctctctcctacccctttgcatactaattacttagtaatttctagctagctgctctgtaaaagggaatatttactgcaatgtctatgctagccgcactgagtccnggaa

SEQ ID NO: 396535 - DNA, 422 bp, Oryza sativa
  unsure (1)..(422): unsure at all n locations
gcggcctcctcgacnacctcgtcctcctccgcctccaaaccctagatcgccccccaccnaccnacctacctaccgcacggagacncctcccatggcggacgcggcgcacnacntccgccgccgcagcagcgccgcgctcccccgcggctggtgctgctccttctccgccacnncgcagagccccgacaacaacagcccccgctcccccccgcctcaaggggaggagagggcgtcggcggcggcggcgcgcgcggtaagctcccgcccaagtcgccctcggtctcgctgccgtccttccagagctccccgtcgtctaggctcgcgggcttcatcganccccgccgcattctctccccggccgcgtctccccatagaccccgacggctcgcggcggtggcggctggggcaattcggagnagatn

SEQ ID NO: 396536 - DNA, 376 bp, Oryza sativa
  unsure (1)..(376): unsure at all n locations
tagtttctangagtactgcagtgtggaggcgtgtccccgcaccgctctcctccccctcncccctctcgcctcgccgacctctccacctccccggcgactcggactcgtcgaagccgcgctcgcctacgaccacccatggcgctcctcccccgcgcggcgcggctggcggccctctccgcgccgcgcgcctactcgtccgcnacggcggcggcggcgggcgcgggtggctccgcgtcgcccgcgccatacggcggggcgccgccgccggccgcgaactccaaggcggcggagttcgtgatctccaaggtggacgacctgatgaactgggcgcnccggggctcgatctggcccatgacgttcggggctcgcttgctgc

SEQ ID NO: 396537 - DNA, 466 bp, Oryza sativa
  unsure (1)..(466): unsure at all n locations
aaaccaaacccaacccctcctccgccgcggcccgaaaccccaccggatcggcggcggcggcggcggcaggaggccggcgggcggaggagatgtcgctgacggaggtcaggatcggggaggaggtgtggctcacctgcctctcccacgccctcaccaccgagacggaggaggtcatgggcctcctcttcggcgacatcaagcattcgagcaggggcggggtgactgctctgatatggggggcgtcgccgcagatgaggtgcgagcggaagaaggacagggtggaggtcaaccccgagctgctcgcggcggcgacggcgcaggccgaagagcttgtcggccaccatcggcgagaaaacgagggtgattggatggtaccactcgcacccgcatatcaccgttctgccttcccatgtagatgtttcggacccaggcaatgttttcagttgaatggagccaggttttgtng
